United States Patent Application Publication US 2024/0327476 A1 - sequence listing, part 6

SEQ ID NO: 5635 - DNA, 852 bp, Homo sapiens
  source 1..852: mol_type = unassigned DNA
ctcgccctcaaatgggaacgctggcctgggactaaagcatagaccaccaggctgagtatcctgacctgagtcatccccagggatcaggagcctccagcagggaaccttccattatattcttcaagcaacttacagctgcaccgacagttgcgatgaaagttctaatctcttccctcctcctgttgctgccactaatgctgatgtccatggtctctagcagcctgaatccaggggtcgccagaggccacagggaccgaggccaggcttctaggagatggctccaggaaggcggccaagaatgtgagtgcaaagattggttcctgagagccccgagaagaaaattcatgacagtgtctgggctgccaaagaagcagtgcccctgtgatcatttcaagggcaatgtgaagaaaacaagacaccaaaggcaccacagaaagccaaacaagcattccagagcctgccagcaatttctcaaacaatgtcagctaagaagctttgctctgcctttgtaggagctctgagcgcccactcttccaattaaacattctcagccaagaagacagtgagcacacctaccagacactcttcttctcccacctcactctcccactgtacccacccctaaatcattccagtgctctcaaaaagcatgtttttcaagatcattttgtttgttgctctctctagtgtcttcttctctcgtcagtcttagcctgtgccctccccttacccaggcttaggcttaattacctgaaagattccaggaaactgtagcttcctagctagtgtcatttaaccttaaatgcaatcaggaaagtagcaaacagaagtcaataaatatttttaaatgtc

SEQ ID NO: 5636 - DNA, 1172 bp, Homo sapiens
  source 1..1172: mol_type = unassigned DNA
gattcccataaagcacatggtctaatctgttacgtaacagcaagacagcgtcacctcacctgttctcgccctcaaatgggaacgctggcctgggactaaagcatagaccaccaggctgagtatcctgacctgagtcatccccagggatcaggagcctccagcagggaaccttccattatattcttcaagcaacttacagctgcaccgacagttgcgatgaaagttctaatctcttccctcctcctgttgctgccactaatgctgatgtccatggtctctagcagcctgaatccaggggtcgccagaggccacagggaccgaggccaggcttctaggagatggctccaggaaggcggccaagaatgtgagtgcaaagattggttcctgagagccccgagaagaaaattcatgacagtgtctgggctgccaaagaagcagtgcccctgtgatcatttcaagggcaatgtgaagaaaacaagacaccaaaggcaccacagaaagccaaacaagcattccagagcctgccagcaatttctcaaacaatgtcagctaagaagctttgctctgcctttgtaggagctctgagcgcccactcttccaattaaacattctcagccaagaagacagtgagcacacctaccagacactcttcttctcccacctcactctcccactgtacccacccctaaatcattccagtgctctcaaaaagcatgtttttcaagatcattttgtttgttgctctctctagtgtcttcttctctcgtcagtcttagcctgtgccctccccttacccaggcttaggcttaattacctgaaagattccaggaaactgtagcttcctagctagtgtcatttaaccttaaatgcaatcaggaaagtagcaaacagaagtcaataaatatttttaaatgtcacagatcaaaattgtttccttcaaatggggtctgccaattcacaaccagatgacccattttaccctattcactgcagactgaatccagattctacacatacttatccccaccaagaccctcactctgtctccattggcctacttgttcatctttcactcattcgacaaatctttctgaggtaagagcgaggtgggacaaaaaaaaaaaagcataccaatgaaccagacacggtcttattaaagataatataggttt

SEQ ID NO: 5637 - DNA, 1177 bp, Homo sapiens
  source 1..1177: mol_type = unassigned DNA
cgggatcgatctggagctccgggaatttccctggcccgggactccgggctttccagccccaaccatgcataaaaggggttcgccgttctcggagagccacagagcccgggccacaggcagctccttgccagctctcctcctcgcacagccgctcgaaccgcctgctgagccccatggcccgcgccacgctctccgccgcccccagcaatccccggctcctgcgggtggcgctgctgctcctgctcctggtggccgccagccggcgcgcagcaggagcgcccctggccactgaactgcgctgccagtgcttgcagaccctgcagggaattcacctcaagaacatccaaagtgtgaaggtgaagtcccccggaccccactgcgcccaaaccgaagtcatagccacactcaagaatgggcagaaagcttgtctcaaccccgcatcgcccatggttaagaaaatcatcgaaaagatgctgaaaaatggcaaatccaactgaccagaaggaaggaggaagcttattggtggctgttcctgaaggaggccctgcccttacaggaacagaagaggaaagagagacacagctgcagaggccacctggattgcgcctaatgtgtttgagcatcacttaggagaagtcttctatttatttatttatttatttatttgtttgttttagaagattctatgttaatattttatgtgtaaaataaggttatgattgaatctacttgcacactctcccattatatttattgtttattttaggtcaaacccaagttagttcaatcctgattcatatttaatttgaagatagaaggtttgcagatattctctagtcatttgttaatatttcttcgtgatgacatatcacatgtcagccactgtgatagaggctgaggaatccaagaaaatggccagtgagatcaatgtgacggcagggaaatgtatgtgtgtctattttgtaactgtaaagatgaatgtcagttgttatttattgaaatgatttcacagtgtgtggtcaacatttctcatgttgaagctttaagaactaaaatgttctaaatatcccttggacattttatgtctttcttgtaaggcatactgccttgtttaatgttaattatgcagtgtttccctctgtgttagagcagagaggtttcgatatttattgatgtt

SEQ ID NO: 5638 - DNA, 1075 bp, Homo sapiens
  source 1..1075: mol_type = unassigned DNA
acacagcccgggtcgcaggcacctccccgccagctctcccgcttctcgcacagcttcccgacgcgtctgctgagccccatggcccacgccacgctctccgccgcccccagcaatccccggctcctgcgggtggcgctgctgctcctgctcctggtggccgccagccggcgcgcagcaggagcgtccgtggtcactgaactgcgctgccagtgcttgcagacactgcagggaattcacctcaagaacatccaaagtgtgaatgtaaggtcccccggaccccactgcgcccaaaccgaagtcatagccacactcaagaatgggaagaaagcttgtctcaaccccgcatcccccatggttcagaaaatcatcgaaaagatactgaacaaggggagcaccaactgacaggagagaagtaagaagcttatcagcgtatcattgacacttcctgcagggtggtccctgcccttaccagagctgaaaatgaaaaagagaacagcagctttctagggacagctggaaaggacttaatgtgtttgactatttcttacgagggttctacttatttatgtatttatttttgaaagcttgtattttaatattttacatgctgttatttaaagatgtgagtgtgtttcatcaaacatagctcagtcctgattatttaattggaatatgatgggttttaaatgtgtcattaaactaatatttagtgggagaccataatgtgtcagccaccttgataaatgacagggtggggaactggagggtggggggattgaaatgcaagcaattagtggatcactgttagggtaagggaatgtatgtacacatctattttttatactttttttttaaaaaaagaatgtcagttgttatttattcaaattatctcacattatgtgttcaacatttttatgctgaagtttcccttagacattttatgtcttgcttgtagggcataatgccttgtttaatgtccattctgcagcgtttctctttcccttggaaaagagaatttatcattactgttacatttgtacaaatgacatgataataaaagttttatgaaaaaaaa

SEQ ID NO: 5639 - DNA, 2538 bp, Homo sapiens
  source 1..2538: mol_type = unassigned DNA
ccatgagttcagggaatttccccagcatcccaaagcttgagtttcctgtcagtggggagagatgagtgtagataaaaggagtgcagaaggcacgaggaagccacagtgctccggatcctccaatcttcgctcctccaatctccgctcctccacccagttcaggaacccgcgaccgctcgcagcgctctcttgaccactatgagcctcctgtccagccgcgcggcccgtgtccccggtccttcgagctccttgtgcgcgctgttggtgctgctgctgctgctgacgcagccagggcccatcgccagcgctggtcctgccgctgctgtgttgagagagctgcgttgcgtttgtttacagaccacgcaaggagttcatcccaaaatgatcagtaatctgcaagtgttcgccataggcccacagtgctccaaggtggaagtggtagcctccctgaagaacgggaaggaaatttgtcttgatccagaagccccttttctaaagaaagtcatccagaaaattttggacggtggaaacaaggaaaactgattaagagaaatgagcacgcatggaaaagtttcccagtcttcagcagagaagttttctggaggtctctgaacccagggaagacaagaaggaaagattttgttgttgtttgtttatttgtttttccagtagttagctttcttcctggattcctcactttgaagagtgtgaggaaaacctatgtttgccgcttaagctttcagctcagctaatgaagtgtttagcatagtacctctgctatttgctgttattttatctgctatgctattgaagttttggcaattgactatagtgtgagccaggaatcactggctgttaatctttcaaagtgtcttgaattgtaggtgactattatatttccaagaaatattccttaagatattaactgagaaggctgtggatttaatgtggaaatgatgtttcataagaattctgttgatggaaatacactgttatcttcacttttataagaaataggaaatattttaatgtttcttggggaatatgttagagaatttccttactcttgattgtgggatactatttaattatttcactttagaaagctgagtgtttcacaccttatctatgtagaatatatttccttattcagaatttctaaaagtttaagttctatgagggctaatatcttatcttcctataattttagacattctttatctttttagtatggcaaactgccatcatttacttttaaactttgattttatatgctatttattaagtattttattaggagtaccataattctggtagctaaatatatattttagatagatgaagaagctagaaaacaggcaaattcctgactgctagtttatatagaaatgtattcttttagtttttaaagtaaaggcaaacttaacaatgacttgtactctgaaagttttggaaacgtattcaaacaatttgaatataaatttatcatttagttataaaaatatatagcgacatcctcgaggccctagcatttctccttggataggggaccagagagagcttggaatgttaaaaacaaaacaaaacaaaaaaaaacaaggagaagttgtccaagggatgtcaattttttatccctctgtatgggttagattttccaaaatcataatttgaagaaggccagcatttatggtagaatatataattatatataaggtggccacgctggggcaagttccctccccactcacagctttggcccctttcacagagtagaacctgggttagaggattgcagaagacgagcgggagcggggagggcagggaagatgcctgtcgggtttttagcacagttcatttcactgggattttgaagcatttctgtctgaatgtaaagcctgttctagtcctggtgggacacactggggttgggggtgggggaagatgcggtaatgaaaccggttagtcagtgttgtcttaatatccttgataatgctgtaaagtttatttttacaaatatttctgtttaagctatttcacctttgtttggaaatccttcccttttaaagagaaaatgtgacacttgtgaaaaggcttgtaggaaagctcctccctttttttctttaaacctttaaatgacaaacctaggtaattaatggttgtgaatttctatttttgctttgtttttaatgaacatttgtctttcagaataggattctgtgataatatttaaatggcaaaaacaaaacataattttgtgcaattaacaaagctactgcaagaaaaataaaacatttcttggtaaaaacgtatgtatttatatattatatatttatatataatatatattatatatttagcattgctgagctttttagatgcctattgtgtatcttttaaaggttttgaccattttgttatgagtaattacatatatattacattcactatattaaaattgtacttttttactatgtgtctcattggttcatagtctttattttgtcctttgaataaacattaaaagatttctaaacttca

SEQ ID NO: 5640 - DNA, 2488 bp, Homo sapiens
  source 1..2488: mol_type = unassigned DNA
tttattcatcaagtgccctctagctgttaagtcactctgatctctgactgcagctcctactgttggacacacctggccggtgcttcagttagatcaaaccattgctgaaactgaagaggacatgtcaaatattacagatccacagatgtgggattttgatgatctaaatttcactggcatgccacctgcagatgaagattacagcccctgtatgctagaaactgagacactcaacaagtatgttgtgatcatcgcctatgccctagtgttcctgctgagcctgctgggaaactccctggtgatgctggtcatcttatacagcagggtcggccgctccgtcactgatgtctacctgctgaacctggccttggccgacctactctttgccctgaccttgcccatctgggccgcctccaaggtgaatggctggatttttggcacattcctgtgcaaggtggtctcactcctgaaggaagtcaacttctacagtggcatcctgctgttggcctgcatcagtgtggaccgttacctggccattgtccatgccacacgcacactgacccagaagcgtcacttggtcaagtttgtttgtcttggctgctggggactgtctatgaatctgtccctgcccttcttccttttccgccaggcttaccatccaaacaattccagtccagtttgctatgaggtcctgggaaatgacacagcaaaatggcggatggtgttgcggatcctgcctcacacctttggcttcatcgtgccgctgtttgtcatgctgttctgctatggattcaccctgcgtacactgtttaaggcccacatggggcagaagcaccgagccatgagggtcatctttgctgtcgtcctcatcttcctgctttgctggctgccctacaacctggtcctgctggcagacaccctcatgaggacccaggtgatccaggagagctgtgagcgccgcaacaacatcggccgggccctggatgccactgagattctgggatttctccatagctgcctcaaccccatcatctacgccttcatcggccaaaattttcgccatggattcctcaagatcctggctatgcatggcctggtcagcaaggagttcttggcacgtcatcgtgttacctcctacacttcttcgtctgtcaatgtctcttccaacctctgaaaaccatcgatgaaggaatatctcttctcagaaggaaagaataaccaacaccctgaggttgtgtgtggaaggtgatctggctctggacaggcactatctgggttttggggggacgctataggatgtggggaagttaggaactggtgtcttcaggggccacaccaaccttctgaggagctgttgaggtacctccaaggaccggcctttgcacctccatggaaacgaagcaccatcattcccgttgaacgtcacatctttaacccactaactggctaattagcatggccacatctgagccccgaatctgacattagatgagagaacagggctgaagctgtgtcctcatgagggctggatgctctcgttgaccctcacaggagcatctcctcaactctgagtgttaagcgttgagccaccaagctggtggctctgtgtgctctgatccgagctcaggggggtggttttcccatctcaggtgtgttgcagtgtctgctggagacattgaggcaggcactgccaaaacatcaacctgccagctggccttgtgaggagctggaaacacatgttccccttgggggtggtggatgaacaaagagaaagagggtttggaagccagatctatgccacaagaaccccctttacccccatgaccaacatcgcagacacatgtgctggccacctgctgagccccaagtggaacgagacaagcagcccttagcccttcccctctgcagcttccaggctggcgtgcagcatcagcatccctagaaagccatgtgcagccaccagtccattgggcaggcagatgttcctaataaagcttctgttccgtgcttgtccctgtggaagtatcttggttgtgacagagtcaagggtgtgtgcagcattgttggctgttcctgcagtagaatgggggcagcacctcctaagaaggcacctctctgggttgaagggcagtgttccctggggctttaactcctgctagaacagtctcttgaggcacagaaactcctgttcatgcccatacccctggccaaggaagatccctttgtccacaagtaaaaggaaatgctcctccagggagtctcagcttcaccctgaggtgagcatcatcttctgggttaggccttgcctaggcatagccctgcctcaagctatgtgagctcaccagtccctccccaaatgctttccatgagttgcagttttttcctagtctgttttccctccttggagacagggccctgtcggtttattcactgtatgtccttggtgcctggagcctactaaatgctcaataaataatgatcacaggaa

SEQ ID NO: 5641 - DNA, 1402 bp, Homo sapiens
  source 1..1402: mol_type = unassigned DNA
atttccgtttattcatcaagtgccctctagctgttaagtcactctgatctctgactgcagctcctactgttggacacacctggccggtgcttcagttagatcaaaccattgctgaaactgaagaggacatgtcaaatattacagatccacagatgtgggattttgatgatctaaatttcactggcatgccacctgcagatgaagattacagcccctgtatgctagaaactgagacactcaacaagtatgttgtgatcatcgcctatgccctagtgttcctgctgagcctgctgggaaactccctggtgatgctggtcatcttatacagcagggtcggccgctccgtcactgatgtctacctgctgaacctggccattgtccatgccacacgcacactgacccagaagcgtcacttggtcaagtttgtttgtcttggctgctggggactgtctatgaatctgtccctgcccttcttccttttccgccaggcttaccatccaaacaattccagtccagtttgctatgaggtcctgggaaatgacacagcaaaatggcggatggtgttgcggatcctgcctcacacctttggcttcatcgtgccgctgtttgtcatgctgttctgctatggattcaccctgcgtacactgtttaaggcccacatggggcagaagcaccgagccatgagggtcatctttgctgtcgtcctcatcttcctgctttgctggctgccctacaacctggtcctgctggcagacaccctcatgaggacccaggtgatccaggagagctgtgagcgccgcaacaacatcggccgggccctggatgccactgagattctgggatttctccatagctgcctcaaccccatcatctacgccttcatcggccaaaattttcgccatggattcctcaagatcctggctatgcatggcctggtcagcaaggagttcttggcacgtcatcgtgttacctcctacacttcttcgtctgtcaatgtctcttccaacctctgaaaaccatcgatgaaggaatatctcttctcagaaggaaagaataaccaacaccctgaggttgtgtgtggaaggtgatctggctctggacaggcactatctgggttttggggggacgctataggatgtggggaagttaggaactggtgtcttcaggggccacaccaaccttctgaggagctgttgaggtacctccaaggaccggcctttgcacctccatggaaacgaagcaccatcattcccgttgaacgtcacatctttaacccactaactggctaattagcatggccacatctgagccccgaatctgacattagatgagagaacagggctgaagctgtgtcctcatgagggctggatgctctcgttgaccctcacaggagcatctcctc

SEQ ID NO: 5642 - DNA, 869 bp, Homo sapiens
  source 1..869: mol_type = unassigned DNA
ccaaccacaagcaccaaagcagaggggcaggcagcacaccacccagcagccagagcaccagcccagccatggtccttgaggtgagtgaccaccaagtgctaaatgacgccgaggttgccgccctcctggagaacttcagctcttcctatgactatggagaaaacgagagtgactcgtgctgtacctccccgccctgcccacaggacttcagcctgaacttcgaccgggccttcctgccagccctctacagcctcctctttctgctggggctgctgggcaacggcgcggtggcagccgtgctgctgagccggcggacagccctgagcagcaccgacaccttcctgctccacctagctgtagcagacacgctgctggtgctgacactgccgctctgggcagtggacgctgccgtccagtgggtctttggctctggcctctgcaaagtggcaggtgccctcttcaacatcaacttctacgcaggagccctcctgctggcctgcatcagctttgaccgctacctgaacatagttcatgccacccagctctaccgccgggggcccccggcccgcgtgaccctcacctgcctggctgtctgggggctctgcctgcttttcgccctcccagacttcatcttcctgtcggcccaccacgacgagcgcctcaacgccacccactgccaatacaacttcccacaggggtcaagttccgggagcggatgtggatgctgctcttgcgcctgggctgccccaaccagagagggctccagaggcagccatcgtcttcccgccgggattcatcctggtctgagacctcagaggcctcctactcgggcttgtgaggccggaatccgggctcccctttcgcccaca

SEQ ID NO: 5643 - DNA, 1861 bp, Homo sapiens
  source 1..1861: mol_type = unassigned DNA
caagcaccaaagcagaggggcaggcagcacaccacccagcagccagagcaccagcccagccatggtccttgaggggtccctgggccgatgggatcacgcagaagaatgcgagagaagcagcctttgagaagggaagtcactatcccagagcccaggctgagcggatggagttgaggaagtacggccctggaagactggcggggacagttataggaggagctgctcagagtaaatcacagactaaatcagactcaatcacaaaagagttcctgccaggcctttacacagccccttcctccccgttcccgccctcacaggtgagtgaccaccaagtgctaaatgacgccgaggttgccgccctcctggagaacttcagctcttcctatgactatggagaaaacgagagtgactcgtgctgtacctccccgccctgcccacaggacttcagcctgaacttcgaccgggccttcctgccagccctctacagcctcctctttctgctggggctgctgggcaacggcgcggtggcagccgtgctgctgagccggcggacagccctgagcagcaccgacaccttcctgctccacctagctgtagcagacacgctgctggtgctgacactgccgctctgggcagtggacgctgccgtccagtgggtctttggctctggcctctgcaaagtggcaggtgccctcttcaacatcaacttctacgcaggagccctcctgctggcctgcatcagctttgaccgctacctgaacatagttcatgccacccagctctaccgccgggggcccccggcccgcgtgaccctcacctgcctggctgtctgggggctctgcctgcttttcgccctcccagacttcatcttcctgtcggcccaccacgacgagcgcctcaacgccacccactgccaatacaacttcccacaggtgggccgcacggctctgcgggtgctgcagctggtggctggctttctgctgcccctgctggtcatggcctactgctatgcccacatcctggccgtgctgctggtttccaggggccagcggcgcctgcgggccatgcggctggtggtggtggtcgtggtggcctttgccctctgctggaccccctatcacctggtggtgctggtggacatcctcatggacctgggcgctttggcccgcaactgtggccgagaaagcagggtagacgtggccaagtcggtcacctcaggcctgggctacatgcactgctgcctcaacccgctgctctatgcctttgtaggggtcaagttccgggagcggatgtggatgctgctcttgcgcctgggctgccccaaccagagagggctccagaggcagccatcgtcttcccgccgggattcatcctggtctgagacctcagaggcctcctactcgggcttgtgaggccggaatccgggctcccctttcgcccacagtctgacttccccgcattccaggctcctccctccctctgccggctctggctctccccaatatcctcgctcccgggactcactggcagccccagcaccaccaggtctcccgggaagccaccctcccagctctgaggactgcaccattgctgctccttagctgccaagccccatcctgccgcccgaggtggctgcctggagccccactgcccttctcatttggaaactaaaacttcatcttccccaagtgcggggagtacaaggcatggcgtagagggtgctgccccatgaagccacagcccaggcctccagctcagcagtgactgtggccatggtccccaagacctctatatttgctcttttatttttatgtctaaaatcctgcttaaaacttttcaataaacaagatcgtcaggacca

SEQ ID NO: 5644 - DNA, 1624 bp, Homo sapiens
  source 1..1624: mol_type = unassigned DNA
ccaaccacaagcaccaaagcagaggggcaggcagcacaccacccagcagccagagcaccagcccagccatggtccttgaggtgagtgaccaccaagtgctaaatgacgccgaggttgccgccctcctggagaacttcagctcttcctatgactatggagaaaacgagagtgactcgtgctgtacctccccgccctgcccacaggacttcagcctgaacttcgaccgggccttcctgccagccctctacagcctcctctttctgctggggctgctgggcaacggcgcggtggcagccgtgctgctgagccggcggacagccctgagcagcaccgacaccttcctgctccacctagctgtagcagacacgctgctggtgctgacactgccgctctgggcagtggacgctgccgtccagtgggtctttggctctggcctctgcaaagtggcaggtgccctcttcaacatcaacttctacgcaggagccctcctgctggcctgcatcagctttgaccgctacctgaacatagttcatgccacccagctctaccgccgggggcccccggcccgcgtgaccctcacctgcctggctgtctgggggctctgcctgcttttcgccctcccagacttcatcttcctgtcggcccaccacgacgagcgcctcaacgccacccactgccaatacaacttcccacaggtgggccgcacggctctgcgggtgctgcagctggtggctggctttctgctgcccctgctggtcatggcctactgctatgcccacatcctggccgtgctgctggtttccaggggccagcggcgcctgcgggccatgcggctggtggtggtggtcgtggtggcctttgccctctgctggaccccctatcacctggtggtgctggtggacatcctcatggacctgggcgctttggcccgcaactgtggccgagaaagcagggtagacgtggccaagtcggtcacctcaggcctgggctacatgcactgctgcctcaacccgctgctctatgcctttgtaggggtcaagttccgggagcggatgtggatgctgctcttgcgcctgggctgccccaaccagagagggctccagaggcagccatcgtcttcccgccgggattcatcctggtctgagacctcagaggcctcctactcgggcttgtgaggccggaatccgggctcccctttcgcccacagtctgacttccccgcattccaggctcctccctccctctgccggctctggctctccccaatatcctcgctcccgggactcactggcagccccagcaccaccaggtctcccgggaagccaccctcccagctctgaggactgcaccattgctgctccttagctgccaagccccatcctgccgcccgaggtggctgcctggagccccactgcccttctcatttggaaactaaaacttcatcttccccaagtgcggggagtacaaggcatggcgtagagggtgctgccccatgaagccacagcccaggcctccagctcagcagtgactgtggccatggtccccaagacctctatatttgctcttttatttttatgtctaaaatcctgcttaaaacttttcaataaacaagatcgtcaggacca

SEQ ID NO: 5645 - DNA, 4431 bp, Homo sapiens
  source 1..4431: mol_type = unassigned DNA
aaaaaaaaaaagtgatgagttgtgaggcaggtcgcggccctactgcctcaggagacgatgcgcagctcatttgcttaaatttgcagctgacggctgccacctctctagaggcacctggcggggagcctctcaacataagacagtgaccagtctggtgactcacagccggcacagccatgaactacccgctaacgctggaaatggacctcgagaacctggaggacctgttctgggaactggacagattggacaactataacgacacctccctggtggaaaatcatctctgccctgccacagaggggcccctcatggcctccttcaaggccgtgttcgtgcccgtggcctacagcctcatcttcctcctgggcgtgatcggcaacgtcctggtgctggtgatcctggagcggcaccggcagacacgcagttccacggagaccttcctgttccacctggccgtggccgacctcctgctggtcttcatcttgccctttgccgtggccgagggctctgtgggctgggtcctggggaccttcctctgcaaaactgtgattgccctgcacaaagtcaacttctactgcagcagcctgctcctggcctgcatcgccgtggaccgctacctggccattgtccacgccgtccatgcctaccgccaccgccgcctcctctccatccacatcacctgtgggaccatctggctggtgggcttcctccttgccttgccagagattctcttcgccaaagtcagccaaggccatcacaacaactccctgccacgttgcaccttctcccaagagaaccaagcagaaacgcatgcctggttcacctcccgattcctctaccatgtggcgggattcctgctgcccatgctggtgatgggctggtgctacgtgggggtagtgcacaggttgcgccaggcccagcggcgccctcagcggcagaaggcagtcagggtggccatcctggtgacaagcatcttcttcctctgctggtcaccctaccacatcgtcatcttcctggacaccctggcgaggctgaaggccgtggacaatacctgcaagctgaatggctctctccccgtggccatcaccatgtgtgagttcctgggcctggcccactgctgcctcaaccccatgctctacactttcgccggcgtgaagttccgcagtgacctgtcgcggctcctgacgaagctgggctgtaccggccctgcctccctgtgccagctcttccctagctggcgcaggagcagtctctctgagtcagagaatgccacctctctcaccacgttctaggtcccagtgtccccttttattgctgcttttccttggggcaggcagtgatgctggatgctccttccaacaggagctgggatcctaagggctcaccgtggctaagagtgtcctaggagtatcctcatttggggtagctagaggaaccaacccccatttctagaacatccctgccagctcttctgccggccctggggctaggctggagcccagggagcggaaagcagctcaaaggcacagtgaaggctgtccttacccatctgcacccccctgggctgagagaacctcacgcacctcccatcctaatcatccaatgctcaagaaacaacttctacttctgcccttgccaacggagagcgcctgcccctcccagaacacactccatcagcttaggggctgctgacctccacagcttcccctctctcctcctgcccacctgtcaaacaaagccagaagctgagcaccaggggatgagtggaggttaaggctgaggaaaggccagctggcagcagagtgtggccttcggacaactcagtccctaaaaacacagacattctgccaggcccccaagcctgcagtcatcttgaccaagcaggaagctcagactggttgagttcaggtagctgcccctggctctgaccgaaacagcgctgggtccaccccatgtcaccggatcctgggtggtctgcaggcagggctgactctaggtgcccttggaggccagccagtgacctgaggaagcgtgaaggccgagaagcaagaaagaaacccgacagagggaagaaaagagctttcttcccgaaccccaaggagggagatggatcaatcaaacccggcggtcccctccgccaggcgagatggggtggggtggagaactcctagggtggctgggtccaggggatgggaggttgtgggcattgatggggaaggaggctggcttgtcccctcctcactcccttcccataagctatagacccgaggaaactcagagtcggaacggagaaaggtggactggaaggggcccgtgggagtcatctcaaccatcccctccgtggcatcaccttaggcagggaagtgtaagaaacacactgaggcagggaagtccccaggccccaggaagccgtgccctgcccccgtgaggatgtcactcagatggaaccgcaggaagctgctccgtgcttgtttgctcacctggggtgtgggaggcccgtccggcagttctgggtgctccctaccacctccccagcctttgatcaggtggggagtcagggacccctgcccttgtcccactcaagccaagcagccaagctccttgggaggccccactggggaaataacagctgtggctcacgtgagagtgtcttcacggcaggacaacgaggaagccctaagacgtcccttttttctctgagtatctcctcgcaagctgggtaatcgatgggggagtctgaagcagatgcaaagaggcaagaggctggattttgaattttctttttaataaaaaggcacctataaaacaggtcaatacagtacaggcagcacagagacccccggaacaagcctaaaaattgtttcaaaataaaaaccaagaagatgtcttcacatattgtatttatatatttatatttatatatatatttatataatggtacaaaatggctgggggtgtggccatggatggagggaagagtaggctggcctgtggcgtgggtgggaggagaggggacggagagggcactcggcccgctgcaatctgacccctctctcctcagggcaggaaacacagagtcagacagtttgggggggtcttgggccaggggtggagggctcaagggcacagggcccaggctgaggcagggcgggcaaagcgcctggcaggatgaagggcaagtggccccccaaacacagaggccctggccatggaccctgggaggtgaccggggtgagtcaggggcctgttgtcagccccagaggaagcgctggacctggccgatggtgggccgagaggacagcaccaggctgggagaagtggggcgagttccctttgtattacagctgccagtgcaagaccaggccctccaggccaggaaggctagggacgggtcctggtagaagacaccctgtctagaatggcccttggtcctggaggtggggcgcaaaaggcctcagccagggaactgccctgccacctcccgaggcaggaaaggaagtgagaaaaggagaagtttttttactcctggggccaaagtagggggacaaacacccagtcgtatatggcttcagctctgaccaaaggcggatagggagctctcctgggtaggagcagggagccaagggggaggcagtggctgtgcctgggtgggcacagacagatctggtacatggccctgagccctgggcagagggacaaccttgccggtgagtgggcaggcagagaggaggcggcaggatgctgtttccccgattccatcctcagggagtggagactggaggggaggtgcactgactcagatgaactgttctcccccttctttgataagaagtaggtggcagcagcctctggaaaagtcagggccctggaggttacctggcccagggctactacagccacaggccccagtggcaccatgccaccccttccatggctccactcaagggggccacacagccaccgcctcttcctcctttccttcatcccaaactgggacaaaagacttcaagttctggctaagatgtagcagcagcggatgcccgggcatccaaagtggaaagccagggccccgtgtcaccggtgtgggcaaacacacatgcacgtgcacacatgttctccctgaatcactcagcagcagacaggctgccgccctgggggtctcagccctgctagggctcaccaggtggaagcctaggtggtctgacctcagtttaggagtgggtcatttacgtcatcttaccatttggggacgagacaggaatggtatcccttagggacccagagacactgcaaacagtgggtggccatgtagggctgcatgtccctgggtccaggggaatggagggagcaataacttgaagaaggggggaagggtttcttttatccttttttttttgtgtgacttctatcaaaacacagaaatacagc

SEQ ID NO: 5646 - DNA, 1962 bp, Homo sapiens
  source 1..1962: mol_type = unassigned DNA
gaagtagaggcagaccttgcttcatgagcaagctcatctctggaacaaactggcaaagcatctctgctggtgttcatcagaacagacaccatggcagagcatgattaccatgaagactatgggttcagcagtttcaatgacagcagccaggaggagcatcaagacttcctgcagttcagcaaggtctttctgccctgcatgtacctggtggtgtttgtctgtggtctggtggggaactctctggtgctggtcatatccatcttctaccataagttgcagagcctgacggatgtgttcctggtgaacctacccctggctgacctggtgtttgtctgcactctgcccttctgggcctatgcaggcatccatgaatgggtgtttggccaggtcatgtgcaagagcctactgggcatctacactattaacttctacacgtccatgctcatcctcacctgcatcactgtggatcgtttcattgtagtggttaaggccaccaaggcctacaaccagcaagccaagaggatgacctggggcaaggtcaccagcttgctcatctgggtgatatccctgctggtttccttgccccaaattatctatggcaatgtctttaatctcgacaagctcatatgtggttaccatgacgaggcaatttccactgtggttcttgccacccagatgacactggggttcttcttgccactgctcaccatgattgtctgctattcagtcataatcaaaacactgcttcatgctggaggcttccagaagcacagatctctaaagatcatcttcctggtgatggctgtgttcctgctgacccagatgcccttcaacctcatgaagttcatccgcagcacacactgggaatactatgccatgaccagctttcactacaccatcatggtgacagaggccatcgcatacctgagggcctgccttaaccctgtgctctatgcctttgtcagcctgaagtttcgaaagaacttctggaaacttgtgaaggacattggttgcctcccttaccttggggtctcacatcaatggaaatcttctgaggacaattccaagactttttctgcctcccacaatgtggaggccaccagcatgttccagttataggccttgccagggtttcgagaagctgctctggaatttgcaagtcatggctgtgccctcttgatgtggtgaggcaggctttgtttatagcttgcgcattctcatggagaagttatcagacactctggctggtttggaatgcttcttctcaggcatgaacatgtactgttctcttcttgaacactcatgctgaaagcccaagtagggggtctaaaatttttaaggactttccttcctccatctccaagaatgctgaaaccaagggggatgacatgtgactcctatgatctcaggttctccttgattgggactggggctgaaggttgaagaggtgagcacggccaacaaagctgttgatggtaggtggcacactgggtgcccaagctcagaaggctcttctgactactgggcaaagagtgtagatcagagcagcagtgaaaacaagtgctggcaccaccaggcacctcacagaaatgagatcaggctctgcctcaccttggggcttgacttttgtataggtagatgttcagattgctttgattaatccagaataactagcaccagggactatgaatgggcaaaactgaattataagaggctgataattccagtggtccatggaatgcttgaaaaatgtgcaaaacagcgtttaagactgtaatgaatctaagcagcatttctgaagtggactctttggtggctttgcattttaaaaatgaaattttccaatgtctgccacacaaacgtatgtaaatgtatatacccacacacatacacacatatgtcatatattactagcatatgagtttcatagctaagaaataaaactgttaaagtctccaaact

SEQ ID NO: 5647 - DNA, 2242 bp, Homo sapiens
  source 1..2242: mol_type = unassigned DNA
gtcaacccctgtacgcggtttccttctcctgctctcctgcttatagaacaattgttcctccagaacaattcctctcagccatagtggctctgctcccaccagatgatctctcagctcatcctggtgacttgcaggggtacaggtctgccggctatgttgcccaggctggcctcaaactcctggcttcaatgatcctctcatcttagcctcttgagtactgggactataagtgcccactgccacgcctggctggttaggctacttttctgtggatcacagcccatcatccaccaatgccttgccaacaactgtaaatgtctcatccctgaatcctggaactgataacagctctgccaggtcttcaggtgttcatcagaacagacaccatggcagagcatgattaccatgaagactatgggttcagcagtttcaatgacagcagccaggaggagcatcaagacttcctgcagttcagcaaggtctttctgccctgcatgtacctggtggtgtttgtctgtggtctggtggggaactctctggtgctggtcatatccatcttctaccataagttgcagagcctgacggatgtgttcctggtgaacctacccctggctgacctggtgtttgtctgcactctgcccttctgggcctatgcaggcatccatgaatgggtgtttggccaggtcatgtgcaagagcctactgggcatctacactattaacttctacacgtccatgctcatcctcacctgcatcactgtggatcgtttcattgtagtggttaaggccaccaaggcctacaaccagcaagccaagaggatgacctggggcaaggtcaccagcttgctcatctgggtgatatccctgctggtttccttgccccaaattatctatggcaatgtctttaatctcgacaagctcatatgtggttaccatgacgaggcaatttccactgtggttcttgccacccagatgacactggggttcttcttgccactgctcaccatgattgtctgctattcagtcataatcaaaacactgcttcatgctggaggcttccagaagcacagatctctaaagatcatcttcctggtgatggctgtgttcctgctgacccagatgcccttcaacctcatgaagttcatccgcagcacacactgggaatactatgccatgaccagctttcactacaccatcatggtgacagaggccatcgcatacctgagggcctgccttaaccctgtgctctatgcctttgtcagcctgaagtttcgaaagaacttctggaaacttgtgaaggacattggttgcctcccttaccttggggtctcacatcaatggaaatcttctgaggacaattccaagactttttctgcctcccacaatgtggaggccaccagcatgttccagttataggccttgccagggtttcgagaagctgctctggaatttgcaagtcatggctgtgccctcttgatgtggtgaggcaggctttgtttatagcttgcgcattctcatggagaagttatcagacactctggctggtttggaatgcttcttctcaggcatgaacatgtactgttctcttcttgaacactcatgctgaaagcccaagtagggggtctaaaatttttaaggactttccttcctccatctccaagaatgctgaaaccaagggggatgacatgtgactcctatgatctcaggttctccttgattgggactggggctgaaggttgaagaggtgagcacggccaacaaagctgttgatggtaggtggcacactgggtgcccaagctcagaaggctcttctgactactgggcaaagagtgtagatcagagcagcagtgaaaacaagtgctggcaccaccaggcacctcacagaaatgagatcaggctctgcctcaccttggggcttgacttttgtataggtagatgttcagattgctttgattaatccagaataactagcaccagggactatgaatgggcaaaactgaattataagaggctgataattccagtggtccatggaatgcttgaaaaatgtgcaaaacagcgtttaagactgtaatgaatctaagcagcatttctgaagtggactctttggtggctttgcattttaaaaatgaaattttccaatgtctgccacacaaacgtatgtaaatgtatatacccacacacatacacacatatgtcatatattactagcatatgagtttcatagctaagaaataaaactg

SEQ ID NO: 5648 - DNA, 1184 bp, Homo sapiens
  source 1..1184: mol_type = unassigned DNA
agcatccttccttgctagagagaaagggcactttggtccctggaaagacagaggcaagcagcagcatcggagacactgctcccagtcaggactcaaagtcagcgacagaagtgtttctgagtggattaggaaaggtgttcatcagaacagacaccatggcagagcatgattaccatgaagactatgggttcagcagtttcaatgacagcagccaggaggagcatcaagacttcctgcagttcagcaaggtctttctgccctgcatgtacctggtggtgtttgtctgtggtctggtggggaactctctggtgctggtcatatccatcttctaccataagttgcagagcctgacggatgtgttcctggtgaacctacccctggctgacctggtgtttgtctgcactctgcccttctgggcctatgcaggcatccatgaatgggtgtttggccaggtcatgtgcaagagcctactgggcatctacactattaacttctacacgtccatgctcatcctcacctgcatcactgtggatcgtttcattgtagtggttaaggccaccaaggcctacaaccagcaagccaagaggatgacctggggcaaggtcaccagcttgctcatctgggtgatatccctgctggtttccttgccccaaattatctatggcaatgtctttaatctcgacaagctcatatgtggttaccatgacgaggcaatttccactgtggttcttgccacccagatgacactggggttcttcttgccactgctcaccatgattgtctgctattcagtcataatcaaaacactgcttcatgctggaggcttccagaagcacagatctctaaagatcatcttcctggtgatggctgtgttcctgctgacccagatgcccttcaacctcatgaagttcatccgcagcacacactgggaatactatgccatgaccagctttcactacaccatcatggtgacagaggccatcgcatacctgagggcctgccttaaccctgtgctctatgcctttgtcagcctgaagtttcgaaagaacttctggaaacttgtgaaggacattggttgcctcccttaccttggggtctcacatcaatggaaatcttctgaggacaattccaagactttttctgcctcccacaatgtggaggccaccagcatgttccagttatag

SEQ ID NO: 5649 - DNA, 2805 bp, Homo sapiens
  source 1..2805: mol_type = unassigned DNA
atttttattaagcagtcttagcccaaaggcagcatccttccttgctagagagaaagggcactttggtccctggaaagacagaggcaagcagcagcatcggagacactgctcccagtcaggactcaaagtcagcgacagaagtgtttctgagtggattaggaaaggtaacctcatcgtttatatgcacttgtctggtcaggcaatattttgactttgctggcagagattctgtccaaacacctgctcttcttcatacatcttctagaggtgctggccagacatggctccaggtcactggaaatgagctgctgcatgttgagtatctgcagtcctgtagcaagggcagacttggcactcatgggctgatgttgccgcagctgcccctgctcccacaccacaggttacatgatcccttgtcctgtccatggtctttggcagggtcacagggcagagggaagggtcagagagaagtgacatcttgaagggctggtgccctgggtaagaaaggttgcccatctggcatcccatttcaattgggttttctgcttgttaaatgaggcccctaagtcctaacctgccaatcacaggagctaaggcaaggttccgctttggggaaatctaccttttaagagacttcttgttcagaagtcttcaggaaatgaggctctgatggtagaatgccataaactgtgttaactgatgaaggggaaagtttagttgggaagtgaggagaaccacccaatgctttaaccatgaagccagctcagccaaagtgctgggcagtcgtgggcttttctatgctttgtttccccattagtagcctttgaaaatctatgcaattgaggggaagtaaaggcaggaaggactacctacccaggcagagcagtcttgccatccccaaacacctgtggtctccaggagtctccttgataggagagccccctggtaggggcacttgctttagctttcacaatttattaggaaatggggctcaggatgggtgggcaactgtggtgaggcagggggagatgaaaacaggcatgttccattgatgagctcatattatcagtgggctcaaccatccatcatcagtgttgctcttccaaacagcactgtgcccacctggcagcaaagcgacttttggtttcaaaataattgagcacaggattttatggaatgtgcttaggggtcagttatgagttgtctcccagatgggtgagatcctgagaattttcaggctaatggagagtcctcatcctgtctgagcaatttcccctcagaattggttatcttcaatatactggactgtgctgtttctacacatcccagtgggtgggtttagaagatgactatttgccccctaaatgtggtcaatgggatagcaggaagacaaagaatgccatcctcagccccaaatataattcctgggttctgactcacaggtgttcatcagaacagacaccatggcagagcatgattaccatgaagactatgggttcagcagtttcaatgacagcagccaggaggagcatcaagacttcctgcagttcagcaaggtctttctgccctgcatgtacctggtggtgtttgtctgtggtctggtggggaactctctggtgctggtcatatccatcttctaccataagttgcagagcctgacggatgtgttcctggtgaacctacccctggctgacctggtgtttgtctgcactctgcccttctgggcctatgcaggcatccatgaatgggtgtttggccaggtcatgtgcaagagcctactgggcatctacactattaacttctacacgtccatgctcatcctcacctgcatcactgtggatcgtttcattgtagtggttaaggccaccaaggcctacaaccagcaagccaagaggatgacctggggcaaggtcaccagcttgctcatctgggtgatatccctgctggtttccttgccccaaattatctatggcaatgtctttaatctcgacaagctcatatgtggttaccatgacgaggcaatttccactgtggttcttgccacccagatgacactggggttcttcttgccactgctcaccatgattgtctgctattcagtcataatcaaaacactgcttcatgctggaggcttccagaagcacagatctctaaagatcatcttcctggtgatggctgtgttcctgctgacccagatgcccttcaacctcatgaagttcatccgcagcacacactgggaatactatgccatgaccagctttcactacaccatcatggtgacagaggccatcgcatacctgagggcctgccttaaccctgtgctctatgcctttgtcagcctgaagtttcgaaagaacttctggaaacttgtgaaggacattggttgcctcccttaccttggggtctcacatcaatggaaatcttctgaggacaattccaagactttttctgcctcccacaatgtggaggccaccagcatgttccagttataggccttgccagggtttcgagaagctgctctggaatttgcaagtcatggctgtgccctcttgatgtggtgaggcaggctttgtttatagcttgcgcattctcatggagaagttatcagacactctggctggtttggaatgcttcttctcaggcatgaacatgtactgttctcttcttgaacactcatgctgaaagcccaagtagggggtctaaaatttttaaggactttccttcctccatctccaagaatgctgaaaccaagggggatgacatgtgactcctatgatctcaggttctccttgattgggactgggg

SEQ ID NO: 5650 - DNA, 2203 bp, Homo sapiens
  source 1..2203: mol_type = unassigned DNA
acacttgtgcaggaaacaacagactagtgaggtttacaagaggggggtgtgtgtgtgtgtgtgtctgcctgtgggatgggggtggcacgggggagagagagatgtgggttacaaagctgccatctagaggctagaggctcctttctgcagtgtatataatgcaagtctgcagccagcagagctcacagttgttgcaaagtgctcagcactaagggagccagcgcacagcacagccaggaaggcgagcgagcccagccagcccagccagcccagccagcccggaggtcatttgattgcccgcctcagaacgatggatctgcatctcttcgactactcagagccagggaacttctcggacatcagctggccatgcaacagcagcgactgcatcgtggtggacacggtgatgtgtcccaacatgcccaacaaaagcgtcctgctctacacgctctccttcatttacattttcatcttcgtcatcggcatgattgccaactccgtggtggtctgggtgaatatccaggccaagaccacaggctatgacacgcactgctacatcttgaacctggccattgccgacctgtgggttgtcctcaccatcccagtctgggtggtcagtctcgtgcagcacaaccagtggcccatgggcgagctcacgtgcaaagtcacacacctcatcttctccatcaacctcttcggcagcattttcttcctcacgtgcatgagcgtggaccgctacctctccatcacctacttcaccaacacccccagcagcaggaagaagatggtacgccgtgtcgtctgcatcctggtgtggctgctggccttctgcgtgtctctgcctgacacctactacctgaagaccgtcacgtctgcgtccaacaatgagacctactgccggtccttctaccccgagcacagcatcaaggagtggctgatcggcatggagctggtctccgttgtcttgggctttgccgttcccttctccattatcgctgtcttctacttcctgctggccagagccatctcggcgtccagtgaccaggagaagcacagcagccggaagatcatcttctcctacgtggtggtcttccttgtctgctggctgccctaccacgtggcggtgctgctggacatcttctccatcctgcactacatccctttcacctgccggctggagcacgccctcttcacggccctgcatgtcacacagtgcctgtcgctggtgcactgctgcgtcaaccctgtcctctacagcttcatcaatcgcaactacaggtacgagctgatgaaggccttcatcttcaagtactcggccaaaacagggctcaccaagctcatcgatgcctccagagtctcagagacggagtactctgccttggagcagagcaccaaatgatctgccctggagaggctctgggacgggtttacttgtttttgaacagggtgatgggccctatggttttctagagcaaagcaaagtagcttcgggtcttgatgcttgagtagagtgaagaggggagcacgtgccccctgcatccattctctctttctcttgatgacgcagctgtcatttggctgtgcgtgctgacagttttgcaacaggcagagctgtgtcgcacagcagtgctgtgcgtcagagccagctgaggacaggcttgcctggacttctgtaagataggattttctgtgtttcctgaattttttatatggtgatttgtatttaaattttaagactttattttctcactattggtgtaccttataaatgtatttgaaagttaaatatattttaaatattgtttgggaggcatagtgctgacatatattcagagtgttgtagttttaaggttagcgtgacttcagttttgactaaggatgacactaattgttagctgttttgaaattatatatatataaatatatataaatatataaatatatgccagtcttggctgaaatgttttatttaccatagttttatatctgtgtggtgttttgtaccggcacgggatatggaacgaaaactgctttgtaatgcagtttgtgacattaatagtattgtaaagttacattttaaaataaacaaaaaactgttctggactgcaaatctgcacacacaacgaacagttgcatttcagagagttctctcaatttgtaagttatttttttttaataaagatttttgtttcctaaaaatgca

SEQ ID NO: 5651 - DNA, 713 bp, Homo sapiens
  source 1..713: mol_type = unassigned DNA
ggtgaccccggggccagaattctcgcaggcgcctgggccgggtgcccggccgtgcgtcatttgattgcccgcctcagaacgatggatctgcatctcttcgactactcagagccagggaacttctcggacatcagctggccatgcaacagcagcgactgcatcgtggtggacacggtgatgtgtcccaacatgcccaacaaaagcgtcctgctctacacgctctccttcatttacattttcatcttcgtcatcggcatgattgccaactccgtggtggtctgggtgaatatccaggccaagaccacaggctatgacacgcactgctacatcttgaacctggccattgccgacctgtgggttgtcctcaccatcccagtctgggtggtcagtctcgtgcagcacaaccagtggcccatgggcgagctcacgtgcaaagtcacacacctcatcttctccatcaacctcttcggcagcattttcttcctcacgtgcatgagcgtggaccgctacctctccatcacctacttcaccaacacccccagcagcaggaagaagatggtacgccgtgtcgtctgcatcctggtgtggctgctggccttctgcgtgtctctgcctgacacctactacctgaagaccgtcacgtctgcgtccaacaatgagacctactgccggtccttctaccccgagcacagcatcaaggagtggctgatcgg

SEQ ID NO: 5652 - DNA, 2910 bp, Homo sapiens
  source 1..2910: mol_type = unassigned DNA
tattgcccacagagcctgttggtgacctgcacacaggagccctccagtcagtactgattgaattactcaaggctgcctctctgcaaagttgagcactacaggacgtcgggactgggcatttccttccaacatggccgccactgcctctccgcagccactcgccactgaggatgccgattctgagaatagcagcttctattactatgactacctggatgaagtggccttcatgctctgcaggaaggatgcagtggtgtcctttggcaaagtcttcctcccagtcttctatagcctgatttttgtgttgggcctcagcgggaacctccttcttctcatggtcttgctccgttacgtgcctcgcaggcggatggttgagatctatctgctgaatctggccatctccaaccttctgtttctggtgacactgcccttctggggcatctccgtggcctggcattgggtcttcgggagtttcttgtgcaagatggtgagcactctttatactattaacttttacagtggcatctttttcattagctgcatgagcctggacaagtacctggagatcgttcatgctcagccctaccacaggctgaggacccgggccaagagcctgctccttgctaccatagtatgggctgtgtccctggccgtctccatccctgatatggtctttgtacagacacatgaaaatcccaagggtgtgtggaactgccacgcagatttcggcgggcatgggaccatttggaagctcttcctccgcttccagcagaacctcctagggtttctccttccactccttgccatgatcttcttctactcccgtattggttgtgtcttggtgaggctgaggcccgcaggccagggccgggctttaaaaatagctgcagccttggtggtggccttcttcgtgctatggttcccatacaatctcaccttgtttctgcatacgctgttggacctgcaagtattcgggaactgtgaggtcagccagcatctagactacgcactccaggtaacagagagcatcgccttccttcactgctgcttttcccccatcctgtatgccttctccagtcaccgcttccgccagtacctgaaggctttcctggctgccgtgcttggatggcacctggcacctggcactgcccaggcctcattatccagctgttctgagagcagcatacttactgcccaagaggaaatgactggcatgaatgaccttggagagaggcagtctgagaactaccctaacaaggaggatgtggggaataaatcagcctgagtgaccaaattttggtctggtgggaacagatgggaaccagctcaattgggtgtccactcaaagtgctctctccaggggcctcagtgactgtgttgctaaacccagtggtcagttctcagttctcagccatcagcagcatttgctcgccccgccttcttcctccactttcttcacttgcttccaggataccacgctttcttttctgaattgctacaatctttcttccttccttccttgcttccttccttccttccttccctctctccctccctccctccctcgcttcttcccttcctcctttcctcccttcctactttccttccttccttctgacagggtcttgctctattgctctgtcacccaggctggaatgcagtggcgagatctccgctcactgtagcctcctccccctgggttgaagcaattctcatgcctcagcctcccaagtagccaggactataggcacctgccaccatgcctggctaatttttgtattttttttctttctttctttcttttcttttttttttttttttgagacggagtctcactcttgttgcccaggctggacaacaatggcgcgatctcggctcactgcaacctccacctcccggattcaagcgattctcctgcctcagcctcctgagtagctggaactacatgcgcgtgccaccacgcacagctaatttttataattttagtagagatggggtttcactgcgttggccaggatgatctcgatctcttgaccttgggatccacccgccttggcctcccaaagtgctgggattacaggtgtgagccaccatgcctggccctaatttttgtgtttttattagaaacagagtttcaccatgttggccaggctggagaattgctgtaatagttttccaactggcccctgtccttcctctctcttgctctcctcccatctcatctgcacctagcagccagagtgatcctgatactctcggcctttacttccgcctccctcagagcagcagcctgtcaaaacaccagattacaacaaatttagtttaaaggtctcaattagcgttattggcaattctagaatcaggcaacagactcattgaatcaggaacagattcactccataaaatacagagagtgctgcaatgagctgggtagaagaggttagttttatagacaggaaggggctgtcaaaggcagaaagaaatgaagaacaaaaaaaaagattgatttttttttttttgagacaggatctcactctgtcatccaggctgaagtccaatcccacaatcatggctcactgcagccaccacctcctgagctcaagtgatcctcccatctaagcccccaagtagctaggactacaggagcacaccaccacacctggctaatttttgtattttttgtggagacagggtctcagtatgttacccaggttggactggaaacccttggctcaagcaatttgcctgcctcagcctcccaaagtgctgggattacaggcgtgagccactgcacagggccagattcatcatttcaaagttactttctatatgcggccggaacagggtggttgacatcagttttcttcaggttactttttaataatgattaaaacggggaacttcattatc

SEQ ID NO: 5653 - DNA, 2956 bp, Homo sapiens
  source 1..2956: mol_type = unassigned DNA
acagtacgggatcctttctggaatggaggtcttatgagctgctattgaacacggcagagcctgttggtgacctgcacacaggagccctccagtcagtactgattgaattactcaaggctgcctctctgcaaagttgagcactacaggacgtcgggactgggcatttccttccaacatggccgccactgcctctccgcagccactcgccactgaggatgccgattctgagaatagcagcttctattactatgactacctggatgaagtggccttcatgctctgcaggaaggatgcagtggtgtcctttggcaaagtcttcctcccagtcttctatagcctgatttttgtgttgggcctcagcgggaacctccttcttctcatggtcttgctccgttacgtgcctcgcaggcggatggttgagatctatctgctgaatctggccatctccaaccttctgtttctggtgacactgcccttctggggcatctccgtggcctggcattgggtcttcgggagtttcttgtgcaagatggtgagcactctttatactattaacttttacagtggcatctttttcattagctgcatgagcctggacaagtacctggagatcgttcatgctcagccctaccacaggctgaggacccgggccaagagcctgctccttgctaccatagtatgggctgtgtccctggccgtctccatccctgatatggtctttgtacagacacatgaaaatcccaagggtgtgtggaactgccacgcagatttcggcgggcatgggaccatttggaagctcttcctccgcttccagcagaacctcctagggtttctccttccactccttgccatgatcttcttctactcccgtattggttgtgtcttggtgaggctgaggcccgcaggccagggccgggctttaaaaatagctgcagccttggtggtggccttcttcgtgctatggttcccatacaatctcaccttgtttctgcatacgctgttggacctgcaagtattcgggaactgtgaggtcagccagcatctagactacgcactccaggtaacagagagcatcgccttccttcactgctgcttttcccccatcctgtatgccttctccagtcaccgcttccgccagtacctgaaggctttcctggctgccgtgcttggatggcacctggcacctggcactgcccaggcctcattatccagctgttctgagagcagcatacttactgcccaagaggaaatgactggcatgaatgaccttggagagaggcagtctgagaactaccctaacaaggaggatgtggggaataaatcagcctgagtgaccaaattttggtctggtgggaacagatgggaaccagctcaattgggtgtccactcaaagtgctctctccaggggcctcagtgactgtgttgctaaacccagtggtcagttctcagttctcagccatcagcagcatttgctcgccccgccttcttcctccactttcttcacttgcttccaggataccacgctttcttttctgaattgctacaatctttcttccttccttccttgcttccttccttccttccttccctctctccctccctccctccctcgcttcttcccttcctcctttcctcccttcctactttccttccttccttctgacagggtcttgctctattgctctgtcacccaggctggaatgcagtggcgagatctccgctcactgtagcctcctccccctgggttgaagcaattctcatgcctcagcctcccaagtagccaggactataggcacctgccaccatgcctggctaatttttgtattttttttctttctttctttcttttcttttttttttttttttgagacggagtctcactcttgttgcccaggctggacaacaatggcgcgatctcggctcactgcaacctccacctcccggattcaagcgattctcctgcctcagcctcctgagtagctggaactacatgcgcgtgccaccacgcacagctaatttttataattttagtagagatggggtttcactgcgttggccaggatgatctcgatctcttgaccttgggatccacccgccttggcctcccaaagtgctgggattacaggtgtgagccaccatgcctggccctaatttttgtgtttttattagaaacagagtttcaccatgttggccaggctggagaattgctgtaatagttttccaactggcccctgtccttcctctctcttgctctcctcccatctcatctgcacctagcagccagagtgatcctgatactctcggcctttacttccgcctccctcagagcagcagcctgtcaaaacaccagattacaacaaatttagtttaaaggtctcaattagcgttattggcaattctagaatcaggcaacagactcattgaatcaggaacagattcactccataaaatacagagagtgctgcaatgagctgggtagaagaggttagttttatagacaggaaggggctgtcaaaggcagaaagaaatgaagaacaaaaaaaaagattgatttttttttttttgagacaggatctcactctgtcatccaggctgaagtccaatcccacaatcatggctcactgcagccaccacctcctgagctcaagtgatcctcccatctaagcccccaagtagctaggactacaggagcacaccaccacacctggctaatttttgtattttttgtggagacagggtctcagtatgttacccaggttggactggaaacccttggctcaagcaatttgcctgcctcagcctcccaaagtgctgggattacaggcgtgagccactgcacagggccagattcatcatttcaaagttactttctatatgcggccggaacagggtggttgacatcagttttcttcaggttactttttaataatgattaaaacggggaacttcattatca

SEQ ID NO: 5654 - DNA, 2879 bp, Homo sapiens
  source 1..2879: mol_type = unassigned DNA
ggatacagtacgggatcctttctggaatggaggtcttatgagctgctattgaacacggcagcactacaggacgtcgggactgggcatttccttccaacatggccgccactgcctctccgcagccactcgccactgaggatgccgattctgagaatagcagcttctattactatgactacctggatgaagtggccttcatgctctgcaggaaggatgcagtggtgtcctttggcaaagtcttcctcccagtcttctatagcctgatttttgtgttgggcctcagcgggaacctccttcttctcatggtcttgctccgttacgtgcctcgcaggcggatggttgagatctatctgctgaatctggccatctccaaccttctgtttctggtgacactgcccttctggggcatctccgtggcctggcattgggtcttcgggagtttcttgtgcaagatggtgagcactctttatactattaacttttacagtggcatctttttcattagctgcatgagcctggacaagtacctggagatcgttcatgctcagccctaccacaggctgaggacccgggccaagagcctgctccttgctaccatagtatgggctgtgtccctggccgtctccatccctgatatggtctttgtacagacacatgaaaatcccaagggtgtgtggaactgccacgcagatttcggcgggcatgggaccatttggaagctcttcctccgcttccagcagaacctcctagggtttctccttccactccttgccatgatcttcttctactcccgtattggttgtgtcttggtgaggctgaggcccgcaggccagggccgggctttaaaaatagctgcagccttggtggtggccttcttcgtgctatggttcccatacaatctcaccttgtttctgcatacgctgttggacctgcaagtattcgggaactgtgaggtcagccagcatctagactacgcactccaggtaacagagagcatcgccttccttcactgctgcttttcccccatcctgtatgccttctccagtcaccgcttccgccagtacctgaaggctttcctggctgccgtgcttggatggcacctggcacctggcactgcccaggcctcattatccagctgttctgagagcagcatacttactgcccaagaggaaatgactggcatgaatgaccttggagagaggcagtctgagaactaccctaacaaggaggatgtggggaataaatcagcctgagtgaccaaattttggtctggtgggaacagatgggaaccagctcaattgggtgtccactcaaagtgctctctccaggggcctcagtgactgtgttgctaaacccagtggtcagttctcagttctcagccatcagcagcatttgctcgccccgccttcttcctccactttcttcacttgcttccaggataccacgctttcttttctgaattgctacaatctttcttccttccttccttgcttccttccttccttccttccctctctccctccctccctccctcgcttcttcccttcctcctttcctcccttcctactttccttccttccttctgacagggtcttgctctattgctctgtcacccaggctggaatgcagtggcgagatctccgctcactgtagcctcctccccctgggttgaagcaattctcatgcctcagcctcccaagtagccaggactataggcacctgccaccatgcctggctaatttttgtattttttttctttctttctttcttttcttttttttttttttttgagacggagtctcactcttgttgcccaggctggacaacaatggcgcgatctcggctcactgcaacctccacctcccggattcaagcgattctcctgcctcagcctcctgagtagctggaactacatgcgcgtgccaccacgcacagctaatttttataattttagtagagatggggtttcactgcgttggccaggatgatctcgatctcttgaccttgggatccacccgccttggcctcccaaagtgctgggattacaggtgtgagccaccatgcctggccctaatttttgtgtttttattagaaacagagtttcaccatgttggccaggctggagaattgctgtaatagttttccaactggcccctgtccttcctctctcttgctctcctcccatctcatctgcacctagcagccagagtgatcctgatactctcggcctttacttccgcctccctcagagcagcagcctgtcaaaacaccagattacaacaaatttagtttaaaggtctcaattagcgttattggcaattctagaatcaggcaacagactcattgaatcaggaacagattcactccataaaatacagagagtgctgcaatgagctgggtagaagaggttagttttatagacaggaaggggctgtcaaaggcagaaagaaatgaagaacaaaaaaaaagattgatttttttttttttgagacaggatctcactctgtcatccaggctgaagtccaatcccacaatcatggctcactgcagccaccacctcctgagctcaagtgatcctcccatctaagcccccaagtagctaggactacaggagcacaccaccacacctggctaatttttgtattttttgtggagacagggtctcagtatgttacccaggttggactggaaacccttggctcaagcaatttgcctgcctcagcctcccaaagtgctgggattacaggcgtgagccactgcacagggccagattcatcatttcaaagttactttctatatgcggccggaacagggtggttgacatcagttttcttcaggttactttttaataatgattaaaacggggaacttcattatca

SEQ ID NO: 5655 - DNA, 5283 bp, Homo sapiens
  source 1..5283: mol_type = unassigned DNA
agtcccattcagggaagcagccccggcggccagcagggagctcaggacagagcaggctccctgggaagcctccgggtgataggggtgttccagctgcggcgctctgggggttcagagggggatcttgaatgaacaaatgaatgaactgctttctgggcaaacagccacagccagaggagcctgtgattggcagaaagaagccagggtgtgcaagtctccccaacagcctcgagtggcctgcagtcacagggaaccctcaggaagaccttccgggcagagaccagagggaaggtgtttctagctgtgtacagggactgattggctgaggactcacattggagagctgcagacaacataacggtgaatgagaatggaggatgaagattacaacacttccatcagttacggtgatgaataccctgattatttagactccattgtggttttggaggacttatcccccttggaagccagggtgaccaggatcttcctggtggtggtctacagcatcgtctgcttcctcgggattctgggcaatggtctggtgatcatcattgccaccttcaagatgaagaagacagtgaacatggtctggttcctcaacctggcagtggcagatttcctgttcaacgtcttcctcccaatccatatcacctatgccgccatggactaccactgggttttcgggacagccatgtgcaagatcagcaacttccttctcatccacaacatgttcaccagcgtcttcctgctgaccatcatcagctctgaccgctgcatctctgtgctcctccctgtctggtcccagaaccaccgcagcgttcgcctggcttacatggcctgcatggtcatctgggtcctggctttcttcttgagttccccatctctcgtcttccgggacacagccaacctgcatgggaaaatatcctgcttcaacaacttcagcctgtccacacctgggtcttcctcgtggcccactcactcccaaatggaccctgtggggtatagccggcacatggtggtgactgtcacccgcttcctctgtggcttcctggtcccagtcctcatcatcacagcttgctacctcaccatcgtgtgcaaactgcagcgcaaccgcctggccaagaccaagaagcccttcaagattattgtgaccatcatcattaccttcttcctctgctggtgcccctaccacacactcaacctcctagagctccaccacactgccatgcctggctctgtcttcagcctgggtttgcccctggccactgcccttgccattgccaacagctgcatgaaccccattctgtatgttttcatgggtcaggacttcaagaagttcaaggtggccctcttctctcgcctggtcaatgctctaagtgaagatacaggccactcttcctaccccagccatagaagctttaccaagatgtcatcaatgaatgagaggacttctatgaatgagagggagaccggcatgctttgatcctcactgtggaacccctcaatggactctctcaacccagggacacccaaggatatgtcttctgaagatcaaggcaagaacctctttagcatccaccaattttcactgcattttgcatgggatgaacagtgttttatgctgggaatctagggcctggaacccctttcttctagtggacagaacatgctgtgttccatacagccttggactagcaatttatgcttcttgggaggccagccttgactgactcaaagcaaaaaaggaagaattctcaaaagcattgccatgaactgggattggcatagggcggtgggattaagctgcctattgtgtgtgccccagaaatgacactctccaaggtccattcctggtgtgagcagtgagggggtcagagcaaacccagtgtgatgcagatcacacttggcccttgtatatatattatcagtagctggccagaaaaccctaccttcaagtcactgctctgtgttaaagtatgtggaaatgcataggtgatctgggagaggaaggtgacatatcagcccatgaactccataggccatgaatttggctttcggatcagctaggaagacagagaactggtcctgagaggtcctgtgggctctttgcaagggcaagacaagtgagggatgcaacgaggacttgagatttggcaaagaaatgagaaaggagaaaagaacctttaaaggatgcaggcatggagcagctcaccctagaacatcgcaggctgatggtgctttaggctggagctatttggggcgtcagggtggtgccagcccctgatctcaccttgcccctcttacctgggggtggggttgtggcaggcatcttcaccagcagccctcaccccatcacagggatttttttctgcctttcctaatccactcagctctggctggaggtgcttagaataaaacactggtggtggggcttctcattctggttaatttcctcaacgcctttggagacaggtccaaaatgcagctttgggaagcaactccggagagtcccctgggaagaagagtatgtccgaggactcagtcacttgagacagagtctggagctggactccttgaactgtgtttctgagctgcagacaccaaatacctcctggatacaggtgcctggcatggcttttctcatctaatactgacacgtccctgtggccacagagtgtcatagccccatttacaaatgacatagctgaggcccagatggggaaagtaacttgcccagcatcacacagctaatcagtggcagagttaagatctgaacctggctccgtctggctccagaaactctgttcttctatttggaatttatctgtggagattattctagtatattgatagcctacatttatttagcactttttatattatgcactttacatatgttttctcatttaatcattacagcaaccctgagttaggtatggttataacttcccttttacataggaggaatctgaggcttagagaggttaagtaacttgcccaaaggtacccagctagtctctgccggagcttggatttgaacttcagtttgcctggctcaaatgaggctgcagagttgggaaggacttaaaaagtttggagatttttgccataaatattgatttttctgcaaatgaggatgaacatcttaatggcctttaagaaactttgcaaatagttttcaaaaatgatgcaacatggcagagaaaatgcacttggcttccagctccctcaacagccattaacagcctcctaccgtggctcccacctcctatgtctccagagatcaaggcaatggggagggaaagctggcaggaggcagtcccttgtgggcctgaggccctttggctcctaagtgtccacattctgttctcttccaagtcccttcattgttaagctgattctccaacaagatgcaatgaacagatgcaatgtctaccccgcgctgggcgagttcccgaggccatgggctgtttggaatcacacttcattaagagacaaactgttccttcccttattgtgccttaatgcttatgacaaggcagctctgaattgatcccaagctggagcctctgaatgctttaaagagtttgaatatagacggtttgagagcaaaaagggagctttaaatattgctcagtggcccccatctcccctcttcccacatttactgaggcacgagatgggatgggacctgtcccgggtcacagcagcagtcgtcagcgccttggccctcctggcttgtaggatgctgcttttcctgggcttctggcagtccaggccaggatgggggagccaggaattcatgttgtcattggaaaagctgataaacaggagcacaattcaaaccggctgttttcctccttagagtctggcctccctctttctggctgctctgtgggtcttcctgttctgacttaggttcctgtcaagtacttaaatgcagccttaacatcccatacagtcttgtccccacagcttcatgtgaacatctccatgggtcatgcatatatcgtccctgcagtgtgcaaagtgtgctcacctgcactgctgcacaggcaaccaacatacttagtgcccagagccttctctctgggcccaggactcagtgatggggccttacttagccctgcctcctgggtggggtgggggagctgagggatcgtgaggacaagaggtagagggaaaagaaaagaagatggtgtttgaggataggggagggacaggagaggggacagaaaggtcccagagcatgatgatgaaggaaagggatctggcattcatgaagcacctacgatggttcaggcacaaacactgaaacctcaaattggccctggcagaaggggaccatcatagcaaggtggggggggggtgcagaaagtgagtttctgtttcaagaacagacttcactagttcagagttgcacagctagtgaggtatggagctgggctttgaatcaggtcagctgcctgaatgcccaacttcttcagcccttggaaggagagggtggggagaagaagaaggaaaagacaaggaagaaagaaagaagagagaaggggagaggaatggaagtccaaagagtgggaggaatttgatttcagaaccatctccagctgacccttgagccagcaaggacagggagaagggaagagcaagaacacgaagggcctcaagcaccgggatgcctttgccagccttagataattcccagagcgcacagagccctgcaggttcctgggtccttctccagagaagaggcacagagattctggcagcaaggttcagaaggggtgaggaaactgggcactgacaaagggaggggattggctcaaattcgaccccagagtcagctctggtggggttgggagcctggatgggtgggagaagatagaatccaatcgtgaaaaccataagggaccttcaaactcatcttgcccagatgtctcccatttcacagatgagggaactgaggttttgagagcttcccctgaggactctgcaaaacgaggtggtgtctggtttggatgaaagtggtcggtgattcctcaactcctgccctgcctccctctctcgttcctccctaacatgttatgctcttgttggggctgggatgccctaggcccaaggttaccaaatcctgggtttggaaaattgctgctgggggtggtatctaggaccagagaggaatctactatttctactgtgaaataattcagcagggggtcttcttacttcttccctttgaggacaaagtttctctcgaataaagagactgaagcaaga

SEQ ID NO: 5656 - DNA, 5283 bp, Homo sapiens; identical to SEQ ID NO: 5655
  source 1..5283: mol_type = unassigned DNA

SEQ ID NO: 5657 - DNA, 5110 bp, Homo sapiens
  source 1..5110: mol_type = unassigned DNA
aaagtggaacaggtgtctgtgattctgcccacggaaggagacatggaggaggaagaggctgaggggaagatggaagaaggagggaaggaaggagaaatctttgcttttgggtaatcaggtgtttctagctgtgtacagggactgattggctgaggactcacattggagagctgcagacaacataacggtgaatgagaatggaggatgaagattacaacacttccatcagttacggtgatgaataccctgattatttagactccattgtggttttggaggacttatcccccttggaagccagggtgaccaggatcttcctggtggtggtctacagcatcgtctgcttcctcgggattctgggcaatggtctggtgatcatcattgccaccttcaagatgaagaagacagtgaacatggtctggttcctcaacctggcagtggcagatttcctgttcaacgtcttcctcccaatccatatcacctatgccgccatggactaccactgggttttcgggacagccatgtgcaagatcagcaacttccttctcatccacaacatgttcaccagcgtcttcctgctgaccatcatcagctctgaccgctgcatctctgtgctcctccctgtctggtcccagaaccaccgcagcgttcgcctggcttacatggcctgcatggtcatctgggtcctggctttcttcttgagttccccatctctcgtcttccgggacacagccaacctgcatgggaaaatatcctgcttcaacaacttcagcctgtccacacctgggtcttcctcgtggcccactcactcccaaatggaccctgtggggtatagccggcacatggtggtgactgtcacccgcttcctctgtggcttcctggtcccagtcctcatcatcacagcttgctacctcaccatcgtgtgcaaactgcagcgcaaccgcctggccaagaccaagaagcccttcaagattattgtgaccatcatcattaccttcttcctctgctggtgcccctaccacacactcaacctcctagagctccaccacactgccatgcctggctctgtcttcagcctgggtttgcccctggccactgcccttgccattgccaacagctgcatgaaccccattctgtatgttttcatgggtcaggacttcaagaagttcaaggtggccctcttctctcgcctggtcaatgctctaagtgaagatacaggccactcttcctaccccagccatagaagctttaccaagatgtcatcaatgaatgagaggacttctatgaatgagagggagaccggcatgctttgatcctcactgtggaacccctcaatggactctctcaacccagggacacccaaggatatgtcttctgaagatcaaggcaagaacctctttagcatccaccaattttcactgcattttgcatgggatgaacagtgttttatgctgggaatctagggcctggaacccctttcttctagtggacagaacatgctgtgttccatacagccttggactagcaatttatgcttcttgggaggccagccttgactgactcaaagcaaaaaaggaagaattctcaaaagcattgccatgaactgggattggcatagggcggtgggattaagctgcctattgtgtgtgccccagaaatgacactctccaaggtccattcctggtgtgagcagtgagggggtcagagcaaacccagtgtgatgcagatcacacttggcccttgtatatatattatcagtagctggccagaaaaccctaccttcaagtcactgctctgtgttaaagtatgtggaaatgcataggtgatctgggagaggaaggtgacatatcagcccatgaactccataggccatgaatttggctttcggatcagctaggaagacagagaactggtcctgagaggtcctgtgggctctttgcaagggcaagacaagtgagggatgcaacgaggacttgagatttggcaaagaaatgagaaaggagaaaagaacctttaaaggatgcaggcatggagcagctcaccctagaacatcgcaggctgatggtgctttaggctggagctatttggggcgtcagggtggtgccagcccctgatctcaccttgcccctcttacctgggggtggggttgtggcaggcatcttcaccagcagccctcaccccatcacagggatttttttctgcctttcctaatccactcagctctggctggaggtgcttagaataaaacactggtggtggggcttctcattctggttaatttcctcaacgcctttggagacaggtccaaaatgcagctttgggaagcaactccggagagtcccctgggaagaagagtatgtccgaggactcagtcacttgagacagagtctggagctggactccttgaactgtgtttctgagctgcagacaccaaatacctcctggatacaggtgcctggcatggcttttctcatctaatactgacacgtccctgtggccacagagtgtcatagccccatttacaaatgacatagctgaggcccagatggggaaagtaacttgcccagcatcacacagctaatcagtggcagagttaagatctgaacctggctccgtctggctccagaaactctgttcttctatttggaatttatctgtggagattattctagtatattgatagcctacatttatttagcactttttatattatgcactttacatatgttttctcatttaatcattacagcaaccctgagttaggtatggttataacttcccttttacataggaggaatctgaggcttagagaggttaagtaacttgcccaaaggtacccagctagtctctgccggagcttggatttgaacttcagtttgcctggctcaaatgaggctgcagagttgggaaggacttaaaaagtttggagatttttgccataaatattgatttttctgcaaatgaggatgaacatcttaatggcctttaagaaactttgcaaatagttttcaaaaatgatgcaacatggcagagaaaatgcacttggcttccagctccctcaacagccattaacagcctcctaccgtggctcccacctcctatgtctccagagatcaaggcaatggggagggaaagctggcaggaggcagtcccttgtgggcctgaggccctttggctcctaagtgtccacattctgttctcttccaagtcccttcattgttaagctgattctccaacaagatgcaatgaacagatgcaatgtctaccccgcgctgggcgagttcccgaggccatgggctgtttggaatcacacttcattaagagacaaactgttccttcccttattgtgccttaatgcttatgacaaggcagctctgaattgatcccaagctggagcctctgaatgctttaaagagtttgaatatagacggtttgagagcaaaaagggagctttaaatattgctcagtggcccccatctcccctcttcccacatttactgaggcacgagatgggatgggacctgtcccgggtcacagcagcagtcgtcagcgccttggccctcctggcttgtaggatgctgcttttcctgggcttctggcagtccaggccaggatgggggagccaggaattcatgttgtcattggaaaagctgataaacaggagcacaattcaaaccggctgttttcctccttagagtctggcctccctctttctggctgctctgtgggtcttcctgttctgacttaggttcctgtcaagtacttaaatgcagccttaacatcccatacagtcttgtccccacagcttcatgtgaacatctccatgggtcatgcatatatcgtccctgcagtgtgcaaagtgtgctcacctgcactgctgcacaggcaaccaacatacttagtgcccagagccttctctctgggcccaggactcagtgatggggccttacttagccctgcctcctgggtggggtgggggagctgagggatcgtgaggacaagaggtagagggaaaagaaaagaagatggtgtttgaggataggggagggacaggagaggggacagaaaggtcccagagcatgatgatgaaggaaagggatctggcattcatgaagcacctacgatggttcaggcacaaacactgaaacctcaaattggccctggcagaaggggaccatcatagcaaggtggggggggggtgcagaaagtgagtttctgtttcaagaacagacttcactagttcagagttgcacagctagtgaggtatggagctgggctttgaatcaggtcagctgcctgaatgcccaacttcttcagcccttggaaggagagggtggggagaagaagaaggaaaagacaaggaagaaagaaagaagagagaaggggagaggaatggaagtccaaagagtgggaggaatttgatttcagaaccatctccagctgacccttgagccagcaaggacagggagaagggaagagcaagaacacgaagggcctcaagcaccgggatgcctttgccagccttagataattcccagagcgcacagagccctgcaggttcctgggtccttctccagagaagaggcacagagattctggcagcaaggttcagaaggggtgaggaaactgggcactgacaaagggaggggattggctcaaattcgaccccagagtcagctctggtggggttgggagcctggatgggtgggagaagatagaatccaatcgtgaaaaccataagggaccttcaaactcatcttgcccagatgtctcccatttcacagatgagggaactgaggttttgagagcttcccctgaggactctgcaaaacgaggtggtgtctggtttggatgaaagtggtcggtgattcctcaactcctgccctgcctccctctctcgttcctccctaacatgttatgctcttgttggggctgggatgccctaggcccaaggttaccaaatcctgggtttggaaaattgctgctgggggtggtatctaggaccagagaggaatctactatttctactgtgaaataattcagcagggggtcttcttacttcttccctttgaggacaaagtttctctcgaataaagagactgaagcaaga

SEQ ID NO: 5658 - DNA, 555 bp, Homo sapiens
  source 1..555: mol_type = unassigned DNA
gtatttctccaaagaaactctggaaggagacatgaggaactaacatagggaggtgtttctagctgtgtacagggactgattggctgaggactcacattggagagctgcagacaacataacggtgaatgagaatggaggatgaagattacaacacttccatcagttacggtgatgaataccctgattatttagactccattgtggttttggaggacttatcccccttggaagccagggtgaccaggatcttcctggtggtggtctacagcatcgtctgcttcctcgggattctgggcaatggtctggtgatcatcattgccaccttcaagatgaagaagacagtgaacatggtctggttcctcaacctggcagtggcagatttcctgttcaacgtcttcctcccaatccatatcacctatgccgccatggactaccactgggttttcgggacagccatgtgcaagatcagcaacttccttctcatccacaacatgttcaccagcgtcttcctgctgaccatcatcagctctgaccgctgcatctctgtgctcctcc

SEQ ID NO: 5659 - DNA, 1893 bp, Homo sapiens
  source 1..1893: mol_type = unassigned DNA
gtttctctggctgagttctgtcccagtcccattcagggaagcagccccggcggccagcagggagctcaggacagagcaggctccctgggaagcctccgggtgataggggtgttccagctgcggcgctctgggggttcagagggggatcttgaatgaacaaatgaatgaactgctttctgggcaaacagccacagccagaggagcctgtgattggcagaaagaagccagggtgtgcaagtctccccaacagcctcgagtggcctgcagtcacagggaaccctcaggaagaccttccgggcagagaccagagggaagcccatctctccagcagaactgcttggatttttctaccaggaggctcagggctctgcaacaatgatagcagaagctgatggcatctagagatctaggctgggactagcacagcatcacttctaccactttctgttggtcacagcaactcaccatgccagtgcagattcaaggggaggagaaatagagtccacttcttgatgggaggcgtgacatgtgtttctagctgtgtacagggactgattggctgaggactcacattggagagctgcagacaacataacggtgaatgagaatggaggatgaagattacaacacttccatcagttacggtgatgaataccctgattatttagactccattgtggttttggaggacttatcccccttggaagccagggtgaccaggatcttcctggtggtggtctacagcatcgtctgcttcctcgggattctgggcaatggtctggtgatcatcattgccaccttcaagatgaagaagacagtgaacatggtctggttcctcaacctggcagtggcagatttcctgttcaacgtcttcctcccaatccatatcacctatgccgccatggactaccactgggttttcgggacagccatgtgcaagatcagcaacttccttctcatccacaacatgttcaccagcgtcttcctgctgaccatcatcagctctgaccgctgcatctctgtgctcctccctgtctggtcccagaaccaccgcagcgttcgcctggcttacatggcctgcatggtcatctgggtcctggctttcttcttgagttccccatctctcgtcttccgggacacagccaacctgcatgggaaaatatcctgcttcaacaacttcagcctgtccacacctgggtcttcctcgtggcccactcactcccaaatggaccctgtggggtatagccggcacatggtggtgactgtcacccgcttcctctgtggcttcctggtcccagtcctcatcatcacagcttgctacctcaccatcgtgtgcaaactgcagcgcaaccgcctggccaagaccaagaagcccttcaagattattgtgaccatcatcattaccttcttcctctgctggtgcccctaccacacactcaacctcctagagctccaccacactgccatgcctggctctgtcttcagcctgggtttgcccctggccactgcccttgccattgccaacagctgcatgaaccccattctgtatgttttcatgggtcaggacttcaagaagttcaaggtggccctcttctctcgcctggtcaatgctctaagtgaagatacaggccactcttcctaccccagccatagaagctttaccaagatgtcatcaatgaatgagaggacttctatgaatgagagggagaccggcatgctttgatcctcactgtggaacccctcaatggactctctcaacccagggacacccaaggatatgtcttctgaagatcaaggcaagaacctctttagcatccaccaattttcactgcattttgcatgggatgaacagtgttttatgctgggaatctagggcctggaacccctttcttc

SEQ ID NO: 5660 - DNA, 632 bp, Homo sapiens
  source 1..632: mol_type = unassigned DNA
aaagtggaacaggtgtctgtgattctgcccacggaaggagacatggaggaggaagaggctgaggggaagatggaagaaggagggaaggaaggagaaatctttgcttttgggtaatcaggtgtttctagctgtgtacagggactgattggctgaggactcacattggagagctgcagacaacataacggtgaatgagaatggaggatgaagattacaacacttccatcagttacggtgatgaataccctgattatttagactccattgtggttttggaggacttatcccccttggaagccagggtgaccaggatcttcctggtggtggtctacagcatcgtctgcttcctcgggattctgggcaatggtctggtgatcatcattgccaccttcaagatgaagaagacagtgaacatggtctggttcctcaacctggcagtggcagatttcctgttcaacgtcttcctcccaatccatatcacctatgccgccatggactaccactgggttttcgggacagccatgtgcaagatcagcaacttccttctcatccacaacatgttcaccagcgtcttcctgctgaccatcatcagctctgaccgctgcatctctgtgctcctccctgtctggtcc

SEQ ID NO: 5661 - DNA, 1890 bp, Homo sapiens
  source 1..1890: mol_type = unassigned DNA
ccattcagggaagcagccccggcggccagcagggagctcaggacagagcaggctccctgggaagcctccgggtgataggggtgttccagctgcggcgctctgggggttcagagggggatcttgaatgaacaaatgaatgaactgctttctgggcaaacagccacagccagaggagcctgtgattggcagaaagaagccagggtgtgcaagtctccccaacagcctcgagtggcctgcagtcacagggaaccctcaggaagaccttccgggcagagaccagagggaagcccatctctccagcagaactgcttggatttttctaccaggaggctcagggctctgcaacaatgatagcagaagctgatggcatctagagatctaggctgggactagcacagcatcacttctaccactttctgttggtcacagcaactcaccatgccagtgcagattcaaggggaggagaaatagagtccacttcttgatgggaggcgtgacatagaatggaggatgaagattacaacacttccatcagttacggtgatgaataccctgattatttagactccattgtggttttggaggacttatcccccttggaagccagggtgaccaggatcttcctggtggtggtctacagcatcgtctgcttcctcgggattctgggcaatggtctggtgatcatcattgccaccttcaagatgaagaagacagtgaacatggtctggttcctcaacctggcagtggcagatttcctgttcaacgtcttcctcccaatccatatcacctatgccgccatggactaccactgggttttcgggacagccatgtgcaagatcagcaacttccttctcatccacaacatgttcaccagcgtcttcctgctgaccatcatcagctctgaccgctgcatctctgtgctcctccctgtctggtcccagaaccaccgcagcgttcgcctggcttacatggcctgcatggtcatctgggtcctggctttcttcttgagttccccatctctcgtcttccgggacacagccaacctgcatgggaaaatatcctgcttcaacaacttcagcctgtccacacctgggtcttcctcgtggcccactcactcccaaatggaccctgtggggtatagccggcacatggtggtgactgtcacccgcttcctctgtggcttcctggtcccagtcctcatcatcacagcttgctacctcaccatcgtgtgcaaactgcagcgcaaccgcctggccaagaccaagaagcccttcaagattattgtgaccatcatcattaccttcttcctctgctggtgcccctaccacacactcaacctcctagagctccaccacactgccatgcctggctctgtcttcagcctgggtttgcccctggccactgcccttgccattgccaacagctgcatgaaccccattctgtatgttttcatgggtcaggacttcaagaagttcaaggtggccctcttctctcgcctggtcaatgctctaagtgaagatacaggccactcttcctaccccagccatagaagctttaccaagatgtcatcaatgaatgagaggacttctatgaatgagagggagaccggcatgctttgatcctcactgtggaacccctcaatggactctctcaacccagggacacccaaggatatgtcttctgaagatcaaggcaagaacctctttagcatccaccaattttcactgcattttgcatgggatgaacagtgttttatgctgggaatctagggcctggaacccctttcttctagtggacagaacatgctgtgttccatacagccttggactagcaatttatgcttcttgggaggccagccttgactgactcaaagcaaaaaaggaagaattc

SEQ ID NO: 5662 - DNA, 2047 bp, Homo sapiens
  source 1..2047: mol_type = unassigned DNA
agtatgtaggcatctttcattcagaatggacattaatatcttgaatagagaagaaagcttttagaaatgtatcatttgtcaaaattgcatgccttttaaaaaatgataaagagagatgctgagtgttttgtatgttagcatcgactctttctttttatttctgttcagactcaagtttttagaagctagaatatagatccctttaagaaaaaaaaaggaagaaagaagaatttgctggttagtcgacctctgtttaagaagtgcttcatcctcctcctccacctctccgtggtgtttctctgcagctctctgtaggttagggttctgtgctgcctggcagaatgctcatgtgttagctgaatagatatcatcgacagacatagaccactataggttttctttccttgtgaattccaaaatgccatccaaagagtcttggtcagggaggaaaactaatagggctgcagttcacaaatcaaaacaagagggccgtcagcaagatttattgatagcagccttgggaatgaaactgggttctccaaagtcgtctgtgacaatctggcaacctctgaaactctttgcttattcgcagttgacatcacttgttagaagagcaactctgaaagaaaacgagcaaattccaaaatatgaaaagattcacaatttcaaggtgcatacattcagagggccacactggtgtgaatactgtgccaactttatgtggggtctcattgctcagggagtgaaatgtgcagattgtggtttgaatgttcataagcagtgttccaagatggtcccaaatgactgtaagccagacttgaagcatgtcaaaaaggtgtacagctgtgaccttacgacgctcgtgaaagcacataccactaagcggccaatggtggtagacatgtgcatcagggagattgagtctagaggtcttaattctgaaggactataccgagtatcaggatttagtgacctaattgaagatgtcaagatggctttcgacagagatggtgagaaggcagatatttctgtgaacatgtatgaagatatcaacattatcactggtgcacttaaactgtacttcagggatttgccaattccactcattacatatgatgcctaccctaagtttatagaatctgccaaaattatggatccggatgagcaattggaaacccttcatgaagcactgaaactactgccacctgctcactgcgaaaccctccggtacctcatggcacatctaaagagagtgaccctccacgaaaaggagaatcttatgaatgcagagaaccttggaatcgtctttggacccacccttatgagatctccagaactagacgccatggctgcattgaatgatatacggtatcagagactggtggtggagctgcttatcaaaaacgaagacattttattttaaatttttaatttgaggggaaaagaaatgttttacagatgaaggaatgttttatagtaatttaatttgctcctgtagctgcattatttcttgattagaggtttgggcatataaccagattaaagtgaaggaactttctgttgtttttgtagcaccgctcagctgtcttgtaaaacagtgaacacacgctttctggttctagtaatcctgggtgtttatcacgttcagagaaactcaagctattgcatgattagccccctatctggcaaggaaaccccatacagaagaaacaacaaacctgcgcctgcaccgcctctgcgtcctgggtagtctgtgcttgtaatccagcatgtttcacagagtaagcctgttgtgactttgcttttggggtctatgtcattggtttctgatgcttgtacaaacacgcacacacaaatggataaaacagcacctctggctgttacattaccataaaccatatcacatgcctacattttacaaatgatttctggtttctcttagttcttctctaacatagtactttctttccagcaaaagcaaaatgtgttttcagatttgttactttaataaaggttatccataccaataaaaagtgtacaacacagc

SEQ ID NO: 5663 - DNA, 1761 bp, Homo sapiens
  source 1..1761: mol_type = unassigned DNA
atcgcaagatggcgtctgcgaggccgcgggatgcggagtgagcgcgccccgccgggggctgtgcgaggctgctgctgctctccccgtcgccgccgccgccgccgccagtgcggcgccgcctctccgccagccactgcgccgcggccaagcctcctgcctcgcagcggtcccccgcgtcccggcctgcagcctccccgggcgccggcgcccccagcacgccccatcgggcaccccactctctccgaggtgtgggtgcggcgggctgatgaggtgatccctagcccgcctgggaggagcgcctggactcgcgggcggcggcgagcgcctttacaatggccctgaccctgtttgatacagatgaatatagacctcctgtttggaaatcttacttatatcagctacaacaggaagcccctcatcctcgaagaattacctgtacttgcgaggtggaaaacagaccaaagtattatggaagagagtttcatggcatgatctccagagaagcagccgaccagctcttgattgtggctgaggggagctacctcatccgggagagccagcggcagccagggacctacactttggctttaagatttggaagtcaaaccagaaacttcaggctctactacgatggcaagcactttgttggggagaaacgctttgagtccatccacgatctggtgactgatggcttgattactctctatattgaaaccaaggcagcagaatacattgccaagatgacgataaacccaatttatgagcacgtaggatacacaaccttaaacagagagccagcatacaaaaaacatatgccagtcctgaaagagacacatgatgagagagattctacaggccaggatggggtgtcagagaaaagggtgcatacattcagagggccacactggtgtgaatactgtgccaactttatgtggggtctcattgctcagggagtgaaatgtgcagattgtggtttgaatgttcataagcagtgttccaagatggtcccaaatgactgtaagccagacttgaagcatgtcaaaaaggtgtacagctgtgaccttacgacgctcgtgaaagcacataccactaagcggccaatggtggtagacatgtgcatcagggagattgagtctagaggtcttaattctgaaggactataccgagtatcaggatttagtgacctaattgaagatgtcaagatggctttcgacagagatggtgagaaggcagatatttctgtgaacatgtatgaagatatcaacattatcactggtgcacttaaactgtacttcagggatttgccaattccactcattacatatgatgcctaccctaagtttatagaatctgccaaaattatggatccggatgagcaattggaaacccttcatgaagcactgaaactactgccacctgctcactgcgaaaccctccggtacctcatggcacatctaaagagagtgaccctccacgaaaaggagaatcttatgaatgcagagaaccttggaatcgtctttggacccacccttatgagatctccagaactagacgccatggctgcattgaatgatatacggtatcagagactggtggtggagctgcttatcaaaaacgaagacattttattttaaatttttaatttgaggggaaaagaaatgttttacagatgaaggaatgttttatagtaatttaatttgctcctgtagctgcattatttcttgattagaggtttgggcatataaccagattaaagtgaag

SEQ ID NO: 5664 - DNA, 2447 bp, Homo sapiens
  source 1..2447: mol_type = unassigned DNA
gccaagcctcctgcctcgcaggtacctcctcccgcgcgcacgctccgcgcctgatggcagcgacaagtgccggctcgcggagagctagcggggctccctgggcccggtgcgcccgacaataacgcgtgaataactttttcttgcagcggtcccccgcgtcccggcctgcagcctccccgggcgccggcgcccccagcacgccccatcgggcaccccactctctccgaggtgtgggtgcggcgggctgatgaggtgatccctagcccgcctgggaggagcgcctggactcgcgggcggcggcgagcgcctttacaatggccctgaccctgtttgatacagatgaatatagacctcctgtttggaaatcttacttatatcagctacaacaggaagcccctcatcctcgaagaattacctgtacttgcgaggtggaaaacagaccaaagtattatggaagagagtttcatggcatgatctccagagaagcagccgaccagctcttgattgtggctgaggggagctacctcatccgggagagccagcggcagccagggacctacactttggctttaagatttggaagtcaaaccagaaacttcaggctctactacgatggcaagcactttgttggggagaaacgctttgagtccatccacgatctggtgactgatggcttgattactctctatattgaaaccaaggcagcagaatacattgccaagatgacgataaacccaatttatgagcacgtaggatacacaaccttaaacagagagccagcatacaaaaaacatatgccagtcctgaaagagacacatgatgagagagattctacaggccaggatggggtgtcagagaaaaggttgacatcacttgttagaagagcaactctgaaagaaaacgagcaaattccaaaatatgaaaagattcacaatttcaaggtgcatacattcagagggccacactggtgtgaatactgtgccaactttatgtggggtctcattgctcagggagtgaaatgtgcagattgtggtttgaatgttcataagcagtgttccaagatggtcccaaatgactgtaagccagacttgaagcatgtcaaaaaggtgtacagctgtgaccttacgacgctcgtgaaagcacataccactaagcggccaatggtggtagacatgtgcatcagggagattgagtctagaggtcttaattctgaaggactataccgagtatcaggatttagtgacctaattgaagatgtcaagatggctttcgacagagatggtgagaaggcagatatttctgtgaacatgtatgaagatatcaacattatcactggtgcacttaaactgtacttcagggatttgccaattccactcattacatatgatgcctaccctaagtttatagaatctgccaaaattatggatccggatgagcaattggaaacccttcatgaagcactgaaactactgccacctgctcactgcgaaaccctccggtacctcatggcacatctaaagagagtgaccctccacgaaaaggagaatcttatgaatgcagagaaccttggaatcgtctttggacccacccttatgagatctccagaactagacgccatggctgcattgaatgatatacggtatcagagactggtggtggagctgcttatcaaaaacgaagacattttattttaaatttttaatttgaggggaaaagaaatgttttacagatgaaggaatgttttatagtaatttaatttgctcctgtagctgcattatttcttgattagaggtttgggcatataaccagattaaagtgaaggaactttctgttgtttttgtagcaccgctcagctgtcttgtaaaacagtgaacacacgctttctggttctagtaatcctgggtgtttatcacgttcagagaaactcaagctattgcatgattagccccctatctggcaaggaaaccccatacagaagaaacaacaaacctgcgcctgcaccgcctctgcgtcctgggtagtctgtgcttgtaatccagcatgtttcacagagtaagcctgttgtgactttgcttttggggtctatgtcattggtttctgatgcttgtacaaacacgcacacacaaatggataaaacagcacctctggctgttacattaccataaaccatatcacatgcctacattttacaaatgatttctggtttctcttagttcttctctaacatagtactttctttccagcaaaagcaaaatgtgttttcagatttgttactttaataaaggttatccataccaataaaaagtgtacaacacagcattttctgttaaattattattggttttcagttgtaatttggtattttttctggcatgcgtttattaatttattaaattggcttttagaaataaaaaatattgatagcttacttttttctcataagaata

SEQ ID NO: 5665 - DNA, 3530 bp, Homo sapiens
  source 1..3530: mol_type = unassigned DNA
ttcttcctttgtgtgtgcgcgagcggagttggggcggagggagaagggggaggtcgctctgtctgtccgtctcccgccgcctctgcccggtctactcgaagtgcggcgggagaggcgggagcccaggagagggtgcgggagctggcggggcggctcggagctgccaggacgccctggtcccagccgcgcacaggggagcgtggacggcagaggggctcggcgggagccgagatccgcccgtcccggctgcccctcggcctccctctgctcccacctaccccctgacacccatagaaaagcgtgcaaaggcgcggagcgggacggaaaccacaaataaatagcggcggcggcagcgcgtcatctggtggagcaggaagtgcaggcagagtccggaggctggtgctttctgcgcgtccccaggactttgccatgggctgggggccgcggaggctgcgagcggccgggcgagggcagcggcggcggcgtccgcaccggggctgagcgagcagcgacgcgaggggcgcgcggagatggcagcgtccagcaactccagcctgtccggctcgtcggtgtcctccgatgctgaagaataccagcctcctatatggaaatcatacttatatcagttacagcaagaggcacctcgtcccaagagaatcatttgtcctcgggaggtggaaaacagaccaaaatattatggaagagagtttcatgggatcatctctcgggagcaggcggatgagcttcttggaggcgtggagggtgcctacatccttagagaaagccagcggcaaccaggatgctacacgctggctctcaggtttggaaaccagaccttaaactacaggctcttccacgacgggaaacactttgtgggtgagaagaggtttgagtcgattcatgatctggtgacagatggcttgataacactgtacatagaaacaaaagctgccgagtacatttcaaaaatgacaactaaccccatctatgaacacattggatatgccaccctactcagagaaaaagtatccagaaggctgagcaggtctaaaaatgaaccaagaaaaacaaacgtcacacatgaagaacacacagcggtggaaaagatctcctccctggttcgaagggctgccctcacacacaacgacaaccacttcaattatgagaagacacacaactttaaggtccacacgttccgaggcccacactggtgtgaatattgtgccaatttcatgtgggggctcatcgcccaaggggtccggtgctcagactgtggattgaacgtacacaaacagtgttccaagcacgttcccaatgactgccaacctgatctcaagaggatcaagaaagtgtactgttgtgacctcacaacacttgtgaaggctcacaacactcagagacccatggtggtagacatatgcattcgggaaattgaagcaagaggattaaaatcggaaggcctttacagagtctctgggttcactgaacacattgaagatgtcaaaatggcatttgacagagatggtgaaaaggccgatatatctgccaatgtctatccagacataaacatcatcactggagcccttaaactgtatttcagagacttacccatccctgtcatcacatatgatacctattccaaatttatagatgcagcaaaaatctccaatgcagatgagaggctggaagccgtccatgaagtgctgatgctgctgcctcctgcccactatgaaaccctccggtacctaatgatccacctcaaaaaggttactatgaatgaaaaagacaatttcatgaatgcagaaaatctggggatcgtgtttgggcccactctgatgaggccccctgaggacagcaccctgaccaccctgcatgatatgcggtaccaaaagctgattgtgcagattttaatagaaaacgaagacgttttattctaatccatcagggaaatgagctgaatggccccagcaccatccaagttgacacagctaaaggaataaaaacatttcttaccacttgatttgttttccaagcaagtgctagaatttcctggactgcagaggatcgctgagtggggtactgtgtctcatagacatgcgccacctccacgtgagaacaagggtgaaggtgagggaagcccctcaccttgggtcttttgctgtgcctcctatgtatgtctggtttgctggaagagtgattaatacatctttaatttattaaaaaacaatgtagacctttaaacttcagtcttattggtaataaaagggaacttaattcatacaggtacttgatacagttatacattttccacttacaaaaagaagacaattctgttaaatgaaacgtgtatcgtaaaatgtatttttattttacccacgagaatgttgttatttttagcaaatagaactcaatgcagtgcattggttattaccctgtgtaccttgtccctcattttgctgtgacaccctgaaaaagctgaccacaaatgcagtattatcttgacatacctctgtcctcctcagtgctttttaatgaaatttcacctgccccttgtgttcctgctttggatagtttttgctcttaagcattggcattcttctattgtatggtatgtatttatagcaattgtaggatggtctgaaatgtccacacactttctatgcatacaaattttgtgaattcccaaagtatgctttggaattggtcatagtcttttcgtatcatgagtgtgtatcccagaagatacagaatgcggtcattttacctgaaattatttgagaacactggatgtatctggtctgtgtaaaaagttagcacttaccctcttttcttcctggccaagccctctgaattcatctgttaatatcaaattgtatttttgccacatttctgtattggtgaaaagcgaatctgcagaataactgtcaacgtttttcattcttgttttacaaacctattttttaaagtgagaataaggttggtttttaccaaatatttgttcctccttgacaaaagtagctctgtgtggataatatgattttattactacagttccagtcacttggttatatttatcttagcatgagcctttcacaccaagatttctatattttgtaacataggtgaaatatttaaaacatcaaaaactgtaaatctagatttttaaaaaatccaactgcaatgtcttttcctttgattgagatgatttgtgtaaactcaccagtcttgctttggagtgagcagaagagaatgactattttacgtggagcatcattgtgtgactgttgacctggacagtcccaagggctatgcagatggactccattggcacagggaggtttgacctcttccctgctattatccctcctcccaactgtacagatttgtttgttgtagtttatgtacttcttgatactgtcaaaaaattatctggaaatggttttattttgtgaagtgaacaatactttgtaatttatgatagtgtaaatggaaggcaaagcatcacatgtattaaattcttctgtctatta

SEQ ID NO: 5666 - DNA, 2832 bp, Homo sapiens
  source 1..2832: mol_type = unassigned DNA
attgttccaggcgcacgtcggccttaagaaatagcacaaaacaggcccatccttattcagaagccgggccccctccatcactcaaactgggcctttcaggtcacatgccggaggctgctgcagacaggacccagctgcctcaaatctgccgcctaacataagctgcggttcgaaaatcctgacagcacagggcttcctgggctctgcagagcaaactggaaagagctgggatccaggcactatgttctctgaagaactgtggctggaaaatgagaaaaagtgtgctgtggttcggaagtctaagcagggcaggaaacgccaagaactgctggccgtagccttcggggtgaaggtgggtgtcaaaggcggctttctttggccccctctcaaactctttgcctgttcacagatctcctccctggttcgaagggctgccctcacacacaacgacaaccacttcaattatgagaagacacacaactttaaggtccacacgttccgaggcccacactggtgtgaatattgtgccaatttcatgtgggggctcatcgcccaaggggtccggtgctcagactgtggattgaacgtacacaaacagtgttccaagcacgttcccaatgactgccaacctgatctcaagaggatcaagaaagtgtactgttgtgacctcacaacacttgtgaaggctcacaacactcagagacccatggtggtagacatatgcattcgggaaattgaagcaagaggattaaaatcggaaggcctttacagagtctctgggttcactgaacacattgaagatgtcaaaatggcatttgacagagatggtgaaaaggccgatatatctgccaatgtctatccagacataaacatcatcactggagcccttaaactgtatttcagagacttacccatccctgtcatcacatatgatacctattccaaatttatagatgcagcaaaaatctccaatgcagatgagaggctggaagccgtccatgaagtgctgatgctgctgcctcctgcccactatgaaaccctccggtacctaatgatccacctcaaaaaggttactatgaatgaaaaagacaatttcatgaatgcagaaaatctggggatcgtgtttgggcccactctgatgaggccccctgaggacagcaccctgaccaccctgcatgatatgcggtaccaaaagctgattgtgcagattttaatagaaaacgaagacgttttattctaatccatcagggaaatgagctgaatggccccagcaccatccaagttgacacagctaaaggaataaaaacatttcttaccacttgatttgttttccaagcaagtgctagaatttcctggactgcagaggatcgctgagtggggtactgtgtctcatagacatgcgccacctccacgtgagaacaagggtgaaggtgagggaagcccctcaccttgggtcttttgctgtgcctcctatgtatgtctggtttgctggaagagtgattaatacatctttaatttattaaaaaacaatgtagacctttaaacttcagtcttattggtaataaaagggaacttaattcatacaggtacttgatacagttatacattttccacttacaaaaagaagacaattctgttaaatgaaacgtgtatcgtaaaatgtatttttattttacccacgagaatgttgttatttttagcaaatagaactcaatgcagtgcattggttattaccctgtgtaccttgtccctcattttgctgtgacaccctgaaaaagctgaccacaaatgcagtattatcttgacatacctctgtcctcctcagtgctttttaatgaaatttcacctgccccttgtgttcctgctttggatagtttttgctcttaagcattggcattcttctattgtatggtatgtatttatagcaattgtaggatggtctgaaatgtccacacactttctatgcatacaaattttgtgaattcccaaagtatgctttggaattggtcatagtcttttcgtatcatgagtgtgtatcccagaagatacagaatgcggtcattttacctgaaattatttgagaacactggatgtatctggtctgtgtaaaaagttagcacttaccctcttttcttcctggccaagccctctgaattcatctgttaatatcaaattgtatttttgccacatttctgtattggtgaaaagcgaatctgcagaataactgtcaacgtttttcattcttgttttacaaacctattttttaaagtgagaataaggttggtttttaccaaatatttgttcctccttgacaaaagtagctctgtgtggataatatgattttattactacagttccagtcacttggttatatttatcttagcatgagcctttcacaccaagatttctatattttgtaacataggtgaaatatttaaaacatcaaaaactgtaaatctagatttttaaaaaatccaactgcaatgtcttttcctttgattgagatgatttgtgtaaactcaccagtcttgctttggagtgagcagaagagaatgactattttacgtggagcatcattgtgtgactgttgacctggacagtcccaagggctatgcagatggactccattggcacagggaggtttgacctcttccctgctattatccctcctcccaactgtacagatttgtttgttgtagtttatgtacttcttgatactgtcaaaaaattatctggaaatggttttattttgtgaagtgaacaatactttgtaatttatgatagtgtaaatggaaggcaaagcatcacatgtattaaattcttctgtctatt

SEQ ID NO: 5667 - DNA, 539 bp, Homo sapiens
  source 1..539: mol_type = unassigned DNA
gcgaggggcgcgcggagatggcagcgtccagcaactccagcctgtccggctcgtcggtgtcctccgtctattctgaacccagaagcccgagagagcttccaaaatatgctgaagaataccagcctcctatatggaaatcatacttatatcagttacagcaagaggcacctcgtcccaagagaatcatttgtcctcgggaggtggaaaacagaccaaaatattatggaagagagtttcatgggatcatctctcgggagcaggcggatgagcttcttggaggcgtggagggtgcctacatccttagagaaagccagcggcaaccaggatgctacacgctggctctcaggtttggaaaccagaccttaaactacaggctcttccacgacgggaaacactttgtgggtgagaagaggtttgagtcgattcatgatctggtgacagatggcttgataacactgtacatagaaacaaaagctgccgagtacatttcaaaaatgacaactaaccccatctatgaacacattggatatgccacccta

SEQ ID NO: 5668 - DNA, 825 bp, Homo sapiens
  source 1..825: mol_type = unassigned DNA
atgttctctgaagaactgtggctggaaaatgagaaaaagtgtgctgtggttcggaagtctaagcagggcaggaaacgccaagaactgctggccgtagccttcggggtgaaggtgggtgtcaaaggcggctttctttggccccctctcaaactctttgcctgttcacagatctcctccctggttcgaagggctgccctcacacacaacgacaaccacttcaattatgagaagacacacaactttaaggtccacacgttccgaggcccacactggtgtgaatattgtgccaatttcatgtgggggctcatcgcccaaggggtccggtgctcaggattaaaatcggaaggcctttacagagtctctgggttcactgaacacattgaagatgtcaaaatggcatttgacagagatggtgaaaaggccgatatatctgccaatgtctatccagacataaacatcatcactggagcccttaaactgtatttcagagacttacccatccctgtcatcacatatgatacctattccaaatttatagatgcagcaaaaatctccaatgcagatgagaggctggaagccgtccatgaagtgctgatgctgctgcctcctgcccactatgaaaccctccggtacctaatgatccacctcaaaaaggttactatgaatgaaaaagacaatttcatgaatgcagaaaatctggggatcgtgtttgggcccactctgatgaggccccctgaggacagcaccctgaccaccctgcatgatatgcggtaccaaaagctgattgtgcagattttaatagaaaacgaagacgttttattctaa

SEQ ID NO: 5669 - DNA, 1195 bp, Homo sapiens
  source 1..1195: mol_type = unassigned DNA
agcacagggcttcctgggctctgcagagcaaactggaaagagctgggatccaggcactatgttctctgaagaactgtggctggaaaatgagaaaaagtgtgctgtggttcggaagtctaagcagggcaggaaacgccaagaactgctggccgtagccttcggggtgaaggtccacacgttccgaggcccacactggtgtgaatattgtgccaatttcatgtgggggctcatcgcccaaggggtccggtgctcagactgtggattgaacgtacacaaacagtgttccaagcacgttcccaatgactgccaacctgatctcaagaggatcaagaaagtgtactgttgtgacctcacaacacttgtgaaggctcacaacactcagagacccatggtggtagacatatgcattcgggaaattgaagcaagaggattaaaatcggaaggcctttacagagtctctgggttcactgaacacattgaagatgtcaaaatggcatttgacagagatggtgaaaaggccgatatatctgccaatgtctatccagacataaacatcatcactggagcccttaaactgtatttcagagacttacccatccctgtcatcacatatgatacctattccaaatttatagatgcagcaaaaatctccaatgcagatgagaggctggaagccgtccatgaagtgctgatgctgctgcctcctgcccactatgaaaccctccggtacctaatgatccacctcaaaaaggttactatgaatgaaaaagacaatttcatgaatgcagaaaatctggggatcgtgtttgggcccactctgatgaggccccctgaggacagcaccctgaccaccctgcatgatatgcggtaccaaaagctgattgtgcagattttaatagaaaacgaagacgttttattctaatccatcagggaaatgagctgaatggccccagcaccatccaagttgacacagctaaaggaataaaaacatttcttaccacttgatttgttttccaagcaagtgctagaatttcctggactgcagaggatcgctgagtggggtactgtgtctcatagacatgcgccacctccacgtgagaacaagggtgaaggtgagggaagcccctcaccttgggtcttttgctgtgcctcctatgtatgtctggtttgctggaagagtgattaatacatcttt

SEQ ID NO: 5670 - DNA, 2608 bp, Homo sapiens
  source 1..2608: mol_type = unassigned DNA
actcgaagtgcggcgggagaggcgggagcccaggagagggtgcgggagctggcggggcggctcggagctgccaggacgccctggtcccagccgcgcacaggggagcgtggacggcagaggggctcggcgggagccgagatccgcccgtcccggctgcccctcggcctccctctgctcccacctaccccctgacacccatagaaaagcgtgcaaaggcgcggagcgggacggaaaccacaaataaatagcggcggcggcagcgcgtcatctggtggagcaggaagtgcaggcagagtccggaggctggtgctttctgcgcgtccccaggactttgccatgggctgggggccgcggaggctgcgagcggccgggcgagggcagcggcggcggcgtccgcaccggggctgagcgagcagcgacgcgaggggcgcgcggagatggcagcgtccagcaactccagcctgtccggctcgtcggtgtcctccgatgctgaagaataccagcctcctatatggaaatcatacttatatcagttacagcaagaggcacctcgtcccaagagaatcatttgtcctcgggaggtggaaaacagaccaaaatattatggaagagagtttcatgggatcatctctcgggagcaggcggatgagcttcttggaggcgtggagggtgcctacatccttagagaaagccagcggcaaccaggatgctacacgctggctctcagaaatcccaccaaaatctccaatgcagatgagaggctggaagccgtccatgaagtgctgatgctgctgcctcctgcccactatgaaaccctccggtacctaatgatccacctcaaaaaggttactatgaatgaaaaagacaatttcatgaatgcagaaaatctggggatcgtgtttgggcccactctgatgaggccccctgaggacagcaccctgaccaccctgcatgatatgcggtaccaaaagctgattgtgcagattttaatagaaaacgaagacgttttattctaatccatcagggaaatgagctgaatggccccagcaccatccaagttgacacagctaaaggaataaaaacatttcttaccacttgatttgttttccaagcaagtgctagaatttcctggactgcagaggatcgctgagtggggtactgtgtctcatagacatgcgccacctccacgtgagaacaagggtgaaggtgagggaagcccctcaccttgggtcttttgctgtgcctcctatgtatgtctggtttgctggaagagtgattaatacatctttaatttattaaaaaacaatgtagacctttaaacttcagtcttattggtaataaaagggaacttaattcatacaggtacttgatacagttatacattttccacttacaaaaagaagacaattctgttaaatgaaacgtgtatcgtaaaatgtatttttattttacccacgagaatgttgttatttttagcaaatagaactcaatgcagtgcattggttattaccctgtgtaccttgtccctcattttgctgtgacaccctgaaaaagctgaccacaaatgcagtattatcttgacatacctctgtcctcctcagtgctttttaatgaaatttcacctgccccttgtgttcctgctttggatagtttttgctcttaagcattggcattcttctattgtatggtatgtatttatagcaattgtaggatggtctgaaatgtccacacactttctatgcatacaaattttgtgaattcccaaagtatgctttggaattggtcatagtcttttcgtatcatgagtgtgtatcccagaagatacagaatgcggtcattttacctgaaattatttgagaacactggatgtatctggtctgtgtaaaaagttagcacttaccctcttttcttcctggccaagccctctgaattcatctgttaatatcaaattgtatttttgccacatttctgtattggtgaaaagcgaatctgcagaataactgtcaacgtttttcattcttgttttacaaacctattttttaaagtgagaataaggttggtttttaccaaatatttgttcctccttgacaaaagtagctctgtgtggataatatgattttattactacagttccagtcacttggttatatttatcttagcatgagcctttcacaccaagatttctatattttgtaacataggtgaaatatttaaaacatcaaaaactgtaaatctagatttttaaaaaatccaactgcaatgtcttttcctttgattgagatgatttgtgtaaactcaccagtcttgctttggagtgagcagaagagaatgactattttacgtggagcatcattgtgtgactgttgacctggacagtcccaagggctatgcagatggactccattggcacagggaggtttgacctcttccctgctattatccctcctcccaactgtacagatttgtttgttgtagtttatgtacttcttgatactgtcaaaaaattatctggaaatggttttattttgtgaagtgaacaatactttgtaatttatgatagtgtaaatggaaggcaaagcatcacatgtattaaattcttctgtctatt

SEQ ID NO: 5671 - DNA, 861 bp, Homo sapiens
  source 1..861: mol_type = unassigned DNA
atgttctctgaagaactgtggctggaaaatgagaaaaagtgtgctgtggttcggaagtctaagcagggcaggaaacgccaagaactgctggccgtagccttcggggtgaaggtgggtgtcaaaggcggctttctttggccccctctcaaactctttgcctgttcacagatctcctccctggttcgaagggctgccctcacacacaacgacaaccacttcaattatgagaagacacacaactttaaggtccacacgttccgaggcccacactggtgtgaatattgtgccaatttcatgtgggggctcatcgcccaaggggtccggtgctcagactgtggattgaacgtacacaaacagtgttccaagcacgttcccaatgactgccaacctgatctcaagaggatcaagaaagtgtactgttgtgacctcacaacacttgtgaaggctcacaacactcagagacccatggtggtagacatatgcattcgggaaattgaagcaagaggattaaaatcggaaggcctttacagagtctctgggttcactgaacacattgaagatgtcaaaatggcatttgacagagaaatctccaatgcagatgagaggctggaagccgtccatgaagtgctgatgctgctgcctcctgcccactatgaaaccctccggtacctaatgatccacctcaaaaaggttactatgaatgaaaaagacaatttcatgaatgcagaaaatctggggatcgtgtttgggcccactctgatgaggccccctgaggacagcaccctgaccaccctgcatgatatgcggtaccaaaagctgattgtgcagattttaatagaaaacgaagacgttttattctaa

SEQ ID NO: 5672 - DNA, 1516 bp, Homo sapiens
  source 1..1516: mol_type = unassigned DNA
gcgaggggcgcgcggagatggcagcgtccagcaactccagcctgtccggctcgtcggtgtcctccgtctattctgaacccagaagcccgagagagcttccaaaatatgctgaagaataccagcctcctatatggaaatcatacttatatcagttacagcaagaggcacctcgtcccaagagaatcatttgtcctcgggaggtggaaaacagaccaaaatattatggaagagagtttcatgggatcatctctcgggagcaggcggatgagcttcttggaggcgtggagggtgcctacatccttagagaaagccagcggcaaccaggatgctacacgctggctctcaggtttggaaaccagaccttaaactacaggctcttccacgacgggaaacactttgtgggtgagaagaggtttgagtcgattcatgatctggtgacagatggcttgataacactgtacatagaaacaaaagctgccgagtacatttcaaaaatgacaactaaccccatctatgaacacattggatatgccaccctactcagagaaaaagtatccagaaggctgagcaggtctaaaaatgaaccaagaaaaacaaacgtcacacatgaagaacacacagcggtggaaaagatctcctccctggttcgaagggctgccctcacacacaacgacaaccacttcaattatgagaagacacacaactttaaggtccacacgttccgaggcccacactggtgtgaatattgtgccaatttcatgtgggggctcatcgcccaaggggtccggtgctcagactgtggattgaacgtacacaaacagtgttccaagcacgttcccaatgactgccaacctgatctcaagaggatcaagaaagtgtactgttgtgacctcacaacacttgtgaaggctcacaacactcagagacccatggtggtagacatatgcattcgggaaattgaagcaagaggattaaaatcggaaggcctttacagagtctctgggttcactgaacacattgaagatgtcaaaatggcatttgacagagatggtgaaaaggccgatatatctgccaatgtctatccagacataaacatcatcactggagcccttaaactgtatttcagagacttacccatccctgtcatcacatatgatacctattccaaatttatagatgcagcaaaaatctccaatgcagatgagaggctggaagccgtccatgaagtgctgatgctgctgcctcctgcccactatgaaaccctccggtacctaatgatccacctcaaaaaggttactatgaatgaaaaagacaatttcatgaatgcagaaaatctggggatcgtgtttgggcccactctgatgaggccccctgaggacagcaccctgaccaccctgcatgatatgcggtaccaaaagctgattgtgcagattttaatagaaaacgaagacgttttattctaatccatcagggaaatgagctgaatggccccagcaccatccaagttgacacagct

SEQ ID NO: 5673 - DNA, 975 bp, Homo sapiens
  source 1..975: mol_type = unassigned DNA
atggcagcgtccagcaactccagcctgtccggctcgtcggtgtcctccgatgctgaagaataccagcctcctatatggaaatcatacttatatcagttacagcaagaggcacctcgtcccaagagaatcatttgtcctcgggagatctcctccctggttcgaagggctgccctcacacacaacgacaaccacttcaattatgagaagacacacaactttaaggtccacacgttccgaggcccacactggtgtgaatattgtgccaatttcatgtgggggctcatcgcccaaggggtccggtgctcagactgtggattgaacgtacacaaacagtgttccaagcacgttcccaatgactgccaacctgatctcaagaggatcaagaaagtgtactgttgtgacctcacaacacttgtgaaggctcacaacactcagagacccatggtggtagacatatgcattcgggaaattgaagcaagaggattaaaatcggaaggcctttacagagtctctgggttcactgaacacattgaagatgtcaaaatggcatttgacagagatggtgaaaaggccgatatatctgccaatgtctatccagacataaacatcatcactggagcccttaaactgtatttcagagacttacccatccctgtcatcacatatgatacctattccaaatttatagatgcagcaaaaatctccaatgcagatgagaggctggaagccgtccatgaagtgctgatgctgctgcctcctgcccactatgaaaccctccggtacctaatgatccacctcaaaaaggttactatgaatgaaaaagacaatttcatgaatgcagaaaatctggggatcgtgtttgggcccactctgatgaggccccctgaggacagcaccctgaccaccctgcatgatatgcggtaccaaaagctgattgtgcagattttaatagaaaacgaagacgttttattctaa

SEQ ID NO: 5674 - DNA, 1632 bp, Homo sapiens
  source 1..1632: mol_type = unassigned DNA
atgacccagacccacagggcaaaaagtgcgtcgtcgtgtcccaacctcctggtcccagaaacctggccgcatcaagtcagcgcttcccatgctggaagaagcaagcagccccagggtggaatcttaaaaattaatgaagagcatcggcggggtgccattcaggacttacttgcaagcccaggatttacatttggaaagcgagtggtgtttgattcccactgtttaaaaaggcaacacacgttcgctgatggtctacattccagctgcactagcaatgctgaagaataccagcctcctatatggaaatcatacttatatcagttacagcaagaggcacctcgtcccaagagaatcatttgtcctcgggaggtggaaaacagaccaaaatattatggaagagagtttcatgggatcatctctcgggagcaggcggatgagcttcttggaggcgtggagggtgcctacatccttagagaaagccagcggcaaccaggatgctacacgctggctctcaggtttggaaaccagaccttaaactacaggctcttccacgacgggaaacactttgtgggtgagaagaggtttgagtcgattcatgatctggtgacagatggcttgataacactgtacatagaaacaaaagctgccgagtacatttcaaaaatgacaactaaccccatctatgaacacattggatatgccaccctactcagagaaaaagtatccagaaggctgagcaggtctaaaaatgaaccaagaaaaacaaacgtcacacatgaagaacacacagcggtggaaaagatctcctccctggttcgaagggctgccctcacacacaacgacaaccacttcaattatgagaagacacacaactttaaggtccacacgttccgaggcccacactggtgtgaatattgtgccaatttcatgtgggggctcatcgcccaaggggtccggtgctcagactgtggattgaacgtacacaaacagtgttccaagcacgttcccaatgactgccaacctgatctcaagaggatcaagaaagtgtactgttgtgacctcacaacacttgtgaaggctcacaacactcagagacccatggtggtagacatatgcattcgggaaattgaagcaagaggattaaaatcggaaggcctttacagagtctctgggttcactgaacacattgaagatgtcaaaatggcatttgacagagatggtgaaaaggccgatatatctgccaatgtctatccagacataaacatcatcactggagcccttaaactgtatttcagagacttacccatccctgtcatcacatatgatacctattccaaatttatagatgcagcaaaaatctccaatgcagatgagaggctggaagccgtccatgaagtgctgatgctgctgcctcctgcccactatgaaaccctccggtacctaatgatccacctcaaaaaggttactatgaatgaaaaagacaatttcatgaatgcagaaaatctggggatcgtgtttgggcccactctgatgaggccccctgaggacagcaccctgaccaccctgcatgatatgcggtaccaaaagctgattgtgcagattttaatagaaaacgaagacgttttattctaa

SEQ ID NO: 5675 - DNA, 1853 bp, Homo sapiens
  source 1..1853: mol_type = unassigned DNA
cttttcccttatcctccagcagccgagacaaacatgcaaacagcaacctctattccagtttgataaaacaaattctgtggagaagggtgcagaggagaggaattgacttagtcaaattagaggggtcagtggaaatgtcatatgagttgggccttgaaagctgagtagaatttttccggaaaacaaatggagaaaaagacatttcaggaagagagaagagcttaggtaaaggcctggagatggatgctgaagaataccagcctcctatatggaaatcatacttatatcagttacagcaagaggcacctcgtcccaagagaatcatttgtcctcgggaggtggaaaacagaccaaaatattatggaagagagtttcatgggatcatctctcgggagcaggcggatgagcttcttggaggcgtggagggtgcctacatccttagagaaagccagcggcaaccaggatgctacacgctggctctcaggtttggaaaccagaccttaaactacaggctcttccacgacgggaaacactttgtgggtgagaagaggtttgagtcgattcatgatctggtgacagatggcttgataacactgtacatagaaacaaaagctgccgagtacatttcaaaaatgacaactaaccccatctatgaacacattggatatgccaccctactcagagaaaaagtatccagaaggctgagcaggtctaaaaatgaaccaagaaaaacaaacgtcacacatgaagaacacacagcggtggaaaagatctcctccctggttcgaagggctgccctcacacacaacgacaaccacttcaattatgagaagacacacaactttaaggtccacacgttccgaggcccacactggtgtgaatattgtgccaatttcatgtgggggctcatcgcccaaggggtccggtgctcagactgtggattgaacgtacacaaacagtgttccaagcacgttcccaatgactgccaacctgatctcaagaggatcaagaaagtgtactgttgtgacctcacaacacttgtgaaggctcacaacactcagagacccatggtggtagacatatgcattcgggaaattgaagcaagaggattaaaatcggaaggcctttacagagtctctgggttcactgaacacattgaagatgtcaaaatggcatttgacagagatggtgaaaaggccgatatatctgccaatgtctatccagacataaacatcatcactggagcccttaaactgtatttcagagacttacccatccctgtcatcacatatgatacctattccaaatttatagatgcagcaaaaatctccaatgcagatgagaggctggaagccgtccatgaagtgctgatgctgctgcctcctgcccactatgaaaccctccggtacctaatgatccacctcaaaaaggttactatgaatgaaaaagacaatttcatgaatgcagaaaatctggggatcgtgtttgggcccactctgatgaggccccctgaggacagcaccctgaccaccctgcatgatatgcggtaccaaaagctgattgtgcagattttaatagaaaacgaagacgttttattctaatccatcagggaaatgagctgaatggccccagcaccatccaagttgacacagctaaaggaataaaaacatttcttaccacttgatttgttttccaagcaagtgctagaatttcctggactgcagaggatcgctgagtggggtactgtgtctcatagacatgcgccacctccacgtgagaacaagggtgaaggtgagggaagcccctcaccttgggtcttttgctgtgcctcctatgtatgtctggtttgctgg

SEQ ID NO: 5676 - DNA, 1792 bp, Homo sapiens
  source 1..1792: mol_type = unassigned DNA
agtggagtgggacaggtatataaaggaagtacagggcctggggaagaggccctgtctaggtagctggcaccaggagccgtgggcaagggaagaggccacaccctgccctgctctgctgcagccagaatgggtgtgaaggcgtctcaaacaggctttgtggtcctggtgctgctccagtgctgctctgcatacaaactggtctgctactacaccagctggtcccagtaccgggaaggcgatgggagctgcttcccagatgcccttgaccgcttcctctgtacccacatcatctacagctttgccaatataagcaacgatcacatcgacacctgggagtggaatgatgtgacgctctacggcatgctcaacacactcaagaacaggaaccccaacctgaagactctcttgtctgtcggaggatggaactttgggtctcaaagattttccaagatagcctccaacacccagagtcgccggactttcatcaagtcagtaccgccatttctgcgcacccatggctttgatgggctggaccttgcctggctctaccctggacggagagacaaacagcattttaccaccctaatcaaggaaatgaaggccgaatttataaaggaagcccagccagggaaaaagcagctcctgctcagcgcagcactgtctgcggggaaggtcaccattgacagcagctatgacattgccaagatatcccaacacctggatttcattagcatcatgacctacgattttcatggagcctggcgtgggaccacaggccatcacagtcccctgttccgaggtcaggaggatgcaagtcctgacagattcagcaacactgactatgctgtggggtacatgttgaggctgggggctcctgccagtaagctggtgatgggcatccccaccttcgggaggagcttcactctggcttcttctgagactggtgttggagccccaatctcaggaccgggaattccaggccggttcaccaaggaggcagggacccttgcctactatgagatctgtgacttcctccgcggagccacagtccatagaatcctcggccagcaggtcccctatgccaccaagggcaaccagtgggtaggatacgacgaccaggaaagcgtcaaaagcaaggtgcagtacctgaaggacaggcagctggcgggcgccatggtatgggccctggacctggatgacttccagggctccttctgtggccaggatctgcgcttccctctcaccaatgccatcaaggatgcactcgctgcaacgtagccctctgttctgcacacagcacgggggccaaggatgccccgtccccctctggctccagctggccgggagcctgatcacctgccctgctgagtcccaggctgagcctcagtctccctcccttggggcctatgcagaggtccacaacacacagatttgagctcagccctggtgggcagagaggtagggatggggctgtggggatagtgaggcatcgcaatgtaagactcgggattagtacacacttgttgattaatggaaatgtttacagatccccaagcctggcaagggaatttcttcaactccctgccccccagccctccttatcaaaggacaccattttggcaagctctatcaccaaggagccaaacatcctacaagacacagtgaccatactaattataccccctgcaaagcccagcttgaaaccttcacttaggaacgtaatcgtgtcccctatcctacttccccttcctaattccacagctgctcaataaagtacaagagcttaacagtg

SEQ ID NO: 5677 - DNA, 921 bp, Homo sapiens
  source 1..921: mol_type = unassigned DNA
gctcctgctcagcgcagcactgtctgcggggaaggtcaccattgacagcagctatgacattgccaagatatcccaacacctggatttcattagcatcatgacctacgattttcatggagcctggcgtgggaccacaggccatcacagtcccctgttccgaggtcaggaggatgcaagtcctgacagattcagcaacactatctgtgacttcctccgcggagccacagtccatagaatcctcggccagcaggtcccctatgccaccaagggcaaccagtgggtaggatacgacgaccaggaaagcgtcaaaagcaaggtgcagtacctgaaggacaggcagctggcgggcgccatggtatgggccctggacctggatgacttccagggctccttctgtggccaggatctgcgcttccctctcaccaatgccatcaaggatgcactcgctgcaacgtagccctctgttctgcacacagcacgggggccaaggatgccccgtccccctctggctccagctggccgggagcctgatcacctgccctgctgagtcccaggctgagcctcagtctccctcccttggggcctatgcagaggtccacaacacacagatttgagctcagccctggtgggcagagaggtagggatggggctgtggggatagtgaggcatcgcaatgtaagactcgggattagtacacacttgttgattaatggaaatgtttacagatccccaagcctggcaagggaatttcttcaactccctgccccccagccctccttatcaaaggacaccattttggcaagctctatcaccaaggagccaaacatcctacaagacacagtgaccatactaattataccccctgcaaagcccagcttgaaaccttcacttaggaacgtaatcgtgtcccctatcctactt

SEQ ID NO: 5678 - DNA, 1482 bp, Homo sapiens
  source 1..1482: mol_type = unassigned DNA
cgggactggtgctgactgcaaccatgacaaagcttattctcctcacaggtcttgtccttatactgaatttgcagctcggaacagccagctgaaaactctcctggccattggaggctggaacttcgggactgcccctttcactgccatggtttctactcctgagaaccgccagactttcatcacctcagtcatcaaattcctgcgccagtatgagtttgacgggctggactttgactgggagtaccctggctctcgtgggagccctcctcaggacaagcatctcttcactgtcctggtgcagatgaggaaactaaagtacagagaggatttaagcaacttgcccaagatcacacaactagtaggaatcataacttcctctgcagtttggccacagagtccattgcttctaagcattacactaggctgcccgttattactgagaaatgcgtgaagcttttgagcaggaggccaagcagatcaacaagcccaggctgatggtcactgctgcagtagctgctggcatctccaatatccagtctggctatgagatcccccaactgtcacagtacctggactacatccatgtcatgacctacgacctccatggctcctgggagggctacactggagagaacagccccctctacaaatacccgactgacaccggcagcaacgcctacctcaatgtggattatgtcatgaactactggaaggacaatggagcaccagctgagaagctcatcgttggattccctacctatggacacaacttcatcctgagcaacccctccaacactggaattggtgcccccacctctggtgctggtcctgctgggccctatgccaaggagtctgggatctgggcttactacgagatctgtaccttcctgaaaaatggagccactcagggatgggatgcccctcaggaagtgccttatgcctatcagggcaatgtgtgggttggctatgacaacatcaagagcttcgatattaaggctcaatggcttaagcacaacaaatttggaggcgccatggtctgggccattgatctggatgacttcactggcactttctgcaaccagggcaagtttcccctaatctccaccctgaagaaggccctcggcctgcagagtgcaagttgcacggctccagctcagcccattgagccaataactgctgctcccagtggcagcgggaacgggagcgggagtagcagctctggaggcagctcgggaggcagtggattctgtgctgtcagagccaacggcctctaccccgtggcaaataacagaaatgccttctggcactgcgtgaatggagtcacgtaccagcagaactgccaggccgggcttgtcttcgacaccagctgtgattgctgcaactgggcataaacctgacctggtctatattccctagagttccagtctcttttgcttaggacatgttgcccctacctaaagtcctgcaataaaatcagcagtc

SEQ ID NO: 5679 - DNA, 1622 bp, Homo sapiens
  source 1..1622: mol_type = unassigned DNA
tctgggtcaaattgttctctatttagaagcctttgtgataaccacagaatcagaacatataaaaagctctgcgggactggtgctgactgcaaccatgacaaagcttattctcctcacaggtcttgtccttatactgaatttgcagctcggctctgcctaccagctgacatgctacttcaccaactgggcccagtaccggccaggcctggggcgcttcatgcctgacaacatcgacccctgcctctgtacccacctgatctacgcctttgctgggaggcagaacaacgagatcaccaccatcgaatggaatgatgtgactctctaccaagctttcaatggcctgaaaaataagaacagccagctgaaaactctcctggccattggaggctggaacttcgggactgcccctttcactgccatggtttctactcctgagaaccgccagactttcatcacctcagtcatcaaattcctgcgccagtatgagtttgacgggctggactttgactgggagtaccctggctctcgtgggagccctcctcaggacaagcatctcttcactgtcctggtgcaggaaatgcgtgaagcttttgagcaggaggccaagcagatcaacaagcccaggctgatggtcactgctgcagtagctgctggcatctccaatatccagtctggctatgagatcccccaactgtcacagtacctggactacatccatgtcatgacctacgacctccatggctcctgggagggctacactggagagaacagccccctctacaaatacccgactgacaccggcagcaacgcctacctcaatgtggattatgtcatgaactactggaaggacaatggagcaccagctgagaagctcatcgttggattccctacctatggacacaacttcatcctgagcaacccctccaacactggaattggtgcccccacctctggtgctggtcctgctgggccctatgccaaggagtctgggatctgggcttactacgagatctgtaccttcctgaaaaatggagccactcagggatgggatgcccctcaggaagtgccttatgcctatcagggcaatgtgtgggttggctatgacaacatcaagagcttcgatattaaggctcaatggcttaagcacaacaaatttggaggcgccatggtctgggccattgatctggatgacttcactggcactttctgcaaccagggcaagtttcccctaatctccaccctgaagaaggccctcggcctgcagagtgcaagttgcacggctccagctcagcccattgagccaataactgctgctcccagtggcagcgggaacgggagcgggagtagcagctctggaggcagctcgggaggcagtggattctgtgctgtcagagccaacggcctctaccccgtggcaaataacagaaatgccttctggcactgcgtgaatggagtcacgtaccagcagaactgccaggccgggcttgtcttcgacaccagctgtgattgctgcaactgggcataaacctgacctggtctatattccctagagttccagtctcttttgcttaggacatgttgcccctacctaaagtcctgcaataaaatcagcagtcaaaaca

SEQ ID NO: 5680 - DNA, 1214 bp, Homo sapiens
  source 1..1214: mol_type = unassigned DNA
accatgacaaagcttattctcctcacaggtcttgtccttatactgaatttgcagctcggaacagccagctgaaaactctcctggccattggaggctggaacttcgggactgccccatgaggaaactaaagtacagagaggatttaagcaacttgcccaagatcacacaactagtaggaatcataacttcctctgcagtttggccacagagtccattgcttctaagcattacactaggctgcccgttattactgagaaatgcgtgaagcttttgagcaggaggccaagcagatcaacaagcccaggctgatggtcactgctgcagtagctgctggcatctccaatatccagtctggctatgagatcccccaactgtcacagtacctggactacatccatgtcatgacctacgacctccatggctcctgggagggctacactggagagaacagccccctctacaaatacccgactgacaccggcagcaacgcctacctcaatgtggattatgtcatgaactactggaaggacaatggagcaccagctgagaagctcatcgttggattccctacctatggacacaacttcatcctgagcaacccctccaacactggaattggtgcccccacctctggtgctggtcctgctgggccctatgccaaggagtctgggatctgggcttactacgagatctgtaccttcctgaaaaatggagccactcagggatgggatgcccctcaggaagtgccttatgcctatcagggcaatgtgtgggttggctatgacaacatcaagagcttcgatattaaggctcaatggcttaagcacaacaaatttggaggcgccatggtctgggccattgatctggatgacttcactggcactttctgcaaccagggcaagtttcccctaatctccaccctgaagaaggccctcggcctgcagagtgcaagttgcacggctccagctcagcccattgagccaataactgctgctcccagtggcagcgggaacgggagcgggagtagcagctctggaggcagctcgggaggcagtggattctgtgctgtcagagccaacggcctctaccccgtggcaaataacagaaatgccttctggcactgcgtgaatggagtcacgtaccagcagaactgccaggccgggcttgtcttcgacaccagctgtgattgctgcaactgggcataaacctgacct

SEQ ID NO: 5681 - DNA, 1625 bp, Homo sapiens
  source 1..1625: mol_type = unassigned DNA
gctttccagtctggtggtgaatcctccatagtctgaagcctttgtgataaccacagaatcagaacatataaaaagctctgcgggactggtgctgactgcaaccatgacaaagcttattctcctcacaggtcttgtccttatactgaatttgcagctcggctctgcctaccagctgacatgctacttcaccaactgggcccagtaccggccaggcctggggcgcttcatgcctgacaacatcgacccctgcctctgtacccacctgatctacgcctttgctgggaggcagaacaacgagatcaccaccatcgaatggaatgatgtgactctctaccaagctttcaatggcctgaaaaataagaacagccagctgaaaactctcctggccattggaggctggaacttcgggactgcccctttcactgccatggtttctactcctgagaaccgccagactttcatcacctcagtcatcaaattcctgcgccagtatgagtttgacgggctggactttgactgggagtaccctggctctcgtgggagccctcctcaggacaagcatctcttcactgtcctggtgcaggaaatgcgtgaagcttttgagcaggaggccaagcagatcaacaagcccaggctgatggtcactgctgcagtagctgctggcatctccaatatccagtctggctatgagatcccccaactgtcacagtacctggactacatccatgtcatgacctacgacctccatggctcctgggagggctacactggagagaacagccccctctacaaatacccgactgacaccggcagcaacgcctacctcaatgtggattatgtcatgaactactggaaggacaatggagcaccagctgagaagctcatcgttggattccctacctatggacacaacttcatcctgagcaacccctccaacactggaattggtgcccccacctctggtgctggtcctgctgggccctatgccaaggagtctgggatctgggcttactacgagatctgtaccttcctgaaaaatggagccactcagggatgggatgcccctcaggaagtgccttatgcctatcagggcaatgtgtgggttggctatgacaacatcaagagcttcgatattaaggctcaatggcttaagcacaacaaatttggaggcgccatggtctgggccattgatctggatgacttcactggcactttctgcaaccagggcaagtttcccctaatctccaccctgaagaaggccctcggcctgcagagtgcaagttgcacggctccagctcagcccattgagccaataactgctgctcccagtggcagcgggaacgggagcgggagtagcagctctggaggcagctcgggaggcagtggattctgtgctgtcagagccaacggcctctaccccgtggcaaataacagaaatgccttctggcactgcgtgaatggagtcacgtaccagcagaactgccaggccgggcttgtcttcgacaccagctgtgattgctgcaactgggcataaacctgacctggtctatattccctagagttccagtctcttttgcttaggacatgttgcccctacctaaagtcctgcaataaaatcagcagtc

SEQ ID NO: 5682 - DNA, 1354 bp, Homo sapiens
  source 1..1354: mol_type = unassigned DNA
gaaacctcctcgtctgtgcacgaacaggtggccgactctggagcccaggctgttgctttccagtctggtggtgaatcctccatagtctggaacagccagctgaaaactctcctggccattggaggctggaacttcgggactgcccctttcactgccatggtttctactcctgagaaccgccagactttcatcacctcagtcatcaaattcctgcgccagtatgagtttgacgggctggactttgactgggagtaccctggctctcgtgggagccctcctcaggacaagcatctcttcactgtcctggtgcaggaaatgcgtgaagcttttgagcaggaggccaagcagatcaacaagcccaggctgatggtcactgctgcagtagctgctggcatctccaatatccagtctggctatgagatcccccaactgtcacagtacctggactacatccatgtcatgacctacgacctccatggctcctgggagggctacactggagagaacagccccctctacaaatacccgactgacaccggcagcaacgcctacctcaatgtggattatgtcatgaactactggaaggacaatggagcaccagctgagaagctcatcgttggattccctacctatggacacaacttcatcctgagcaacccctccaacactggaattggtgcccccacctctggtgctggtcctgctgggccctatgccaaggagtctgggatctgggcttactacgagatctgtaccttcctgaaaaatggagccactcagggatgggatgcccctcaggaagtgccttatgcctatcagggcaatgtgtgggttggctatgacaacatcaagagcttcgatattaaggctcaatggcttaagcacaacaaatttggaggcgccatggtctgggccattgatctggatgacttcactggcactttctgcaaccagggcaagtttcccctaatctccaccctgaagaaggccctcggcctgcagagtgcaagttgcacggctccagctcagcccattgagccaataactgctgctcccagtggcagcgggaacgggagcgggagtagcagctctggaggcagctcgggaggcagtggattctgtgctgtcagagccaacggcctctaccccgtggcaaataacagaaatgccttctggcactgcgtgaatggagtcacgtaccagcagaactgccaggccgggcttgtcttcgacaccagctgtgattgctgcaactgggcataaacctgacctggtctatattccctagagttccagtctcttttgcttaggacatgttgcccctacctaaagtcctgcaataaaatcagcagtc

SEQ ID NO: 5683 - DNA, 1320 bp, Homo sapiens
  source 1..1320: mol_type = unassigned DNA
cttattctcctcacaggtcttgtccttatactgaatttgcagctcggaacagccagctgaaaactctcctggccattggaggctggaacttcgggactgcccctttcactgccatggtttctactcctgagaaccgccagactttcatcacctcagtcatcaaattcctgcgccagtatgagtttgacgggctggactttgactgggagtaccctggctctcgtgggagccctcctcaggacaagcatctcttcactgtcctggtgcaggaaatgcgtgaagcttttgagcaggaggccaagcagatcaacaagcccaggctgatggtcactgctgcagtagctgctggcatctccaatatccagtctggctatgagatcccccaactgtcacagtacctggactacatccatgtcatgacctacgacctccatggctcctgggagggctacactggagagaacagccccctctacaaatacccgactgacaccggcagcaacgcctacctcaatgtggattatgtcatgaactactggaaggacaatggagcaccagctgagaagctcatcgttggattccctacctatggacacaacttcatcctgagcaacccctccaacactggaattggtgcccccacctctggtgctggtcctgctgggccctatgccaaggagtctgggatctgggcttactacgagatctgtaccttcctgaaaaatggagccactcagggatgggatgcccctcaggaagtgccttatgcctatcagggcaatgtgtgggttggctatgacaacatcaagagcttcgatattaaggctcaatggcttaagcacaacaaatttggaggcgccatggtctgggccattgatctggatgacttcactggcactttctgcaaccagggcaagtttcccctaatctccaccctgaagaaggccctcggcctgcagagtgcaagttgcacggctccagctcagcccattgagccaataactgctgctcccagtggcagcgggaacgggagcgggagtagcagctctggaggcagctcgggaggcagtggattctgtgctgtcagagccaacggcctctaccccgtggcaaataacagaaatgccttctggcactgcgtgaatggagtcacgtaccagcagaactgccaggccgggcttgtcttcgacaccagctgtgattgctgcaactgggcataaacctgacctggtctatattccctagagttccagtctcttttgcttaggacatgttgcccctacctaaagtcctgcaataaaatcagcagtcaaaacatga

SEQ ID NO: 5684 - DNA, 1482 bp, Homo sapiens; identical to SEQ ID NO: 5678
  source 1..1482: mol_type = unassigned DNA

SEQ ID NO: 5685 - DNA, 1188 bp, Homo sapiens
  source 1..1188: mol_type = unassigned DNA
gaaacctcctcgtctgtgcacgaacaggtggccgactctggagcccaggctgttgctttccagtctggtggtgaatcctccatagtctggaacagccagctgaaaactctcctggccattggaggctggaacttcgggactgccccgaaatgcgtgaagcttttgagcaggaggccaagcagatcaacaagcccaggctgatggtcactgctgcagtagctgctggcatctccaatatccagtctggctatgagatcccccaactgtcacagtacctggactacatccatgtcatgacctacgacctccatggctcctgggagggctacactggagagaacagccccctctacaaatacccgactgacaccggcagcaacgcctacctcaatgtggattatgtcatgaactactggaaggacaatggagcaccagctgagaagctcatcgttggattccctacctatggacacaacttcatcctgagcaacccctccaacactggaattggtgcccccacctctggtgctggtcctgctgggccctatgccaaggagtctgggatctgggcttactacgagatctgtaccttcctgaaaaatggagccactcagggatgggatgcccctcaggaagtgccttatgcctatcagggcaatgtgtgggttggctatgacaacatcaagagcttcgatattaaggctcaatggcttaagcacaacaaatttggaggcgccatggtctgggccattgatctggatgacttcactggcactttctgcaaccagggcaagtttcccctaatctccaccctgaagaaggccctcggcctgcagagtgcaagttgcacggctccagctcagcccattgagccaataactgctgctcccagtggcagcgggaacgggagcgggagtagcagctctggaggcagctcgggaggcagtggattctgtgctgtcagagccaacggcctctaccccgtggcaaataacagaaatgccttctggcactgcgtgaatggagtcacgtaccagcagaactgccaggccgggcttgtcttcgacaccagctgtgattgctgcaactgggcataaacctgacctggtctatattccctagagttccagtctcttttgcttaggacatgttgcccctacctaaagtcctgcaataaaatcagcagtc

SEQ ID NO: 5686 - DNA, 977 bp, Homo sapiens
  source 1..977: mol_type = unassigned DNA
atgacaaagcttattctcctcacaggtcttgtccttatactgaatttgcagctcggaacagccagctgaaaactctcctggccattggaggctggaacttcgggactgccccgaaatgcgtgaagcttttgagcaggaggccaagcagatcaacaagcccaggctgatggtcactgctgcagtagctgctggcatctccaatatccagtctggctatgagatcccccaactgtcacagtacctggactacatccatgtcatgacctacgacctccatggctcctgggagggctacactggagagaacagccccctctacaaatacccgactgacaccggcagcaacgcctacctcaatgtggattatgtcatgaactactggaaggacaatggagcaccagctgagaagctcatcgttggattccctacctatggacacaacttcatcctgagcaacccctccaacactggaattggtgcccccacctctggtgctggtcctgctgggccctatgccaaggagtctgggatctgggcttactacgagatctgtaccttcctgaaaaatggagccactcagggatgggatgcccctcaggaagtgccttatgcctatcagggcaatgtgtgggttggctatgacaacatcaagagcttcgatattaaggctcaatggcttaagcacaacaaatttggaggcgccatggtctgggccattgatctggatgacttcactggcactttctgcaaccagggcaagtttcccctaatctccaccctgaagaaggccctcggcctgcagagtgcaagttgcacggctccagctcagcccattgagccaataactgctgctcccagtggcagcgggaacgggagcgggagtagcagctctggaggcagctcgggaggcagtggattctgtgctgtcagagccaacggcctctaccccgtggcaaataacagaaatgccttctggc

SEQ ID NO: 5687 - DNA, 3082 bp, Homo sapiens
  source 1..3082: mol_type = unassigned DNA
cgcccacccaggcggtaggaacccactccggcccgctagacctgctgctatgtcccggccgcagcttcgacgctggcgcctcgtctctagcccgccgagcggcgtcccgggtctagcgctgctggcgctgctggcgctgctggcgctgcggctcgcggccgggaccgactgcccatgcccggagcctgagctctgccgcccgattcgccaccatccagatttcgaggtctttgtgtttgatgttggacagaaaacttggaaatcttatgattggtcacagattacaactgtggcaacatttggaaaatatgactcagaacttatgtgctacgctcattcaaaaggagccagagtagtacttaaaggagatgtatccttaaaggatatcattgatcctgctttcagagcatcctggatagctcaaaaacttaatttggccaaaacacaatatatggatggaattaatatagatatagagcaagaagttaattgtttatcacctgaatatgatgcattaactgctttagtcaaagaaactacagactctttccatcgtgaaattgagggatcacaggtaacctttgatgtagcttggtctccaaagaacatagacagaagatgctataattatactggaatcgcagatgcttgtgacttcctctttgtgatgtcttatgatgaacaaagtcagatctggtcagaatgtattgcagcagccaatgctccctataatcagacattaactggatataatgactacatcaagatgagcattaatcctaagaaacttgtaatgggtgttccttggtatggttatgattatacctgcctgaatctgtctgaggatcatgtttgtaccattgcaaaagtccctttccggggggctccttgtagtgacgctgcaggacgtcaggtgccctacaaaacgatcatgaagcaaataaatagttctatttctggaaacctatgggataaagatcagcgggctccttattataactataaagatcctgctggccactttcatcaagtatggtatgataaccctcagagtatttctttaaaggcaacatatatacaaaactatcgcttacggggcattggcatgtggaatgcaaactgtcttgactactctggagatgctgtagccaaacagcaaactgaagaaatgtgggaagtcttaaagccaaagctgttacagagatgaacatcttttgtcaaaccattaagagttagaaagatgatctgtatcaacagatctagtttcttgcatttttattatgttgctatatacttttgttatccgtatactaaaaaaaaagaataaataaatgttttgattgtttgaatttgaaaaatacacacgaatgtcctcagtatccaggaacataaaggcaagaagcaagtcaacttacctattaaatattcctctattagatgtttcaacactataatttaattgggaaaaattgctttcagaattttattatgccatatttcccttcattatagtaaaatatatgctcacgaatcaatgctgatttttaaaatatgtataatctgaagtggaaattgtttgcttagagtttttaaaaacctagtctttgaaaagcagtttgtgctatacttttcccccaaccctccaataaatcttaaatttaaaacctacaatgtagtgtctcccctttaggttcatcaaactgatgaaaataatttttctgcttcctgactccatatagtatttatgttctctgaggtacttgaactaaatctttggacagtgagtgagaattaaaaagaatccagaagattaaatgtattcacaaaatagaagaatgtaacagtaatattttgaattggtaagttagaactacctaatattttccaactacattatttttatgaggctcatttgtaaaatttttaataataggaataacttgcagttgaacttgattctgttcactgtcacacttctaattattcatttcttcatttatggacatatataatttatttcttggctagcttgcttacatggttaaatttttctttctacatctgcaatgtatcttttttatttttattttttgtagagacagggtctcgctatgttgtccagatgggtctccaactcctgggctcaagcactcctcctgccttggcttcctaaagagctgggattacaggcatgagctgcattgtgcttttaatgatctaaagacactgattagcttctcaactagttctctttctaaaagatcaattttatacaaataagttttctaaatgtaataaagtctgttttctttctccagggaattaagaacaacattgtgctgcccttattagttcctaattacagattaaaaatctgtatctttgaactctagatttacataaatcctggcttccctgcacattttgcccctgtaaattggaatacatgatgattgaaccatctgttatgagaatattacatttcctatttacacaattgtttgtgacagagtaaaaaccattttcatagtatatgttggatcactgttgtcttcatatttctaaaataaatgaattaaaaaatttaaattcttagatgcttatctctatcatagctcagaatgcaacttcaatacccccattcttttatatttccagatttcttttaattaagatataatgaacaaattaagttaaatgaagtctgtattttcatgcaaatatattagtattcattaatatacatttattctttgcaaatagattttagttatattagctcttaaattgttaaataaattattattgaattttattattaaattattaaaatgaaaattataaaattagcactgtaaaataatatgtaaaggacttggaatgttaaaaataaccattcatcattttgctttatattacatctaatatttcctgaaacattttgtaatacccacatggaaagtggagaaagagaaaccttgtgctttttataaaacattgccaaggagaataatggttaaacaaatctgttcaaatacatatttaaatttttttacaaataaaagttttaaattaacatacc

SEQ ID NO: 5688 - DNA, 3172 bp, Homo sapiens
  source 1..3172: mol_type = unassigned DNA
agcaagagcagaggcttaaggagctacactgggggaaggacaggggcaagcaggccaaggcctggccggggctcggggggagggaatatggagcaatcccggtcacagcagcgtgggggtgaacaaagctggtggggtagtgacccccagtaccagtatatgccctttgaacactgcaccagctacggactgccctctgagaatgggggcctccagcacaggctccggaaggatgcaggcccccgccacaacgtccaccccacacagatttatggccatcacaaagaacaattctcagacagggagcaggacatagggatgcccaagaagacaggctccagttctaccgtggacagcaaggatgaggatcactattctaaatgtcaagattgtatccaccgcctgggacaggtggtgagaagaaaattaggggaagacgggatctttctggtgcttctgggactgctgatggctctggtcagctggagcatggactacgtcagtgccaaaagccttcaggcctacaagtggtcctacgcgcagatgcagcccagccttcctctgcagttcctggtctgggtcaccttcccactagtcctcatcctcttcagcgccctcttctgccacctcatctctccccaggctgttggctctggaatccccgaaatgaagacaatacttcgtggggttgtcctgaaggaatacctcacaatgaaagcctttgtggccaaggttgtcgccctgactgcgggcctgggcagtggcatccccgtggggaaagagggccccttcgtccacattgccagcatctgtgctgctgtcctcagcaaattcatgtctgtgttctgcggggtatatgagcagccatactactactctgatatcctgacggtgggctgtgctgtgggagtcggctgttgttttgggacaccacttggaggagtgctatttagcatcgaggtcacctccacctactttgctgttcggaactactggagaggattctttgcagccacgttcagcgcctttgtgtttcgagtgctggcagtgtggaacaaggatgctgtcaccatcactgctctgttcagaaccaatttccgaatggatttcccctttgacctgaaggaactaccagcttttgctgccatcgggatttgctgtgggctcctgggagctgtatttgtgtatctgcatcgccaagtcatgctcggtgtccgaaagcacaaggccctcagccagtttcttgctaagcaccgcctgctgtatcctggaattgttacctttgtcattgcctcattcaccttcccaccaggaatgggtcaattcatggctggagagttgatgccccgcgaagccatcagtactttgtttgacaacaatacatgggtgaaacacgcgggtgatcctgagagcctgggccagtcagctgtgtggattcacccccgggtcaacgttgtcatcatcatctttctcttcttcgtcatgaagttctggatgtccatcgtggccaccactatgcccataccctgcggaggcttcatgcctgtgtttgtgctaggagctgcatttggaaggctggtaggagaaatcatggccatgctctttcctgatggtattttgtttgatgacatcatctacaagatcctacctgggggctatgcagtaattggagcagcagcgctgactggtgccgtttcccacacagtctccacagctgtgatttgcttcgaattaacgggtcagattgctcacatcctgcccatgatggtggctgttatcttggccaacatggtggcccagagcctgcagccctctctctatgacagcatcatccaggtcaagaagctaccctacttgcctgaccttggctggaaccagctcagcaaatataccatctttgttgaggacatcatggtacgtgatgtgaagtttgtttcagcttcttacacatatggggagttgcgaaccctgctccagaccaccacagtcaagactttaccactggttgactcaaaagattcaatgatcctgctgggctcggtggagcggtcggaactgcaggccctcctgcagcgccacctgtgtcctgagcgcaggctgcgcgcagcccaagagatggcgcggaagttgtcggagctgccttacgacgggaaggcgcggctggctggggaggggctccccggcgcgcctccaggccggcccgagtccttcgcctttgtggatgaggatgaggacgaagacctctctggcaagagcgagcttcctccttcccttgctctccacccctctactactgcccctctgtccccagaagagcccaatgggcctctgcctggccacaaacagcagccggaagcaccagagcctgcaggtcaaagaccctccatcttccagtccctgcttcactgcttgctgggcagagctcgccccacaaagaagaaaacaacccaggattccacagatttagtggataacatgtcacctgaagagattgaggcctgggagcaggagcagctgagccagcctgtctgttttgattcctgctgtattgaccagtctcccttccagctggtggagcagacaaccctgcacaagactcataccctgttttcactccttggcctccacctcgcttacgtgaccagcatggggaagctcaggggcgtcctggccctggaggagctacagaaggccattgaggggcacaccaagtctggggtgcagctccgccctccccttgccagcttccggaacacgacttcaactcgaaagagtaccggggcacctccatcttctgcagagaactggaacctgcctgaggacaggcctggggccactggaacaggggatgtgattgctgcctccccagagacccctgtgccatctccttccccagagccccctctctccctggccccaggcaaggtagagggcgagttggaggagctggagctggtggagagtccagggctggaagaggagctggccgacatcttgcagggccccagcctgcgatccacagacgaggaggatgaggatgaactgatcctttgaccccctcccacgacctcctcataaagaccgtggagaggcccagcctgagggtgaacttgtgtggggcagggtgcgtcctgaatgtggcgaggtcatgccaatgtcgtggcctcttcca

SEQ ID NO: 5689 - DNA, 3290 bp, Homo sapiens
  source 1..3290: mol_type = unassigned DNA
gacgcgagcgggaggctgcgccagcggcgcccgccgggggcccgccgcactctgctctcggcctcccgggctgcggggacgggacggctgccggcgcggactttgcgggccgggagccgagtccaggacagagccggaaccgccgagggaggcgagagggcagtgcgcggagatggcggccgcggcggcggaggaagggatggagccacgggcgctgcagtacgagcagaccctgatgtatggccggtacactcaggaccttggggcctttgccaaagaggaagctgctcggattcgcctgggagggcctgaaccctggaaaggtcccccttcctctcgggctgccccagagctcttggaatatggacggagccgttgcgcccgatgccgcgtctgttctgtccgctgccacaagttcctagtatccagggttggtgaagattggatcttcctggtcctgctggggcttctcatggcattggtcagctgggtcatggactatgccattgctgcctgtctgcaagcccagcagtggatgtcccggggcttgaacaccagcatcttgctccagtacctggcctgggtcacctaccctgttgtcctcatcactttctcagccggattcacacagatcctggcccctcaggctgtcggctctggcatccctgagatgaagaccatcttgcggggagtggtgctgaaagaatacctcacactcaagacctttatagctaaggtcattgggctgacctgcgccctaggcagcgggatgccgcttggcaaagagggcccttttgtgcatatcgcaagcatgtgtgctgcccttctcagcaagttcctctccctctttgggggtatctatgagaatgaatcccggaacacagagatgctggctgccgcctgtgccgtgggggtgggctgctgcttcgcggcacctattggaggcgtcctcttcagcatcgaggtcacctccaccttctttgcagtgcggaactactggcggggcttcttcgctgccaccttcagtgccttcatcttccgggtcttggcagtctggaaccgggatgaagagactattacagccctcttcaaaacccgattccggctcgacttcccctttgacctgcaggagctgccagcctttgctgtcattggtattgctagtggcttcggtggagccctctttgtctacctgaaccggaagattgtccaggtgatgcggaagcagaaaaccatcaatcgcttcctcatgaggaaacgcctgctcttcccggctctggtgaccctgctcatctccacgctgaccttcccccctggctttggacagttcatggctggacagctctcacagaaagagacgctggtcaccctgtttgacaatcggacgtgggtccgccagggcctggtggaggagctagaaccacccagcacctcacaggcctggaacccaccacgtgccaacgtcttcctcaccctggtcatcttcattctcatgaagttctggatgtctgcactggccaccaccatcccagttccctgtggggccttcatgcctgtctttgtcattggagcagcatttgggcgtctggtgggtgaaagcatggctgcctggttcccagatggaattcatacggacagcagcacctaccggattgtgcctgggggctacgctgtggtcggggcagctgcgctggcaggagcggtgacacacacagtgtccacggctgtgatcgtgttcgagctcacaggccagattgcccacatcctgcctgtcatgatcgccgtcatcctggccaacgctgtcgcccagagtctgcagccctccctctatgacagcatcatccgaatcaagaaactgccctacctgcctgagctcggctggggccgccaccagcagtaccgggtgcgtgtggaggacatcatggtgcgggatgttccccatgtggccctcagctgcaccttccgggacctgcgtttggcactgcacaggaccaagggccgaatgctggccctagtggagtcccctgagtccatgattctgctgggctccatcgagcgttcacaggtggtggcattgttgggggcccagctgagcccagcccgccggcggcagcacatgcaggagcgcagagccacccagacctctccactatctgatcaggagggtccccctacccctgaggcttctgtctgcttccaggtgaacacagaagactcagccttcccagcagcccggggggagacccacaagcccctaaagcctgcactcaagagggggcccagtgtcaccaggaacctcggagagagtcccacagggagcgcagagtcggcaggcatcgccctccggagcctcttctgtggcagtccaccccctgaggctgcttcggagaagttggaatcctgtgagaagcgcaagctgaagcgtgtccgaatctccctggcaagtgacgcggacctggaaggcgagatgagccctgaagagattctggagtgggaggagcagcaactagatgaacctgtcaacttcagtgactgcaaaattgatcctgctcccttccagctggtggagcggacctctttgcacaagactcacactatcttctcactgctgggagtggaccatgcttatgtcaccagtattggcagactcattggaatcgttactctaaaggagctccggaaggccatcgagggctctgtcacagcacagggtgtgaaagtccggccgcccctcgccagcttccgagacagtgccaccagcagcagtgacacggagaccactgaggtgcatgcactctgggggccccactcccgtcatggcctcccccgggagggcagcccttccgacagcgacgacaaatgccaatgagcccctcgtgggtggcctaggatggtgctagccatgcccgtcagcccagaatgtgcatctttcattccttctgccttcggaaggcaggaggcagctacagctggaggctgcaccccagccccctccagacctggggtgccagcttctcccagttcatcctacctggaatctgacccactacccacctgcaacaagtcttccagaggcaggaagataggccctgccctggcaggatgggttggggtcacttgacccctgctccccctttgaggggaaaggggtggaactaagatgggtttataactggaacctccaatgaccagatgtatatagagatttacaaagatttttatattaatttaataaaacaaattcttaaatagaacaaaataaacacctaatgagccacttatatatagaa

SEQ ID NO: 5690 - DNA, 3160 bp, Homo sapiens
  source 1..3160: mol_type = unassigned DNA
actctgctctcggcctcccgggctgcggggacgggacggctgccggcgcggactttgcgggccgggagccgagtccaggacagagccggaaccgccgagggaggcgagagggcagtgcgcggagatggcggccgcggcggcggaggaagggatggagccacgggcgctgcagtacgagcagaccctgatgtatggccggtacactcaggaccttggggcctttgccaaagaggaagctgctcggattcgcctgggagggcctgaaccctggaaaggtcccccttcctctcgggctgccccagagctcttggaatatggacggagccgttgcgcccgatgccgcgtctgttctgtccgctgccacaagttcctagtatccagggttggtgaagattggatcttcctggtcctgctggggcttctcatggcattggtcagctgggtcatggactatgccattgctgcctgtctgcaagcccagcagtggatgtcccggggcttgaacaccagcatcttgctccagtacctggcctgggtcacctaccctgttgtcctcatcactttctcagccggattcacacagatcctggcccctcaggctgtcggctctggcatccctgagatgaagaccatcttgcggggagtggtgctgaaagaatacctcacactcaagacctttatagctaaggtcattgggctgacctgcgccctaggcagcgggatgccgcttggcaaagagggcccttttgtgcatatcgcaagcatgtgtgctgcccttctcagcaagttcctctccctctttgggggtatctatgagaatgaatcccggaacacagagatgctggctgccgcctgtgccgtgggggtgggctgctgcttcgcggcacctattggaggcgtcctcttcagcatcgaggtcacctccaccttctttgcagtgcggaactactggcggggcttcttcgctgccaccttcagtgccttcatcttccgggtcttggcagtctggaaccgggatgaagagactattacagccctcttcaaaacccgattccggctcgacttcccctttgacctgcaggagctgccagcctttgctgtcattggtattgctagtggcttcggtggagccctctttgtctacctgaaccggaagattgtccaggtgatgcggaagcagaaaaccatcaatcgcttcctcatgaggaaacgcctgctcttcccggctctggtgaccctgctcatctccacgctgaccttcccccctggctttggacagttcatggctggacagctctcacagaaagagacgctggtcaccctgtttgacaatcggacgtgggtccgccagggcctggtggaggagctagaaccacccagcacctcacaggcctggaacccaccacgtgccaacgtcttcctcaccctggtcatcttcattctcatgaagcatttgggcgtctggtgggtgaaagcatggctgcctggttcccagatggaattcatacggacagcagcacctaccggattgtgcctgggggctacgctgtggtcggggcagctgcgctggcaggagcggtgacacacacagtgtccacggctgtgatcgtgttcgagctcacaggccagattgcccacatcctgcctgtcatgatcgccgtcatcctggccaacgctgtcgcccagagtctgcagccctccctctatgacagcatcatccgaatcaagaaactgccctacctgcctgagctcggctggggccgccaccagcagtaccgggtgcgtgtggaggacatcatggtgcgggatgttccccatgtggccctcagctgcaccttccgggacctgcgtttggcactgcacaggaccaagggccgaatgctggccctagtggagtcccctgagtccatgattctgctgggctccatcgagcgttcacaggtggtggcattgttgggggcccagctgagcccagcccgccggcggcagcacatgcaggagcgcagagccacccagacctctccactatctgatcaggagggtccccctacccctgaggcttctgtctgcttccaggtgaacacagaagactcagccttcccagcagcccggggggagacccacaagcccctaaagcctgcactcaagagggggcccagtgtcaccaggaacctcggagagagtcccacagggagcgcagagtcggcaggcatcgccctccggagcctcttctgtggcagtccaccccctgaggctgcttcggagaagttggaatcctgtgagaagcgcaagctgaagcgtgtccgaatctccctggcaagtgacgcggacctggaaggcgagatgagccctgaagagattctggagtgggaggagcagcaactagatgaacctgtcaacttcagtgactgcaaaattgatcctgctcccttccagctggtggagcggacctctttgcacaagactcacactatcttctcactgctgggagtggaccatgcttatgtcaccagtattggcagactcattggaatcgttactctaaaggagctccggaaggccatcgagggctctgtcacagcacagggtgtgaaagtccggccgcccctcgccagcttccgagacagtgccaccagcagcagtgacacggagaccactgaggtgcatgcactctgggggccccactcccgtcatggcctcccccgggagggcagcccttccgacagcgacgacaaatgccaatgagcccctcgtgggtggcctaggatggtgctagccatgcccgtcagcccagaatgtgcatctttcattccttctgccttcggaaggcaggaggcagctacagctggaggctgcaccccagccccctccagacctggggtgccagcttctcccagttcatcctacctggaatctgacccactacccacctgcaacaagtcttccagaggcaggaagataggccctgccctggcaggatgggttggggtcacttgacccctgctccccctttgaggggaaaggggtggaactaagatgggtttataactggaacctccaatgaccagatgtatatagagatttacaaagatttttatattaatttaataaaacaaattcttaaatagaacaaaataaacacctaatgagccacttatat

SEQ ID NO: 5691 - DNA, 3635 bp, Homo sapiens
  source 1..3635: mol_type = unassigned DNA
gtcacgcgtcgacgctggggcgtacctttcgggctcctgactcctgccgcttctcttccccttccgtgggtcagggccggtccggtccggaacctgcagcccctttcccagtgttctagttcgcccgtgacccggaataatgagcaaggagggtgtggtgggttgaaagccatcctactttactcccgagttagagcatggattcagttttagtcttaagggggaagtgagattggagatttttatttttaattttgggcagaagcaggttgactctagggatctccagagcgagaggatttaacttcatgttgctcccgtgtttgaaggaggacaataaaagtcccaccgggcaaaattttcgtaacctctgcggtagaaaacgtcaggtatcttttaaatcgcgatagttttcgctgtgtcaggctttcttcggtggagctccgagggtagctaggttctaggtttgaaacagatgcagaatccaaaggcagcgcaaaaaacagccaccgattttgctatgtctctgagctgcgagataatcagacagctaaatggagtctgagcagctgttccatagaggctactatagaaacagctacaacagtataacaagtgcaagtagtgatgaggaacttttagatggagcaggtgttattatggactttcaaacatctgaagatgacaatttattagatggtgacactgcagttggaactcattatacaatgacaaatggaggcagcattaacagttctacacatttactggatcttttggatgaaccaattccaggtgttggtacatatgatgatttccatactattgattgggtgcgagaaaaatgtaaagacagagaaaggcatagacggatcaacagcaaaaagaaagaatcagcatgggaaatgacaaaaagtttgtatgatgcgtggtcaggatggctagtagtaacactaacaggattggcatcaggggcactggccggattaatagacattgctgccgattggatgactgacctaaaggagggcatttgccttagtgcgttgtggtacaaccacgaacagtgctgttggggatctaatgaaacaacatttgaagagagggataaatgtccacagtggaaaacatgggcagaattaatcataggtcaagcagagggtcctggttcttatatcatgaactacataatgtacatcttctgggccttgagttttgcctttcttgcagtttccctggtaaaggtatttgctccatatgcctgtggctctggaattccagagattaaaactattttaagtggattcatcatcagaggttacttgggaaaatggactttaatgattaaaaccatcacattagtcctggctgtggcatcaggtttgagtttaggaaaagaaggtcccctggtacatgttgcctgttgctgcggaaatatcttttcctacctctttccaaagtatagcacaaacgaagctaaaaaaagggaggtgctatcagctgcctcagctgcaggggtttctgtagcttttggtgcaccaattggaggagttctttttagcctggaagaggttagctattattttcctctcaaaactttatggagatcattttttgctgctttagtggctgcatttgttttgaggtccatcaatccatttggtaacagccgtctggtccttttttatgtggagtatcatacaccatggtacctttttgaactgtttccttttattcttctaggggtatttggagggctttggggagcctttttcattagggcaaatattgcctggtgtcgtcgacgcaagtccacgaaatttggaaagtatcccgttctggaagtcattattgttgcagccattactgctgtgatagccttccctaatccatacactaggctaaacaccagtgaactgatcaaagagctttttacagactgtggtcccctggaatcctcttctctttgtgactacagaaatgacatgaatgccagtaaaattgtcgatgacattcctgatcgtccagcaggcattggagtatattcagctatatggcagttatgcctggcactcatatttaaaatcataatgacagtattcacttttggcatcaaggttccatcaggcttgttcatccccagcatggccattggagcgatcgcaggaaggattgtggggattgcggtggagcagcttgcctactatcaccacgactggtttatctttaaggagtggtgtgaggtcggggctgattgcattacacctggcctttatgccatggttggtgctgctgcatgcttaggtggtgtgacaagaatgactgtctccctggtggttattgtttttgagcttactggaggcttggaatatattgttccccttatggctgcagtcatgaccagtaaatgggttggagatgcctttggcagggaaggcatttatgaagcacacatccgattaaatggataccctttcttggatgcaaaagaagaattcactcataccaccctggctgctgacgttatgagacctcgaaggaatgatcctcccttagctgtcctgacacaggacaatatgacagtggatgatatagaaaacatgattaatgaaaccagctacaatggatttcctgtcataatgtcaaaagaatctcagagattagtgggatttgccctcagaagagacctgacaattgcaatagaaagtgccaggaaaaaacaagaaggtatcgttggcagttctcgggtgtgttttgcacagcacaccccatctcttccagcagaaagtcctcggccattgaagcttcgaagcattcttgacatgagcccttttacagtgacagaccacaccccaatggagatcgtggtggatattttccgaaagctgggactgaggcagtgccttgtaactcacaatgggattgtcttggggatcatcacaaagaagaacatattagagcatctcgagcaactaaagcagcacgtcgaacccttggcgcctccttggcattataacaaaaaaagatatcctccggcatatggcccagacggcaaaccaagaccccgcttcaataatgttcaactgaatctcacagatgaggagagagaagaaacggaagaggaagtttatttgttgaatagcacaactctttaacctgagggagtcatctacttttttttcctcctttacaaaaaaagaaaggaaatataaaagccgggtttttgcaacatggtttgcaaataatgctggtggaatggaggagttgtttggggagggaaaggagagagaaggaaaggagtgaggtatttcccgtctaacagaaagcagcgtatcaactcctattgttctgcactggatgcattcagctgaggatgtgcctgatagtgcaggcttgcgcctcaacagagatgacagcagagtcctcgagcacctggcctgttgctccaacattgcaaagacacattatcagtccctatttctagagggattactttgaattgagccatctataaaactgcaaggtcttgcccttttttttaatcaaaactgttctgtttaattcatgaattgtatagttaagcattacctttctacattccagaagagcctttatttctctctctctctctctct

SEQ ID NO: 5692 - DNA, 3208 bp, Homo sapiens
  source 1..3208: mol_type = unassigned DNA
acgcgtcgacgctggggcgtacctttcgggctcctgactcctgccgcttctcttccccttccgtgggtcagggccggtccggtccggaacctgcagcccctttcccagtgttctagttcgcccgtgacccggaataatgagcaaggagggtgtggtgggttgaaagccatcctactttactcccgagttagagcatggattcagttttagtcttaagggggaagtgagattggagatttttatttttaattttgggcagaagcaggttgactctagggatctccagagcgagaggatttaacttcatgttgctcccgtgtttgaaggaggacaataaaagtcccaccgggcaaaattttcgtaacctctgcggtagaaaacgtcaggtatcttttaaatcgcgatagttttcgctgtgtcaggctttcttcggtggagctccgagggtagctaggttctaggtttgaaacagatgcagaatccaaaggcagcgcaaaaaacagccaccgattttgctatgtctctgagctgcgagataatcagacagctaaatggagtctgagcagctgttccatagaggctactatagaaacagctacaacagtataacaagtgcaagtagtgatgaggaacttttagatggagcaggtgttattatggactttcaaacatctgaagatgacaatttattagatggtgacactgcagttggaactcattatacaatgacaaatggaggcagcattaacagttctacacatttactggatcttttggatgaaccaattccaggtgttggtacatatgatgatttccatactattgattgggtgcgagaaaaatgtaaagacagagaaaggcatagacggatcaacagcaaaaagaaagaatcagcatgggaaatgacaaaaagtttgtatgatgcgtggtcaggatggctagtagtaacactaacaggattggcatcaggggcactggccggattaatagacattgctgccgattggatgactgacctaaaggagggcatttgccttagtgcgttgtggtacaaccacgaacagtgctgttggggatctaatgaaacaacatttgaagagagggataaatgtccacagtggaaaacatgggcagaattaatcataggtcaagcagagggtcctggttcttatatcatgaactacataatgtacatcttctgggccttgagttttgcctttcttgcagtttccctggtaaaggtatttgctccatatgcctgtggctctggaattccagagattaaaactattttaagtggattcatcatcagaggttacttgggaaaatggactttaatgattaaaaccatcacattagtcctggctgtggcatcaggtttgagtttaggaaaagaaggtcccctggtacatgttgcctgttgctgcggaaatatcttttcctacctctttccaaagtatagcacaaacgaagctaaaaaaagggaggttagctattattttcctctcaaaactttatggagatcattttttgctgctttagtggctgcatttgttttgaggtccatcaatccatttggtaacagccgtctggtccttttttatgtggagtatcatacaccatggtacctttttgaactgtttccttttattcttctaggggtatttggagggctttggggagcctttttcattagggcaaatattgcctggtgtcgtcgacgcaagtccacgaaatttggaaagtatcccgttctggaagtcattattgttgcagccattactgctgtgatagccttccctaatccatacactaggctaaacaccagtgaactgatcaaagagctttttacagactgtggtcccctggaatcctcttctctttgtgactacagaaatgacatgaatgccagtaaaattgtcgatgacattcctgatcgtccagcaggcattggagtatattcagctatatggcagttatgcctggcactcatatttaaaatcataatgacagtattcacttttggcatcaaggttccatcaggcttgttcatccccagcatggccattggagcgatcgcaggaaggattgtggggattgcggtggagcagcttgcctactatcaccacgactggtttatctttaaggagtggtgtgaggtcggggctgattgcattacacctggcctttatgccatggttggtgctgctgcatgcttaggtggtgtgacaagaatgactgtctccctggtggttattgtttttgagcttactggaggcttggaatatattgttccccttatggctgcagtcatgaccagtaaatgggttggagatgcctttggcagggaaggcatttatgaagcacacatccgattaaatggataccctttcttggatgcaaaagaagaattcactcataccaccctggctgctgacgttatgagacctcgaaggaatgatcctcccttagctgtcctgacacaggacaatatgacagtggatgatatagaaaacatgattaatgaaaccagctacaatggatttcctgtcataatgtcaaaagaatctcagagattagtgggatttgccctcagaagagacctgacaattgcaatagaaagtgccaggaaaaaacaagaaggtatcgttggcagttctcgggtgtgttttgcacagcacaccccatctcttccagcagaaagtcctcggccattgaagcttcgaagcattcttgacatgagcccttttacagtgacagaccacaccccaatggagatcgtggtggatattttccgaaagctgggactgaggcagtgccttgtaactcacaatgggcgcctccttggcattataacaaaaaaagatatcctccggcatatggcccagacggcaaaccaagaccccgcttcaataatgttcaactgaatctcacagatgaggagagagaagaaacggaagaggaagtttatttgttgaatagcacaactctttaacctgagggagtcatctacttttttttcctcctttacaaaaaaagaaaggaaatataaaagccgggtttttgcaacatggtttgcaaataatgctggtggaatggaggagttgtttggggagggaaaggagagagaaggaaaggagtgaggtatttcccgtctaacagaaagcagcgtatcaactcctattgttctgcactggatgcattcagc

SEQ ID NO: 5693 - DNA, 3157 bp, Homo sapiens
  source 1..3157: mol_type = unassigned DNA
ttgctcccgtgtttgaaggaggacaataaaagtcccaccgggcaaaattttcgtaacctctgcggtagaaaacgtcaggtatcttttaaatcgcgatagttttcgctgtgtcaggctttcttcggtggagctccgagggtagctaggttctaggtttgaaacagatgcagaatccaaaggcagcgcaaaaaacagccaccgattttgctatgtctctgagctgcgagataatcagacagctaaatggagtctgagcagctgttccatagaggctactatagaaacagctacaacagtataacaagtgcaagtagtgatgaggaacttttagatggagcaggtgttattatggactttcaaacatctgaagatgacaatttattagatggtgacactgcagttgggagagtctcactatgttgtccaggctggtctccaactcctgggctcaagcaaccctcctgccttggcctcccaagtagctgagattacaggaactcattatacaatgacaaatggaggcagcattaacagttctacacatttactggatcttttggatgaaccaattccaggtgttggtacatatgatgatttccatactattgattgggtgcgagaaaaatgtaaagacagagaaaggcatagacggatcaacagcaaaaagaaagaatcagcatgggaaatgacaaaaagtttgtatgatgcgtggtcaggatggctagtagtaacactaacaggattggcatcaggggcactggccggattaatagacattgctgccgattggatgactgacctaaaggagggcatttgccttagtgcgttgtggtacaaccacgaacagtgctgttggggatctaatgaaacaacatttgaagagagggataaatgtccacagtggaaaacatgggcagaattaatcataggtcaagcagagggtcctggttcttatatcatgaactacataatgtacatcttctgggccttgagttttgcctttcttgcagtttccctggtaaaggtatttgctccatatgcctgtggctctggaattccagagattaaaactattttaagtggattcatcatcagaggttacttgggaaaatggactttaatgattaaaaccatcacattagtcctggctgtggcatcaggtttgagtttaggaaaagaaggtcccctggtacatgttgcctgttgctgcggaaatatcttttcctacctctttccaaagtatagcacaaacgaagctaaaaaaagggaggtgctatcagctgcctcagctgcaggggtttctgtagcttttggtgcaccaattggaggagttctttttagcctggaagaggttagctattattttcctctcaaaactttatggagatcattttttgctgctttagtggctgcatttgttttgaggtccatcaatccatttggtaacagccgtctggtccttttttatgtggagtatcatacaccatggtacctttttgaactgtttccttttattcttctaggggtatttggagggctttggggagcctttttcattagggcaaatattgcctggtgtcgtcgacgcaagtccacgaaatttggaaagtatcccgttctggaagtcattattgttgcagccattactgctgtgatagccttccctaatccatacactaggctaaacaccagtgaactgatcaaagagctttttacagactgtggtcccctggaatcctcttctctttgtgactacagaaatgacatgaatgccagtaaaattgtcgatgacattcctgatcgtccagcaggcattggagtatattcagctatatggcagttatgcctggcactcatatttaaaatcataatgacagtattcacttttggcatcaaggttccatcaggcttgttcatccccagcatggccattggagcgatcgcaggaaggattgtggggattgcggtggagcagcttgcctactatcaccacgactggtttatctttaaggagtggtgtgaggtcggggctgattgcattacacctggcctttatgccatggttggtgctgctgcatgcttaggtggtgtgacaagaatgactgtctccctggtggttattgtttttgagcttactggaggcttggaatatattgttccccttatggctgcagtcatgaccagtaaatgggttggagatgcctttggcagggaaggcatttatgaagcacacatccgattaaatggataccctttcttggatgcaaaagaagaattcactcataccaccctggctgctgacgttatgagacctcgaaggaatgatcctcccttagctgtcctgacacaggacaatatgacagtggatgatatagaaaacatgattaatgaaaccagctacaatggatttcctgtcataatgtcaaaagaatctcagagattagtgggatttgccctcagaagagacctgacaattgcaatagaaagtgccaggaaaaaacaagaaggtatcgttggcagttctcgggtgtgttttgcacagcacaccccatctcttccagcagaaagtcctcggccattgaagcttcgaagcattcttgacatgagcccttttacagtgacagaccacaccccaatggagatcgtggtggatattttccgaaagctgggactgaggcagtgccttgtaactcacaatgggcgcctccttggcattataacaaaaaaagatatcctccggcatatggcccagacggcaaaccaagaccccgcttcaataatgttcaactgaatctcacagatgaggagagagaagaaacggaagaggaagtttatttgttgaatagcacaactctttaacctgagggagtcatctacttttttttcctcctttacaaaaaaagaaaggaaatataaaagccgggtttttgcaacatggtttgcaaataatgctggtggaatggaggagttgtttggggagggaaaggagagagaaggaaaggagtgaggtatttcccgtctaacagaaagcagcgtatcaactcctattgttctgcactggatgcattcagctgaggatgtgcctgatagtgcaggcttgcgcctcaacagagatgacagcagagtcctcgagcacctggcctgttgctccaacatt

SEQ ID NO: 5694 - DNA, 582 bp, Homo sapiens
  source 1..582: mol_type = unassigned DNA
agcgcgtggaaggcggcacgcagcggaggcggctgggaaggagcaataatcagacagctaaatggagtctgagcagctgttccatagaggctactatagaaacagctacaacagtataacaagtgcaagtagtgatgaggaacttttagatggagcaggtgttattatggactttcaaacatctgaagatgacaatttattagatggtgacactgcagttggaactcattatacaatgacaaatggaggcagcattaacagttctacacatttactggatcttttggatgaaccaattccaggtgttggtacatatgatgatttccatactattgattgggtgcgagaaaaatgtaaagacagagaaaggcatagacggatcaacagcaaaaagaaagaatcagcatgggaaatgacaaaaagtttgtatgatgcgtggtcaggatggctagtagtaacactaacaggattggcatcaggggcactggccggattaatagacattgctgccgattggatgactgacctaaaggagggcatttgccttagtgcgttgtggtacaaccacgaacagtgctgttg

SEQ ID NO: 5695 - DNA, 563 bp, Homo sapiens
  source 1..563: mol_type = unassigned DNA
tttcgggctcctgactcctgccgcttctcttccccttccgtgggtcagggccggtccggtccggaacctgcagcccctttcccagtgttctagttcgcccgtgacccggaataatgagcaaggagggtgtgataatcagacagctaaatggagtctgagcagctgttccatagaggctactatagaaacagctacaacagtataacaagtgcaagtagtgatgaggaacttttagatggagcaggtgttattatggactttcaaacatctgaagatgacaatttattagatggtgacactgcagttggaactcattatacaatgacaaatggaggcagcattaacagttctacacatttactggatcttttggatgaaccaattccaggtgttggtacatatgatgatttccatactattgattgggtgcgagaaaaatgtaaagacagagaaaggcatagacggatcaacagcaaaaagaaagaatcagcatgggaaatgacaaaaagtttgtatgatgcgtggtcaggatggctagtagtaacactaacaggattggcatc

SEQ ID NO: 5696 - DNA, 6692 bp, Homo sapiens
  source 1..6692: mol_type = unassigned DNA
gtgacgtcacgcgtcgacgctggggcgtacctttcgggctcctgactcctgccgcttctcttccccttccgtgggtcagggccggtccggtccggaacctgcagcccctttcccagtgttctagttcgcccgtgacccggaataatgagcaaggagggtgtggtgggttgaaagccatcctactttactcccgagttagagcatggattcagttttagtcttaagggggaagtgagattggagatttttatttttaattttgggcagaagcaggttgactctagggatctccagagcgagaggatttaacttcatgttgctcccgtgtttgaaggaggacaataaaagtcccaccgggcaaaattttcgtaacctctgcggtagaaaacgtcaggtatcttttaaatcgcgatagttttcgctgtgtcaggctttcttcggtggagctccgagggtagctaggttctaggtttgaaacagatgcagaatccaaaggcagcgcaaaaaacagccaccgattttgctatgtctctgagctgcgagataatcagacagctaaatggagtctgagcagctgttccatagaggctactatagaaacagctacaacagtataacaagtgcaagtagtgatgaggaacttttagatggagcaggtgttattatggactttcaaacatctgaagatgacaatttattagatggtgacactgcagttggaactcattatacaatgacaaatggaggcagcattaacagttctacacatttactggatcttttggatgaaccaattccaggtgttggtacatatgatgatttccatactattgattgggtgcgagaaaaatgtaaagacagagaaaggcatagacggatcaacagcaaaaagaaagaatcagcatgggaaatgacaaaaagtttgtatgatgcgtggtcaggatggctagtagtaacactaacaggattggcatcaggggcactggccggattaatagacattgctgccgattggatgactgacctaaaggagggcatttgccttagtgcgttgtggtacaaccacgaacagtgctgttggggatctaatgaaacaacatttgaagagagggataaatgtccacagtggaaaacatgggcagaattaatcataggtcaagcagagggtcctggttcttatatcatgaactacataatgtacatcttctgggccttgagttttgcctttcttgcagtttccctggtaaaggtatttgctccatatgcctgtggctctggaattccagagattaaaactattttaagtggattcatcatcagaggttacttgggaaaatggactttaatgattaaaaccatcacattagtcctggctgtggcatcaggtttgagtttaggaaaagaaggtcccctggtacatgttgcctgttgctgcggaaatatcttttcctacctctttccaaagtatagcacaaacgaagctaaaaaaagggaggtgctatcagctgcctcagctgcaggggtttctgtagcttttggtgcaccaattggaggagttctttttagcctggaagaggttagctattattttcctctcaaaactttatggagatcattttttgctgctttagtggctgcatttgttttgaggtccatcaatccatttggtaacagccgtctggtccttttttatgtggagtatcatacaccatggtacctttttgaactgtttccttttattcttctaggggtatttggagggctttggggagcctttttcattagggcaaatattgcctggtgtcgtcgacgcaagtccacgaaatttggaaagtatcccgttctggaagtcattattgttgcagccattactgctgtgatagccttccctaatccatacactaggctaaacaccagtgaactgatcaaagagctttttacagactgtggtcccctggaatcctcttctctttgtgactacagaaatgacatgaatgccagtaaaattgtcgatgacattcctgatcgtccagcaggcattggagtatattcagctatatggcagttatgcctggcactcatatttaaaatcataatgacagtattcacttttggcatcaaggttccatcaggcttgttcatccccagcatggccattggagcgatcgcaggaaggattgtggggattgcggtggagcagcttgcctactatcaccacgactggtttatctttaaggagtggtgtgaggtcggggctgattgcattacacctggcctttatgccatggttggtgctgctgcatgcttaggtggtgtgacaagaatgactgtctccctggtggttattgtttttgagcttactggaggcttggaatatattgttccccttatggctgcagtcatgaccagtaaatgggttggagatgcctttggcagggaaggcatttatgaagcacacatccgattaaatggataccctttcttggatgcaaaagaagaattcactcataccaccctggctgctgacgttatgagacctcgaaggaatgatcctcccttagctgtcctgacacaggacaatatgacagtggatgatatagaaaacatgattaatgaaaccagctacaatggatttcctgtcataatgtcaaaagaatctcagagattagtgggatttgccctcagaagagacctgacaattgcaatagaaagtgccaggaaaaaacaagaaggtatcgttggcagttctcgggtgtgttttgcacagcacaccccatctcttccagcagaaagtcctcggccattgaagcttcgaagcattcttgacatgagcccttttacagtgacagaccacaccccaatggagatcgtggtggatattttccgaaagctgggactgaggcagtgccttgtaactcacaatgggcgcctccttggcattataacaaaaaaagatatcctccggcatatggcccagacggcaaaccaagaccccgcttcaataatgttcaactgaatctcacagatgaggagagagaagaaacggaagaggaagtttatttgttgaatagcacaactctttaacctgagggagtcatctacttttttttcctcctttacaaaaaaagaaaggaaatataaaagccgggtttttgcaacatggtttgcaaataatgctggtggaatggaggagttgtttggggagggaaaggagagagaaggaaaggagtgaggtatttcccgtctaacagaaagcagcgtatcaactcctattgttctgcactggatgcattcagctgaggatgtgcctgatagtgcaggcttgcgcctcaacagagatgacagcagagtcctcgagcacctggcctgttgctccaacattgcaaagacacattatcagtccctatttctagagggattactttgaattgagccatctataaaactgcaaggtcttgcccttttttttaatcaaaactgttctgtttaattcatgaattgtatagttaagcattacctttctacattccagaagagcctttatttctctctctctctctctctctctctctctctctactgagctgtaacaaagcctctttaaatcggtgtatccttttgaagcagtcctttctcatattgagatgtactgtgattttactgaggtttcatcacaagaagggagtgtttcttgtgccattaaccatgtagtttgtaccatcactaaatgcttggaacagtacacatgcaccacaacaaaggctcatcaaacaggtaaagtctcgaaggaagcgagaacgaaatctctcattgtgtgccgtgtggctcaaaaccgaaaacaatgaagcttggttttaaaggataaagttttcttttttgttttcctctcagactttatggataatgtgaccgggtcttatgcaaattttctatttctaaaactactactatgatatacaagtgctgttgagcataattaaataaaatgctgctgctttgacagtaaagagaaggaagtattctgattagctgtatctggtattaattgcatgttaaaacactggaatttttaaaattgaaattagatcagtcattcttttcttttctcaagatatctcatggctgacactgaagaagaaatgtaattcataacttgcactaaatgtatattttttttcttaaaaatttaccattcttatttatatttttatggattaaaatttataaaatacagatcagttaatattgcacttaagtaattttacctttttaatgtgatttttatagaataattcagacttacaaatacagagatatgaacaaagtttacagtgggaacaaaggtttaaaaaaaggttgtggttctctctctgtgatccagtgtgcacataaacctttctctgatctttcactgccatcctctggattatgtcttctgacctgtccattttgacccattaactggaaagttgaaaaactacattaactggaaagttgaaaaactacattactttggagaataaaaccgaaagttcgtgtataccttcttaaaaaaaaaatcaaaccaaaaatgtgaaaacaatagaattgcaaagatagcagttaaaattttaatctgaaaataacctttgaatctcgggctaggttacgtccatatttgaagtggtcagtgatggtttgaacattttttgcaggatgagtgaaaatgcactggattatatttgggatttttgtttttggaattgtctgttttaatcacagccttaattcacaattggcaaaggcagtttactcaaaggactgggctaaatattctgtaattatgcatttttgataggaaaatgaaatttttgcaaacagacattttctttttttttggctggagtgcagtggggcatggtcttggctcactgcagcgttgaccacctgggctcaagtgatactcccgcctcagccacccaagtagctggcactacgggcacacgccaccatgcccagctaatttttttgtatttttagtagagatggggttttgccatgctgcccaggctggtctcaactcctcagctcaagcaatctgcctgcgtgagcctcccaaagtggtggaattacaggcgtgggccactgcgcctggcccagacagacattttctgaaacacaactggcaatgagctgtttttacattttgaaagtgattcttcacttcctagttcttaattatagtatacctattaagatctgtaagatcctgaagacataagatcatgaagccatataagaatgaggattgaaagttgagcaaaattttcgggattttgggaaacattcttagctgtgctatctgcctaaaattattccttattacttctctcctttgacagacttcaagttttcttcatagccctttcaaagttttttgagccatccagagtaaaatcatttctaaatgatagttctgtatatctccaactcgtcttaagtgtatttgcctgtgtgcaacgtattgctagactatgaactcctcagcatggctgctggataacttaattgtcctgagttaatagccttcaaaggacaaatcggtttctttgcagatagcttcgtaaaacttcacatggagtttattttatcatatttcccttttttatttctgctcctcctttaattgcccatcttgcttcagagactgacatttcagggtggatattaattaaagcattaattttgttttttggtatatttctatccctagtatttctatcttactgctaaaatacaggaaaagtgccgtatttttaatgcatttagtggttttctttggtgttatctgttccatttttctttttcatacattgaagtgtgtctccttttcaaccaaaataatgaaatagtggagaccatgaaattgttgtgcctggctaattggcaaattaatttaccaatataataagtgtagcgccttgtttgaataccctttttgagaaggtatgatgagaatgggcaagggtgtcagcatctcttcttcttaataattaattgttttcagttttggttcacgaagaatgcttagttaatctgtaatgttgcctagagctgtatttatctgtttttatttatactagtgtagtaaagctgcatatcattacagtaaaaacgactactgtgatgagttaatcagaaaatctattaaaatctatatgacaatgtgtggtttggcctttaattatatctgtaacagtcctccctcttcactgctgccctacgcagtgtaggccgatatgcctggcacagggagccccaaaaaggtaataattataatgcttctctcaggttacaaagcatttctacactttgcaagcaaggagcaatagaagagtagatagatgctggattgacagcaggatgttcataccaccagcaatggtttagcgcccccatttgtcagtgaaagctgcaggtccacagaaaactgatttcatttcagctcactttcaaaagtgatttttttttttttcgcaagaaaaattacgctatttgcatgaaaagaggtaaaacgatttatttacatgtctttaaaaaatcaccttggacatttgctaatagaactgccaaaagagggtggtaagtaacaacctttgattaagatgtggtcttttactattaagcttttagtaaaaaggaacacactaaaa

SEQ ID NO: 5697 - DNA, 1082 bp, Homo sapiens
  source 1..1082: mol_type = unassigned DNA
gccgcttctcttccccttccgtgggtcagggccggtccggtccggaacctgcagcccctttcccagtgttctagttcgcccgtgacccggaataatgagcaaggagggtgtggtgggttgaaagccatcctactttactcccgagttagagcatggattcagttttagtcttaagggggaagtgagattggagatttttatttttaattttgggcagaagcaggttgactctagggatctccagagcgagaggatttaacttcatgttgctcccgtgtttgaaggaggacaataaaagtcccaccgggcaaaattttcgtaacctctgcggtagaaaacgtcaggtatcttttaaatcgcgatagttttcgctgtgtcaggctttcttcggtggagctccgagggtagctaggttctaggtttgaaacagatgcagaatccaaaggcagcgcaaaaaacagccaccgattttgctatgtctctgagctgcgagataatcagacagctaaatggagtctgagcagctgttccatagaggctactatagaaacagctacaacagtataacaagtgcaagtagtgatgaggaacttttagatggagcaggtgttattatggactttcaaacatctgaagatgacaatttattagatggtgacactgcagttggaactcattatacaatgacaaatggaggcagcattaacagttctacacatttactggatcttttggatgaaccaattccaggtgttggtacatatgatgatttccatactattgattgggtgcgagaaaaatgtaaagacagagaaaggcatagacggatcaacagcaaaaagaaagaatcagcatgggaaatgacaaaaagtttgtatgatgcgtggtcaggatggctagtagtaacactaacaggattggcatcaggggcactggccggattaatagacattgctgccgattggatgactgacctaaaggagggcatttgccttagtgcgttgtggtacaaccacgaacagtgctgttggggatctaatgaaacaacatttgaaaaaaaaaaaaaaaaaaaaaagaaagcc

SEQ ID NO: 5698 - DNA, 2418 bp, Homo sapiens
  source 1..2418: mol_type = unassigned DNA
ccgcctcctggtgatgtcacggcgctcgcagccgtcgcgctgaagaaaggatgctcgaggatgctgtccaggtgggcggccgcgggcgcgatgcggcactgcaggtgtaattagcatggtcaatgcgggagcgatgagtggctctggaaacctgatggatttcctcgatgagccgttccctgatgtggggacgtatgaggacttccacaccatcgactggctaagggaaaagtcacgggacaccgacagacacaggaagatcaccagcaagagcaaggagtccatatgggagttcatcaagagcctgctggatgcctggtcgggatgggtggtgatgctgctcatcggcctgctggcgggcaccttggctggggtcatcgatctcgccgtggactggatgacggacctgaaggagggggtctgcctgtctgccttctggtatagccatgagcagtgttgctggacttctaacgagaccacttttgaggacagagacaagtgtcccctgtggcagaaatggtcggagctgctggtgaatcagtcagagggtgccagtgcttacattctgaattacttaatgtacatcctatgggcgctgctgtttgcatttttggctgtctccctggtgcgtgtatttgcaccatatgcctgtggctctggcataccagagataaagaccattttgagcggctttatcatcaggggctacttggggaagtggaccctgctaatcaagacagtcacgctggtgctggtagtgtcctccggtctgagccttgggaaggaagggccgctagtgcacgtggcttgttgctgtggcaacttcttcagcagccttttctccaagtacagcaagaatgagggcaagaggcgggaggtgctttcagctgcagcggctgctggagtctctgttgcctttggtgcaccaattggaggcgtgcttttcagtctagaagaggtcagttactactttcccctgaagaccttgtggaggtcatttttcgcagccctggtggcggcctttacgctgagatccatcaatccctttgggaatagccgtctcgttctcttttatgtggaataccacacgccctggaggcgcaagaccaccaggctggggaagtacccggtgctggaggtcattgtggtgactgccatcactgccatcattgcctaccccaatccctacacacgccagagcaccagcgagctcatttctgagctgttcaatgactgtggagcccttgagtcttcccagctctgtgactacatcaatgaccccaacatgactcggcctgtggatgacattccagaccggccggctggtgtcggtgtttacacggccatgtggcagctggccctggcactgatcttcaaaatcgtcgttaccatatttacctttggcatgaagatcccgtcgggcctcttcatccccagcatggctgtgggcgcgatagcgggcaggatggtgggaattggcgtggagcagctggcctaccatcaccatgactggatcatcttcaggaactggtgcagacccggtgcagactgtgtcacgccagggctgtacgcaatggtgggagctgcggcctgcctcggtggagttaccaggatgacggtgtcattggtggtcatcatgtttgaattaaccgggggtctggagtacatcgtgcccctgatggcggcggctgtgaccagcaagtgggtagctgatgcatttgggaaagaaggcatctacgaggcccacatccacttaaatgggtaccctttccttgacgtgaaggacgagtttactcaccgcacactggccaccgacgtcatgcggccccggcggggagagccgccactgtcggtgctcacccaggacagcatgactgtcgaggacgtggagacgctcatcaaggagaccgactacaacggcttccccgtggtggtctccagagactccgagcgcctcattggatttgcccagaggagggaactgattctcgcaataaagaacgccagacagaggcaggagggcattgtgagcaattccatcatgtacttcacggaggaaccccccgagctgccggccaacagcccacatcccctgaagctgcggcgcatcctgaacctcagcccgtttacagtgacagaccacactccgatggaaacggtggtggatatcttccggaaactggggcttcggcagtgcctggtgacgcggagcgggagacttcttggcatcatcacaaaaaaggatgttctgagacatatggcccagatggcaaaccaggaccccgaatccatcatgtttaattagcaacaaggtggcaattattttcagaaaaacactgactgtgtcatttaaaaagaaataaatgatatgttattatcccaatgaaagatcatgcattggggacagcagaaacaaaa

SEQ ID NO: 5699 - DNA, 6750 bp, Homo sapiens
  source 1..6750: mol_type = unassigned DNA
atttgcctctggcaggaaaatgagcttgtcagtttctgcctccattagaccctcaacccaaaggagcaggagatttcggtagcgttttaactttatctcagaatctgaaagcggaaggccaggcaagctgcacacatcaagcgaaacgcctgaggggcggccagcgcgagggtttctggccatcgaccctcacctcccgggacttccagggtcttccccccaccccgcgcacacctccctgcctcgccccgagggcgtcacgtggcagcgtggggcccgcctcctggtgatgtcacggcgctcgcagccgtcgcgctgaagaaaggatgctcgaggatgctgtccaggtgggcggccgcgggcgcgatgcggcactgcaggtgtaattagcatggtcaatgcgggagcgatgagtggctctggaaacctgatggatttcctcgatgagccgttccctgatgtggggacgtatgaggacttccacaccatcgactggctaagggaaaagtcacgggacaccgacagacacaggaagatcaccagcaagagcaaggagtccatatgggagttcatcaagagcctgctggatgcctggtcgggatgggtggtgatgctgctcatcggcctgctggcgggcaccttggctggggtcatcgatctcgccgtggactggatgacggacctgaaggagggggtctgcctgtctgccttctggtatagccatgagcagtgttgctggacttctaacgagaccacttttgaggacagagacaagtgtcccctgtggcagaaatggtcggagctgctggtgaatcagtcagagggtgccagtgcttacattctgaattacttaatgtacatcctatgggcgctgctgtttgcatttttggctgtctccctggtgcgtgtatttgcaccatatgcctgtggctctggcataccagagataaagaccattttgagcggctttatcatcaggggctacttggggaagtggaccctgctaatcaagacagtcacgctggtgctggtagtgtcctccggtctgagccttgggaaggaagggccgctagtgcacgtggcttgttgctgtggcaacttcttcagcagccttttctccaagtacagcaagaatgagggcaagaggcgggaggtgctttcagctgcagcggctgctggagtctctgttgcctttggtgcaccaattggaggcgtgcttttcagtctagaagaggtcagttactactttcccctgaagaccttgtggaggtcatttttcgcagccctggtggcggcctttacgctgagatccatcaatccctttgggaatagccgtctcgttctcttttatgtggaataccacacgccctggtacatggctgaactcttccccttcatcctgcttggggtcttcgggggcttgtggggaaccctcttcatccgctgcaacatcgcctggtgcaggaggcgcaagaccaccaggctggggaagtacccggtgctggaggtcattgtggtgactgccatcactgccatcattgcctaccccaatccctacacacgccagagcaccagcgagctcatttctgagctgttcaatgactgtggagcccttgagtcttcccagctctgtgactacatcaatgaccccaacatgactcggcctgtggatgacattccagaccggccggctggtgtcggtgtttacacggccatgtggcagctggccctggcactgatcttcaaaatcgtcgttaccatatttacctttggcatgaagatcccgtcgggcctcttcatccccagcatggctgtgggcgcgatagcgggcaggatggtgggaattggcgtggagcagctggcctaccatcaccatgactggatcatcttcaggaactggtgcagacccggtgcagactgtgtcacgccagggctgtacgcaatggtgggagctgcggcctgcctcggtggagttaccaggatgacggtgtcattggtggtcatcatgtttgaattaaccgggggtctggagtacatcgtgcccctgatggcggcggctgtgaccagcaagtgggtagctgatgcatttgggaaagaaggcatctacgaggcccacatccacttaaatgggtaccctttccttgacgtgaaggacgagtttactcaccgcacactggccaccgacgtcatgcggccccggcggggagagccgccactgtcggtgctcacccaggacagcatgactgtcgaggacgtggagacgctcatcaaggagaccgactacaacggcttccccgtggtggtctccagagactccgagcgcctcattggatttgcccagaggagggaactgattctcgcaataaagaacgccagacagaggcaggagggcattgtgagcaattccatcatgtacttcacggaggaaccccccgagctgccggccaacagcccacatcccctgaagctgcggcgcatcctgaacctcagcccgtttacagtgacagaccacactccgatggaaacggtggtggatatcttccggaaactggggcttcggcagtgcctggtgacgcggagcgggagacttcttggcatcatcacaaaaaaggatgttctgagacatatggcccagatggcaaaccaggaccccgaatccatcatgtttaattagcaacaaggtggcaattattttcagaaaaacactgactgtgtcatttaaaaagaaataaatgatatgttattatcccaatgaaagatcatgcattggggacagcagaaacaaaagcttttttggaaaggcggggaagaaggatgaaacctttaaaaacaaaaacaaaaacatcaatgagtaggcattttatagctttaaccccgtatgagtttcaagctgtgtttcctaatgagtttgctactgctgtgggggcatgtgggtgggtaaatgatgtaaatgatgtgatctgtacaagtatgtggagcatgaatgctgactcaagaaacttttactccttctgctcaaggctgatgtttgtaacttatgaacacacgtgaagtgttgagtccaaaagacaaaggggcatcggcatgtcagcgtccttatttattggttcttgaagttttgctgctatgttactgaatcatactaaagacatttgcgcttactttgttgaaaaagaaaaagaaattaaatttgaacacagtgaaagctgcaagtatgccagtgggtccgctcacgaccgtcctgtttcttgctcctgttctcagcctgttatctggcttatccatcagtttctgaaccaacatcaggggcacctgccatgatgagtgtgaagaaatcatttctctatgcaagactggcatcctgggactgcacgatgaactattggagcatacagtactgcggtgtgtctcctcccatacaaagggacacatccttattttgagggtatactcacccgatcattgatttgcatccccatggcatttgcttcatttatttattgcttttgcccatgcattcaatattgatcagctcagcacttccatgggccatagccggtatgcccccagcctgccataagcgtgctttcattttcaagtagcatatgcaagagtccaaacaggctacccaatgttactacttatttttcctctcaggtcttatcagatacggctgtggagaggatgaggcatatgcgttgtcagttggaatccctccaaatggattgcaagagaaatactaaattgattctaaatctgttccattatcttctctgtaggatgcaaaacatccagttgtaatgtataagcatgcacttcatactagcaatcacagcacaggaggacagcattaaattttatatagccaatttgggcactgggcatctttgtatttgaacttaacgacacatttactcttttagtcaggatttcggtcttttctgcgggaaggaattaagctatgtattaggtccaccatacgatctgtgtaagtaagattatcccacttgccctttctctttagtctttgtcccttccttttcactaagtgcccctcatccttttcaatctcattgtcactggatagtgctgtatcacttaggtgtgcattcggctgcaaataacagaaaacccagcaaacactgaagggctggataagaaccctgagagggggtactccaggactgtctccataacatcattgggatccccatcccgttgctatttctttttcaccgtttttaccttttgtcctctggcttattgcctcagagttgcaagatggttcctgaactgtcaggtatcatgtctgctttctaagtgggaagaggaagggagaggcaagcaactaggtacaatgtctatcaggaaagcaaagcttccccagagacgctcagcttgtatccattgactggaagtctgtcacgtggctccccctagccgcacactagtgtgggaaggaaaatattgagctaggcacattactctctgaacgaaattcatattatcttattaaggaagagtgttggtcttcaggaggggaagtttgctgtattggatgccatcatcgtgtccttgtcattgcccttccggttttcattcttgctaaacccctgtgaatgttcttctaaccttcctgttccccaccccttttctcagatttgacctagaattcccagcccaaatccataatttcttagctctaatacgaattttcatgttggacaaaaacctagctacaaatgggtttctatggaacttctaattaatgtgcaaaatacatattttctccaggttaagaaattttaagtcagatcatgctgacacaataagaaaatttgtttgtgtaattcattgacctcttccttccaaaataacatcaagtagccacctcagtgtgacaatatccagtcaatagtagagaatttaatccttggtcctataaaagaataaaattcattgtcgtatttatagcacgtaagccttgagtaacaggtcttaatgttagtgttggtgttgtggtttctgcggaacgtttacaagtgaagttggattctcctgggctttaaatccaaaaagtcttaatgaccgcttcatgtagttcccctcttattcccctgtggtctcctcagagccagcgtgtgctgggaaagagtattagtcatagcctggctttatagaatccaggaggtccttttagctgaaacaagtggcttcaaaagggaacatgaaacagtgaaaagatagccaaaggtcagtgaaaccacagcatttctttctaatctggctgaggccatgggggggaatgaggggaaattatgcttccgggccaaggtcaccgagggggaccttgggatttgtgtcctccccagtgcttagagtagagatacctgcaaattcatggcaaacagttggaagagttacttgactgaaacaacccaatcttactttctttcgtaagttgaacctctgatttattgtggggttcaggctctcctcaatagaaggccagagttggacaggtggactaaggtcaaggatgaggagtctgcagtggggactaccacagcaaactgccttccttccgtggagtcctaactcagccatgtggtccactcacccaggggcccgggggctcagacaaaccccatggggaacatgctgccatgctctgtctttcttgtaaacgtagttgggtagggatcccaagggtatttgctctctccaaatgcagaacttccatccactttatctggtgatctgatgaacagcatggggacgtggaggtgaaataagcatctttcagaataaggtttttttttttttcctcttccagaaccaaaggctttagacatttgtagaactttctggattccttctgaatcgggttttaacataaaaaaccatcaacacatcatgggaaaggagctctttcatgatatacatcacatgtttcttgctctcactgaggaaatgtgttgtacaaaagcaccaaataagggcaccctggaagtgacatgtgtgtttcttctaagtcgtttttagtgcatcccctgcgattgcatgatgctcatgtggcttttagggaaaggcagaatgtgctagaagtcgaagtcattcaatattcagtgcttactgttactttgaaccaggtaatctcagttctttattcagtccttcccaaagaccttacaaaggagatgtgtaaactgatagattttgagcctaataagtcacagaaatggaaaattttagagcagtttgtttcacttaggtgagaactgattactttaaattaccaacatgtgcaaattctacttagtattcattattagatgctaagctggaaaagatgagaaacccaaggagaactattgaattaccacataattgtaatattatgctttaattttgtatgggcagtgttctatcagactaagcttctagcctttgaaatgatttacatgaggagagagcctgtatatctgacttgggaaacattaagcagaccctattttcactggcgcggtaataactatttatttgctatcctagaggtgctgggaatgagcctacgtgcgactttgatgagatatattcacatttggtgttggaacgaccacatagcaacgtgttggtttttttttattgtaacactctgtgtaaacgttgacaccttattaaatattaaatgtctgaactctatttttaaaaataaaacaagcacagagtctgcaacaaacatgtaaa

SEQ ID NO: 5700 - DNA, 2227 bp, Homo sapiens
  source 1..2227: mol_type = unassigned DNA
gctcgaggatgctgtccaggtgggcggccgcgggcgcgatgcggcactgcaggcaccttggctggggtcatcgatctcgccgtggactggatgacggacctgaaggagggggtctgcctgtctgccttctggtatagccatgagcagtgttgctggacttctaacgagaccacttttgaggacagagacaagtgtcccctgtggcagaaatggtcggagctgctggtgaatcagtcagagggtgccagtgcttacattctgaattacttaatgtacatcctatgggcgctgctgtttgcatttttggctgtctccctggtgcgtgtatttgcaccatatgcctgtggctctggcataccagagataaagaccattttgagcggctttatcatcaggggctacttggggaagtggaccctgctaatcaagacagtcacgctggtgctggtagtgtcctccggtctgagccttgggaaggaagggccgctagtgcacgtggcttgttgctgtggcaacttcttcagcagccttttctccaagtacagcaagaatgagggcaagaggcgggaggtgctttcagctgcagcggctgctggagtctctgttgcctttggtgcaccaattggaggcgtgcttttcagtctagaagaggtcagttactactttcccctgaagaccttgtggaggtcatttttcgcagccctggtggcggcctttacgctgagatccatcaatccctttgggaatagccgtctcgttctcttttatgtggaataccacacgccctggtacatggctgaactcttccccttcatcctgcttggggtcttcgggggcttgtggggaaccctcttcatccgctgcaacatcgcctggtgcaggaggcgcaagaccaccaggctggggaagtacccggtgctggaggtcattgtggtgactgccatcactgccatcattgcctaccccaatccctacacacgccagagcaccagcgagctcatttctgagctgttcaatgactgtggagcccttgagtcttcccagctctgtgactacatcaatgaccccaacatgactcggcctgtggatgacattccagaccggccggctggtgtcggtgtttacacggccatgtggcagctggccctggcactgatcttcaaaatcgtcgttaccatatttacctttggcatgaagatcccgtcgggcctcttcatccccagcatggctgtgggcgcgatagcgggcaggatggtgggaattggcgtggagcagctggcctaccatcaccatgactggatcatcttcaggaactggtgcagacccggtgcagactgtgtcacgccagggctgtacgcaatggtgggagctgcggcctgcctcggtggagttaccaggatgacggtgtcattggtggtcatcatgtttgaattaaccgggggtctggagtacatcgtgcccctgatggcggcggctgtgaccagcaagtgggtagctgatgcatttgggaaagaaggcatctacgaggcccacatccacttaaatgggtaccctttccttgacgtgaaggacgagtttactcaccgcacactggccaccgacgtcatgcggccccggcggggagagccgccactgtcggtgctcacccaggacagcatgactgtcgaggacgtggagacgctcatcaaggagaccgactacaacggcttccccgtggtggtctccagagactccgagcgcctcattggatttgcccagaggagggaactgattctcgcaataaagaacgccagacagaggcaggagggcattgtgagcaattccatcatgtacttcacggaggaaccccccgagctgccggccaacagcccacatcccctgaagctgcggcgcatcctgaacctcagcccgtttacagtgacagaccacactccgatggaaacggtggtggatatcttccggaaactggggcttcggcagtgcctggtgacgcggagcgggagacttcttggcatcatcacaaaaaaggatgttctgagacatatggcccagatggcaaaccaggaccccgaatccatcatgtttaattagcaacaaggtggcaattattttcagaaaaacactgactgtgtcatttaaaaagaaataaatgatatgttattatcccaatgaaagatcatgcattggggacagcagaaacaaaagcttttttggaaaggcggggaag

SEQ ID NO: 5701 - DNA, 487 bp, Homo sapiens
  source 1..487: mol_type = unassigned DNA
ggcgcgatgcggcactgcaggtgtaattagcatggtcaatgcgggagcgatgagtggctctggaaacctgatggatttcctcgatgagccgttccctgatgtggggacgtatgaggacttccacaccatcgactggctaagggaaaagtcacgggacaccgacagacacaggaagatcaccagcaagagcaaggagtccatatgggagttcatcaagagcctgctggatgcctggtcgggatgggtggtgatgctgctcatcggcctgctggcgggcaccttggctggggtcatcgatctcgccgtggactggatgacggacctgaaggagggggtctgcctgtctgccttctggtatagccatgagcagtgttgctggacttctaacgagaccacttttgaggacagagacaagtgtcccctgtggcagaaatggtcggagctgctggtgaatcagtcagaggtgctttcagctgcagcggctgct

SEQ ID NO: 5702 - DNA, 3177 bp, Homo sapiens
  source 1..3177: mol_type = unassigned DNA
tgatgtgatatggctgcaagtgcctttgacccttttgtctcccttccataaactgaaatacctaagctgctccaacctcctttttgtcttttgtttcataaatcctttcccattgcacatcaactcctgtctctctttgtactgtcactctcatctgttgctttccattcacactgcctttagccactcatcattttgtgcctacaccacagaaacctctgaatgtaatggatgttcctaccagaggacaagtcgtacaatggtggaggaataggttcttcaaataggatcatggacttcttggaggagccaatccctggtgtagggacctatgatgatttcaatacaattgattgggtgagagagaagtctcgagaccgggataggcaccgagagattaccaataaaagcaaagagtcaacatgggccttaattcacagtgtgagtgatgctttttccggctggttgttgatgctccttattgggcttttatcaggttcgttagctggtttgatagacatctctgctcattggatgacagacttaaaagaaggtatatgcacagggggattctggtttaaccatgaacattgttgctggaactctgagcatgtcacctttgaagagagagacaaatgtccagagtggaatagttggtcccagcttatcatcagcacagatgagggagcctttgcctacatagtcaattatttcatgtacgtcctctgggctctcctatttgccttccttgccgtatctcttgtcaaggtgtttgcgccttatgcctgtggctctggaatccctgagataaaaactatcttgagtggtttcattattaggggctatttgggtaagtggactctggttatcaaaaccatcaccttggtgctggcagtgtcgtctggcttgagcctgggcaaagagggccctctagtgcacgtggcttgctgctgtgggaacatcctgtgccactgcttcaacaaatacaggaagaatgaagccaagcgcagagaggtcttgtcggctgcagcagcagctggtgtatctgtagcctttggagcacctataggtggagtattattcagccttgaagaggtcagctactattttcccctcaaaacattgtggcgttcattctttgctgccttggtggcagcattcactctacgctccatcaatccatttgggaacagccgcctggtactattttatgtggagtttcacaccccatggcatctctttgagctcgtgccattcattctgctgggcatatttggtggtctgtggggagcactgtttatccgcacaaacattgcctggtgtcggaagcgaaagaccacccagttgggcaagtatcctgttatagaggtactcgtcgtgacagccatcactgccatcctggctttccccaatgaatacactcggatgagcacaagtgagctcatttctgagctgtttaatgactgtggccttctggactcctccaagctctgtgattatgagaaccgtttcaacacaagcaaagggggtgaactgcctgacagaccggctggcgtgggagtctacagtgcaatgtggcagctggctttaacactcatactgaaaattgtcattactatattcacctttggcatgaagatcccttctggcctctttatccctagcatggctgttggtgctatagcaggtcgacttctaggagtaggaatggaacagctggcttattaccaccaggaatggaccgtcttcaatagctggtgtagtcagggagctgattgcatcacccccggcctttatgcaatggttggggctgcagcctgcttaggtggggtgactcggatgactgtttctcttgttgtcataatgtttgaactgactggtggcttagaatacatcgtgcctctgatggctgcagccatgacaagcaagtgggtggcagatgctcttgggcgggagggcatctatgatgcccacatccgtctcaatggatacccctttcttgaagccaaagaagagtttgctcataagaccctggcaatggatgtgatgaaaccccggagaaatgatcctttgttgactgtccttactcaggacagtatgactgtggaagatgtagagaccataatcagtgaaaccacttacagtggcttcccagtggtggtatcccgggagtcccaaagacttgtgggctttgtcctccgaagagatctcattatttcaattgaaaatgctcgaaagaaacaggatggggttgttagcacttccatcatttatttcacggagcattctcctccattgccaccatacactccacccactctaaagcttcggaacatcctcgatctcagccccttcactgtgactgaccttacacccatggagatcgtagtggatattttccgaaagctgggactgcggcagtgcctggttacacacaacgggcgattgcttggaatcattaccaaaaaggatgtgttaaagcatatagcacagatggcgaaccaagatcctgattccattctcttcaactagaatcatagagttctggatgtaaagcgggaaggacattacagaccatggatatgttgtattaactgggtacccaaaacacattttccatatttggatggtgaagtcacattagtgtgttgtctctttcctacaagttaaccagttgcactacataatctctggaaattaattttctctttaggagaaattatagttaggcttccatgatgttacattaggaagatatcatgaaagaataaataagattgctatggtttaattatatttgctttttaaaagatttttttaacttaaaaagtagttagccaatatgcaatcactgaaaactatgcaagagaaattccaaccgtcctgacctataacctgtaggaaaccgacgaaaaagtcactcttttgggatctaactgttgttactggaagacgaagtgtaaactaaggggctttgcttttcaaaccagagaaaggaaagccagaaggaaaagagtaatggtattttctagactgtgaagattcagttcaaatgttatccttgttcctgttacaatatttagcattattagtttgttatgtgtgtatgtttatgttaattttaatttctgattataagacaatgctgctttggttaatctcttctaaatgaattta

SEQ ID NO: 5703 - DNA, 10108 bp, Homo sapiens
  source 1..10108: mol_type = unassigned DNA
gtcacatgagccgcgcgcccgcttcgctccccctcctccccggctgggctgtgtgaatgaagctctgccggctacgtggggcgctcactcaacttggtgtcctggacgccagagccgaccgagcgcgctgcccaccggcggcggacacgggctccgccgctccggacctcggcgacagagcaaatcagttgcctggagttcccagtgaagttgtacctgtgcccgtgcgataacgtcagtggaagctgccccgagtaagtgagggaaatctagaagtttggagcataaaaaaccagcacgaatcaactttacataaacttcatacatttattagcaactgctcgggtttaacttcagggatgttaaatttcgcctagtcccacgggacgatgatcattacttcttaactgcacgcgaaataggagaagaaaaaaggcaaatcaaaacagactgtcccaggtctcagagaagtcatcggagcgctttttcctgctgaattcaccctaggagtttgtttggggctttagccccttggagaaaacagggccacatagctgcctttctatcaagtctccctacaaaactgagaggctctgggaaactcagcctgtgaccccagcgtgggtgaagataggatcaagatggccatgtggcagggtgccatggataacagaggctttcagcaggggagttttagtagcttccagaacagctccagtgatgaagacctgatggacattccagcaaccgctatggatttctccatgagagatgatgttcctcccttagaccgagaagtaggagaggacaagtcgtacaatggtggaggaataggttcttcaaataggatcatggacttcttggaggagccaatccctggtgtagggacctatgatgatttcaatacaattgattgggtgagagagaagtctcgagaccgggataggcaccgagagattaccaataaaagcaaagagtcaacatgggccttaattcacagtgtgagtgatgctttttccggctggttgttgatgctccttattgggcttttatcaggttcgttagctggtttgatagacatctctgctcattggatgacagacttaaaagaaggtatatgcacagggggattctggtttaaccatgaacattgttgctggaactctgagcatgtcacctttgaagagagagacaaatgtccagagtggaatagttggtcccagcttatcatcagcacagatgagggagcctttgcctacatagtcaattatttcatgtacgtcctctgggctctcctatttgccttccttgccgtatctcttgtcaaggtgtttgcgccttatgcctgtggctctggaatccctgagataaaaactatcttgagtggtttcattattaggggctatttgggtaagtggactctggttatcaaaaccatcaccttggtgctggcagtgtcgtctggcttgagcctgggcaaagagggccctctagtgcacgtggcttgctgctgtgggaacatcctgtgccactgcttcaacaaatacaggaagaatgaagccaagcgcagagaggtcttgtcggctgcagcagcagctggtgtatctgtagcctttggagcacctataggtggagtattattcagccttgaagaggtcagctactattttcccctcaaaacattgtggcgttcattctttgctgccttggtggcagcattcactctacgctccatcaatccatttgggaacagccgcctggtactattttatgtggagtttcacaccccatggcatctctttgagctcgtgccattcattctgctgggcatatttggtggtctgtggggagcactgtttatccgcacaaacattgcctggtgtcggaagcgaaagaccacccagttgggcaagtatcctgttatagaggtactcgtcgtgacagccatcactgccatcctggctttccccaatgaatacactcggatgagcacaagtgagctcatttctgagctgtttaatgactgtggccttctggactcctccaagctctgtgattatgagaaccgtttcaacacaagcaaagggggtgaactgcctgacagaccggctggcgtgggagtctacagtgcaatgtggcagctggctttaacactcatactgaaaattgtcattactatattcacctttggcatgaagatcccttctggcctctttatccctagcatggctgttggtgctatagcaggtcgacttctaggagtaggaatggaacagctggcttattaccaccaggaatggaccgtcttcaatagctggtgtagtcagggagctgattgcatcacccccggcctttatgcaatggttggggctgcagcctgcttaggtggggtgactcggatgactgtttctcttgttgtcataatgtttgaactgactggtggcttagaatacatcgtgcctctgatggctgcagccatgacaagcaagtgggtggcagatgctcttgggcgggagggcatctatgatgcccacatccgtctcaatggatacccctttcttgaagccaaagaagagtttgctcataagaccctggcaatggatgtgatgaaaccccggagaaatgatcctttgttgactgtccttactcaggacagtatgactgtggaagatgtagagaccataatcagtgaaaccacttacagtggcttcccagtggtggtatcccgggagtcccaaagacttgtgggctttgtcctccgaagagatctcattatttcaattgaaaatgctcgaaagaaacaggatggggttgttagcacttccatcatttatttcacggagcattctcctccattgccaccatacactccacccactctaaagcttcggaacatcctcgatctcagccccttcactgtgactgaccttacacccatggagatcgtagtggatattttccgaaagctgggactgcggcagtgcctggttacacacaacgggcgattgcttggaatcattaccaaaaaggatgtgttaaagcatatagcacagatggcgaaccaagatcctgattccattctcttcaactagaatcatagagttctggatgtaaagcgggaaggacattacagaccatggatatgttgtattaactgggtacccaaaacacattttccatatttggatggtgaagtcacattagtgtgttgtctctttcctacaagttaaccagttgcactacataatctctggaaattaattttctctttaggagaaattatagttaggcttccatgatgttacattaggaagatatcatgaaagaataaataagattgctatggtttaattatatttgctttttaaaagatttttttaacttaaaaagtagttagccaatatgcaatcactgaaaactatgcaagagaaattccaaccgtcctgacctataacctgtaggaaaccgacgaaaaagtcactcttttgggatctaactgttgttactggaagacgaagtgtaaactaaggggctttgcttttcaaaccagagaaaggaaagccagaaggaaaagagtaatggtattttctagactgtgaagattcagttcaaatgttatccttgttcctgttacaatatttagcattattagtttgttatgtgtgtatgtttatgttaattttaatttctgattataagacaatgctgctttggttaatctcttctaaatgaatttagagagattgacttttatagcttgcttgttgctggtactcttttgaagtgcacaaagataagttatagagctttctccttgtctgcaaaaacggtaattttccaggtggcatttgttagctggtagacaaggactttgccgtgaatttgttagtagcaaggaatgatttcttccagcttccttgaaatgaataattagtaaacttctaagcaaagtcaatgactaggagtttcacatgtttgtgaggtcctaactaattctcttacccagatgccacctccatgaatgatggtgctttaggcttctggaatatgtaaaaacagcaaagggaaccaagtctagactgcatactggtaaaccagggaagactcagaactgcatatgcatcctcatgcattcctttgtaaagaccaccagtactaaaataactggacactcattgtacctcccagcgataagtatgtgtaacaggccagtgtgttgtccccatgatcatgaattaggcttgggatgcttccaaatatattcaaggtgttggaacaggataggcagctgtgactccctcaagagtccttagaattctaaataaaatgcagagccatcctaagacacaggggtatggacaaggcctggtgacaccaaaggtgcttgtatccaattgaaaaggtgcctgtctcaatttcataccacctttattgcagttaaaaaaaaatcacactctggggacacttggtggaattacagagccaccatcatcattccaaccactatttcattttctgtagttttacctgtgtgcaattactccccctccattctgttccacttcttactccttagtaccaaatcctctgtttgggattgagcgctgctcctggttaatcattcctactacaaaaaaaaataactcccagggctagttaaattgtaaaccaaggctcagcagtctcacaacacatggaccagaggtgacacacagccatttcctttgccatgtggcccagttgctgctgccatgcctccatttccacactggatgcctacggcagtgagatttcactgccggggtaagagttcagcctggatgattttatagctctgttcctagcacttctcatcatccttccagcccagaatcagcggtcattctgcatattcccaccaaccctctacccccaaacacttcagtgtacctcattttaagagttgctgatccctgattctaggacgtttttacccatagttcttgtctttccaaaatctgaaattcttttttttgctcagaactgggtagccaagggttattttatttttatctttaaaataatcaaggcagtcgctagagtttctccttgtgaatagatcactctagcattttaatgaaaaagaaaaaaatctttctggggtatgttgtatcatagtaatggctcagtaaccacatattttgtcctttccatgtcactgattccttcatatgagactatttggcttgactaccctgtatattgtgtagaaatcaaagttcttatctgtacatttctggtccaatacctgtcttattagttgtccttccccactaaagtttgcaaaacagaaaatgttactatttctggtatttaatgacaatgaaaggtttggtcatatttcatagtgcagtagcgataaggagggtgtctcaagtttgcttttgtgtttcttctaggctttgttcttgattttagacagatgagccagtgttaaggtgctacttcagagaataaattagagaaatcagataacactgtgccaaggtatactttgtagatgctaagcaccgattggccctccagagaatgacaatatccctttgatacctcactcctgatcaatctcattcattaacctcagcttctcaggaatccttgtagcttgtatgctagaagtagctatggtatatggtatccactatatgtccagtcctatggtttggctcaaaggttggctaattgcagctagagctctcaactgctagctcagcaccttgacatttgaagtttcttgtcttgaggagaaggaaaatgttctttctgccattgccactttaacagttggacatgcttaagcaacaaatacagccagtatagggaggactgtcagtagcatcaaatggccacatacctcaatggcaaaagactagatggtttgtgatttaaaaattaatgagtcgagatgagactattttggtattaaatgagaaaattgcctaacacaagggaagggtttacaaaagaatgccaattagtgtttcaacagagttaggattttccaagtaagagtagctggtagccatccagccataaaaggaacgagagtctatagatttgtaaaagtaaaactgctatattttgtatcttcaaatcttcaatataaagaatttaaagaacctgaaacagttaatgcatgattcgttatattggagggaaaaagcaggggactgataatacaaaataatggcaactttaaagatcatttctacgtggatgtttggttagaaacatattccaatgctctcctctttctctggccacagcatcctggctcagcccagctgtggagtagaggtggtaagatccacagaacagatatcctctggtagataagctgacattgatgatactttgaatttaccagctggtgaagcaaacgattaatttgtgattgaactgaaaagcagttgaattgttttgacaccagaggctgaatctaaaccctttacaggaagagcagagcatactatacatttcttagcagatcttcaattctgtttgaacatgatgaagtaaccagggtttagtgagatctaaggccgtgaagtaattcacaaccaagatcttatgaacgcattcagatgtgaggggggcaaatatgttttcaaaaacttagtgtgcaatagagtccattatagaaattaaccactgctatatgttttaagtagttcaatcacctgttgtggttcagtcttgattattgtttattttgttaggtgataagtaggaagatgcacttgttatcccacactatctcttgttttgttttgttttgtttttaaataatgaacagtgcaatctttgaacttgagtttttaataatgatagcaaagacaatggtgagaacttgaaacagccagcatattttatattgccaaagtacttactgatgactgaccacactgtcttgtgaggaactgggtcccctgcactggatcagagccaaatgcaagccacccatcagttcagaggaagcaggaaaacatcttttgggtggtgcatagaacattgagctcttaaaaacccggagaaaaattaggaatttagaaagtaagtgggaggtagaatattgagtccttttttaaaaaaaagaattgatgtctaaatatgtagtctgaacttaagtgtcctaaaaccttgttttttgtttttttgttttttgaggagtcgtcttgctctatcaccaggtgggagtgcagtggcacaatctcggctcactgtaacctctgcctcctgcctcccgggtccaagcaattcccctgcctcagtctcccaagtaggtgggactacaggcgcacaccaccatgcccagctaacttttgtatttttagtagagacggggtttcaccatgttggccaggatggtctcgatctcttgacctcgtgatccacccatctcggcctcccaaagtgctgggattataggtgtgagccaccgcacccagccaaaccttgatttttttagccacctctgggattgcctgggttccctttggagaagaaactaaaagttatggccatagaaaaagccctggtaagaaaatatttgaatggtgtaagatggtggaaggaaagccatcccacacccctacaacatatgttctggcatttataaactgcttgattgtgtgcctcaaggggagaaaaagtcaagcaatgcttcaaaggccaggctttctaagcaaatgagtggttcaaagcagtgtttggctcaagggcagtctggttttatggatagggccgacccaagacatctgctcatgaagaaatgtggcatctgttgccatttcctaaactataaggtttagatagattgtcttgaattttgatagcaaatttttttaaatttatatttctgcctcctcgtacatccttatatatggaaaaaaaagtaagagttcctcagatcagagctcagtagctgtgtcaatttgaagttcaatcagtgtagttgtcctggggtgatcgctgactctgctctgtttcatatttcagttgcttgctccaaggagagaatttctgagaacaatgggtgttagcaactttaagttactccccaaacgtttgctggccacattctcatttctaaacatctggatctgggtaaaggtttgaatagatgtagggaacaaaattggtttttccatggtgtagtctaattttgccaaatcacccaagaaagaaagtatatgacgtgtggagtttgcatttcttggatgggacctatcgggtcacccagcccagtcttacagtcataaattcctacctcttagttcctgccaaagggccttcagcctctgtgtgcacacttattgaatgaatgctttgcctaaagtttggccttttgaagaaaaacagcatgtgataatataaaaatatgagagtttaaaaaaaaaaaagatctctgcctctcttctctctgcctcgtcccaccttgctgtctgtctcattgtctttctctcccctcaccatgcgctgaattcagatttctctttcttttattataggcatgttgttttgaatgtggactttgtgggagggagaggattgttctgagaacagaaactggaagatacgtctgagttgatgggaccaacagggctttgctcctctgtgagggccaaagccattgatacttgtcgggggtgatgagggctttagcatctcaaggcagacatatgaagtatttactgctaaactatattacttactagtacaaatctgttggaattcaggggcagtctaagatttggtgagtgaaatgccatctggcaaaatcgagaagagagtgtggcctgagaggggaatgttcagcctcactgtcacattaagggtacctcaaaatacatggtccttccagtgtgttccttttccttcctccatttcactttgtcccctcttcttcctttctctcccattttcctggctttttagcactcagcttttttttataagtatgtatttactttttattatatatttggtcctttgggactttgtgatgattaagaatttattccattcaggattttaaaatgatgtgtttaatattttgttctcttaaactcttttgaagctatgctgctaaccaggtataggccagaaaggaggtggcccagtcagtaccttgctcacgtcagctaagggggacagtgatgtcatgtgggtgactcttcttcatttgaccaaggccagcctcctgttcttacctctgcccattcatttctggctatgggaaaactaccacctgttgagtgagccaatgaggccaggaagatcagaggggctgggttccggcccatgggccactatttgaatttctctgtagtaagctctttgtagggctggctccaactgcagtagccaaagaaaacctgtctgactcgacattttaatgcctgagagttggtgaaagttcagctgaagctaatgtctagacatcagcagtaactaggcatccagaaagtagcttcaaccaaagctaatagagcccaagtttccgcaggaagtttggtgctgagctgtccagagcagttgtttatctgagtgttgctagcccttagccatgctttcttagctttattctcgcctgttcctaggcatagcctgaaccagagctatggctcactgctcgctttattctactccctagtcatgcggaacaacatagtctaaaaaggaagatgtggactggggagttaggagacctgatttctattccctatgcttctactaactagcctcgagatcttaaccgctctgtgcctcagtgttcccatctgcaaaatggggatagtgttaattgccctacctacctcacagggttgttgtgaggataaactgagacaatgaattcaaagcaagttgacaagtaagtgctatgcaaattgtaagaaatggaaacaatcatgttaaaagcaatggaatggacattggcagaagggttaatggattgtccagccctttctctgtgtggcttaaacccaggtcgccattgctttatacattttcacttagcacagatttgtaattatgcatgtaataaagcacagccttatccaccctg

SEQ ID NO: 5704 - DNA, 3046 bp, Homo sapiens
  source 1..3046: mol_type = unassigned DNA
gtgtgaatgaagctctgccggctacgtggggcgctcactcaacttggtgtcctggacgccagagccgaccgagcgcgctgcccaccggcggcggacacgggctccgccgctccggacctcggcgacagagcaaatcagttgcctggagttcccagtgaagttgtacctgtgcccgtgcgataacgtcagtggaagctgccccgagtttggggctttagccccttggagaaaacagggccacatagctgcctttctatcaagtctccctacaaaactgagaggctctgggaaactcagcctgtgaccccagcgtgggtgaagataggatcaagatggccatgtggcagggtgccatggataacagaggctttcagcaggggagttttagtagcttccagaacagctccagtgatgaagacctgatggacattccagcaaccgctatggatttctccatgagagatgatgttcctcccttagaccgagaagtaggagaggacaagtcgtacaatggtggaggaataggttcttcaaataggatcatggacttcttggaggagccaatccctggtgtagggacctatgatgatttcaatacaattgattgggtgagagagaagtctcgagaccgggataggcaccgagagattaccaataaaagcaaagagtcaacatgggccttaattcacagtgtgagtgatgctttttccggctggttgttgatgctccttattgggcttttatcaggttcgttagctggtttgatagacatctctgctcattggatgacagacttaaaagaaggtatatgcacagggggattctggtttaaccatgaacattgttgctggaactctgagcatgtcacctttgaagagagagacaaatgtccagagtggaatagttggtcccagcttatcatcagcacagatgagggagcctttgcctacatagtcaattatttcatgtacgtcctctgggctctcctatttgccttccttgccgtatctcttgtcaaggtgtttgcgccttatgcctgtggctctggaatccctgagataaaaactatcttgagtggtttcattattaggggctatttgggtaagtggactctggttatcaaaaccatcaccttggtgctggcagtgtcgtctggcttgagcctgggcaaagagggccctctagtgcacgtggcttgctgctgtgggaacatcctgtgccactgcttcaacaaatacaggaagaatgaagccaagcgcagagaggtcttgtcggctgcagcagcagctggtgtatctgtagcctttggagcacctataggtggagtattattcagccttgaagaggtcagctactattttcccctcaaaacattgtggcgttcattctttgctgccttggtggcagcattcactctacgctccatcaatccatttgggaacagccgcctggtactattttatgtggagtttcacaccccatggcatctctttgagctcgtgccattcattctgctgggcatatttggtggtctgtggggagcactgtttatccgcacaaacattgcctggtgtcggaagcgaaagaccacccagttgggcaagtatcctgttatagaggtactcgtcgtgacagccatcactgccatcctggctttccccaatgaatacactcggatgagcacaagtgagctcatttctgagctgtttaatgactgtggccttctggactcctccaagctctgtgattatgagaaccgtttcaacacaagcaaagggggtgaactgcctgacagaccggctggcgtgggagtctacagtgcaatgtggcagctggctttaacactcatactgaaaattgtcattactatattcacctttggcatgaagatcccttctggcctctttatccctagcatggctgttggtgctatagcaggtcgacttctaggagtaggaatggaacagctggcttattaccaccaggaatggaccgtcttcaatagctggtgtagtcagggagctgattgcatcacccccggcctttatgcaatggttggggctgcagcctgcttaggtggggtgactcggatgactgtttctcttgttgtcataatgtttgaactgactggtggcttagaatacatcgtgcctctgatggctgcagccatgacaagcaagtgggtggcagatgctcttgggcgggagggcatctatgatgcccacatccgtctcaatggatacccctttcttgaagccaaagaagagtttgctcataagaccctggcaatggatgtgatgaaaccccggagaaatgatcctttgttgactgtccttactcaggacagtatgactgtggaagatgtagagaccataatcagtgaaaccacttacagtggcttcccagtggtggtatcccgggagtcccaaagacttgtgggctttgtcctccgaagagatctcattatttcaattgaaaatgctcgaaagaaacaggatggggttgttagcacttccatcatttatttcacggagcattctcctccattgccaccatacactccacccactctaaagcttcggaacatcctcgatctcagccccttcactgtgactgaccttacacccatggagatcgtagtggatattttccgaaagctgggactgcggcagtgcctggttacacacaacgggcgattgcttggaatcattaccaaaaaggatgtgttaaagcatatagcacagatggcgaaccaagatcctgattccattctcttcaactagaatcatagagttctggatgtaaagcgggaaggacattacagaccatggatatgttgtattaactgggtacccaaaacacattttccatatttggatggtgaagtcacattagtgtgttgtctctttcctacaagttaaccagttgcactacataatctctggaaattaattttctctttaggagaaattatagttaggcttccatgatgttacattaggaagatatcatgaaagaataaataagattgctatggtttaattat

SEQ ID NO: 5705 - DNA, 2660 bp, Homo sapiens
  source 1..2660: mol_type = unassigned DNA
gggaacactggtagttctttaggtggcgtttgttgctgtgaaaggcagagaatgcagcaagtgcccttctaaagcacttcagactggggcttcttttgtaaaagctccccaacctgaatgaccaaatgcgggctgccaaggttatttcttccttgaggcagaaaaaaagaaaactgtgattgaagaggacaagtcgtacaatggtggaggaataggttcttcaaataggatcatggacttcttggaggagccaatccctggtgtagggacctatgatgatttcaatacaattgattgggtgagagagaagtctcgagaccgggataggcaccgagagattaccaataaaagcaaagagtcaacatgggccttaattcacagtgtgagtgatgctttttccggctggttgttgatgctccttattgggcttttatcaggttcgttagctggtttgatagacatctctgctcattggatgacagacttaaaagaaggtatatgcacagggggattctggtttaaccatgaacattgttgctggaactctgagcatgtcacctttgaagagagagacaaatgtccagagtggaatagttggtcccagcttatcatcagcacagatgagggagcctttgcctacatagtcaattatttcatgtacgtcctctgggctctcctatttgccttccttgccgtatctcttgtcaaggtgtttgcgccttatgcctgtggctctggaatccctgagataaaaactatcttgagtggtttcattattaggggctatttgggtaagtggactctggttatcaaaaccatcaccttggtgctggcagtgtcgtctggcttgagcctgggcaaagagggccctctagtgcacgtggcttgctgctgtgggaacatcctgtgccactgcttcaacaaatacaggaagaatgaagccaagcgcagagaggtcttgtcggctgcagcagcagctggtgtatctgtagcctttggagcacctataggtggagtattattcagccttgaagaggtcagctactattttcccctcaaaacattgtggcgttcattctttgctgccttggtggcagcattcactctacgctccatcaatccatttgggaacagccgcctggtactattttatgtggagtttcacaccccatggcatctctttgagctcgtgccattcattctgctgggcatatttggtggtctgtggggagcactgtttatccgcacaaacattgcctggtgtcggaagcgaaagaccacccagttgggcaagtatcctgttatagaggtactcgtcgtgacagccatcactgccatcctggctttccccaatgaatacactcggatgagcacaagtgagctcatttctgagctgtttaatgactgtggccttctggactcctccaagctctgtgattatgagaaccgtttcaacacaagcaaagggggtgaactgcctgacagaccggctggcgtgggagtctacagtgcaatgtggcagctggctttaacactcatactgaaaattgtcattactatattcacctttggcatgaagatcccttctggcctctttatccctagcatggctgttggtgctatagcaggtcgacttctaggagtaggaatggaacagctggcttattaccaccaggaatggaccgtcttcaatagctggtgtagtcagggagctgattgcatcacccccggcctttatgcaatggttggggctgcagcctgcttaggtggggtgactcggatgactgtttctcttgttgtcataatgtttgaactgactggtggcttagaatacatcgtgcctctgatggctgcagccatgacaagcaagtgggtggcagatgctcttgggcgggagggcatctatgatgcccacatccgtctcaatggatacccctttcttgaagccaaagaagagtttgctcataagaccctggcaatggatgtgatgaaaccccggagaaatgatcctttgttgactgtccttactcaggacagtatgactgtggaagatgtagagaccataatcagtgaaaccacttacagtggcttcccagtggtggtatcccgggagtcccaaagacttgtgggctttgtcctccgaagagatctcattatttcaattgaaaatgctcgaaagaaacaggatggggttgttagcacttccatcatttatttcacggagcattctcctccattgccaccatacactccacccactctaaagcttcggaacatcctcgatctcagccccttcactgtgactgaccttacacccatggagatcgtagtggatattttccgaaagctgggactgcggcagtgcctggttacacacaacgggcgattgcttggaatcattaccaaaaaggatgtgttaaagcatatagcacagatggcgaaccaagatcctgattccattctcttcaactagaatcatagagttctggatgtaaagcgggaaggacattacagaccatggatatgttgtattaactgggtacccaaaacacattttccatatttggatggtgaagtcacattagtgtgttgtctctttcctacaagttaaccagttgcactacataatctctggaaattaattttctctttaggagaaa

SEQ ID NO: 5706 - DNA, 3353 bp, Homo sapiens
  source 1..3353: mol_type = unassigned DNA
gtcacatgagccgcgcgcccgcttcgctccccctcctccccggctgggctgtgtgaatgaagctctgccggctacgtggggcgctcactcaacttggtgtcctggacgccagagccgaccgagcgcgctgcccaccggcggcggacacgggctccgccgctccggacctcggcgacagagcaaatcagttgcctggagttcccagtgaagttgtacctgtgcccgtgcgataacgtcagtggaagctgccccgagtaagtgagggaaatctagaagtttggagcataaaaaaccagcacgaatcaactttacataaacttcatacatttattagcaactgctcgggtttaacttcagggatgttaaatttcgcctagtcccacgggacgatgatcattacttcttaactgcacgcgaaataggagaagaaaaaaggcaaatcaaaacagactgtcccaggtctcagagaagtcatcggagcgctttttcctgctgaattcaccctaggagtttgtttggggctttagccccttggagaaaacagggccacatagctgcctttctatcaagtctccctacaaaactgagaggctctgggaaactcagcctgtgaccccagcgtgggtgaagataggatcaagatggccatgtggcagggtgccatggataacagaggctttcagcaggggagttttagtagcttccagaacagctccagtgatgaagacctgatggacattccagcaaccgctatggatttctccatgagagatgatgttcctcccttagaccgagaagtaggagaggacaagtcgtacaatggtggaggaataggttcttcaaataggatcatggacttcttggaggagccaatccctggtgtagggacctatgatgatttcaatacaattgattgggtgagagagaagtctcgagaccgggataggcaccgagagattaccaataaaagcaaagagtcaacatgggccttaattcacagtgtgagtgatgctttttccggctggttgttgatgctccttattgggcttttatcaggttcgttagctggtttgatagacatctctgctcattggatgacagacttaaaagaaggtatatgcacagggggattctggtttaaccatgaacattgttgctggaactctgagcatgtcacctttgaagagagacaaatgtccagagtggaatagttggtcccagcttatcatcagcacagatgagggagcctttgcctacatagtcaattatttcatgtacgtcctctgggctctcctatttgccttccttgccgtatctcttgtcaaggtgtttgcgccttatgcctgtggctctggaatccctgagataaaaactatcttgagtggtttcattattaggggctatttgggtaagtggactctggttatcaaaaccatcaccttggtgctggcagtgtcgtctggcttgagcctgggcaaagagggccctctagtgcacgtggcttgctgctgtgggaacatcctgtgccactgcttcaacaaatacaggaagaatgaagccaagcgcagagaggtcttgtcggctgcagcagcagctggtgtatctgtagcctttggagcacctataggtggagtattattcagccttgaagaggtcagctactattttcccctcaaaacattgtggcgttcattctttgctgccttggtggcagcattcactctacgctccatcaatccatttgggaacagccgcctggtactattttatgtggagtttcacaccccatggcatctctttgagctcgtgccattcattctgctgggcatatttggtggtctgtggggagcactgtttatccgcacaaacattgcctggtgtcggaagcgaaagaccacccagttgggcaagtatcctgttatagaggtactcgtcgtgacagccatcactgccatcctggctttccccaatgaatacactcggatgagcacaagtgagctcatttctgagctgtttaatgactgtggccttctggactcctccaagctctgtgattatgagaaccgtttcaacacaagcaaagggggtgaactgcctgacagaccggctggcgtgggagtctacagtgcaatgtggcagctggctttaacactcatactgaaaattgtcattactatattcacctttggcatgaagatcccttctggcctctttatccctagcatggctgttggtgctatagcaggtcgacttctaggagtaggaatggaacagctggcttattaccaccaggaatggaccgtcttcaatagctggtgtagtcagggagctgattgcatcacccccggcctttatgcaatggttggggctgcagcctgcttaggtggggtgactcggatgactgtttctcttgttgtcataatgtttgaactgactggtggcttagaatacatcgtgcctctgatggctgcagccatgacaagcaagtgggtggcagatgctcttgggcgggagggcatctatgatgcccacatccgtctcaatggatacccctttcttgaagccaaagaagagtttgctcataagaccctggcaatggatgtgatgaaaccccggagaaatgatcctttgttgactgtccttactcaggacagtatgactgtggaagatgtagagaccataatcagtgaaaccacttacagtggcttcccagtggtggtatcccgggagtcccaaagacttgtgggctttgtcctccgaagagatctcattatttcaattgaaaatgctcgaaagaaacaggatggggttgttagcacttccatcatttatttcacggagcattctcctccattgccaccatacactccacccactctaaagcttcggaacatcctcgatctcagccccttcactgtgactgaccttacacccatggagatcgtagtggatattttccgaaagctgggactgcggcagtgcctggttacacacaacgggcgattgcttggaatcattaccaaaaaggatgtgttaaagcatatagcacagatggcgaaccaagatcctgattccattctcttcaactagaatcatagagttctggatgtaaagcgggaaggacattacagaccatggatatgttgtattaactgggtacccaaaacacattttccatatttggatggtgaagtcacattagtgtgttgtctctttcctacaagttaaccagttgcactacataatctctggaaattaattttctctttaggagaaattatagttaggcttccatgatgttacattaggaagatatcatgaaagaataaataagattgctatggtttaattat

SEQ ID NO: 5707 - DNA, 5477 bp, Homo sapiens
  source 1..5477: mol_type = unassigned DNA
agtcccagagctcgagagggccacgtgaccgtcccggggccagtcacgtgaggcgcagatcctggctgggagggggttggtagaggggtccagagtggcagtaaaggaggaagatggcggggtgcagggggtctctgtgctgctgctgcaggtggtgctgctgctgcggtgagcgtgagacccgcacccccgaggagctgaccatccttggagaaacacaggaggaggaggatgagattcttccaaggaaagactatgagagtttggattatgatcgctgtatcaatgacccttacctggaagttttggagaccatggataataagaaaggtcgaagatatgaggcggtgaagtggatggtggtgtttgccattggagtctgcactggcctggtgggtctctttgtggacttttttgtgcgactcttcacccaactcaagttcggagtggtacagacatcggtggaggagtgcagccagaaaggctgcctcgctctgtctctccttgaactcctgggttttaacctcacctttgtcttcctggcaagcctccttgttctcattgagccggtggcagcaggttccgggatacccgaggtcaaatgctatctgaatggcgtaaaggtgccaggaatcgtccgtctccggaccctgctctgcaaggtccttggagtgctgttcagtgtggctggagggctcttcgtggagaaggaaggccccatgatccacagtggttcggtggtgggagctggcctccctcagtttcagagcatctccttacggaagatccagtttaacttcccctatttccgaagcgacagagacaagagagactttgtatcagcaggagcggctgctggagttgctgcagctttcggggcgccaatcgggggtaccttgttcagtctagaggagggttcgtccttctggaaccaagggctcacgtggaaagtgctcttttgttccatgtctgccaccttcaccctcaacttcttccgttctgggattcagtttggaagctggggttccttccagctccctggattgctgaactttggcgagtttaagagtcttagagagcctccttgtgtctctggtaaccaccgtggtggtgtttgtggcctcgatggtgttaggagaatgccgacagatgtcctcttcgagtcaaatcggtaatgactcattccagctccaggtcacagaagatgtgaattcaagtatcaagacatttttttgtcccaatgatacctacaatgacatggccacactcttcttcaacccgcaggagtctgccatcctccagctcttccaccaggatggtactttcagccccgtcactctggccttgttcttcgttctctatttcttgcttgcatgttggacttacggcatttctgttccaagtggcctttttgtgccttctctgctgtgtggagctgcttttggacgtttagttgccaatgtcctaaaaagctacattggattgggccacatctattcggggacctttgccctgattggtgcagcggctttcttgggcggggtggtccgcatgaccatcagcctcacggtcatcctgatcgagtccaccaatgagatcacctacgggctccccatcatggtcacactgatggtggccaaatggacaggggactttttcaataagggcatttatgatatccacgtgggcctgcgaggcgtgccgcttctggaatgggagacagaggtggaaatggacaagctgagagccagcgacatcatggagcccaacctgacctacgtctacccgcacacccgcatccagtctctggtgagcatcctgcgcaccacggtccaccatgccttcccggtggtcacagagaaccgcggtaacgagaaggagttcatgaagggcaaccagctcatcagcaacaacatcaagttcaagaaatccagcatcctcacccgggctggcgagcagcgcaaacggagccagtccatgaagtcctacccatccagcgagctacggaacatgtgtgatgagcacatcgcctctgaggagccagccgagaaggaggacctcctgcagcagatgctggaaaggagatacactccctaccccaacctataccctgaccagtccccaagtgaagactggaccatggaggagcggttccgccctctgaccttccacggcctgatccttcggtcgcagcttgtcaccctgcttgtccgaggagtttgttactctgaaagccagtcgagcgccagccagccgcgcctctcctatgccgagatggccgaggactacccgcggtaccccgacatccacgacctggacctgacgctgctcaacccgcgcatgatcgtggatgtcaccccatacatgaacccttcgcctttcaccgtctcgcccaacacccacgtctcccaagtcttcaacctgttcagaacgatgggcctgcgccacctgcccgtggtgaacgctgtgggagagatcgtggggatcatcacacggcacaacctcacctatgaatttctgcaggcccggctgaggcagcactaccagaccatctgacagcccagcccaccctctcctggtgctgcctggggaggcaaatcatgctcactccggcgggcacagctggctggggctgttccggggcatggaagattcccagtcacccactcactcagaaagccgggagtcatcggacaccttgctggtcagaggtcctgggggtggttttgaaccatcagagcttggacttttctgacttccccagcaaggatcttcccacttcctgctccctgtgttcccaccctccagtgttggcacaggcccacccctggctccaccagagccagaagcagaggtagaatcaggcgggccccgggctgcactccgagcagtgttcctggccatctttgctactttcctagagaacccggctgttgccttaaatgtgtgagagggacttggccaaggcaaaagctggggagatgccagtgacaacatacagttcatgactaggtttaggaattgggcactgagaaaattctcaatatttcagagagtccttcccttatttgggactcttaacacggtatcctcgctagttggttttaagggaaacactctgctcctgggtgtgagcagaggctctggtcttgccctgtggtttgactctccttagaaccaccgcccaccagaaacataaaggattaaaatcacactaataacccctggatggtcaatctgataataggatcagatttacgtctaccctaattcttaacattgcagctttctctccatctgcagattattcccagtctcccagtaacacgtttctacccagatcctttttcatttccttaagttttgatctccgtcttcctgatgaagcaggcagagctcagaggatcttggcatcacccaccaaagttagctgaaagcagggcactcctggataaagcagcttcactcaactctggggaatgctaccattttttttccaaagtagaaaggaagcacttctgagccagtgaccactgaaaggtatgtgctatgataaagcagatggcctatttgaggaagagggtgtctgcccttcacaaacacctctctctcccctgcactagctgtcccaagcttacatacagaggcccttcaggagggcctcctgtgccgcagggagggtgcgtggggaagatgcttcctgccagcacgtgcctgaaggtttcacatgaagcatgggaagcgcaccctgtcgttcagtgacgtcattcttctccaggctggcccgccccctctgactaggcacccaaagtgagcatctgggcattgggcattcatgcttatcttcccccaccttctacatggtattagtcccagcaggcatccctggggcagacgtgctttggctcaagatggccttcatttacgtttagttttttttaaaaccgtggaggttgcccacgggcctcggcacctggccctggcagcacagctctcaggcccagccctgggcgacctccttggccaagtctgcctttcaccctggggtgagcatcagtcctggctctgctggtccagatcttgcgctcagcacactctagggaataattccactccagagatggggctgcttcaaggtcttttctagctgattgtggcccctccattttccccattttcttatctccctgaccaaaattgctttgacttctaaatgtttctgcttcccagaatgcacctgacttatgaaatggggataatactcccaggaaatagcgcaggacatcacaaggaccaaaaaggcaattcttatttaaatgttactatttggccagctgctgctgtgttttatggcagtgttcagagcttgatcacgttatttcttccttttattaagaaggaagccaattgtccaagtcaggagaatggtgtgatcacctgtcacagacactttgtcccctctccccgccccttcctggagctggcagagctaacgccctgcaggaggaccccggcctctcgagggctggatcagcagccgcctgccctgaggctgccccggtgaatgttattggaattcatccctcgtgcacatcctgttgtgtttaagtcaccagatattttgttcccatcagtttagcccagagatagacagtagaatgcaaatacctccctcccctaaactgactggacggctgccaaggaggccccaaacccaggccccatgcaaaggcacgtggtttccttttctcctctctctgcatctgcgctttccagataagcccaaagacagcaacttctccactcatgacaaatcaactgtgaccctcgctccttccatttctgtccattagaaaccagccttttcagcatctcacccattagcagccccatcacccagtgatcagtcgcctcagtaaagcagatctgtggatggggagcctacgggtggtaagaagtggtgttttgtgtttcatctccagcttggtgttccatggcccctaggcgaggtgatcagggagtggggccaatgggcccccggccctggctttgggaccttgtgctgagggatgatttgctcctgaccttgattaacttaacagttcccagctggaagggacactttcaggacccagtccactgtatggcatttgtgatgcagaattatgcactgacatgaccctgggtgacaggaaagcctttcgagaggcccaaggtggcctcgccagccctgcagtattgatgtgcagtattgcaccacagctctgcggaccttggccattgccgcagtcgcagcttccttttttctgtttgcactgtttgtttgtatgatgttagctaattccactgtgtatataaattgtattttttttaatttgtaaaatgctatttttatttgaacctttggaacttgggagttctcattgtaaccctaacatgtgagaataaaatgtcttctgtctcctctgtctccttta

SEQ ID NO: 5708 - DNA, 5583 bp, Homo sapiens
  source 1..5583: mol_type = unassigned DNA
ctggctgggagggggttggtagaggggtccagagtggcagtaaaggaggaagatggcggggtgcagggggtctctgtgctgctgctgcaggtggtgctgctgctgcggtgagcgtgagacccgcacccccgaggagctgaccatccttggagaaacacaggaggaggaggatgagattcttccaaggaaagactatgagagtttggattatgatcgctgtatcaatgacccttacctggaagttttggagaccatggataataagaaaggtcgaagatatgaggcggtgaagtggatggtggtgtttgccattggagtctgcactggcctggtgggtctctttgtggacttttttgtgcgactcttcacccaactcaagttcggagtggtacagacatcggtggaggagtgcagccagaaaggctgcctcgctctgtctctccttgaactcctgggttttaacctcacctttgtcttcctggcaagcctccttgttctcattgagccggtggcagcaggttccgggatacccgaggtcaaatgctatctgaatggcgtaaaggtgccaggaatcgtccgtctccggaccctgctctgcaaggtccttggagtgctgttcagtgtggctggagggctcttcgtggagaaggaaggccccatgatccacagtggttcggtggtgggagctggcctccctcagtttcagagcatctccttacggaagatccagtttaacttcccctatttccgaagcgacagagacaagagagactttgtatcagcaggagcggctgctggagttgctgcagctttcggggcgccaatcgggggtaccttgttcagtctagaggagggttcgtccttctggaaccaagggctcacgtggaaagtgctcttttgttccatgtctgccaccttcaccctcaacttcttccgttctgggattcagtttggaagctggggttccttccagctccctggattgctgaactttggcgagtttaagtgctctgactctgataaaaaatgtcatctctggacagctatggatttgggtttcttcgtcgtgatgggggtcattgggggcctcctgggagccacattcaactgtctgaacaagaggcttgcaaagtaccgtatgcgaaacgtgcacccgaaacctaagctcgtcagagtcttagagagcctccttgtgtctctggtaaccaccgtggtggtgtttgtggcctcgatggtgttaggagaatgccgacagatgtcctcttcgagtcaaatcggtaatgactcattccagctccaggtcacagaagatgtgaattcaagtatcaagacatttttttgtcccaatgatacctacaatgacatggccacactcttcttcaacccgcaggagtctgccatcctccagctcttccaccaggatggtactttcagccccgtcactctggccttgttcttcgttctctatttcttgcttgcatgttggacttacggcatttctgttccaagtggcctttttgtgccttctctgctgtgtggagctgcttttggacgtttagttgccaatgtcctaaaaagctacattggattgggccacatctattcggggacctttgccctgattggtgcagcggctttcttgggcggggtggtccgcatgaccatcagcctcacggtcatcctgatcgagtccaccaatgagatcacctacgggctccccatcatggtcacactgatggtggccaaatggacaggggactttttcaataagggcatttatgatatccacgtgggcctgcgaggcgtgccgcttctggaatgggagacagaggtggaaatggacaagctgagagccagcgacatcatggagcccaacctgacctacgtctacccgcacacccgcatccagtctctggtgagcatcctgcgcaccacggtccaccatgccttcccggtggtcacagagaaccgcggtaacgagaaggagttcatgaagggcaaccagctcatcagcaacaacatcaagttcaagaaatccagcatcctcacccgggctggcgagcagcgcaaacggagccagtccatgaagtcctacccatccagcgagctacggaacatgtgtgatgagcacatcgcctctgaggagccagccgagaaggaggacctcctgcagcagatgctggaaaggagatacactccctaccccaacctataccctgaccagtccccaagtgaagactggaccatggaggagcggttccgccctctgaccttccacggcctgatccttcggtcgcagcttgtcaccctgcttgtccgaggagtttgttactctgaaagccagtcgagcgccagccagccgcgcctctcctatgccgagatggccgaggactacccgcggtaccccgacatccacgacctggacctgacgctgctcaacccgcgcatgatcgtggatgtcaccccatacatgaacccttcgcctttcaccgtctcgcccaacacccacgtctcccaagtcttcaacctgttcagaacgatgggcctgcgccacctgcccgtggtgaacgctgtgggagagatcgtggggatcatcacacggcacaacctcacctatgaatttctgcaggcccggctgaggcagcactaccagaccatctgacagcccagcccaccctctcctggtgctgcctggggaggcaaatcatgctcactccggcgggcacagctggctggggctgttccggggcatggaagattcccagtcacccactcactcagaaagccgggagtcatcggacaccttgctggtcagaggtcctgggggtggttttgaaccatcagagcttggacttttctgacttccccagcaaggatcttcccacttcctgctccctgtgttcccaccctccagtgttggcacaggcccacccctggctccaccagagccagaagcagaggtagaatcaggcgggccccgggctgcactccgagcagtgttcctggccatctttgctactttcctagagaacccggctgttgccttaaatgtgtgagagggacttggccaaggcaaaagctggggagatgccagtgacaacatacagttcatgactaggtttaggaattgggcactgagaaaattctcaatatttcagagagtccttcccttatttgggactcttaacacggtatcctcgctagttggttttaagggaaacactctgctcctgggtgtgagcagaggctctggtcttgccctgtggtttgactctccttagaaccaccgcccaccagaaacataaaggattaaaatcacactaataacccctggatggtcaatctgataataggatcagatttacgtctaccctaattcttaacattgcagctttctctccatctgcagattattcccagtctcccagtaacacgtttctacccagatcctttttcatttccttaagttttgatctccgtcttcctgatgaagcaggcagagctcagaggatcttggcatcacccaccaaagttagctgaaagcagggcactcctggataaagcagcttcactcaactctggggaatgctaccattttttttccaaagtagaaaggaagcacttctgagccagtgaccactgaaaggtatgtgctatgataaagcagatggcctatttgaggaagagggtgtctgcccttcacaaacacctctctctcccctgcactagctgtcccaagcttacatacagaggcccttcaggagggcctcctgtgccgcagggagggtgcgtggggaagatgcttcctgccagcacgtgcctgaaggtttcacatgaagcatgggaagcgcaccctgtcgttcagtgacgtcattcttctccaggctggcccgccccctctgactaggcacccaaagtgagcatctgggcattgggcattcatgcttatcttcccccaccttctacatggtattagtcccagcaggcatccctggggcagacgtgctttggctcaagatggccttcatttacgtttagttttttttaaaaccgtggaggttgcccacgggcctcggcacctggccctggcagcacagctctcaggcccagccctgggcgacctccttggccaagtctgcctttcaccctggggtgagcatcagtcctggctctgctggtccagatcttgcgctcagcacactctagggaataattccactccagagatggggctgcttcaaggtcttttctagctgattgtggcccctccattttccccattttcttatctccctgaccaaaattgctttgacttctaaatgtttctgcttcccagaatgcacctgacttatgaaatggggataatactcccaggaaatagcgcaggacatcacaaggaccaaaaaggcaattcttatttaaatgttactatttggccagctgctgctgtgttttatggcagtgttcagagcttgatcacgttatttcttccttttattaagaaggaagccaattgtccaagtcaggagaatggtgtgatcacctgtcacagacactttgtcccctctccccgccccttcctggagctggcagagctaacgccctgcaggaggaccccggcctctcgagggctggatcagcagccgcctgccctgaggctgccccggtgaatgttattggaattcatccctcgtgcacatcctgttgtgtttaagtcaccagatattttgttcccatcagtttagcccagagatagacagtagaatgcaaatacctccctcccctaaactgactggacggctgccaaggaggccccaaacccaggccccatgcaaaggcacgtggtttccttttctcctctctctgcatctgcgctttccagataagcccaaagacagcaacttctccactcatgacaaatcaactgtgaccctcgctccttccatttctgtccattagaaaccagccttttcagcatctcacccattagcagccccatcacccagtgatcagtcgcctcagtaaagcagatctgtggatggggagcctacgggtggtaagaagtggtgttttgtgtttcatctccagcttggtgttccatggcccctaggcgaggtgatcagggagtggggccaatgggcccccggccctggctttgggaccttgtgctgagggatgatttgctcctgaccttgattaacttaacagttcccagctggaagggacactttcaggacccagtccactgtatggcatttgtgatgcagaattatgcactgacatgaccctgggtgacaggaaagcctttcgagaggcccaaggtggcctcgccagccctgcagtattgatgtgcagtattgcaccacagctctgcggaccttggccattgccgcagtcgcagcttccttttttctgtttgcactgtttgtttgtatgatgttagctaattccactgtgtatataaattgtattttttttaatttgtaaaatgctatttttatttgaacctttggaacttgggagttctcattgtaaccctaacatgtgagaataaaatgtcttctgtctcctctgtctccttta

SEQ ID NO: 5709 - DNA, 3014 bp, Homo sapiens
  source 1..3014: mol_type = unassigned DNA
agagtggcagtaaaggaggaagatggcggggtgcagggggtctctgtgctgctgctgcaggtggtgctgctgctgcggtgagcgtgagacccgcacccccgaggagctgaccatccttggagaaacacaggaggaggaggatgagattcttccaaggaaagactatgagaaaggtcgaagatatgaggcggtgaagtggatggtggtgtttgccattggagtctgcactggcctggtgggtctctttgtggacttttttgtgcgactcttcacccaactcaagttcggagtggtacagacatcggtggaggagtgcagccagaaaggctgcctcgctctgtctctccttgaactcctgggttttaacctcacctttgtcttcctggcaagcctccttgttctcattgagccggtggcagcaggttccgggatacccgaggtcaaatgctatctgaatggcgtaaaggtgccaggaatcgtccgtctccggaccctgctctgcaaggtccttggagtgctgttcagtgtggctggagggctcttcgtggagaaggaaggccccatgatccacagtggttcggtggtgggagctggcctccctcagtttcagagcatctccttacggaagatccagtttaacttcccctatttccgaagcgacagagacaagagagactttgtatcagcaggagcggctgctggagttgctgcagctttcggggcgccaatcgggggtaccttgttcagtctagaggagggttcgtccttctggaaccaagggctcacgtggaaagtgctcttttgttccatgtctgccaccttcaccctcaacttcttccgttctgggattcagtttggaagctggggttccttccagctccctggattgctgaactttggcgagtttaagtgctctgactctgataaaaaatgtcatctctggacagctatggatttgggtttcttcgtcgtgatgggggtcattgggggcctcctgggagccacattcaactgtctgaacaagaggcttgcaaagtaccgtatgcgaaacgtgcacccgaaacctaagctcgtcagagtcttagagagcctccttgtgtctctggtaaccaccgtggtggtgtttgtggcctcgatggtgttaggagaatgccgacagatgtcctcttcgagtcaaatcggtaatgactcattccagctccaggtcacagaagatgtgaattcaagtatcaagacatttttttgtcccaatgatacctacaatgacatggccacactcttcttcaacccgcaggagtctgccatcctccagctcttccaccaggatggtactttcagccccgtcactctggccttgttcttcgttctctatttcttgcttgcatgttggacttacggcatttctgttccaagtggcctttttgtgccttctctgctgtgtggagctgcttttggacgtttagttgccaatgtcctaaaaagctacattggattgggccacatctattcggggacctttgccctgattggtgcagcggctttcttgggcggggtggtccgcatgaccatcagcctcacggtcatcctgatcgagtccaccaatgagatcacctacgggctccccatcatggtcacactgatggtggccaaatggacaggggactttttcaataagggcatttatgatatccacgtgggcctgcgaggcgtgccgcttctggaatgggagacagaggtggaaatggacaagctgagagccagcgacatcatggagcccaacctgacctacgtctacccgcacacccgcatccagtctctggtgagcatcctgcgcaccacggtccaccatgccttcccggtggtcacagagaaccgcggtaacgagaaggagttcatgaagggcaaccagctcatcagcaacaacatcaagttcaagaaatccagcatcctcacccgggctggcgagcagcgcaaacggagccagtccatgaagtcctacccatccagcgagctacggaacatgtgtgatgagcacatcgcctctgaggagccagccgagaaggaggacctcctgcagcagatgctggaaaggagatacactccctaccccaacctataccctgaccagtccccaagtgaagactggaccatggaggagcggttccgccctctgaccttccacggcctgatccttcggtcgcagcttgtcaccctgcttgtccgaggagtttgttactctgaaagccagtcgagcgccagccagccgcgcctctcctatgccgagatggccgaggactacccgcggtaccccgacatccacgacctggacctgacgctgctcaacccgcgcatgatcgtggatgtcaccccatacatgaacccttcgcctttcaccgtctcgcccaacacccacgtctcccaagtcttcaacctgttcagaacgatgggcctgcgccacctgcccgtggtgaacgctgtgggagagatcgtggggatcatcacacggcacaacctcacctatgaatttctgcaggcccggctgaggcagcactaccagaccatctgacagcccagcccaccctctcctggtgctgcctggggaggcaaatcatgctcactccggcgggcacagctggctggggctgttccggggcatggaagattcccagtcacccactcactcagaaagccgggagtcatcggacaccttgctggtcagaggtcctgggggtggttttgaaccatcagagcttggacttttctgacttccccagcaaggatcttcccacttcctgctccctgtgttcccaccctccagtgttggcacaggcccacccctggctccaccagagccagaagcagaggtagaatcaggcgggccccgggctgcactccgagcagtgttcctggccatctttgctactttcctagagaacccggctgttgccttaaatgtgtgagagggacttggccaaggcaaaagctggggagatgccagtgacaacatacagttc

SEQ ID NO: 5710 - DNA, 963 bp, Homo sapiens
  source 1..963: mol_type = unassigned DNA
atggcggggtgcagggggtctctgtgctgctgctgcaggtggtgctgctgctgcggtgagcgtgagacccgcacccccgaggagctgaccatccttggagaaacacaggaggaggaggatgagattcttccaaggaaagactatgagagtttggattatgatcgctgtatcaatgacccttacctggaagttttggagaccatggataataagaaaggtcgaagatatgaggcggtgaagtggatggtggtgtttgccattggagtctgcactggcctggtgggtctctttgtggacttttttgtgcgactcttcacccaactcaagttcggagtggtacagacatcggtggaggagtgcagccagaaaggctgcctcgctctgtctctccttgaactcctgggttttaacctcacctttgtcttcctggcaagcctccttgttctcattgagccggtggcagcaggttccgggatacccgaggtcaaatgctatctgaatggcgtaaaggtgccaggaatcgtccgtctccggaccctgctctgcaaggtccttggagtgctgttcagtgtggctggagggctcttcgtggagaaggaaggccccatgatccacagtggttcggtggtgggagctggcctccctcagtttcagagcatctccttacggaagatccagtttaacttcccctatttccgaagcgacaggtatggaaagagacaagagagactttgtatcagcaggagcggctgctggagttgctgcagctttcggggcgccaatcgggggtaccttgttcagtctagaggagggttcgtccttctggaaccaagggctcacgtggaaagtgctcttttgttccatgtctgccaccttcaccctcaacttcttccgttctgggattcagtttggaagctggggttccttccagctccctggattgctgaactttggcgagtttaa

SEQ ID NO: 5711 - DNA, 927 bp, Homo sapiens
  source 1..927: mol_type = unassigned DNA
atggcggggtgcagggggtctctgtgctgctgctgcaggtggtgctgctgctgcggtgagcgtgagacccgcacccccgaggagctgaccatccttggagaaacacaggaggaggaggatgagattcttccaaggaaagactatgagagtttggattatgatcgctgtatcaatgacccttacctggaagttttggagaccatggataataagaaaggtcgaagatatgaggcggtgaagtggatggtggtgtttgccattggagtctgcactggcctggtgggtctctttgtggacttttttgtgcgactcttcacccaactcaagttcggagtggtacagacatcggtggaggagtgcagccagaaaggctgcctcgctctgtctctccttgaactcctgggttttaacctcacctttgtcttcctggcaagcctccttgttctcattgagccggtggcagcaggttccgggatacccgaggtcaaatgctatctgaatggcgtaaaggtgccaggaatcgtccgtctccggaccctgctctgcaaggtccttggagtgctgttcagtgtggctggagggctcttcgtggagaaggaaggccccatgatccacagtggttcggtggtgggagctggcctccctcagtttcagagcatctccttacggaagatccagtttaacttcccctatttccgaagcgacaggagcggctgctggagttgctgcagctttcggggcgccaatcgggggtaccttgttcagtctagaggagggttcgtccttctggaaccaagggctcacgtggaaagtgctcttttgttccatgtctgccaccttcaccctcaacttcttccgttctgggattcagtttggaagctggggttccttccagctccctggattgctgaactttggcgagtttaa

SEQ ID NO: 5712 - DNA, 1062 bp, Homo sapiens
  source 1..1062: mol_type = unassigned DNA
atggcggggtgcagggggtctctgtgctgctgctgcaggtggtgctgctgctgcggtgagcgtgagacccgcacccccgaggagctgaccatccttggagaaacacaggaggaggaggatgagattcttccaaggaaagactatgagagtttggattatgatcgctgtatcaatgacccttacctggaagttttggagaccatggataataagaaaggtcgaagatatgaggcggtgaagtggatggtggtgtttgccattggagtctgcactggcctggtgggtctctttgtggacttttttgtgcgactcttcacccaactcaagttcggagtggtacagacatcggtggaggagtgcagccagaaaggctgcctcgctctgtctctccttgaactcctgggttttaacctcacctttgtcttcctggcaagcctccttgttctcattgagccggtggcagcaggttccgggatacccgaggtcaaatgctatctgaatggcgtaaaggtgccaggaatcgtccgtctccggaccctgctctgcaaggtccttggagtgctgttcagtgtggctggagggctcttcgtggagaaggaaggccccatgatccacagtggttcggtggtgggagctggcctccctcagtttcagagcatctccttacggaagatccagtttaacttcccctatttccgaagcgacagagacaagagagactttgtatcagcaggagcggctgctggagttgctgcagctttcggggcgccaatcgggggtaccttgttcagtctagaggagggttcgtccttctggaaccaagggctcacgtggaaagtgctcttttgttccatgtctgccaccttcaccctcaacttcttccgttctgggattcagtttggaagctggggttccttccagctccctggattgctgaactttggcgagtttaagagtcttagagagcctccttgtgtctctggtaaccaccgtggtggtgtttgtggcctcgatggtgttaggagaatgccgacagatgtcctcttcgagtcaaatcggtaa

SEQ ID NO: 5713 - DNA, 2922 bp, Homo sapiens
  source 1..2922: mol_type = unassigned DNA
aagatggcggggtgcagggggtctctgtgctgctgctgcaggtggtgctgctgctgcggtgagcgtgagacccgcacccccgaggagctgaccatccttggagaaacacaggaggaggaggatgagattcttccaaggaaagactatgagagtttggattatgatcgctgtatcaatgacccttacctggaagttttggagaccatggataataagaaaggtcgaagatatgaggcggtgaagtggatggtggtgtttgccattggagtctgcactggcctggtgggtctctttgtggacttttttgtgcgactcttcacccaactcaagttcggagtggtacagacatcggtggaggagtgcagccagaaaggctgcctcgctctgtctctccttgaactcctgggttttaacctcacctttgtcttcctggcaagcctccttgttctcattgagccggtggcagcaggttccgggatacccgaggtcaaatgctatctgaatggcgtaaaggtgccaggaatcgtccgtctccggaccctgctctgcaaggtccttggagtgctgttcagtgtggctggagggctcttcgtggagaaggaaggccccatgatccacagtggttcggtggtgggagctggcctccctcagtttcagagcatctccttacggaagatccagtttaacttcccctatttccgaagcgacagagacaagagagactttgtatcagcaggagcggctgctggagttgctgcagctttcggggcgccaatcgggggtaccttgttcagtctagaggagggttcgtccttctggaaccaagggctcacgtggaaagtgctcttttgttccatgtctgccaccttcaccctcaacttcttccgttctgggattcagtttggaagctggggttccttccagctccctggattgctgaactttggcgagtttaagtgctctgactctgataaaaaatgtcatctctggacagctatggatttgggtttcttcgtcgtgatgggggtcattgggggcctcctgggagccacattcaactgtctgaacaagaggcttgcaaagtaccgtatgcgaaacgtgcacccgaaacctaagctcgtcagagtcttagagagcctccttgtgtctctggtaaccaccgtggtggtgtttgtggcctcgatggtgttaggagaatgccgacagatgtcctcttcgagtcaaatcggtaatgactcattccagctccaggtcacagaagatgtgaattcaagtatcaagacatttttttgtcccaatgatacctacaatgacatggccacactcttcttcaacccgcaggagtctgccatcctccagctcttccaccaggatggtactttcagccccgtcactctggccttgttcttcgttctctatttcttgcttgcatgttggacttacggcatttctgttccaagtggcctttttgtgccttctctgctgtgtggagctgcttttggacgtttagttgccaatgtcctaaaaagctacattggattgggccacatctattcggggacctttgccctgattggtgcagcggctttcttgggcggggtggtccgcatgaccatcagcctcacggtcatcctgatcgagtccaccaatgagatcacctacgggctccccatcatggtcacactgatggtggccaaatggacaggggactttttcaataagggcatttatgatatccacgtgggcctgcgaggcgtgccgcttctggaatgggagacagaggtggaaatggacaagctgagagccagcgacatcatggagcccaacctgacctacgtctacccgcacacccgcatccagtctctggtgagcatcctgcgcaccacggtccaccatgccttcccggtggtcacagagaaccgcggtaacgagaaggagttcatgaagggcaaccagctcatcagcaacaacatcaagttcaagaaatccagcatcctcacccgggctggcgagcagcgcaaacggagccagtccatgaagtcctacccatccagcgagctacggaacatgtgtgatgagcacatcgcctctgaggagccagccgagaaggaggacctcctgcagcagatgctggaaaggagatacactccctaccccaacctataccctgaccagtccccaagtgaagactggaccatggaggagcggttccgccctctgaccttccacggcctgatccttcggtcgcagcttgtcaccctgcttgtccgaggagtttgttactctgaaagccagtcgagcgccagccagccgcgcctctcctatgccgagatggccgaggactacccgcggtaccccgacatccacgacctggacctgacgctgctcaacccgcgcatgatcgtggatgtcaccccatacatgaacccttcgcctttcaccgtctcgcccaacacccacgtctcccaagtcttcaacctgttcagaacgatgggcctgcgccacctgcccgtggtgaacgctgtgggagaggtgagcgaggccccggccctgcccccacctttgagagaggatcccctagccaggtgctgtttgtgcacccaggcttctcaccagaaacgtaggcatcccaccaggaggggagagtgtggcccaacactagctttgaaccctgctcggcttccgtgcactcgggaccctttcccctgcctgccagcagatggcaccagcgtcccactggccgtcctttccagccagagccgcgcctctaccaggctgtgtcttcctcctgaaatgttgctcttcactccgtaccactggtgttccttggttctccacctgcgtagggatttgcgcattagatgagagaatttcaagcaaaatactttgagttttacaaagatataaaacacctagtaatta

SEQ ID NO: 5714 - DNA, 814 bp, Homo sapiens
  source 1..814: mol_type = unassigned DNA
ggctgggagggggttggtagaggggtccagagtggcagtaaaggaggaagatggcggggtgcagggggtctctgtgctgctgctgcaggtggtgctgctgctgcggtgagcgtgagacccgcacccccgaggagctgaccatccttggagaaacacaggaggaggaggatgagattcttccaaggaaagactatgagagtttggattatgatcgctgtatcaatgacccttacctggaagttttggagaccatggataataagaaaggtcgaagatatgaggcggtgaagtggatggtggtgtttgccattggagtctgcactggcctggtgggtctctttgtggacttttttgtgcgactcttcacccaactcaagttcggagtggtacagacatataaattccagatgaagatgtaaatatgcagaacaaaacttcgggagactatatgttgtcaagagtggggaataatttcttaaaactccagaaggcacagactataagaaaaaacatcaatggggccggacacagtggctcacgcctgtaatcccagcattttgggaggcagaggcaggcggatcacaaggtcaggagattgagaccatcctggctaacacggtgaaaccccgtctctactaaaaatacaaaaaaattagctgggcgtggcggtgtgcgcctgtagtcccagatgctggggaggctgaggcaggagaatggcatgaacctgggaggcggagcttgcagtaagccaagatcacgccactgcactccagcctgggtgacagagcaagactccgtctcaaaaacaaacaaa

SEQ ID NO: 5715 - DNA, 3572 bp, Homo sapiens
  source 1..3572: mol_type = unassigned DNA
tcaccacgttctgcgcttttccgagtcggacatatgagcagcgtggagctggatgatgaacttttggacccggatatggaccctccacatcccttccccaaggagatcccacacaacgagaagctcctgtccctcaagtatgagagcttggactatgacaacagtgagaaccagctgttcctggaggaggagcggcggatcaatcacacggccttccggacggtggagatcaagcgctgggtcatctgcgccctcattgggatcctcacgggcctcgtggcctgcttcattgacatcgtggtggaaaacctggctggcctcaagtacagggtcatcaagggcaatatcgacaagttcacagagaagggcggactgtccttctccctgttgctgtgggccacgctgaacgccgccttcgtgctcgtgggctctgtgattgtggctttcatagagccggtggctgctggcagcggaatcccccagatcaagtgcttcctcaacggggtgaagatcccccacgtggtgcggctcaagacgttggtgatcaaagtgtccggtgtgatcctgtccgtggtcgggggcctggccgtgggaaaggaagggccgatgatccactcaggttcagtgattgccgccgggatctctcagggaaggtcaacgtcactgaaacgagatttcaagatcttcgagtacttccgcagagacacagagaagcgggacttcgtctccgcaggggctgcggccggagtgtcagcggcgtttggagcccccgtgggtggggtcctgttcagcttggaggagggtgcgtccttctggaaccagttcctgacctggaggatcttctttgcttccatgatctccacgttcaccctgaattttgttctgagcatttaccacgggaacatgtgggacctgtccagcccaggcctcatcaacttcggaaggtttgactcggagaaaatggcctacacgatccacgagatcccggtcttcatcgccatgggcgtggtgggcggtgtgcttggagcagtgttcaatgccttgaactactggctgaccatgtttcgaatcaggtacatccaccggccctgcctgcaggtgattgaggccgtgctggtggccgccgtcacggccacagttgccttcgtgctgatctactcgtcgcgggattgccagcccctgcaggggggctccatgtcctacccgctgcagctcttttgtgcagatggcgagtacaactccatggctgcggccttcttcaacaccccggagaagagcgtggtgagcctcttccacgacccgccaggctcctacaaccccctgaccctcggcctgttcacgctggtctacttcttcctggcctgctggacctacgggctcacggtgtctgccggggtcttcatcccgtccctgctcatcggggctgcctggggccggctctttgggatctccctgtcctacctcacgggggcggcgatctgggcggaccccggcaaatacgccctgatgggagctgctgcccagctgggcgggattgtgcggatgacactgagcctgaccgtcatcatgatggaggccaccagcaacgtgacctacggcttccccatcatgctggtgctcatgaccgccaagatcgtgggcgacgtcttcattgagggcctgtacgacatgcacattcagctgcagagtgtgcccttcctgcactgggaggccccggtcacctcacactcactcactgccagggaggtgatgagcacaccagtgacctgcctgaggcggcgtgagaaggtcggcgtcattgtggacgtgctgagcgacacggcgtccaatcacaacggcttccccgtggtggagcatgccgatgacacccagcctgcccggctccagggcctgatcctgcgctcccagctcatcgttctcctaaagcacaaggtgtttgtggagcggtccaacctgggcctggtacagcggcgcctgaggctgaaggacttccgagacgcctacccgcgcttcccacccatccagtccatccacgtgtcccaggacgagcgggagtgcaccatggacctctccgagttcatgaacccctccccctacacggtgccccaggaggcgtcgctcccacgggtgttcaagctgttccgggccctgggcctgcggcacctggtggtggtggacaaccgcaatcaggttgtcgggttggtgaccaggaaggacctcgccaggtaccgcctgggaaagagaggcttggaggagctctcgctggcccagacgtgaggcccagccctgcccataatgggcactggcgctggcaccccggcccttctgcatttcctcccggagtcactggtttctcggcccaaaccatgctccccagcagtggcaatggcgagcaccctgcagctgggcgggcaggcggcaggcgcggaactgaccctctcgcgggactgaccctgttgtgggcagtggtctccccccttggcgcctccttgcgcaggcccagcctccactctcctcgtctaggtttctttacctccagggatcagctgtgtgtgtgtgacctccctaccgggctatcggcctcttgggagccagcggcagggccggcacctgcgtgcctgtgcccgtgtgcgtgagacagagcccttgcccctgctgctgccccgagggctgccctgccctggaagggcccctctgcctccacaccagtggagtcttcgagacttgggagctgcttggcctcattttcagccatgagcagacggcctgtggtccctgggcctgaggcacggactcgtagcaccagggtttggaggctgcgaccgccccggagagcagcttcacactggcgccacagaggagccccacgtgcactccccggcctgcatccggcttgggtacacaggcccagaggactggggtgactcacgggccctgtgctgtgatgttgagagctgagaaaaacctccaaggccctgagccccatgcccagccctgccttggtcccccaacccccagagcttggagtctgggccccacacccagccctgccttggtccctgagcctcagagcgtggaattgctgccctgtggacactggctgggaaggcaggtcttcccctagcacatggggaccccggcctcgagggtgacctccctaccccgcccctgccagccaccaagcgcaggtgcagcgggggccagactcctgccggcctcagaggacacctggcccagcacaggcagctagaagggccggtgggcaccggggccgggaagcccccacctcaccacctgagggcccctgggaggctcctctggcctggctgggctgggtctggggccgccacaggcccctcacggggcggcagaggcaacttcagtgtccctgttagagcaacacgggtccctccgtggggggctgggtgcggccccctgccgtgtatttcctccccagggagtggggcctccccgggagctgacgccaccaccctgcttagccctcacagggccccaaggtgtccgagtgtgttgggtctgaacgcgaaataaagaaatcctctcagcccgcc

SEQ ID NO: 5716 - DNA, 4311 bp, Homo sapiens
  source 1..4311: mol_type = unassigned DNA
attaggcgggaggaccctctggggctgcctggaggaagcctccactccgaccctcgcccgagtgcctactgcgagggcggatgcatgcttcgggacttctaatttcatccttcacgtctttagccgccgcctatggcaaggaaaggcctgccctcgcccctgcctccctcctcccttccccaccgcggctccgtcacgatcggcgcgggcgaccgggcctgggggagcccctccagccggctcctgccctcaggccccgggcgcttccctcgccccgactcccgggcccgaggtcccgggggcggccattcgcctcccaagcactcggcgctcagcccaacggggccgcctttgcagtcgcgtgggcagaacggggtcctcagggccgcggcgattctctagggcgggcggcgccacgacccgccgggagcgcggctcccaggagcccccgcgcgaccgggcctcggtggttgccgttgcaggtcacatggtcgccgtcgctcatcacgtggccccgtcgcgcgtcacgtggccgccggcgcgggtcacgagaacaaacacgggggcagccggcgcttcccggccggtgtcgctccgcggcgggccatggccaacgtctctaagaaggtgtcctggtccggccgggaccgggacgacgaggaggcggcgccgctgctgcggaggacggcgcggcccggcggggggacgccgctgctgaacggggctgggcctggggctgcgcgccagtcaccacgttctgcgcttttccgagtcggacatatgagcagcgtggagctggatgatgaacttttggacccggatatggaccctccacatcccttccccaaggagatcccacacaacgagaagctcctgtccctcaagtatgagagcttggactatgacaacagtgagaaccagctgttcctggaggaggagcggcggatcaatcacacggccttccggacggtggagatcaagcgctgggtcatctgcgccctcattgggatcctcacgggcctcgtggcctgcttcattgacatcgtggtggaaaacctggctggcctcaagtacagggtcatcaagggcaatatcgacaagttcacagagaagggcggactgtccttctccctgttgctgtgggccacgctgaacgccgccttcgtgctcgtgggctctgtgattgtggctttcatagagccggtggctgctggcagcggaatcccccagatcaagtgcttcctcaacggggtgaagatcccccacgtggtgcggctcaagacgttggtgatcaaagtgtccggtgtgatcctgtccgtggtcgggggcctggccgtgggaaaggaagggccgatgatccactcaggttcagtgattgccgccgggatctctcagggaaggtcaacgtcactgaaacgagatttcaagatcttcgagtacttccgcagagacacagagaagcgggacttcgtctccgcaggggctgcggccggagtgtcagcggcgtttggagcccccgtgggtggggtcctgttcagcttggaggagggtgcgtccttctggaaccagttcctgacctggaggatcttctttgcttccatgatctccacgttcaccctgaattttgttctgagcatttaccacgggaacatgtgggacctgtccagcccaggcctcatcaacttcggaaggtttgactcggagaaaatggcctacacgatccacgagatcccggtcttcatcgccatgggcgtggtgggcggtgtgcttggagcagtgttcaatgccttgaactactggctgaccatgtttcgaatcaggtacatccaccggccctgcctgcaggtgattgaggccgtgctggtggccgccgtcacggccacagttgccttcgtgctgatctactcgtcgcgggattgccagcccctgcaggggggctccatgtcctacccgctgcagctcttttgtgcagatggcgagtacaactccatggctgcggccttcttcaacaccccggagaagagcgtggtgagcctcttccacgacccgccaggctcctacaaccccctgaccctcggcctgttcacgctggtctacttcttcctggcctgctggacctacgggctcacggtgtctgccggggtcttcatcccgtccctgctcatcggggctgcctggggccggctctttgggatctccctgtcctacctcacgggggcggcgatctgggcggaccccggcaaatacgccctgatgggagctgctgcccagctgggcgggattgtgcggatgacactgagcctgaccgtcatcatgatggaggccaccagcaacgtgacctacggcttccccatcatgctggtgctcatgaccgccaagatcgtgggcgacgtcttcattgagggcctgtacgacatgcacattcagctgcagagtgtgcccttcctgcactgggaggccccggtcacctcacactcactcactgccagggaggtgatgagcacaccagtgacctgcctgaggcggcgtgagaaggtcggcgtcattgtggacgtgctgagcgacacggcgtccaatcacaacggcttccccgtggtggagcatgccgatgacacccagcctgcccggctccagggcctgatcctgcgctcccagctcatcgttctcctaaagcacaaggtgtttgtggagcggtccaacctgggcctggtacagcggcgcctgaggctgaaggacttccgagacgcctacccgcgcttcccacccatccagtccatccacgtgtcccaggacgagcgggagtgcaccatggacctctccgagttcatgaacccctccccctacacggtgccccaggaggcgtcgctcccacgggtgttcaagctgttccgggccctgggcctgcggcacctggtggtggtggacaaccgcaatcaggttgtcgggttggtgaccaggaaggacctcgccaggtaccgcctgggaaagagaggcttggaggagctctcgctggcccagacgtgaggcccagccctgcccataatgggcactggcgctggcaccccggcccttctgcatttcctcccggagtcactggtttctcggcccaaaccatgctccccagcagtggcaatggcgagcaccctgcagctgggcgggcaggcggcaggcgcggaactgaccctctcgcgggactgaccctgttgtgggcagtggtctccccccttggcgcctccttgcgcaggcccagcctccactctcctcgtctaggtttctttacctccagggatcagctgtgtgtgtgtgacctccctaccgggctatcggcctcttgggagccagcggcagggccggcacctgcgtgcctgtgcccgtgtgcgtgagacagagcccttgcccctgctgctgccccgagggctgccctgccctggaagggcccctctgcctccacaccagtggagtcttcgagacttgggagctgcttggcctcattttcagccatgagcagacggcctgtggtccctgggcctgaggcacggactcgtagcaccagggtttggaggctgcgaccgccccggagagcagcttcacactggcgccacagaggagccccacgtgcactccccggcctgcatccggcttgggtacacaggcccagaggactggggtgactcacgggccctgtgctgtgatgttgagagctgagaaaaacctccaaggccctgagccccatgcccagccctgccttggtcccccaacccccagagcttggagtctgggccccacacccagccctgccttggtccctgagcctcagagcgtggaattgctgccctgtggacactggctgggaaggcaggtcttcccctagcacatggggaccccggcctcgagggtgacctccctaccccgcccctgccagccaccaagcgcaggtgcagcgggggccagactcctgccggcctcagaggacacctggcccagcacaggcagctagaagggccggtgggcaccggggccgggaagcccccacctcaccacctgagggcccctgggaggctcctctggcctggctgggctgggtctggggccgccacaggcccctcacggggcggcagaggcaacttcagtgtccctgttagagcaacacgggtccctccgtggggggctgggtgcggccccctgccgtgtatttcctccccagggagtggggcctccccgggagctgacgccaccaccctgcttagccctcacagggccccaaggtgtccgagtgtgttgggtctgaacgcgaaataaagaaatcctctc

SEQ ID NO: 5717 - DNA, 2570 bp, Homo sapiens
  source 1..2570: mol_type = unassigned DNA
atcacgtggccccgtcgcgcgtcacgtggccgccggcgcgggtcacgagaacaaacacgggggctgcgcgccagtcaccacgttctgcgcttttccgagtcggacatatgagcagcgtggagctggatgatgaacttttggacccggatatggaccctccacatcccttccccaaggagatcccacacaacgagaagctcctgtccctcaagtatgagagcttggactatgacaacagtgagaaccagctgttcctggaggaggagcggcggatcaatcacacggccttccggacggtggagatcaagcgctgggtcatctgcgccctcattgggatcctcacgggcctcgtggcctgcttcattgacatcgtggtggaaaacctggctggcctcaagtacagggtcatcaagggcaatatcgacaagttcacagagaagggcggactgtccttctccctgttgctgtgggccacgctgaacgccgccttcgtgctcgtgggctctgtgattgtggctttcatagagccggtggctgctggcagcggaatcccccagatcaagtgcttcctcaacggggtgaagatcccccacgtggtgcggctcaagacgttggtgatcaaagtgtccggtgtgatcctgtccgtggtcgggggcctggccgtgggaaaggaagggccgatgatccactcaggttcagtgattgccgccgggatctctcagggaaggtcaacgtcactgaaacgagatttcaagatcttcgagtacttccgcagagacacagagaagcgggacttcgtctccgcaggggctgcggccggagtgtcagcggcgtttggagcccccgtgggtggggtcctgttcagcttggaggagggtgcgtccttctggaaccagttcctgacctggaggatcttctttgcttccatgatctccacgttcaccctgaattttgttctgagcatttaccacgggaacatgtgggacctgtccagcccaggcctcatcaacttcggaaggtttgactcggagaaaatggcctacacgatccacgagatcccggtcttcatcgccatgggcgtggtgggcggtgtgcttggagcagtgttcaatgccttgaactactggctgaccatgtttcgaatcaggtacatccaccggccctgcctgcaggtgattgaggccgtgctggtggccgccgtcacggccacagttgccttcgtgctgatctactcgtcgcgggattgccagcccctgcaggggggctccatgtcctacccgctgcagctcttttgtgcagatggcgagtacaactccatggctgcggccttcttcaacaccccggagaagagcgtggtgagcctcttccacgacccgccaggctcctacaaccccctgaccctcggcctgttcacgctggtctacttcttcctggcctgctggacctacgggctcacggtgtctgccggggtcttcatcccgtccctgctcatcggggctgcctggggccggctctttgggatctccctgtcctacctcacgggggcggcgatctgggcggaccccggcaaatacgccctgatgggagctgctgcccagctgggcgggattgtgcggatgacactgagcctgaccgtcatcatgatggaggccaccagcaacgtgacctacggcttccccatcatgctggtgctcatgaccgccaagatcgtgggcgacgtcttcattgagggcctgtacgacatgcacattcagctgcagagtgtgcccttcctgcactgggaggccccggtcacctcacactcactcactgccagggaggtgatgagcacaccagtgacctgcctgaggcggcgtgagaaggtcggcgtcattgtggacgtgctgagcgacacggcgtccaatcacaacggcttccccgtggtggagcatgccgatgacacccagcctgcccggctccagggcctgatcctgcgctcccagctcatcgttctcctaaagcacaaggtgtttgtggagcggtccaacctgggcctggtacagcggcgcctgaggctgaaggacttccgagacgcctacccgcgcttcccacccatccagtccatccacgtgtcccaggacgagcgggagtgcaccatggacctctccgagttcatgaacccctccccctacacggtgccccaggaggcgtcgctcccacgggtgttcaagctgttccgggccctgggcctgcggcacctggtggtggtggacaaccgcaatcaggttgtcgggttggtgaccaggaaggacctcgccaggtaccgcctgggaaagagaggcttggaggagctctcgctggcccagacgtgaggcccagccctgcccataatgggcactggcgctggcaccccggcccttctgcatttcctcccggagtcactggtttctcggcccaaaccatgctccccagcagtggcaatggcgagcaccctgcagctgggcgggcaggcggcaggcgcggaactgaccctctcgcgggactgaccctgttgtgggcagtggtctccccccttggcgcctccttgcgca

SEQ ID NO: 5718 - DNA, 4153 bp, Homo sapiens
  source 1..4153: mol_type = unassigned DNA
gtcgctcatcacgtggccccgtcgcgcgtcacgtggccgccggcgcgggtcacgagaacaaacacgggggcagccggcgcttcccggccggtgtcgctccgcggcgggccatggccaacgtctctaagaaggtgtcctggtccggccgggaccgggacgacgaggaggcggcgccgctgctgcggaggacggcgcggcccggcggggggacgccgctgctgaacggggctgggcctggggctgcgcgccaggatatggaccctccacatcccttccccaaggagatcccacacaacgagaagctcctgtccctcaagtatgagagcttggactatgacaacagtgagaaccagctgttcctggaggaggagcggcggatcaatcacacggccttccggacggtggagatcaagcgctgggtcatctgcgccctcattgggatcctcacgggcctcgtggcctgcttcattgacatcgtggtggaaaacctggctggcctcaagtacagggtcatcaagggcaatatcgacaagttcacagagaagggcggactgtccttctccctgttgctgtgggccacgctgaacgccgccttcgtgctcgtgggctctgtgattgtggctttcatagagccggtggctgctggcagcggaatcccccagatcaagtgcttcctcaacggggtgaagatcccccacgtggtgcggctcaagacgttggtgatcaaagtgtccggtgtgatcctgtccgtggtcgggggcctggccgtgggaaaggaagggccgatgatccactcaggttcagtgattgccgccgggatctctcagggaaggtcaacgtcactgaaacgagatttcaagatcttcgagtacttccgcagagacacagagaagcgggacttcgtctccgcaggggctgcggccggagtgtcagcggcgtttggagcccccgtgggtggggtcctgttcagcttggaggagggtgcgtccttctggaaccagttcctgacctggaggatcttctttgcttccatgatctccacgttcaccctgaattttgttctgagcatttaccacgggaacatgtgggacctgtccagcccaggcctcatcaacttcggaaggtttgactcggagaaaatggcctacacgatccacgagatcccggtcttcatcgccatgggcgtggtgggcggtgtgcttggagcagtgttcaatgccttgaactactggctgaccatgtttcgaatcaggtacatccaccggccctgcctgcaggtgattgaggccgtgctggtggccgccgtcacggccacagttgccttcgtgctgatctactcgtcgcgggattgccagcccctgcaggggggctccatgtcctacccgctgcagctcttttgtgcagatggcgagtacaactccatggctgcggccttcttcaacaccccggagaagagcgtggtgagcctcttccacgacccgccaggctcctacaaccccctgaccctcggcctgttcacgctggtctacttcttcctggcctgctggacctacgggctcacggtgtctgccggggtcttcatcccgtccctgctcatcggggctgcctggggccggctctttgggatctccctgtcctacctcacgggggcggcgatctgggcggaccccggcaaatacgccctgatgggagctgctgcccagctgggcgggattgtgcggatgacactgagcctgaccgtcatcatgatggaggccaccagcaacgtgacctacggcttccccatcatgctggtgctcatgaccgccaagatcgtgggcgacgtcttcattgagggcctgtacgacatgcacattcagctgcagagtgtgcccttcctgcactgggaggccccggtcacctcacactcactcactgccagggaggtgatgagcacaccagtgacctgcctgaggcggcgtgagaaggtcggcgtcattgtggacgtgctgagcgacacggcgtccaatcacaacggcttccccgtggtggagcatgccgatgacacccagcctgcccggctccagggcctgatcctgcgctcccagctcatcgttctcctaaagcacaaggtgtttgtggagcggtccaacctgggcctggtacagcggcgcctgaggctgaaggacttccgagacgcctacccgcgcttcccacccatccagtccatccacgtgtcccaggacgagcgggagtgcaccatggacctctccgagttcatgaacccctccccctacacggtgccccaggaggcgtcgctcccacgggtgttcaagctgttccgggccctgggcctgcggcacctggtggtggtggacaaccgcaatcaggttgtcgggttggtgaccaggaaggacctcgccaggtaccgcctgggaaagagaggcttggaggagctctcgctggcccagacgtgaggcccagccctgcccataatgggcactggcgctggcaccccggcccttctgcatttcctcccggagtcactggtttctcggcccaaaccatgctccccagcagtggcaatggcgagcaccctgcagctgggcgggcaggcggcaggcgcggaactgaccctctcgcgggactgaccctgttgtgggcagtggtctccccccttggcgcctccttgcgcaggcccagcctccactctcctcgtctaggtttctttacctccagggatcagctgtgtgtgtgtgacctccctaccgggctatcggcctcttgggagccagcggcagggccggcacctgcgtgcctgtgcccgtgtgcgtgagacagagcccttgcccctgctgctgccccgagggctgccctgccctggaagggcccctctgcctccacaccagtggagtcttcgagacttgggagctgcttggcctcattttcagccatgagcagacggcctgtggtccctgggcctgaggcacggactcgtagcaccagggtttggaggctgcgaccgccccggagagcagcttcacactggcgccacagaggagccccacgtgcactccccggcctgcatccggcttgggtacacaggcccagaggactggggtgactcacgggccctgtgctgtgatgttgagagctgagaaaaacctccaaggccctgagccccatgcccagccctgccttggtcccccaacccccagagcttggagtctgggccccacacccagccctgccttggtccctgagcctcagagcgtggaattgctgccctgtggacactggctgggaaggcaggtcttcccctagcacatggggaccccggcctcgagggtgacctccctaccccgcccctgccagccaccaagcgcaggtgcagcgggggccagactcctgccggcctcagaggacacctggcccagcacaggcagctagaagggccggtgggcaccggggccgggaagcccccacctcaccacctgagggcccctgggaggctcctctggcctggctgggctgggtctggggccgccacaggcccctcacggggcggcagaggcaacttcagtgtccctgttagagcaacacgggtccctccgtggggggctgggtgcggccccctgccgtgtatttcctccccagggagtggggcctccccgggagctgacgccaccaccctgcttagccctcacagggccccaaggtgtccgagtgtgttgggtctgaacgcgaaataaagaaatcctctcagcccgcctttgccagcgtcgtccctcccaccccacccagaccacgtccaacagcctgggactttcgggaccctggggtcggggcaccgtgtggagtgagaaaggcgtgaaagacagcggctgcggccacccagggcaccagccacatcctcttcctcgtccccgcccctcagcctccctcctctggctcctggctggtgggtctgggggcaaggcagaggcgctccaggtggaggggggcgggccggggtgcccacgctggggtgacgcaagaagaaaactcccgggcctcagagtcggcgccggaaacctaggtctgggtttccctcgtggtggttgtgtactgaggacctggaagtgatcatattttggatatattcggttaaataaaatcagcggttaggattcac

SEQ ID NO: 5719 - DNA, 3310 bp, Homo sapiens
  source 1..3310: mol_type = unassigned DNA
tgctaatgcttttggtacaaatggatgtggaatataattgaatattttcttgtttaaggggagcatgaagaggtgttgaggttatgtcaagcatctggcacagctgaaggcagatggaaatatttacaagtacgcaatttgagactaagatattgttatcattctcctattgaagacaagagcaatagtaaaacacatcaggtcagggggttaaagacctgtgataaaccacttccgataagttggaaacgtgtgtctatattttcatatctgtatatatataatggtaaagaaagacaccttcgtaacccgcattttccaaagagagaaatcacagggagatgtacagcaatggggccatttaagagttctgtgttcatcttgattcttcaccttctagaaggggccctgagtaattcactcattcagctgaacaacaatggctatgaaggcattgtcgttgcaatcgaccccaatgtgccagaagatgaaacactcattcaacaaataaaggacatggtgacccaggcatctctgtatctgcttgaagctacaggaaagcgattttatttcaaaaatgttgccattttgattcctgaaacatggaagacaaaggctgactatgtgagaccaaaacttgagacctacaaaaatgctgatgttctggttgctgagtctactcctccaggtaatgatgaaccctacactgagcagatgggcaactgtggagagaagggtgaaaggatccacctcactcctgatttcattgcaggaaaaaagttagctgaatatggaccacaaggtagggcatttgtccatgagtgggctcatctacgatggggagtatttgacgagtacaataatgatgagaaattctacttatccaatggaagaatacaagcagtaagatgttcagcaggtattactggtacaaatgtagtaaagaagtgtcagggaggcagctgttacaccaaaagatgcacattcaataaagtaacaggactctatgaaaaaggatgtgagtttgttctccaatcccgccagacggagaaggcttctataatgtttgcacaacatgttgattctatagttgaattctgtacagaacaaaaccacaacaaagaagctccaaacaagcaaaatcaaaaatgcaatctccgaagcacatgggaagtgatccgtgattctgaggactttaagaaaaccactcctatgacaacacagccaccaaatcccaccttctcattgctgcagattggacaaagaattgtgtgtttagtccttgacaaatctggaagcatggcgactggtaaccgcctcaatcgactgaatcaagcaggccagcttttcctgctgcagacagttgagctggggtcctgggttgggatggtgacatttgacagtgctgcccatgtacaaaatgaactcatacagataaacagtggcagtgacagggacacactcgccaaaagattacctgcagcagcttcaggagggacgtccatctgcagcgggcttcgatcggcatttactgtgattaggaagaaatatccaactgatggatctgaaattgtgctgctgacggatggggaagacaacactataagtgggtgctttaacgaggtcaaacaaagtggtgccatcatccacacagtcgctttggggccctctgcagctcaagaactagaggagctgtccaaaatgacaggaggtttacagacatatgcttcagatcaagttcagaacaatggcctcattgatgcttttggggccctttcatcaggaaatggagctgtctctcagcgctccatccagcttgagagtaagggattaaccctccagaacagccagtggatgaatggcacagtgatcgtggacagcaccgtgggaaaggacactttgtttcttatcacctggacaatgcagcctccccaaatccttctctgggatcccagtggacagaagcaaggtggctttgtagtggacaaaaacaccaaaatggcctacctccaaatcccaggcattgctaaggttggcacttggaaatacagtctgcaagcaagctcacaaaccttgaccctgactgtcacgtcccgtgcgtccaatgctaccctgcctccaattacagtgacttccaaaacgaacaaggacaccagcaaattccccagccctctggtagtttatgcaaatattcgccaaggagcctccccaattctcagggccagtgtcacagccctgattgaatcagtgaatggaaaaacagttaccttggaactactggataatggagcaggtgctgatgctactaaggatgacggtgtctactcaaggtatttcacaacttatgacacgaatggtagatacagtgtaaaagtgcgggctctgggaggagttaacgcagccagacggagagtgataccccagcagagtggagcactgtacatacctggctggattgagaatgatgaaatacaatggaatccaccaagacctgaaattaataaggatgatgttcaacacaagcaagtgtgtttcagcagaacatcctcgggaggctcatttgtggcttctgatgtcccaaatgctcccatacctgatctcttcccacctggccaaatcaccgacctgaaggcggaaattcacgggggcagtctcattaatctgacttggacagctcctggggatgattatgaccatggaacagctcacaagtatatcattcgaataagtacaagtattcttgatctcagagacaagttcaatgaatctcttcaagtgaatactactgctctcatcccaaaggaagccaactctgaggaagtctttttgtttaaaccagaaaacattacttttgaaaatggcacagatcttttcattgctattcaggctgttgataaggtcgatctgaaatcagaaatatccaacattgcacgagtatctttgtttattcctccacagactccgccagagacacctagtcctgatgaaacgtctgctccttgtcctaatattcatatcaacagcaccattcctggcattcacattttaaaaattatgtggaagtggataggagaactgcagctgtcaatagcctagggctgaatttttgtcagataaataaaataaatcattcatccttttttttgattataaaattttctaaaatgtattttagacttcctgtagggggcgatatactaaatgtatatagtacatttatactaaatgtattcctgtagggggcgatatactaaatgtattttagacttcctgtagggggcgataaaataaaatgctaaacaactgggta

SEQ ID NO: 5720 - DNA, 3118 bp, Homo sapiens
  source 1..3118: mol_type = unassigned DNA
gataaaccacttccgataagttggaaacgtgtgtctatattttcatatctgtatatatataatggtaaagaaagacaccttcgtaacccgcattttccaaagagagaaatcacagggagatgtacagcaatggggccatttaagagttctgtgttcatcttgattcttcaccttctagaaggggccctgagtaattcactcattcagctgaacaacaatggctatgaaggcattgtcgttgcaatcgaccccaatgtgccagaagatgaaacactcattcaacaaataaaggacatggtgacccaggcatctctgtatctgcttgaagctacaggaaagcgattttatttcaaaaatgttgccattttgattcctgaaacatggaagacaaaggctgactatgtgagaccaaaacttgagacctacaaaaatgctgatgttctggttgctgagtctactcctccaggtaatgatgaaccctacactgagcagatgggcaactgtggagagaagggtgaaaggatccacctcactcctgatttcattgcaggaaaaaagttagctgaatatggaccacaaggtagggcatttgtccatgagtgggctcatctacgatggggagtatttgacgagtacaataatgatgagaaattctacttatccaatggaagaatacaagcagtaagatgttcagcaggtattactggtacaaatgtagtaaagaagtgtcagggaggcagctgttacaccaaaagatgcacattcaataaagtaacaggactctatgaaaaaggatgtgagtttgttctccaatcccgccagacggagaaggcttctataatgtttgcacaacatgttgattctatagttgaattctgtacagaacaaaaccacaacaaagaagctccaaacaagcaaaatcaaaaatgcaatctccgaagcacatgggaagtgatccgtgattctgaggactttaagaaaaccactcctatgacaacacagccaccaaatcccaccttctcattgctgcagattggacaaagaattgtgtgtttagtccttgacaaatctggaagcatggcgactggtaaccgcctcaatcgactgaatcaagcaggccagcttttcctgctgcagacagttgagctggggtcctgggttgggatggtgacatttgacagtgctgcccatgtacaaaatgaactcatacagataaacagtggcagtgacagggacacactcgccaaaagattacctgcagcagcttcaggagggacgtccatctgcagcgggcttcgatcggcatttactgtgattaggaagaaatatccaactgatggatctgaaattgtgctgctgacggatggggaagacaacactataagtgggtgctttaacgaggtcaaacaaagtggtgccatcatccacacagtcgctttggggccctctgcagctcaagaactagaggagctgtccaaaatgacaggaggtttacagacatatgcttcagatcaagttcagaacaatggcctcattgatgcttttggggccctttcatcaggaaatggagctgtctctcagcgctccatccagcttgagagtaagggattaaccctccagaacagccagtggatgaatggcacagtgatcgtggacagcaccgtgggaaaggacactttgtttcttatcacctggacaatgcagcctccccaaatccttctctgggatcccagtggacagaagcaaggtggctttgtagtggacaaaaacaccaaaatggcctacctccaaatcccaggcattgctaaggttggcacttggaaatacagtctgcaagcaagctcacaaaccttgaccctgactgtcacgtcccgtgcgtccaatgctaccctgcctccaattacagtgacttccaaaacgaacaaggacaccagcaaattccccagccctctggtagtttatgcaaatattcgccaaggagcctccccaattctcagggccagtgtcacagccctgattgaatcagtgaatggaaaaacagttaccttggaactactggataatggagcaggtgctgatgctactaaggatgacggtgtctactcaaggtatttcacaacttatgacacgaatggtagatacagtgtaaaagtgcgggctctgggaggagttaacgcagccagacggagagtgataccccagcagagtggagcactgtacatacctggctggattgagaatgatgaaatacaatggaatccaccaagacctgaaattaataaggatgatgttcaacacaagcaagtgtgtttcagcagaacatcctcgggaggctcatttgtggcttctgatgtcccaaatgctcccatacctgatctcttcccacctggccaaatcaccgacctgaaggcggaaattcacgggggcagtctcattaatctgacttggacagctcctggggatgattatgaccatggaacagctcacaagtatatcattcgaataagtacaagtattcttgatctcagagacaagttcaatgaatctcttcaagtgaatactactgctctcatcccaaaggaagccaactctgaggaagtctttttgtttaaaccagaaaacattacttttgaaaatggcacagatcttttcattgctattcaggctgttgataaggtcgatctgaaatcagaaatatccaacattgcacgagtatctttgtttattcctccacagactccgccagagacacctagtcctgatgaaacgtctgctccttgtcctaatattcatatcaacagcaccattcctggcattcacattttaaaaattatgtggaagtggataggagaactgcagctgtcaatagcctagggctgaatttttgtcagataaataaaataaatcattcatccttttttttgattataaaattttctaaaatgtattttagacttcctgtagggggcgatatactaaatgtatatagtacatttatactaaatgtattcctgtagggggcgatatactaaatgtattttagacttcctgtagggggcgataaaataaaatgctaaacaactgggtatacatgcataaaaactatccattcaaaccc

SEQ ID NO: 5721 - DNA, 2608 bp, Homo sapiens
  source 1..2608: mol_type = unassigned DNA
acccgcattttccaaagagagaaatcacagggagatgtacagcaatggggccatttaagagttctgtgttcatcttgattcttcaccttctagaaggggccctgagtaattcactcattcagctgaacaacaatggctatgaaggcattgtcgttgcaatcgaccccaatgtgccagaagatgaaacactcattcaacaaataaaggacatggtgacccaggcatctctgtatctgcttgaagctacaggaaagcgattttatttcaaaaatgttgccattgcaggaaaaaagttagctgaatatggaccacaaggtagggcatttgtccatgagtgggctcatctacgatggggagtatttgacgagtacaataatgatgagaaattctacttatccaatggaagaatacaagcagtaagatgttcagcaggtattactggtacaaatgtagtaaagaagtgtcagggaggcagctgttacaccaaaagatgcacattcaataaagtaacaggactctatgaaaaaggatgtgagtttgttctccaatcccgccagacggagaaggcttctataatgtttgcacaacatgttgattctatagttgaattctgtacagaacaaaaccacaacaaagaagctccaaacaagcaaaatcaaaaatgcaatctccgaagcacatgggaagtgatccgtgattctgaggactttaagaaaaccactcctatgacaacacagccaccaaatcccaccttctcattgctgcagattggacaaagaattgtgtgtttagtccttgacaaatctggaagcatggcgactggtaaccgcctcaatcgactgaatcaagcaggccagcttttcctgctgcagacagttgagctggggtcctgggttgggatggtgacatttgacagtgctgcccatgtacaaaatgaactcatacagataaacagtggcagtgacagggacacactcgccaaaagattacctgcagcagcttcaggagggacgtccatctgcagcgggcttcgatcggcatttactgtgattaggaagaaatatccaactgatggatctgaaattgtgctgctgacggatggggaagacaacactataagtgggtgctttaacgaggtcaaacaaagtggtgccatcatccacacagtcgctttggggccctctgcagctcaagaactagaggagctgtccaaaatgacaggaggtttacagacatatgcttcagatcaagttcagaacaatggcctcattgatgcttttggggccctttcatcaggaaatggagctgtctctcagcgctccatccagcttgagagtaagggattaaccctccagaacagccagtggatgaatggcacagtgatcgtggacagcaccgtgggaaaggacactttgtttcttatcacctggacaatgcagcctccccaaatccttctctgggatcccagtggacagaagcaaggtggctttgtagtggacaaaaacaccaaaatggcctacctccaaatcccaggcattgctaaggttggcacttggaaatacagtctgcaagcaagctcacaaaccttgaccctgactgtcacgtcccgtgcgtccaatgctaccctgcctccaattacagtgacttccaaaacgaacaaggacaccagcaacctccccaattctcagggccagtgtcacagccctgattgaatcagtgaatggaaaaacagttaccttggaactactggataatggagcaggtgctgatgctactaaggatgacggtgtctactcaaggtatttcacaacttatgacacgaatggtagatacagtgtaaaagtgcgggctctgggaggagttaacgcagccagacggagagtgataccccagcagagtggagcactgtacatacctggctggattgagaatgatgaaatacaatggaatccaccaagacctgaaattaataaggatgatgttcaacacaagcaagtgtgtttcagcagaacatcctcgggaggctcatttgtggcttctgatgtcccaaatgctcccatacctgatctcttcccacctggccaaatcaccgacctgaaggcggaaattcacgggggcagtctcattaatctgacttggacagctcctggggatgattatgaccatggaacagctcacaagtatatcattcgaataagtacaagtattcttgatctcagagacaagttcaatgaatctcttcaagtgaatactactgctctcatcccaaaggaagccaactctgaggaagtctttttgtttaaaccagaaaacattacttttgaaaatggcacagatcttttcattgctattcaggctgttgataaggtcgatctgaaatcagaaatatccaacattgcacgagtatctttgtttattcctccacagactccgccagagacacctagtcctgatgaaacgtctgctccttgtcctaatattcatatcaacagcaccattcctggcattcacattttaaaaattatgtggaagtggataggagaactgcagctgtcaatagcctagggctgaatttttgtcagataaataaaataaatcattcatcctt

SEQ ID NO: 5722 - DNA, 2475 bp, Homo sapiens
  source 1..2475: mol_type = unassigned DNA
gaggactgacaggggcctgatggaggagttggtggggctgcgtgagggcttctcaggggaccctgtgactctgcaggagctgtggggcccctgtccccacatccgccgagccatccaaggtggcctggagtggctaaagcagaaggtgttccgcctgggagaagactggtacttcctgatgaccctcggggtgctcatggccctggtcagctatgccatgaactttgccatcgggtgtgtggtccgagcacaccagtggctgtacagggagattggggacagccacctgctccggtatctttcctggactgtgtaccctgtggccctcgtctctttctcctcaggcttctcccagagcatcacgccctcctctggaggttctggaatcccggagctgaagaccatgttggcgggtgtgatcttggaggactacctggatatcaagaactttggggccaaggtggtgggcctctcctgcaccctggccaccggcagcaccctgttcctgggcaaagtgggccctttcgtgcacctgtctgtaatgatcgctgcctacctgggccgtgtgcgcaccacgaccatcggggagcctgagaacaagagcaagcaaaacgaaatgctggtggcagcggcggcagtgggcgtggccacagtctttgcagctcccttcagcggcgtcctgttcagcatcgaggtcatgtcttcccacttctctgtccgggattactggaggggcttctttgcggccacctgcggggccttcatattccggctcctggcagtcttcaacagcgagcaggagaccatcacctccctctacaagaccagtttccgggtggacgttcccttcgacctgcctgagatcttcttttttgtggcgctgggtggcatctgcggcgtcctgagctgtgcttacctcttctgtcagcgaaccttcctcagcttcatcaagaccaatcggtacagctccaaactgctggctactagcaagcctgtgtactccgctctggccaccttgcttctcgcctccatcacctacccgcctggtgtgggccacttcctagcttctcggctgtccatgaagcagcatctggactcgctgttcgacaaccactcctgggcgctgatgacccagaactccagcccaccctggcccgaggagctcgacccccagcacctttggtgggaatggtaccacccgcggttcaccatctttgggacccttgccttcttcctggttatgaagttctggatgctgattctggccaccaccatccccatgcctgccgggtacttcatgcccatctttatccttggagctgccatcgggcgcctcttgggagaggctcttgccgtcgccttccctgagggcattgtgactggaggggttaccaatcccatcatgcccggggggtatgctctggcaggggctgcagccttctcaggggctgtgacccacaccatctccacggcgctgctggcctttgagctgaccggccagatagtgcatgcactgcccgtgctgatggcggtgctggcagccaacgccattgcacagagctgccagccctccttctatgatggcaccatcattgtcaagaagctgccatacctgccacggattctgggccgcaacatcggctcccaccatgtgagggtggagcacttcatgaaccacagcatcaccacactggccaaggacacgccgctggaggaggtggtcaaggttgtgacctccacagacgtgaccgagtatcccctggtggagagcacagagtcccagatcctggtaggcatcgtgcagagggcccagctggtgcaggccctccaggctgagcctccttccagggctccaggacaccagcagtgtctccaggacatcttggccaggggctgccccacggaaccagtgaccctgacgctattctcagagaccaccttgcaccaggcacaaaacctctttaagctgttgaaccttcagtccctcttcgtgacatcgcggggcagagctgtgggctgcgtgtcctgggtggagatgaagaaagcaatttccaacctgacaaatccgccagctccaaagtgagccggcccagcaagatgaaacagggcaccccagctgacctggtactgaggttgggctgagaccctgcttctcttcccccatcaccacctgcccctccctccagcccagctccattctttggcataacaggcaactctaacctagcccagaagaggatggctcatcctgggtgggacgatggctcctgccttgaaagacaaaaatcccaccttgggcagagctgagtgtgagaagatggaaaaccagtatctgccaggtgctcagtgactggccatcacattaatgaatgacgagattggagtacactgtcaccaagggcaggcaaagatgccctctggggttgtctggttcccagtgagaggctcctgagaaaaataaagctggttcccaga

SEQ ID NO: 5723 - DNA, 2581 bp, Homo sapiens
  source 1..2581: mol_type = unassigned DNA
gcctccacagttctggttggtttgtcaaggacgtttttaatctccatggtgcactggagctgggagcaaaggaggctctgtgagaggagggccagttcagccgcagcaggaggactgacaggggcctgatggaggagttggtggggctgcgtgagggcttctcaggggaccctgtgactctgcaggagctgtggggcccctgtccccacatccgccgagccatccaaggtggcctggagtggctaaagcagaaggtgttccgcctgggagaagactggtacttcctgatgaccctcggggtgctcatggccctggtcagctatgccatgaactttgccatcgggtgtgtggtccgagcacaccagtggctgtacagggagattggggacagccacctgctccggtatctttcctggactgtgtaccctgtggccctcgtctctttctcctcaggcttctcccagagcatcacgccctcctctggaggttctggaatcccggagctgaagaccatgttggcgggtgtgatcttggaggactacctggatatcaagaactttggggccaaggtggtgggcctctcctgcaccctggccaccggcagcaccctgttcctgggcaaagtgggccctttcgtgcacctgtctgtaatgatcgctgcctacctgggccgtgtgcgcaccacgaccatcggggagcctgagaacaagagcaagcaaaacgaaatgctggtggcagcggcggcagtgggcgtggccacagtctttgcagctcccttcagcggcgtcctgttcagcatcgaggtcatgtcttcccacttctctgtccgggattactggaggggcttctttgcggccacctgcggggccttcatattccggctcctggcagtcttcaacagcgagcaggagaccatcacctccctctacaagaccagtttccgggtggacgttcccttcgacctgcctgagatcttcttttttgtggcgctgggtggcatctgcggcgtcctgagctgtgcttacctcttctgtcagcgaaccttcctcagcttcatcaagaccaatcggtacagctccaaactgctggctactagcaagcctgtgtactccgctctggccaccttgcttctcgcctccatcacctacccgcctggtgtgggccacttcctagcttctcggctgtccatgaagcagcatctggactcgctgttcgacaaccactcctgggcgctgatgacccagaactccagcccaccctggcccgaggagctcgacccccagcacctttggtgggaatggtaccacccgcggttcaccatctttgggacccttgccttcttcctggttatgaagttctggatgctgattctggccaccaccatccccatgcctgccgggtacttcatgcccatctttatccttggagctgccatcgggcgcctcttgggagaggctcttgccgtcgccttccctgagggcattgtgactggaggggttaccaatcccatcatgcccggggggtatgctctggcaggggctgcagccttctcaggggctgtgacccacaccatctccacggcgctgctggcctttgagctgaccggccagatagtgcatgcactgcccgtgctgatggcggtgctggcagccaacgccattgcacagagctgccagccctccttctatgatggcaccatcattgtcaagaagctgccatacctgccacggattctgggccgcaacatcggctcccaccatgtgagggtggagcacttcatgaaccacagcatcaccacactggccaaggacacgccgctggaggaggtggtcaaggttgtgacctccacagacgtgaccgagtatcccctggtggagagcacagagtcccagatcctggtaggcatcgtgcagagggcccagctggtgcaggccctccaggctgagcctccttccagggctccaggacaccagtgtctccaggacatcttggccaggggctgccccacggaaccagtgaccctgacgctattctcagagaccaccttgcaccaggcacaaaacctctttaagctgttgaaccttcagtccctcttcgtgacatcgcggggcagagctgtgggctgcgtgtcctgggtggagatgaagaaagcaatttccaacctgacaaatccgccagctccaaagtgagccggcccagcaagatgaaacagggcaccccagctgacctggtactgaggttgggctgagaccctgcttctcttcccccatcaccacctgcccctccctccagcccagctccattctttggcataacaggcaactctaacctagcccagaagaggatggctcatcctgggtgggacgatggctcctgccttgaaagacaaaaatcccaccttgggcagagctgagtgtgagaagatggaaaaccagtatctgccaggtgctcagtgactggccatcacattaatgaatgacgagattggagtacactgtcaccaagggcaggcaaagatgccctctggggttgtctggttcccagtgagaggctcctgagaaaaataaagctggttcccaga

SEQ ID NO: 5724 - DNA, 2530 bp, Homo sapiens
  source 1..2530: mol_type = unassigned DNA
gtgcactggagctgggagcaaaggaggctctgtgagaggagggccagttcagccgcagcaggaggactgacaggggcctgatggaggagttggtggggctgcgtgagggcttctcaggggaccctgtgactctgcaggagctgtggggcccctgtccccacatccgccgagccatccaaggtggcctggagtggctaaagcagaaggtgttccgcctgggagaagactggtacttcctgatgaccctcggggtgctcatggccctggtcagctatgccatgaactttgccatcgggtgtgtggtccgagcacaccagtggctgtacagggagattggggacagccacctgctccggtatctttcctggactgtgtaccctgtggccctcgtctctttctcctcaggcttctcccagagcatcacgccctcctctggaggttctggaatcccggagctgaagaccatgttggcgggtgtgatcttggaggactacctggatatcaagaactttggggccaaggtggtgggcctctcctgcaccctggccaccggcagcaccctgttcctgggcaaagtgggccctttcgtgcacctgtctgtaatgatcgctgcctacctgggccgtgtgcgcaccacgaccatcggggagcctgagaacaagagcaagcaaaacgaaatgctggtggcagcggcggcagtgggcgtggccacagtctttgcagctcccttcagcggcgtcctgttcagcatcgaggtcatgtcttcccacttctctgtccgggattactggaggggcttctttgcggccacctgcggggccttcatattccggctcctggcagtcttcaacagcgagcaggagaccatcacctccctctacaagaccagtttccgggtggacgttcccttcgacctgcctgagatcttcttttttgtggcgctgggtggcatctgcggcgtcctgagctgtgcttacctcttctgtcagcgaaccttcctcagcttcatcaagaccaatcggtacagctccaaactgctggctactagcaagcctgtgtactccgctctggccaccttgcttctcgcctccatcacctacccgcctggtgtgggccacttcctagcttctcggctgtccatgaagcagcatctggactcgctgttcgacaaccactcctgggcgctgatgacccagaactccagcccaccctggcccgaggagctcgacccccagcacctttggtgggaatggtaccacccgcggttcaccatctttgggacccttgccttcttcctggttatgaagttctggatgctgattctggccaccaccatccccatgcctgccgggtacttcatgcccatctttatccttggagctgccatcgggcgcctcttgggagaggctcttgccgtcgccttccctgagggcattgtgactggaggggttaccaatcccatcatgcccggggggtatgctctggcaggggctgcagccttctcaggggctgtgacccacaccatctccacggcgctgctggcctttgagctgaccggccagatagtgcatgcactgcccgtgctgatggcggtgctggcagccaacgccattgcacagagctgccagccctccttctatgatggcaccatcattgtcaagaagctgccatacctgccacggattctgggccgcaacatcggctcccaccatgtgagggtggagcacttcatgaaccacagcatcaccacactggccaaggacacgccgctggaggaggtggtcaaggttgtgacctccacagacgtgaccgagtatcccctggtggagagcacagagtcccagatcctggtaggcatcgtgcagagggcccagctggtgcaggccctccaggctgagcctccttccagggctccaggacaccagtgtctccaggacatcttggccaggggctgccccacggaaccagtgaccctgacgctattctcagagaccaccttgcaccaggcacaaaacctctttaagctgttgaaccttcagtccctcttcgtgacatcgcggggcagagctgtgggctgcgtgtcctgggtggagatgaagaaagcaatttccaacctgacaaatccgccagctccaaagtgagccggcccagcaagatgaaacagggcaccccagctgacctggtactgaggttgggctgagaccctgcttctcttcccccatcaccacctgcccctccctccagcccagctccattctttggcataacaggcaactctaacctagcccagaagaggatggctcatcctgggtgggacgatggctcctgccttgaaagacaaaaatcccaccttgggcagagctgagtgtgagaagatggaaaaccagtatctgccaggtgctcagtgactggccatcacattaatgaatgacgagattggagtacactgtcaccaagggcaggcaaagatgccctctggggttgtctggttcccagtgagaggctcctgagaaaaataaagctggttccc

SEQ ID NO: 5725 - DNA, 1997 bp, Homo sapiens
  source 1..1997: mol_type = unassigned DNA
gaggctctgtgagaggagggccagttcagccgcagcaggaggactgacaggggcctgatggaggagttggtggggctgcgtgagggcttctcaggggaccctgtgactctgcaggagctgtggggcccctgtccccacatccgccgagccatccaaggtggcctggagtggctaaagcagaaggtgttccgcctgggagaagactggtacttcctgatgaccctcggggtgctcatggccctggtcagctatgccatgaactttgccatcgggtgtgtggtccgaggttctggaatcccggagctgaagaccatgttggcgggtgtgatcttggaggactacctggatatcaagaactttggggccaaggtggtgggcctctcctgcaccctggccaccggcagcaccctgttcctgggcaaagtgggccctttcgtgcacctgtctgtaatgatcgctgcctacctgggccgtgtgcgcaccacgaccatcggggagcctgagaacaagagcaagcaaaacgaaatgctggtggcagcggcggcagtgggcgtggccacagtctttgcagctcccttcagcggcgtcctgttcagcatcgaggtcatgtcttcccacttctctgtccgggattactggaggggcttctttgcggccacctgcggggccttcatattccggctcctggcagtcttcaacagcgagcaggagaccatcacctccctctacaagaccagtttccgggtggacgttcccttcgacctgcctgagatcttcttttttgtggcgctgggtggcatctgcggcgtcctgagctgtgcttacctcttctgtcagcgaaccttcctcagcttcatcaagaccaatcggtacagctccaaactgctggctactagcaagcctgtgtactccgctctggccaccttgcttctcgcctccatcacctacccgcctggtgtgggccacttcctagcttctcggctgtccatgaagcagcatctggactcgctgttcgacaaccactcctgggcgctgatgacccagaactccagcccaccctggcccgaggagctcgacccccagcacctttggtgggaatggtaccacccgcggttcaccatctttgggacccttgccttcttcctggttatgaagttctggatgctgattctggccaccaccatccccatgcctgccgggtacttcatgcccatctttatccttggagctgccatcgggcgcctcttgggagaggctcttgccgtcgccttccctgagggcattgtgactggaggggttaccaatcccatcatgcccggggggtatgctctggcaggggctgcagccttctcaggggctgtgacccacaccatctccacggcgctgctggcctttgagctgaccggccagatagtgcatgcactgcccgtgctgatggcggtgctggcagccaacgccattgcacagagctgccagccctccttctatgatggcaccatcattgtcaagaagctgccatacctgccacggattctgggccgcaacatcggctcccaccatgtgagggtggagcacttcatgaaccacagcatcaccacactggccaaggacacgccgctggaggaggtggtcaaggttgtgacctccacagacgtgaccgagtatcccctggtggagagcacagagtcccagatcctggtaggcatcgtgcagagggcccagctggtgcaggccctccaggctgagcctccttccagggctccaggacaccagcagtgtctccaggacatcttggccaggggctgccccacggaaccagtgaccctgacgctattctcagagaccaccttgcaccaggcacaaaacctctttaagctgttgaaccttcagtccctcttcgtgacatcgcggggcagagctgtgggctgcgtgtcctgggtggagatgaagaaagcaatttccaacctgacaaatccgccagctccaaagtgagccgg

SEQ ID NO: 5726 - DNA, 1520 bp, Homo sapiens
  source 1..1520: mol_type = unassigned DNA
ggggggaggatgttgattgttggaacacacacctgtccaggtgcaggggagctggaggctctgtgagaggagggccagctcagccacagcaggaggactgacaggggcctgatggaggagtttgtggggctgcgtgaaggctcctcagggaaccctgtgactctgcaggagctgtggggcccctgtccccgcatccgccgaggcatccgaggtggcctggagtggctgaagcagaagctcttccgcctgggcgaggactggtacttcctgatgaccctcggggtgctcatggccctggtcagctgtgccatggacttggctgttgagagtgtggtccgagcgcaccagtggctgtacagggagattggggacagccacctgctccggtatctctcctggactgtgtaccctgtggccctcgtctctttctcttcaggcttctctcagagcatcacaccctcctctggaggttctggaatcccggaggtgaagaccatgttggcgggtgtggtcttggaggactacctggatatcaagaactttggggccaaagtggtgggcctctcctgcaccctggcctgtggcagcaccctcttcctcgggaaagtgggccctttcgtgcacctgtctgtgatgatggctgcctacctgggccgtgtgcgcaccacgaccatcggggagcctgagaacaagagcaagcctgtgtactccgctctggccaccttggttctcgcctccatcacctacccacccagcgccggccgcttcctagcttctcggctgtccatgaagcagcatctggactcgctgttcgacaaccactcctgggcgctgatgacccagaactccagcccaccctggcccgaggagctcgacccccagcacctgtggtgggaatggtaccacccgcggttcaccatctttgggacccttgccttcttcctggttatgaagttctggatgctgattctggccaccaccatccccatgcctgccgggtacttcatgcccatctttgtctatggagctgctatcgggcgcctctttggggagactctctcttttatcttccctgagggcatcgtggctggagggatcaccaatcccatcatgccaggggggtatgctctggcaggggctgcagccttctcaggggctgtgacccacaccatctccacggcgctgctggccttcgaggtgaccggccagatagtgcatgcactgcccgtgctgatggcggtgctggcagccaacgccattgcacagagctgccagccctccttctatgatggcaccgtcattgtcaagaagctgccatacctgccacggattctgggccgcaacatcggttcccaccgcgtgagggtggagcacttcatgaaccacagcatcaccacactggccatcacattaatgaatgatgagattggagtacactgtcaccaagggcaggcacagatgccttctggggttgtctggttcccagtgagaggctcctgagaaaaataaagctggttccc

SEQ ID NO: 5727 - DNA, 2129 bp, Homo sapiens
  source 1..2129: mol_type = unassigned DNA
aacattatacagacttgggtttgaaatccacgtatgaccctggcccgttggcctctctgagcccggcttcctcctctacaaaatggagatcgcaaccgtccccacccgatagcgagagggcgcacacccgcattccaggctggacgggtctctgggcagcgggctcctccccgcccagggcgcatgccctgccctcccctcctgtctgtccctgtccgggctgcaggagagcaggacagatgggtcagggaggaggtgacatggggagggggtcctacagtcacaggtgggtgggggtggagggcccacctgagatcagtgtcgcccccaggcgtcctgttcagcatcgaggtcatgtcttcccacttctctgtctgggattactggaggggcttctttgcggccacctgcggggccttcatgttccggctcctggcggtcttcaacagcgagcaggagaccatcacctccctctacaagaccagtttccgggtggacgttcccttcgacctgcctgagatcttcttttttgtggcgctggggggtctctgtggcatcctgggcagcgcttacctcttctgtcagcgaatcttctttggcttcatcaggaacaataggttcagctccaaactgctggccaccagcaagcctgtgtactccgctctggccaccttggttctcgcctccatcacctacccacccagcgccggccgcttcctagcttctcggctgtccatgaagcagcatctggactcgctgttcgacaaccactcctgggcgctgatgacccagaactccagcccaccctggcccgaggagctcgacccccagcacctgtggtgggaatggtaccacccgcggttcaccatctttgggacccttgccttcttcctggttatgaagttctggatgctgattctggccaccaccatccccatgcctgccgggtacttcatgcccatctttgtctatggagctgctatcgggcgcctctttggggagactctctcttttatcttccctgagggcatcgtggctggagggatcaccaatcccatcatgccaggggggtatgctctggcaggggctgcagccttctcaggggctgtgacccacaccatctccacggcgctgctggccttcgaggtgaccggccagatagtgcatgcactgcccgtgctgatggcggtgctggcagccaacgccattgcacagagctgccagccctccttctatgatggcaccgtcattgtcaagaagctgccatacctgccacggattctgggccgcaacatcggttcccaccgcgtgagggtggagcacttcatgaaccacagcatcaccacactggccaaggacatgccactggaggaggtggtcaaggttgtgacctccacagacgtggccaagtatcccctggtggagagcacagagtcccagatcctggtgggcatagtgcgaagggcccagctggtgcaggccctgaaggctgagcctccttcctgggctcctggacaccagtgtctccaggacatcttggctgcaggctgccccacagaaccagtgaccctgaagctgtccccagagacttccctgcatgaggcacacaacctctttgagctgttgaaccttcattccctctttgtgacgtcgcggggcagagctgtgggctgcgtgtcctgggtggagatgaagaaagcaatttccaacctgacaaatccgccagccccaaagtgagccggcccagcaagatgaaacagggcaccccagctgacctggtactgaggttgggctgagaccctgcttctcttcccccatcaccacctgcccctccctccagcccagctccattctttggcataacaggcaactttaacctagcccagaagaggatggctcatcctgggtgggacgatggctcctgccttgaaagacaaaaatcccaccttgggcagagctgagtgtgagaagatggaaaaccagtatctgccagttgctcagtgactggccatcacattaatgaatgatgagattggagtacactgtcaccaagggcaggcacagatgccttctggggttgtctggttcccagtgagaggctcctgagaaaaataaagctggttcccaga

SEQ ID NO: 5728 - DNA, 2110 bp, Homo sapiens
  source 1..2110: mol_type = unassigned DNA
ataaaccctgggcccaggcgggaaaggggggaggatgttgattgttggaacacacacctgtccaggtgcaggggagctggaggctctgtgagaggagggccagctcagccacagcaggaggactgacaggggcctgatggaggagtttgtggggctgcgtgaaggctcctcagggaaccctgtgactctgcaggagctgtggggcccctgtccccgcatccgccgaggcatccgaggtggcctggagtggctgaagcagaagctcttccgcctgggcgaggactggtacttcctgatgaccctcggggtgctcatggccctggtcagctgtgccatggacttggctgttgagagtgtggtccgagcgcaccagtggctgtacagggagattggggacagccacctgctccggtatctctcctggactgtgtaccctgtggccctcgtctctttctcttcaggcttctctcagagcatcacaccctcctctggaggttctggaatcccggaggtgaagaccatgttggcgggtgtggtcttggaggactacctggatatcaagaactttggggccaaagtggtgggcctctcctgcaccctggcctgtggcagcaccctcttcctcgggaaagtgggccctttcgtgcacctgtctgtgatgatggctgcctacctgggccgtgtgcgcaccacgaccatcggggagcctgagaacaagagcaagcaaaacgaaatgctggtggcagcggcggcagtgggcgtggccacagtctttgcagctcccttcagcggcgtcctgttcagcatcgaggtcatgtcttcccacttctctgtctgggattactggaggggcttctttgcggccacctgcggggccttcatgttccggctcctggcggtcttcaacagcgagcaggagaccatcacctccctctacaagaccagtttccgggtggacgttcccttcgacctgcctgagatcttcttttttgtggcgctggggggtctctgtggcatcctgggcagcgcttacctcttctgtcagcgaatcttctttggcttcatcaggaacaataggttcagctccaaactgctggccaccagcaagcctgtgtactccgctctggccaccttggttctcgcctccatcacctacccacccagcgccggccgcttcctagcttctcggctgtccatgaagcagcatctggactcgctgttcgacaaccactcctgggcgctgatgacccagaactccagcccaccctggcccgaggagctcgacccccagcacctgtggtgggaatggtaccacccgcggttcaccatctttgggacccttgccttcttcctggttatgaagttctggatgctgattctggccaccaccatccccatgcctgccgggtacttcatgcccatctttgtctatggagctgctatcgggcgcctctttggggagactctctcttttatcttccctgagggcatcgtggctggagggatcaccaatcccatcatgccaggggggtatgctctggcaggggctgcagccttctcaggggctgtgacccacaccatctccacggcgctgctggccttcgaggtgaccggccagatagtgcatgcactgcccgtgctgatggcggtgctggcagccaacgccattgcacagagctgccagccctccttctatgatggcaccgtcattgtcaagaagctgccatacctgccacggattctgggccgcaacatcggttcccaccgcgtgagggtggagcacttcatgaaccacagcatcaccacactggccaaggacatgccactggaggaggtggtcaaggttgtgacctccacagacgtggccaagtatcccctggtggagagcacagagtcccagatcctggtgggcatagtgcgaagggcccagctggtgcaggccctgaaggctgagcctccttcctgggctcctggacaccagtgtctccaggacatcttggctgcaggctgccccacagaaccagtgaccctgaagctgtccccagagacttccctgcatgaggcacagatgccttctggggttgtctggttcccagtgagaggctcctga

SEQ ID NO: 5729 - DNA, 2567 bp, Homo sapiens
  source 1..2567: mol_type = unassigned DNA
ggggggaggatgttgattgttggaacacacacctgtccaggtgcaggggagctggaggctctgtgagaggagggccagctcagccacagcaggaggactgacaggggcctgatggaggagtttgtggggctgcgtgaaggctcctcagggaaccctgtgactctgcaggagctgtggggcccctgtccccgcatccgccgaggcatccgaggtggcctggagtggctgaagcagaagctcttccgcctgggcgaggactggtacttcctgatgaccctcggggtgctcatggccctggtcagctgtgccatggacttggctgttgagagtgtggtccgagcgcaccagtggctgtacagggagattggggacagccacctgctccggtatctctcctggactgtgtaccctgtggccctcgtctctttctcttcaggcttctctcagagcatcacaccctcctctggaggttctggaatcccggaggtgaagaccatgttggcgggtgtggtcttggaggactacctggatatcaagaactttggggccaaagtggtgggcctctcctgcaccctggcctgtggcagcaccctcttcctcgggaaagtgggccctttcgtgcacctgtctgtgatgatggctgcctacctgggccgtgtgcgcaccacgaccatcggggagcctgagaacaagagcaagcaaaacgaaatgctggtggcagcggcggcagtgggcgtggccacagtctttgcagctcccttcagcggcgtcctgttcagcatcgaggtcatgtcttcccacttctctgtctgggattactggaggggcttctttgcggccacctgcggggccttcatgttccggctcctggcggtcttcaacagcgagcaggagaccatcacctccctctacaagaccagtttccgggtggacgttcccttcgacctgcctgagatcttcttttttgtggcgctggggggtctctgtggcatcctgggcagcgcttacctcttctgtcagcgaatcttctttggcttcatcaggaacaataggttcagctccaaactgctggccaccagcaagcctgtgtactccgctctggccaccttggttctcgcctccatcacctacccacccagcgccggccgcttcctagcttctcggctgtccatgaagcagcatctggactcgctgttcgacaaccactcctgggcgctgatgacccagaactccagcccaccctggcccgaggagctcgacccccagcacctgtggtgggaatggtaccacccgcggttcaccatctttgggacccttgccttcttcctggttatgaagttctggatgctgattctggccaccaccatccccatgcctgccgggtacttcatgcccatctttgtctatggagctgctatcgggcgcctctttggggagactctctcttttatcttccctgagggcatcgtggctggagggatcaccaatcccatcatgccaggggggtatgctctggcaggggctgcagccttctcaggggctgtgacccacaccatctccacggcgctgctggccttcgaggtgaccggccagatagtgcatgcactgcccgtgctgatggcggtgctggcagccaacgccattgcacagagctgccagccctccttctatgatggcaccgtcattgtcaagaagctgccatacctgccacggattctgggccgcaacatcggttcccaccgcgtgagggtggagcacttcatgaaccacagcatcaccacactggccaaggacatgccactggaggaggtggtcaaggttgtgacctccacagacgtggccaagtatcccctggtggagagcacagagtcccagatcctggtgggcatagtgcgaagggcccagctggtgcaggccctgaaggctgagcctccttcctgggctcctggacaccagcagtgtctccaggacatcttggctgcaggctgccccacagaaccagtgaccctgaagctgtccccagagacttccctgcatgaggcacacaacctctttgagctgttgaaccttcattccctctttgtgacgtcgcggggcagagctgtgggctgcgtgtcctgggtggagatgaagaaagcaatttccaacctgacaaatccgccagccccaaagtgagccggcccagcaagatgaaacagggcaccccagctgacctggtactgaggttgggctgagaccctgcttctcttcccccatcaccacctgcccctccctccagcccagctccattctttggcataacaggcaactttaacctagcccagaagaggatggctcatcctgggtgggacgatggctcctgccttgaaagacaaaaatcccaccttgggcagagctgagtgtgagaagatggaaaaccagtatctgccagttgctcagtgactggccatcacattaatgaatgatgagattggagtacactgtcaccaagggcaggcacagatgccttctggggttgtctggttcccagtgagaggctcctgagaaaaataaagctggttcccaga

SEQ ID NO: 5730 - DNA, 464 bp, Homo sapiens
  source 1..464: mol_type = unassigned DNA
gcacagagctgccagccctccttctatgatggcaccgtcattgtcaagaagctgccatacctgccacggattctgggccgcaacatcggttcccaccgcgtgagggtggagcacttcatgaaccacagcatcaccacactggccaaggacatgccactggaggaggtggtcaaggttgtgacctccacagacgtggccaagtatcccctggtggagagcacagagtcccagatcctggtgggcatagtgcgaagggcccagctggtgcaggccctgaaggctgagcctccttcctgggctcctggacaccagtgtctccaggacatcttggctgcaggctgccccacagaaccagtgaccctgaagctgtccccagagacttccctgcatgaggcacagatgccttctggggttgtctggttcccagtgagaggctcctgagaaaaataaagctggttcccaga

SEQ ID NO: 5731 - DNA, 3187 bp, Homo sapiens
  source 1..3187: mol_type = unassigned DNA
ctctgctctcggcctcccgggctgcggggacgggacggctgccggcgcggactttgcgggccgggagccgagtccaggacagagccggaaccgccgagggaggcgagagggcagtgcgcggagatggcggccgcggcggcggaggaagggatggagccacgggcgctgcagtacgagcagaccctgatgtatggccggtacactcaggaccttggggcctttgccaaagaggaagctgctcggattcgcctgggagggcctgaaccctggaaaggtcccccttcctctcgggctgccccagagctcttggaatatggacggagccgttgcgcccgatgccgcgtctgttctgtccgctgccacaagttcctagtatccagggttggtgaagattggatcttcctggtcctgctggggcttctcatggcattggtcagctgggtcatggactatgccattgctgcctgtctgcaagcccagcagtggatgtcccggggcttgaacaccagcatcttgctccagtacctggcctgggtcacctaccctgttgtcctcatcactttctcagccggattcacacagatcctggcccctcaggctgtcggctctggcatccctgagatgaagaccatcttgcggggagtggtgctgaaagaatacctcacactcaagacctttatagctaaggtcattgggctgacctgcgccctaggcagcgggatgccgcttggcaaagagggcccttttgtgcatatcgcaagcatgtgtgctgcccttctcagcaagttcctctccctctttgggggtatctatgagaatgaatcccggaacacagagatgctggctgccgcctgtgccgtgggggtgggctgctgcttcgcggcacctattggaggcgtcctcttcagcatcgaggtcacctccaccttctttgcagtgcggaactactggcggggcttcttcgctgccaccttcagtgccttcatcttccgggtcttggcagtctggaaccgggatgaagagactattacagccctcttcaaaacccgattccggctcgacttcccctttgacctgcaggagctgccagcctttgctgtcattggtattgctagtggcttcggtggagccctctttgtctacctgaaccggaagattgtccaggtgatgcggaagcagaaaaccatcaatcgcttcctcatgaggaaacgcctgctcttcccggctctggtgaccctgctcatctccacgctgaccttcccccctggctttggacagttcatggctggacagctctcacagaaagagacgctggtcaccctgtttgacaatcggacgtgggtccgccagggcctggtggaggagctagaaccacccagcacctcacaggcctggaacccaccacgtgccaacgtcttcctcaccctggtcatcttcattctcatgaagttctggatgtctgcactggccaccaccatcccagttccctgtggggccttcatgcctgtctttgtcattgatggaattcatacggacagcagcacctaccggattgtgcctgggggctacgctgtggtcggggcagctgcgctggcaggagcggtgacacacacagtgtccacggctgtgatcgtgttcgagctcacaggccagattgcccacatcctgcctgtcatgatcgccgtcatcctggccaacgctgtcgcccagagtctgcagccctccctctatgacagcatcatccgaatcaagaaactgccctacctgcctgagctcggctggggccgccaccagcagtaccgggtgcgtgtggaggacatcatggtgcgggatgttccccatgtggccctcagctgcaccttccgggacctgcgtttggcactgcacaggaccaagggccgaatgctggccctagtggagtcccctgagtccatgattctgctgggctccatcgagcgttcacaggtggtggcattgttgggggcccagctgagcccagcccgccggcggcagcacatgcaggagcgcagagccacccagacctctccactatctgatcaggagggtccccctacccctgaggcttctgtctgcttccaggtgaacacagaagactcagccttcccagcagcccggggggagacccacaagcccctaaagcctgcactcaagagggggcccagtgtcaccaggaacctcggagagagtcccacagggagcgcagagtcggcaggcatcgccctccggagcctcttctgtggcagtccaccccctgaggctgcttcggagaagttggaatcctgtgagaagcgcaagctgaagcgtgtccgaatctccctggcaagtgacgcggacctggaaggcgagatgagccctgaagagattctggagtgggaggagcagcaactagatgaacctgtcaacttcagtgactgcaaaattgatcctgctcccttccagctggtggagcggacctctttgcacaagactcacactatcttctcactgctgggagtggaccatgcttatgtcaccagtattggcagactcattggaatcgttactctaaaggagctccggaaggccatcgagggctctgtcacagcacagggtgtgaaagtccggccgcccctcgccagcttccgagacagtgccaccagcagcagtgacacggagaccactgaggtgcatgcactctgggggccccactcccgtcatggcctcccccgggagggcagcccttccgacagcgacgacaaatgccaatgagcccctcgtgggtggcctaggatggtgctagccatgcccgtcagcccagaatgtgcatctttcattccttctgccttcggaaggcaggaggcagctacagctggaggctgcaccccagccccctccagacctggggtgccagcttctcccagttcatcctacctggaatctgacccactacccacctgcaacaagtcttccagaggcaggaagataggccctgccctggcaggatgggttggggtcacttgacccctgctccccctttgaggggaaaggggtggaactaagatgggtttataactggaacctccaatgaccagatgtatatagagatttacaaagatttttatattaatttaataaaacaaattcttaaatagaacaaaataaacacctaatgagccacttatatata

SEQ ID NO: 5732 - DNA, 2897 bp, Homo sapiens
  source 1..2897: mol_type = unassigned DNA
actctgctctcggcctcccgggctgcggggacgggacggctgccggcgcggactttgcgggccgggagccgagtccaggacagagccggaaccgccgagggaggcgagagggcagtgcgcggagatggcggccgcggcggcggaggaagggatggagccacgggcgctgcagtacgagcagaccctgatgtatggccggtacactcaggaccttggggcctttgccaaagaggaagctgctcggattcgcctgggagggcctgaaccctggaaaggtcccccttcctctcgggctgccccagagctcttggaatatggacggagccgttgcgcccgatgccgcgcccagcagtggatgtcccggggcttgaacaccagcatcttgctccagtacctggcctgggtcacctaccctgttgtcctcatcactttctcagccggattcacacagatcctggcccctcaggctgtcggctctggcatccctgagatgaagaccatcttgcggggagtggtgctgaaagaatacctcacactcaagacctttatagctaaggtcattgggctgacctgcgccctaggcagcgggatgccgcttggcaaagagggcccttttgtgcatatcgcaagcatgtgtgctgcccttctcagcaagttcctctccctctttgggggtatctatgagaatgaatcccggaacacagagatgctggctgccgcctgtgccgtgggggtgggctgctgcttcgcggcacctattggaggcgtcctcttcagcatcgaggtcacctccaccttctttgcagtgcggaactactggcggggcttcttcgctgccaccttcagtgccttcatcttccgggtcttggcagtctggaaccgggatgaagagactattacagccctcttcaaaacccgattccggctcgacttcccctttgacctgcaggagctgccagcctttgctgtcattggtattgctagtggcttcggtggagccctctttgtctacctgaaccggaagattgtccaggtgatgcggaagcagaaaaccatcaatcgcttcctcatgaggaaacgcctgctcttcccggctctggtgaccctgctcatctccacgctgaccttcccccctggctttggacagttcatggctggacagctctcacagaaagagacgctggtcaccctgtttgacaatcggacgtgggtccgccagggcctggtggaggagctagaaccacccagcacctcacaggcctggaacccaccacgtgccaacgtcttcctcaccctggtcatcttcattctcatgaagttctggatgtctgcactggccaccaccatcccagttccctgtggggccttcatgcctgtctttgtcattggagcagcatttgggcgtctggtgggtgaaagcatggctgcctggttcccagatggaattcatacggacagcagcacctaccggattgtgcctgggggctacgctgtggtcggggcagctgcgctggcaggagcggtgacacacacagtgtccacggctgtgatcgtgttcgagctcacaggccagattgcccacatcctgcctgtcatgatcgccgtcatcctggccaacgctgtcgcccagagtctgcagccctccctctatgacagcatcatccgaatcaagaaactgccctacctgcctgagctcggctggggccgccaccagcagtaccgggtgcgtgtggaggacatcatggtgcgggatgttccccatgtggccctcagctgcaccttccgggacctgcgtttggcactgcacaggaccaagggccgaatgctggccctagtggagtcccctgagtccatgattctgctgggctccatcgagcgttcacaggtggtggcattgttgggggcccagctgagcccagcccgccggcggcagcacatgcaggagcgcagagccacccagacctctccactatctgatcaggagggtccccctacccctgaggcttctgtctgcttccaggtgaacacagaagactcagccttcccagcagcccggggggagacccacaagcccctaaagcctgcactcaagagggggcccagtgtcaccaggaacctcggagagagtcccacagggagcgcagagtcggcaggcatcgccctccggagcctcttctgtggcagtccaccccctgaggctgcttcggagaagttggaatcctgtgagaagcgcaagctgaagcgtgtccgaatctccctggcaagtgacgcggacctggaaggcgagatgagccctgaagagattctggagtgggaggagcagcaactagatgaacctgtcaacttcagtgactgcaaaattgatcctgctcccttccagctggtggagcggacctctttgcacaagactcacactatcttctcactgctgggagtggaccatgcttatgtcaccagtattggcagactcattggaatcgttactctaaaggagctccggaaggccatcgagggctctgtcacagcacagggtgtgaaagtccggccgcccctcgccagcttccgagacagtgccaccagcagcagtgacacggagaccactgaggtgcatgcactctgggggccccactcccgtcatggcctcccccgggagggcagcccttccgacagcgacgacaaatgccaatgagcccctcgtgggtggcctaggatggtgctagccatgcccgtcagcccagaatgtgcatctttcattccttctgccttcggaaggcaggaggcagctacagctggaggctgcaccccagccccctccagacctggggtgccagcttctcccagttcatcctacctggaatctgacccactacccacctgcaacaagtcttccagaggca

SEQ ID NO: 5733 - DNA, 2820 bp, Homo sapiens
  source 1..2820: mol_type = unassigned DNA
actctgctctcggcctcccgggctgcggggacgggacggctgccggcgcggactttgcgggccgggagccgagtccaggacagagccggaaccgccgagggaggcgagagggcagtgcgcggagatggcggccgcggcggcggaggaagggatggagccacgggcgctgcagtacgagcagaccctgatgtatggccggtacactcaggaccttggggcctttgccaaagaggaagctgctcggattcgcctgggagggcctgaaccctggaaaggtcccccttcctctcgggctgccccagagctcttggaatatggacggagccgttgcgcccgatgccgcgtctgttctgtccgctgccacaagttcctagtatccagggttggtgaagattggatcttcctggtcctgctggggcttctcatggcattggtcagctgggtcatggactatgccattgctgcctgtctgcaagcccagcagtggatgtcccggggcttgaacaccagcatcttgctccagtacctggcctgggtcacctaccctgttgtcctcatcactttctcagccggattcacacagatcctggcccctcaggctgtcggctctggcatccctgagatgaagaccatcttgcggggagtggtgctgaaagaatacctcacactcaagacctttatagctaaggtcattgggctgacctgcgccctaggcagcgggatgccgcttggcaaagagggcccttttgtgcatatcgcaagcatgtgtgctgcccttctcagcaagttcctctccctctttgggggtatctatgagaatgaatcccggaacacagagatgctggctgccgcctgtgccgtgggggtgggctgctgcttcgcggcacctattggaggcgtcctcttcagcatcgaggtcacctccaccttctttgcagtgcggaactactggcggggcttcttcgctgccaccttcagtgccttcatcttccgggtcttggcagtctggaaccgggatgaagagactattacagccctcttcaaaacccgattccggctcgacttcccctttgacctgcaggagctgccagcctttgctgtcattggtattgctagtggcttcggtggagccctctttgtctacctgaaccggaagattgtccaggtgatgcggaagcagaaaaccatcaatcgcttcctcatgaggaaacgcctgctcttcccggctctggtgaccctgctcatctccacgctgaccttcccccctggctttggacagttcatggctggacagctctcacagaaagagacgctggtcaccctgtttgacaatcggacgtgggtccgccagggcctggtggaggagctagaaccacccagcacctcacaggcctggaacccaccacgtgccaacgtcttcctcaccctggtcatcttcattctcatgaagttctggatgtctgcactggccaccaccatcccagttccctgtggggccttcatgcctgtctttgtcattggagcagcatttgggcgtctggtgggtgaaagcatggctgcctggttcccagatggaattcatacggacagcagcacctaccggattgtgcctgggggctacgctgtggtcggggcagctgcgctggcaggagcggtgacacacacagtgtccacggctgtgatcgtgttcgagctcacaggccagattgcccacatcctgcctgtcatgatcgccgtcatcctggccaacgctgtcgcccagagtctgcagccctccctctatgacagcatcatccgaatcaagaaactgccctacctgcctgagctcggctggggccgccaccagcagtaccgggtgcgtgtggaggacatcatggtgcgggatgttccccatgtggccctcagctgcaccttccgggacctgcgtttggcactgcacaggaccaagggccgaatgctggccctagtggagtcccctgagtccatgattctgctgggctccatcgagcgttcacaggtggtggcattgttgggggcccagctgagcccagcccgccggcggcagcacatgcaggagcgcagagccacccagacctctccactatctgatcaggagggtccccctacccctgaggcttctgtctgcttccaggtgaacacagaagactcagccttcccagcagcccggggggagacccacaagcccctaaagcctgcactcaagagggggcccagtgtcaccaggaacctcggagagagtcccacagggagcgcagagtcggcaggcatcgccctccggagcctcttctgtggcagtccaccccctgaggctgcttcggagaagttggaatcctgtgagaagcgcaagctgaagcgtgtccgaatctccctggcaagtgacgcggacctggaaggcgagatgagccctgaagagattctggagtgggaggagcagcaactagatgaacctgtcaacttcagtgactgcaaaattgatcctgctcccttccagctggtggagcggacctctttgcacaagctccggaaggccatcgagggctctgtcacagcacagggtgtgaaagtccggccgcccctcgccagcttccgagacagtgccaccagcagcagtgacacggagaccactgaggtgcatgcactctgggggccccactcccgtcatggcctcccccgggagggcagcccttccgacagcgacgacaaatgccaatgagcccctcgtgggtggcctaggatggtgctagccatgcccgtcagcccagaatgtgcatctttcattccttctgccttcggaaggca

SEQ ID NO: 5734 - DNA, 2993 bp, Homo sapiens
  source 1..2993: mol_type = unassigned DNA
ggggtgactgcctcttccagggcgggcggtgtggtgcacgcattgctgtgctccaactccctcagggcctgtgttgccgcactctgctgctatgagcttcctcaaaagtttcccgccgcctgggccagcggaggggctcctgcggcagcagccagacactgaggctgtgctgaacgggaagggcctcggcactggtaccctttacatcgctgagagccgcctgtcttggttagatggctctggattaggattctcactggaataccccaccattagtttacatgcattatccagggaccgaagtgactgtctaggagagcatttgtatgttatggtgaatgccaaatttgaagaagaatcaaaagaacctgttgctgatgaagaagaggaagacagtgatgatgatgttgaacctattactgaatttagatttgtgcctagtgataaatcagcgttggaggcaatgttcactgcaatgtgcgaatgccaggccttgcatccagatcctgaggatgaggattcagatgactacgatggagaagaatatgatgtggaagcacatgaacaaggacagggggacatccctacattttacacctatgaagaaggattatcccatctaacagcagaaggccaagccacactggagagattagaaggaatgctttctcagtctgtgagcagccagtataatatggctggggtcaggacagaagattcaataagagattatgaagatgggatggaggtggataccacaccaacagttgctggacagtttgaggatgcagatgttgatcactgaaaatgatttatgcaagtttaagattctgctcctaagtgtaggagagaacttggtgcctcttccactctggagtgaagttaatgaaagtctttttccttttccaaaacccaacctgaaccagttctttcttgagacagactatactgagacaacaagttgtcaccagcagaagatagataatatgacctttattaacttgatgaattaacttaaccaagagggtatttgtagtttactatttaccctaaaactttctgtgtctgggtaccctctgagtaggcctataattcctaccttgactgtgtgcatcatttgtaagctagcagatctatgtggtgaaaatgcacaggagcttggtagactgcgggggaaagagagagctcctttcgccatgttttaccagtctgctgttataacctcttaggttgtatcctttaatttccagccttttaggttagtttctgtaacagaacaagtgagtctgggatgaagtcctcaaagtacttcaaatggtaattgttttgtttttgtaatagcttaacaaataaacctaggttttctatattactttgctctcattcttgactaaaaccattaatgagaaatgttttttaaaaaataatgctggcaaatatgagaattttgttggctttatttttgtttacttgttgagaagatgaacatgaaattaataagaaaatatagttatagcttctggcaagtatttagtaaggcaaagatttaacacatttcaggggatttctgccacttccttttagatcagcagtaatttcttatatttatcaactctcaatttttagttttcatagatacctgggtattataaggctgatttgtaattactgatttatacttggacttttgaaatcattatgtgtccttaaaaataaggttatacaagctaaccttcttaacaggatcacatggctaattagtgactaaactgatgtttggtaccactcagcccagtgttcatttcagcactgtcacttggtttcccttatcttgcaaggtagactgaaaaaaaacgaattttcctttttctaaccagactctcagaatttctgagtctgttaacaataggcaagtaaaacagccacttgaaatggaaactaaaatttactgagacctctgtactagccactgtcctgagttctttattatgtattataatattcttaattatcttatgagatacgcttttatcccactttatagttgaggaaactgagttatagagagaggtaaaataacttgcttaaggtcatgtagatagtgaattgtgatttttgagcctgtgctttaaaacatcatacagccttaccacctaccagcagcagaaagcatgcacactctccccactgctgcagggtttcagtgttaacatttcaatggccagtacaagagcttccccagtttctctgctacccatctgagcaacacccataattctatcctagaagtttgtccattcttcagtaatcagtcaggacattctcacaggctaatattagaaattccatttgagttccttttaaaaggaacaaatttataattgtgactttccatgaacataaattgctctgatagcaaaatgtcgagaagattcagagtgtacttggtttcttgttggtgttgctgtggtcaatgcaatatgcaaaaaggcaggagaccaaagcatgtgggcacctctctgggcttatttcctcattagactaagtgactttcaaagattgagctgtaacattcactagatagttagaaccgtagcattgagaaaatagaagctgagaaaaaagagcaggtcaggcttttaaaagataaaatttataatgatcagccagacaatatttattgatttcatttgagcctaattttagggttgctggaattgttttctttgtgtgttcctgatgtagagacactttaaaggtacatagacatttcccctccaaaatgtaagtcatctaaatgttcctaaaagctagggttaatggttctctgttctaggttcttcatttaaaaaatgtattcattaagatatggtcccagccggacgtggtggctcacacctgtaatcccagcactttgggaggctcaggtgggcagatcacttgaggtcaggagtttgagaccagcctggccaatacggtgaaaacccatctct

SEQ ID NO: 5735 - DNA, 953 bp, Homo sapiens
  source 1..953: mol_type = unassigned DNA
tgtggtgcacgcattgctgtgctccaactccctcagggcctgtgttgccgcactctgctgctatgagcttcctcaaaagtttcccgccgcctgggccagcggaggggctcctgcggcagcagccagacactgaggctgtgctgaacgggaagggcctcggcactggtaccctttacatcgctgagagccgcctgtcttggttagatggctctggattaggattctcactggaataccccaccattagtttacatgcattatccagggaccgaagtgactgtctaggagagcatttgtatgttatggtgaatgccaaatttgaagaagaatcaaaagaacctgttgctgatgaagaagaggaagacagtgatgatgatgttgaacctattactgaatttagatttgtgcctagtgataaatcagcgttggaggcaatgttcactgcaatgtgcgaatgccaggccttgcatccagatcctgaggatgaggattcagatgactacgatggagaagaatatgatgtggaagcacatgaacaaggacagggggacatccctacattttacacctatgaagaaggattatcccatctaacagcagaaggccaagccacactggagagattagaaggaatgctttctcagtctgtgagcagccagtataatatggctggggtcaggacagaagattcaataagagattatgaagatgggatggaggtggataccacaccaacagttgctggacagtttgaggatgcagatgttgatcactgaaaatgatttatgcaagtttaagaaaccagccttttaaagttccagttagcttccaagttactgctattgtgaaaactgtataacattgcttcttatactgaccatgaattgtgatactggacctgtgctttcttctcacatcctgccagtggaactatcagaaaataacctcttaga

SEQ ID NO: 5736 - DNA, 760 bp, Homo sapiens
  source 1..760: mol_type = unassigned DNA
gcgcctgaccgcggcagctcccaccatggcggagaccaagctccagctgtttgtcaaggtgcagggcggactcagctgcggggagggtgtctgggaggaagcgcttttctgggctttgctttctgtggcaggctgtggggtgggcctcccagtaatgtctgagccccttcctgtgggtggctagggggactcaggcagccctacagaggctgagtaaagtgggacccagcgatcactgcccctcctgccagcggctcttcatggtcctgctcctcaagggcgtacctttcaccctcaccacggtggacacgcgcaggtccccggacgtgctgaaggacttcgcccccggctcgcagctgcccatcctgctctatgacagcgacgccaagacagacacgctgcagatcgaggactttctggaggagacgctggggccgcccgacttccccagcctggcgcctcgttacagggagtccaacaccgccggcaacgacgttttccacaagttctccgcgttcatcaagaacccggtgcccgcgcaggacgaagccctgtaccagcagctgctgcgcgccctcgccaggctggacagctacctgcgcgcgcccctggagcacgagctggcgggggagccgcagctgcgcgagtcccgccgccgcttcctggacggcgacaggctcacgctggccgactgcagcctcctgcccaagctgcacatcgtcgacacggtgtgcgcgcacttccgccaggcgcccatccc

SEQ ID NO: 5737 - DNA, 1017 bp, Homo sapiens
  source 1..1017: mol_type = unassigned DNA
ggatctccgtgcacaccagactcaagtccagggcagccccccacaccattccgccaccctgaggtcacaccctcaggctcagacaccccggggccgggctggcgttgctcaggcagctggttctgcgcgctgggcagcttcatctgcccgcctaggtggctccacggggcgggcccctcggccagggagggcggggcgcacagggagacttaaagagctccccaggtccccacccgcgcctgaccgcggcagctcccaccatggcggagaccaagctccagctgtttgtcaaggcgagtgaggacggggagagcgtgggtcactgcccctcctgccagcggctcttcatggtcctgctcctcaagggcgtacctttcaccctcaccacggtggacacgcgcaggtccccggacgtgctgaaggacttcgcccccggctcgcagctgcccatcctgctctatgacagcgacgccaagacagacacgctgcagatcgaggactttctggaggagacgctggggccgcccgacttccccagcctggcgcctcgttacagggagtccaacaccgccggcaacgacgttttccacaagttctccgcgttcatcaagaacccggtgcccgcgcaggacgaagccctgtaccagcagctgctgcgcgccctcgccaggctggacagctacctgcgcgcgcccctggagcacgagctggcgggggagccgcagctgcgcgagtcccgccgccgcttcctggacggcgacaggctcacgctggccgactgcagcctcctgcccaagctgcacatcgtcgacacggtgtgcgcgcacttccgccaggcgcccatccccgcggagctgcgcggcgtacgccgctacctggacagcgcgatgcaggagaaagagttcaaatacacgtgtccgcacagcgccgagatcctggcggcctaccggcccgccgtgcacccccgctagcgccccaccccgcgtctgtcgcccaataaaggcatctttgtcggga

SEQ ID NO: 5738 - DNA, 830 bp, Homo sapiens
  source 1..830: mol_type = unassigned DNA
cacttcaaccggttgtcgccccagtggccgccctctgagcacgtgttactgccagtctgcgtcagcgttgggtaaatacatgactggccgacgccgccgggtggggctatttaagagacagccgcccgctggtcctccctgaacttggctcagctgccgggctgctccggttggaaacgccaagccagctgcgtcctaatccaaaagccatgaacagcggcgtgtgcctgtgcgtgctgatggcggtactggcggctggcgccctgacgcagccggtgcctcccgcagatcccgcgggctccgggctgcagcgggcagaggaggcgccccgtaggcagctgagggtatcgcagagaacggatggcgagtcccgagcgcacctgggcgccctgctggcaagatacatccagcaggcccggaaagctccttctggacgaatgtccatcgttaagaacctgcagaacctggaccccagccacaggataagtgaccgggactacatgggctggatggattttggccgtcgcagtgccgaggagtatgagtacccctcctagaggacccagccgccatcagcccaacgggaagcaacctcccaacccagaggaggcagaataagaaaacaatcacactcataactcattgtctgtggagtttgacattgtatgtatctatttattaagttctcaatgtgaaaaatgtgtctgtaagattgtccagtgcaaccacacacctcaccagaattgtgcaaatggaagacaaaatgttttcttcatctgtgactcctggtctgaaaatgttgttatgctattaaagtgatttcattctgc

SEQ ID NO: 5739 - DNA, 1527 bp, Homo sapiens
  source 1..1527: mol_type = unassigned DNA
ctggcgttgccacagtccctccattccagagggaattccagagcggaatacggattccgattttaaaataagcgcttctaaatctttctccttgcatctaagacgggtgggggaaagaaagggagaggagttgaggtcccaaggttcaaggcctggtgatctccaggtcccaggctgggcggcctcggtgcacggagagggcgaggggcgtgttgtggagccttggcaaggcgctgctcttcctcgcgcctcggtttgcggtctgtgaaatggggttggcagtgcctttgcagggacgcggcgaactcaagcaccagcaagcggactcgaactcaaagggtttcagggtgtagacgaccagagcgcactgaggggctccaggtcggcccgctccggagccgggagagtaaccgcgtgcagggaaaggcgcacggcagcctcggtgcctcccttccctccaccggacgggtgactgactaggggtgaggtcctcacctccaggctgcgcagctgagttctggaagctgcgtcaagagaggcccaggacaccaagagccagctgtggccagagccctttcactgacccagaacactggccctcggaaacctggagaactgcgagggcttttaatgcggctgagaagaaagtgaagaccccgactcctcctctctccttcgaaagagccgacacaggagccacttcaaccggttgtcgccccagtggccgccctctgagcacgtgttactgccagtctgcgtcagcgttgggtaaatacatgactggccgacgccgccgggtggggctatttaagagacagccgcccgctggtcctccctgaacttggctcagctgccgggctgctccggttggaaacgccaagccagctgcgtcctaatccaaaagccatgaacagcggcgtgtgcctgtgcgtgctgatggcggtactggcggctggcgccctgacgcagccggtgcctcccgcagatcccgcgggctccgggctgcagcgggcagaggaggcgccccgtaggcagctgagggtatcgcagagaacggatggcgagtcccgagcgcacctgggcgccctgctggcaagatacatccagcaggcccggaaagctccttctggacgaatgtccatcgttaagaacctgcagaacctggaccccagccacaggataagtgaccgggactacatgggctggatggattttggccgtcgcagtgccgaggagtatgagtacccctcctagaggacccagccgccatcagcccaacgggaagcaacctcccaacccagaggaggcagaataagaaaacaatcacactcataactcattgtctgtggagtttgacattgtatgtatctatttattaagttctcaatgtgaaaaatgtgtctgtaagattgtccagtgcaaccacacacctcaccagaattgtgcaaatggaagacaaaatgttttcttcatctgtgactcctggtctgaaaatgttgttatgctattaaagtgatttcattctgc

SEQ ID NO: 5740 - DNA, 747 bp, Homo sapiens
  source 1..747: mol_type = unassigned DNA
gagaggcactctgcaaacacttcctcaaactttaggaaagcaaaaacattccttctgctcaacacggcagaaaacagggtctctgccccttggcgctgggtgaggagttcccaaagaccagccagccatgaacagcggcgtgtgcctgtgcgtgctgatggcggtactggcggctggcgccctgacgcagccggtgcctcccgcagatcccgcgggctccgggctgcagcgggcagaggaggcgccccgtaggcagctgagggtatcgcagagaacggatggcgagtcccgagcgcacctgggcgccctgctggcaagatacatccagcaggcccggaaagctccttctggacgaatgtccatcgttaagaacctgcagaacctggaccccagccacaggataagtgaccgggactacatgggctggatggattttggccgtcgcagtgccgaggagtatgagtacccctcctagaggacccagccgccatcagcccaacgggaagcaacctcccaacccagaggaggcagaataagaaaacaatcacactcataactcattgtctgtggagtttgacattgtatgtatctatttattaagttctcaatgtgaaaaatgtgtctgtaagattgtccagtgcaaccacacacctcaccagaattgtgcaaatggaagacaaaatgttttcttcatctgtgactcctggtctgaaaatgttgttatgctattaaagtgatttcattctg

SEQ ID NO: 5741 - DNA, 1720 bp, Homo sapiens
  source 1..1720: mol_type = unassigned DNA
tacaaatgctggagtgagtgaggtgaactcaagtcgcctttaggaatggctgaaaaagcccacacctggaaatcactccctccctgctcctccacggcaggttgcatctgcgagacgcttcggtcattagaggaatgagccgggagtgagcaattcaccagctctccagcacttggtggaaagcagcaggcaaggatggatgtggttgacagccttcttgtgaatggaagcaacatcactcctccctgtgaactcgggctcgaaaatgagacgcttttctgcttggatcagccccgtccttccaaagagtggcagccagcggtgcagattctcttgtactccttgatattcctgctcagcgtgctgggaaacacgctggtcatcaccgtgctgattcggaacaagcggatgcggacggtcaccaacatcttcctcctctccctggctgtcagcgacctcatgctctgtctcttctgcatgccgttcaacctcatccccaatctgctcaaggatttcatcttcgggagcgccgtttgcaagaccaccacctacttcatgggcacctctgtgagtgtatctacctttaatctggtagccatatctctagagagatatggtgcgatttgcaaacccttacagtcccgggtctggcagacaaaatcccatgctttgaaggtgattgctgctacctggtgcctttcctttaccatcatgactccgtaccccatttatagcaacttggtgccttttaccaaaaataacaaccagaccgcgaatatgtgccgctttctactgccaaatgatgttatgcagcagtcctggcacacattcctgttactcatcctctttcttattcctggaattgtgatgatggtggcatatggattaatctctttggaactctaccagggaataaaatttgaggctagccagaagaagtctgctaaagaaaggaaacctagcaccaccagcagcggcaaatatgaggacagcgatgggtgttacctgcaaaagaccaggcccccgaggaagctggagctccggcagctgtccaccggcagcagcagcagggccaaccgcatccggagtaacagctccgcagccaacctgatggccaagaaaagggtgatccgcatgctcatcgtcatcgtggtcctcttcttcctgtgctggatgcccatcttcagcgccaacgcctggcgggcctacgacaccgcctccgcagagcgccgcctctcaggaacccccatttccttcatcctcctcctgtcctacacctcctcctgcgtcaaccccatcatctactgcttcatgaacaaacgcttccgcctcggcttcatggccaccttcccctgctgccccaatcctggtcccccaggggcgaggggagaggtgggggaggaggaggaaggcgggaccacaggagcctctctgtccaggttctcgtacagccatatgagtgcctcggtgccaccccagtgagatgtcccctgaccctccaccgcagaaggaaggcagggaggaggcagagaagaaagaacggaagaagagatcaggaagagaaggagcagagctgatggagaaggaaggctccatctccagtgggaactcttcaaggtctgcttttcatccttcatctggattccagagcactgctccagtggggccatgattggtttctaggcagttcaaagcaggatatgttaagtaacactcacca

SEQ ID NO: 5742 - DNA, 2121 bp, Homo sapiens
  source 1..2121: mol_type = unassigned DNA
cgggaacccaggcggggcgagccgcgggagagtggagggcaggcgcctgggctgggggcggggaccaggcggggcagggggcagggagaggagggcggcgggagcctgagccggaatcgcagcgtgagcaggtggagccgcgttgggagcccgccgggtcgagctgagtaaggcggcgggctcggcgggggccatggagctgctaaagctgaaccggagcgtgcagggaaccggacccgggccgggggcttccctgtgccgcccgggggcgcctctcctcaacagcagcagtgtgggcaacctcagctgcgagccccctcgcattcgcggagccgggacacgagaattggagctggccattagaatcactctttacgcagtgatcttcctgatgagcgttggaggaaatatgctcatcatcgtggtcctgggactgagccgccgcctgaggactgtcaccaatgccttcctcctctcactggcagtcagcgacctcctgctggctgtggcttgcatgcccttcaccctcctgcccaatctcatgggcacattcatctttggcaccgtcatctgcaaggcggtttcctacctcatgggggtgtctgtgagtgtgtccacgctaagcctcgtggccatcgcactggagcggtacagcgccatctgccgaccactgcaggcacgagtgtggcagacgcgctcccacgcggctcgcgtgattgtagccacgtggctgctgtccggactactcatggtgccctaccccgtgtacactgtcgtgcaaccagtggggcctcgtgtgctgcagtgcgtgcatcgctggcccagtgcgcgggtccgccagacctggtccgtactgctgcttctgctcttgttcttcatcccgggtgtggttatggccgtggcctacgggcttatctctcgcgagctctacttagggcttcgctttgacggcgacagtgacagcgacagccaaagcagggtccgaaaccaaggcgggctgccaggggctgttcaccagaacgggcgttgccggcctgagactggcgcggttggcgaagacagcgatggctgctacgtgcaacttccacgttcccggcctgccctggagctgacggcgctgacggctcctgggccgggatccggctcccggcccacccaggccaagctgctggctaagaagcgcgtggtgcgaatgttgctggtgatcgttgtgcttttttttctgtgttggttgccagtttatagtgccaacacgtggcgcgcctttgatggcccgggtgcacaccgagcactctcgggtgctcctatctccttcattcacttgctgagctacgcctcggcctgtgtcaaccccctggtctactgcttcatgcaccgtcgctttcgccaggcctgcctggaaacttgcgctcgctgctgcccccggcctccacgagctcgccccagggctcttcccgatgaggaccctcccactccctccattgcttcgctgtccaggcttagctacaccaccatcagcacactgggccctggctgaggagtagaggggccgtgggggttgaggcagggcaaatgacatgcactgacccttccagacatacgaaacacaaaccacaactgacacaggaaaccaacacccaaagcatggactaaccccaacgcacaggaaaaggtagcttacctgacacaagaggaataagaatggagcagtacatgggaaaggaggcatgcctctgatatgggactgagcctggcccatagaaacatgacactgaccttggagagacacagcgtccctagcagtgaactatttctacacagtgggaactctgacaagggctgacctgcctctcacacacatagattaatggcactgattgttttagagactatggagcctggcacaggactgattctgggatgctcctagtttgacctcacagtgacccttcccaatcagcactgaaaataccatcaggcctaatctcatacctctgaccaacaggctgttctgcactgaaaaggttcttcatccctttccagttaaggaccgtggccctgccctctccttccttacccaaactgttcaagaaataataaattgtttggcttcctcctgaa

SEQ ID NO: 5743 - DNA, 2138 bp, Homo sapiens
  source 1..2138: mol_type = unassigned DNA
gccatggagctgctaaagctgaaccggagcgtgcagggaaccggacccgggccgggggcttccctgtgccgcccgggggcgcctctcctcaacagcagcagtgtgggcaacctcagctgcgagccccctcgcattcgcggagccgggacacgagaattggagctggccattagaatcactctttacgcagtgatcttcctgatgagcgttggaggaaatatgctcatcatcgtggtcctgggactgagccgccgcctgaggactgtcaccaatgccttcctcctctcactggcagtcagcgacctcctgctggctgtggcttgcatgcccttcaccctcctgcccaatctcatgggcacattcatctttggcaccgtcatctgcaaggcggtttcctacctcatgggggtgtctgtgagtgtgtccacgctaagcctcgtggccatcgcactggagcggtacagcgccatctgccgaccactgcaggcacgagtgtggcagacgcgctcccacgcggctcgcgtgattgtagccacgtggctgctgtccggactactcatggtgccctaccccgtgtacactgtcgtgcaaccagtggggcctcgtgtgctgcagtgcgtgcatcgctggcccagtgcgcgggtccgccagacctggtccgtactgctgcttctgctcttgttcttcatcccgggtgtggttatggccgtggcctacgggcttatctctcgcgagctctacttagggcttcgctttgacggcgacagtgacagcgacagccaaagcagggtccgaaaccaaggcgggctgccaggtggggctggaccacgtgagcaaaatctgggcgaggcggagctttggagggcgacggggcctgctggagtgggtgggactgaaatgaaggtgagggtgagaaggaagctggaaatggagttgagctgggagcggaggtcaggtggggactgggctggagactggggggactcgcctttttctctgaccgcccaccctttgtgctcaggggctgttcaccagaacgggcgttgccggcctgagactggcgcggttggcgaagacagcgatggctgctacgtgcaacttccacgttcccggcctgccctggagctgacggcgctgacggctcctgggccgggatccggctcccggcccacccaggccaagctgctggctaagaagcgcgtggtgcgaatgttgctggtgatcgttgtgcttttttttctgtgttggttgccagtttatagtgccaacacgtggcgcgcctttgatggcccgggtgcacaccgagcactctcgggtgctcctatctccttcattcacttgctgagctacgcctcggcctgtgtcaaccccctggtctactgcttcatgcaccgtcgctttcgccaggcctgcctggaaacttgcgctcgctgctgcccccggcctccacgagctcgccccagggctcttcccgatgaggaccctcccactccctccattgcttcgctgtccaggcttagctacaccaccatcagcacactgggccctggctgaggagtagaggggccgtgggggttgaggcagggcaaatgacatgcactgacccttccagacatacgaaacacaaaccacaactgacacaggaaaccaacacccaaagcatggactaaccccaacgcacaggaaaaggtagcttacctgacacaagaggaataagaatggagcagtacatgggaaaggaggcatgcctctgatatgggactgagcctggcccatagaaacatgacactgaccttggagagacacagcgtccctagcagtgaactatttctacacagtgggaactctgacaagggctgacctgcctctcacacacatagattaatggcactgattgttttagagactatggagcctggcacaggactgattctgggatgctcctagtttgacctcacagtgacccttcccaatcagcactgaaaataccatcaggcctaatctcatacctctgaccaacaggctgttctgcactgaaaaggttcttcatccctttccagttaaggaccgtggccctgccctctccttccttacccaaactgttcaagaaataataaattgtttggcttcctcctgaa

SEQ ID NO: 5744 - DNA, 1378 bp, Homo sapiens
  source 1..1378: mol_type = unassigned DNA
agctgccttgcacagcctcgcaatgagctgccacaactgctccgacccccaggtcctttgcagctccgggcagctgttcctgcagcccctctgggaccacctgaggagctgggaggccctcctacagtcgcccttcttcccggtcatcttctccatcaccacatacgtgggcttttgcctgcccttcgtggtcctggatatcctgtgctcctgggtgcccgccctgcggcgctacaagatccaccctgacttctcgccatccgcgcagcagctgctaccttgcctggggcagaccctctaccagcatgtgatgtttgtgttccccgtgacgctgctgcattgggcccgcagcccggccctcctgccccacgaagctcccgagctgctcctgctgctgcaccacatcctgttctgcctgctactcttcgacatggagttcttcgtgtggcacctgctgcaccacaaggtgccctggctgtaccgcaccttccacaaggtgcaccaccagaactcgtcctcgttcgcgctggcaacgcagtatatgagcgtctgggaactgttttctttgggcttcttcgacatgatgaacgtcacactgctcgggtgccacccgctcaccaccctgaccttccacgtggtcaacatctggctttccgtggaggaccactccggctacaacttcccttggtccactcacagactggtgcccttcgggtggtacgggggtgtggtgcaccacgacctgcatcactctcactttaactgcaacttcgctccgtactttacacactgggacaaaatactgggaacgctgcggactgcatctgtcccagcgcggtgatgtggctgcggtgggtgcccctaagactcgggactgctgtgcctttcacacttgaatgaagagaaacacctgagctatatatttttttaaagcaactaacttattgctttatgtttatctatgaaaaccatagataaaatctgatgcatttttgtaatctgacaaagtaatttacatactgtttgtgtatcaatacaattttgtgttcttggtattcttagtctagctcacctcaatagccttgaatcctgcatatgaattagacattcatcactggcatatttagaatatctctaaaaggacttgtttgtagaataaggaattttctatgtttcaaagtgttctaaaacctggctaaaagaatgtatttttgtggatggtgttgacttctgactctaaaagcaatcaaacatgtttctgctggacagtgaccaagaattatagtaccttcttatatttttttatagaactgtatatttattttgaaagaaatgttattcgtgctttaaaaaggaaaaaaaaccatgaatcaaataa

SEQ ID NO: 5745 - DNA, 1791 bp, Homo sapiens
  source 1..1791: mol_type = unassigned DNA
gtgaatctctggggccaggaagaccctgctgcccggaagagcctcatgttccgtgggggctgggcggacatacatatacgggctccaggctgaacggctcgggccacttacacaccactgcctgataaccatgctggctgccacagtcctgaccctggccctgctgggcaatgcccatgcctgctccaaaggcacctcgcacgaggcaggcatcgtgtgccgcatcaccaagcctgccctcctggtgttgaaccacgagactgccaaggtgatccagaccgccttccagcgagccagctacccagatatcacgggcgagaaggccatgatgctccttggccaagtcaagtatgggttgcacaacatccagatcagccacttgtccatcgccagcagccaggtggagctggtggaagccaagtccattgatgtctccattcagaacgtgtctgtggtcttcaaggggaccctgaagtatggctacaccactgcctggtggctgggtattgatcagtccattgacttcgagatcgactctgccattgacctccagatcaacacacagctgacctgtgactctggtagagtgcggaccgatgcccctgactgctacctgtctttccataagctgctcctgcatctccaaggggagcgagagcctgggtggatcaagcagctgttcacaaatttcatctccttcaccctgaagctggtcctgaagggacagatctgcaaagagatcaacgtcatctctaacatcatggccgattttgtccagacaagggctgccagcatcctttcagatggagacattggggtggacatttccctgacaggtgatcccgtcatcacagcctcctacctggagtcccatcacaagggtcatttcatctacaagaatgtctcagaggacctccccctccccaccttctcgcccacactgctgggggactcccgcatgctgtacttctggttctctgagcgagtcttccactcgctggccaaggtagctttccaggatggccgcctcatgctcagcctgatgggagacgagttcaaggcagtgctggagacctggggcttcaacaccaaccaggaaatcttccaagaggttgtcggcggcttccccagccaggcccaagtcaccgtccactgcctcaagatgcccaagatctcctgccaaaacaagggagtcgtggtcaattcttcagtgatggtgaaattcctctttccacgcccagaccagcaacattctgtagcttacacatttgaagaggatatcgtgactaccgtccaggcctcctattctaagaaaaagctcttcttaagcctcttggatttccagattacaccaaagactgtttccaacttgactgagagcagctccgagtccgtccagagcttcctgcagtcaatgatcaccgctgtgggcatccctgaggtcatgtctcggctcgaggtagtgtttacagccctcatgaacagcaaaggcgtgagcctcttcgacatcatcaaccctgagattatcactcgagatggcttcctgctgctgcagatggactttggcttccctgagcacctgctggtggatttcctccagagcttgagctagaagtctccaaggaggtcgggatggggcttgtagcagaaggcaagcaccaggctcacagctggaaccctggtgtctcctccagcgtggtggaagttgggttaggagtacggagatggagattggctcccaactcctccctatcctaaaggcccactggcattaaagtgctgtatccaaga

SEQ ID NO: 5746 - DNA, 1537 bp, Homo sapiens
  source 1..1537: mol_type = unassigned DNA
atatacgggctccaggctgaacggctcgggccacttacacaccactgcctgataaccatgctggctgccacagtcctgaccctggccctgctgggcaatgcccatgcctgctccaaaggcacctcgcacgaggcaggcatcgtgtgccgcatcaccaagcctgccctcctggtgttgaaccacgagactgccaaggtgatccagaccgccttccagcgagccagctacccagatatcacgggcgagaaggccatgatgctccttggccaagtcaagtatgggttgcacaacatccagatcagccacttgtccatcgccagcagccaggtggagctggtggaagccaagtccattgatgtctccattcagaacgtgtctgtggtcttcaaggggaccctgaagtatggctacaccactgcctggtggctgggtattgatcagtccattgacttcgagatcgactctgccattgacctccagatcaacacacagctgacctgtgactctggtagagtgcggaccgatgcccctgactgctacctgtctttccataagctgctcctgcatctccaaggggagcgagagcctgggtggatcaagcagctgttcacaaatttcatctccttcaccctgaagctggtcctgaagggacagatctgcaaagagatcaacgtcatctctaacatcatggccgattttgtccagacaagggctgccagcatcctttcagatggagacattggggtggacatttccctgacaggtgatcccgtcatcacagcctcctacctggagtcccatcacaaggcagtgctggagacctggggcttcaacaccaaccaggaaatcttccaagaggttgtcggcggcttccccagccaggcccaagtcaccgtccactgcctcaagatgcccaagatctcctgccaaaacaagggagtcgtggtcaattcttcagtgatggtgaaattcctctttccacgcccagaccagcaacattctgtagcttacacatttgaagaggatatcgtgactaccgtccaggcctcctattctaagaaaaagctcttcttaagcctcttggatttccagattacaccaaagactgtttccaacttgactgagagcagctccgagtccgtccagagcttcctgcagtcaatgatcaccgctgtgggcatccctgaggtcatgtctcggctcgaggtagtgtttacagccctcatgaacagcaaaggcgtgagcctcttcgacatcatcaaccctgagattatcactcgagatggcttcctgctgctgcagatggactttggcttccctgagcacctgctggtggatttcctccagagcttgagctagaagtctccaaggaggtcgggatggggcttgtagcagaaggcaagcaccaggctcacagctggaaccctggtgtctcctccagcgtggtggaagttgggttaggagtacggagatggagattggctcccaactcctccctatcctaaaggcccactggcattaaagtgctgtatccaag

SEQ ID NO: 5747 - DNA, 2530 bp, Homo sapiens
  source 1..2530: mol_type = unassigned DNA
ccgcgcctcctcggccgcctgtcgggcatgaaaaccaaattctgcaccgggggcgaggcggagccctcgccgctcgggctgctgctgagctgcggtagcggcagcgcggccccggcgcccggcgtggggcagcagcgcgacgccgccagcgacctcgagtccaagcagctgggcggccaacagccgccgctcgcgctgccccctccgccgccgctgccgctgccgctgccgctgccccagcccccgccgccgcagccgcccgcagacgagcagccggagccccggacgcggcgcagggcctatctgtggtgcaaggagttcctgcccggcgcctggcggggcctccgcgaggacgagttccacatcagtgtcatcagaggcggccttagcaacatgctgttccagtgctccctacctgacaccacagccacccttggtgatgagcctcggaaagtgctcctgcggctgtatggagcgattttgcagatgaggtcctgtaataaagagggatccgaacaagctcagaaagaaaatgaatttcaaggggctgaggccatggttctggagagcgttatgtttgccattctcgcagagaggtcacttgggccaaaactctatggcatctttccccaaggccgactggagcagttcatcccgagccggcgattagatactgaagaattaagtttgccagatatttctgcagaaatcgccgagaaaatggctacatttcatggtatgaaaatgccattcaataaggaaccaaaatggctttttggcacaatggaaaagtatctaaaggaagtgctgagaattaaatttactgaggaatccagaattaaaaagctccacaaattgctcagttacaatctgcccttggaactggaaaacctgagatcattgcttgaatctactccatctccagttgtattttgtcataatgactgtcaagaaggtaatatcttgttgctggaaggccgagagaattctgaaaaacagaaactgatgctcattgatttcgaatacagcagttacaattacaggggattcgacattggaaatcacttctgtgagtggatgtatgattatagctatgaaaaatacccttttttcagagcaaacatccggaagtatcccaccaagaaacaacagctccattttatttccagttacttgcctgcattccaaaatgactttgaaaacctcagtactgaagaaaaatccattataaaagaagaaatgttgcttgaagttaataggtttgcccttgcatctcatttcctctggggactgtggtccattgtacaagccaagatttcatctattgaatttgggtacatggactacgcccaagcaaggtttgatgcctatttccaccagaagaggaagcttggggtgtgactgtggggaggactccatccacctcatcactggactgcatggggaggcagcagagcggggtcccctctgtgcttcgactactgctcctgtggcaggaggctttgggtggctcactactgaacacatgtgtatgatactaaagacggtattaaaatggagcgacgtttatttcatctcttgtttacgatttcactaggactcagaaacgagatcgggaagcagaaatatagtgcaatagtgcaacatctctgaatccttttaatctagagaaggcatttcatatttgggggctaaggtttccagtcagatgaggcaaacagcaagagtaagcagtgttacttgcaggtactttggttaatgttgatttaaattttcatgaatgtgctggtgaacactgtgaccaggcttttgtagatggcgatgtgttatagacggtgctcactcccaagggacagcaagtgagcagagatgtactgcaaagtcgccagtcactgctgcaaggtggcctctgcctggggcctccagaagctgctcctttaccctcttggtcccatggctgaagctggagcagcggattgctctggagcagccaaggccgccagcgtgtggagcagagctctcccctcctgctgggcgtgtgtgacactgatgagtttcactgtactgcatgtgacttctcccctgcccttcctcctgatggagtgtgcagacagccatgcgtggccacgggggcagtgtgaggacctccctgtctcccggctcccctcccaggggagccagctgcttgacctagctctttgggcctctcctgccctctgctctgcctggagtgtcggatcctgtgagtaggctgggcctcccctgggcagggttctccaagggcccggtttcccggcccttacctttcctgatgcccctgacatcatcattcttgtgggagacagcagcctgtatgtggtgtggggcgtggatcgagtgtagctgtgaaatccatatatatgaaatgtcctgcgggatacagtcttagctgacttttttttactctgaactcttatttgaattgttttttgtgcatatatttctgctaccacagagattgtactatacaaataaaaaaataaaaacccaa

SEQ ID NO: 5748 - DNA, 1580 bp, Homo sapiens
  source 1..1580: mol_type = unassigned DNA
agtgagagagcggcgagggggcgcccggccggactctgagcctagtcctctcgcgctgcggccgcccgcgcctcctcggccgcctgtcgggcatgaaaaccaaattctgcaccgggggcgaggcggagccctcgccgctcgggctgctgctgagctgcggtagcggcagcgcggccccggcgcccggcgtggggcagcagcgcgacgccgccagcgacctcgagtccaagcagctgggcggccaacagccgccgctcgcgctgccccctccgccgccgctgccgctgccgctgccgctgccccagcccccgccgccgcagccgcccgcagacgagcagccggagccccggacgcggcgcagggcctatctgtggtgcaaggagttcctgcccggcgcctggcggggcctccgcgaggacgagttccacatcagtgtcatcagaggcggccttagcaacatgctgttccagtgctccctacctgacaccacagccacccttggtgatgagcctcggaaagtgctcctgcggctgtatggagcgattttgcagatgggggctgaggccatggttctggagagcgttatgtttgccattctcgcagagaggtcacttgggccaaaactctatggcatctttccccaaggccgactggagcagttcatcccgagccggcgattagatactgaagaattaagtttgccagatatttctgcagaaatcgccgagaaaatggctacatttcatggtatgaaaatgccattcaataaggaaccaaaatggctttttggcacaatggaaaagtatctaaaggaagtgctgagaattaaatttactgaggaatccagaattaaaaagctccacaaattgctcagttacaatctgcccttggaactggaaaacctgagatcattgcttgaatctactccatctccagttgtattttgtcataatgactgtcaagaaggtaatatcttgttgctggaaggccgagagaattctgaaaaacagaaactgatgctcattgatttcgaatacagcagttacaattacaggggattcgacattggaaatcacttctgtgagtggatgtatgattatagctatgaaaaatacccttttttcagagcaaacatccggaagtatcccaccaagaaacaacagctccattttatttccagttacttgcctgcattccaaaatgactttgaaaacctcagtactgaagaaaaatccattataaaagaagaaatgttgcttgaagttaataggtttgcccttgcatctcatttcctctggggactgtggtccattgtacaagccaagatttcatctattgaatttgggtacatggactacgcccaagcaaggtttgatgcctatttccaccagaagaggaagcttggggtgtgactgtggggaggactccatccacctcatcactggactgcatggggaggcagcagagcggggtcccctctgtgcttcgactactgctcctgtggcaggaggctttgggtggctcactactgaacacatgtgtatgatactaaagacggtattaaaatggagcgacgttta

SEQ ID NO: 5749 - DNA, 1638 bp, Homo sapiens
  source 1..1638: mol_type = unassigned DNA
agagatctgcggaattcggccttcggaaagagcccccgggccggggcacggagagagccgagcgccgcagccgtgagccgaatagagccggagagacccgagtatgaccggagaagcccaggccggccggaagaggagccgagcgcggccggaaggaaccgagcccgtccgaagggagcggagcgcagcctggcctggggcccggtcgagcccgcgccatggcggccgaggcgacagctgtggccggaagcggggctgttggcggctgcctggccaaagacggcttgcagcagtctaagtgcccggacactaccccaaaacggcggcgcgcctcgtcgctgtcgcgtgacgccgagcgccgagcctaccaatggtgccgggagtacttgggcggggcctggcgccgagtgcagcccgaggagctgagggtttaccccgtgagcggaggcctcagcaacctgctcttccgctgctcgctcccggaccacctgcccagcgttggcgaggagccccgggaggtgcttctgcggctgtacggagccatcttgcagggcgtggactccctggtgctagaaagcgtgatgttcgccatacttgcggagcggtcgctggggccccagctgtacggagtcttcccagagggccggctggaacagtacatcccaagtcggccattgaaaactcaagagcttcgagagccagtgttgtcagcagccattgccacgaagatggcgcaatttcatggcatggagatgcctttcaccaaggagccccactggctgtttgggaccatggagcggtacctaaaacagatccaggacctgcccccaactggcctccctgagatgaacctgctggagatgtacagcctgaaggatgagatgggcaacctcaggaagttactagagtctaccccatcgccagtcgtcttctgccacaatgacatccaggaagggaacatcttgctgctctcagagccagaaaatgctgacagcctcatgctggtggacttcgagtacagcagttataactataggggctttgacattgggaaccatttttgtgagtgggtttatgattatactcacgaggaatggcctttctacaaagcaaggcccacagactaccccactcaagaacagcagttgcattttattcgtcattacctggcagaggcaaagaaaggtgagaccctctcccaagaggagcagagaaaactggaagaagatttgctggtagaagtcagtcggtatgctctggcatcccatttcttctggggtctgtggtccatcctccaggcatccatgtccaccatagaatttggttacttggactatgcccagtctcggttccagttctacttccagcagaaggggcagctgaccagtgtccactcctcatcctgactccaccctcccactccttggatttctcctggagcctccagggcaggaccttggagggaggaacaacgagcagaaggccctggcgactgggctgagcccccaagtgaaactgaggttcaggagaccggcctgttcctgagtttgagtaggtccccatggctggcaggccagagccccgtgctgtgtatgtaacacaataaacaagcttcttcttcccaccctgtcctggccc

SEQ ID NO: 5750 - DNA, 2458 bp, Homo sapiens
  source 1..2458: mol_type = unassigned DNA
aaatgctgagctaggggcaggaggcatgggcgggacagtgttctgtgcccccttctagagcctaaatttgttgcccgagttcctccgggaagcgctccgggtagattctgggggccgggagctgagatccctgggcggggagctggggaagggatggggctgaggacagcgaagaagagggggcttgggggaggggggaaatggaagagagaggagggaggaggtacaagaggaaggagagaagtgcggccagcttgctttctccagtcgggtggccgcggggacccgggcgacgtcggaggccctgccgggaacccaggctgcagcccccacccccgcgctgcgacacgccccccaccccttccggctcacacccccgcccacactcctgagtggtgcggtgcagcgtcggccgaggcagcagagccgaggagagcaggtccacacctctgcatccctgcaccaggactcaccaagacgcccatcctggaaaaggtcccccgtaagatggcagcaaaaactcccagcagtgaggagtctgggctgcccaaactgcccgtgcccccgctgcagcagaccctggccacgtacctgcagtgcatgcgacacttggtgtctgaggagcagttcaggaagagccaggccattgtgcagcagtttggggcccctggtggcctcggcgagaccctgcagcagaaactcctggagcggcaggagaagacagccaactgggtgtctgagtactggctgaatgacatgtatctcaacaaccgcctggccctgcctgtcaactccagccctgccgtgatctttgctcggcagcacttccctggcaccgatgaccagctgaggtttgcagccagcctcatctctggtgtactcagctacaaggccctgctggacagccactccattcccactgactgtgccaaaggccagctgtcagggcagcccctttgcatgaagcaatactatgggctcttctcctcctaccggctccccggccatacccaggacacgctggtggctcagaacagcagcatcatgccggagcctgagcacgtcatcgtagcctgctgcaatcagttctttgtcttggatgttgtcattaatttccgccgtctcagtgagggggatctgttcactcagttgagaaagatagtcaaaatggcttccaacgaggacgagcgtttgcctccaattggcctgctgacgtctgacgggaggagcgagtgggccgaggccaggacggtcctcgtgaaagactccaccaaccgggactcgctggacatgattgagcgctgcatctgccttgtatgcctggacgcgccaggaggcgtggagctcagcgacacccacagggcactccagctccttcacggcggaggctacagcaagaacggggccaatcgctggtacgacaagtccctgcagtttgtggtgggccgagacggcacctgcggtgtggtgtgcgaacactccccattcgatggcatcgtcctggtgcagtgcactgagcatctgctcaagcacgtgacgcagagcagcaggaagctgatccgagcagactccgtcagcgagctccccgccccccggaggctgcggtggaaatgctccccggaaattcaaggccacttagcctcctcggcagaaaaacttcaacgaatagtaaagaaccttgacttcattgtctataagtttgacaactatgggaaaacattcattaagaagcagaaatgcagccctgatgccttcatccaggtggccctccagctggccttctacaggctccatcgaagactggtgcccacctacgagagcgcgtccatccgccgattccaggagggacgcgtggacaacatcagatcggccactccagaggcactggcttttgtgagagccgtgactgaccacaaggctgctgtgccagcttctgagaagcttctgctcctgaaggatgccatccgtgcccagactgcatacacagtcatggccataacagggatggccattgacaaccacctgctggcactgcgggagctggcccgggccatgtgcaaggagctgcccgagatgttcatggatgaaacctacctgatgagcaaccggtttgtcctctccactagccaggtgcccacaaccacggagatgttctgctgctatggtcctgtggtcccaaatgggtatggtgcctgctacaacccccagccagagaccatccttttctgcatctctagctttcacagctgcaaagagacttcttctagcaagtttgcaaaagctgtggaagaaagcctcattgacatgagagacctctgcagtctgctgccgcctactgagagcaagccattggcaacaaaggaaaaagccacgaggcccagccagggacaccaaccttgactcctgccactaggtttcacctcccaaacccagcctctagaacagccagaccctgcag

SEQ ID NO: 5751 - DNA, 2124 bp, Homo sapiens
  source 1..2124: mol_type = unassigned DNA
tcaacgccgctctggggacgcgtcaggcccagcgcacagcctgggcagctcagcctgtcagctgagcacgggcgcctcaaggggtgcggccctctcagaaggaaggtccacacctctgcatccctgcaccaggactcaccaagacgcccatcctggaaaaggtcccccgtaagatggcagcaaaaactcccagcagtgaggagtctgggctgcccaaactgcccgtgcccccgctgcagcagaccctggccacgtacctgcagtgcatgcgacacttggtgtctgaggagcagttcaggaagagccaggccattgtgcagcagtttggggcccctggtggcctcggcgagaccctgcagcagaaactcctggagcggcaggagaagacagccaactgggtgtctgagtactggctgaatgacatgtatctcaacaaccgcctggccctgcctgtcaactccagccctgccgtgatctttgctcggcagcacttccctggcaccgatgaccagctgaggtttgcagccagcctcatctctggtgtactcagctacaaggccctgctggacagccactccattcccactgactgtgccaaaggccagctgtcagggcagcccctttgcatgaagcaatactatgggctcttctcctcctaccggctccccggccatacccaggacacgctggtggctcagaacagcagcatcatgccggagcctgagcacgtcatcgtagcctgctgcaatcagttctttgtcttggatgttgtcattaatttccgccgtctcagtgagggggatctgttcactcagttgagaaagatagtcaaaatggcttccaacgaggacgagcgtttgcctccaattggcctgctgacgtctgacgggaggagcgagtgggccgaggccaggacggtcctcgtgaaagactccaccaaccgggactcgctggacatgattgagcgctgcatctgccttgtatgcctggacgcgccaggaggcgtggagctcagcgacacccacagggcactccagctccttcacggcggaggctacagcaagaacggggccaatcgctggtacgacaagtccctgcagtttgtggtgggccgagacggcacctgcggtgtggtgtgcgaacactccccattcgatggcatcgtcctggtgcagtgcactgagcatctgctcaagcacgtgacgcagagcagcaggaagctgatccgagcagactccgtcagcgagctccccgccccccggaggctgcggtggaaatgctccccggaaattcaaggccacttagcctcctcggcagaaaaacttcaacgaatagtaaagaaccttgacttcattgtctataagtttgacaactatgggaaaacattcattaagaagcagaaatgcagccctgatgccttcatccaggtggccctccagctggccttctacaggctccatcgaagactggtgcccacctacgagagcgcgtccatccgccgattccaggagggacgcgtggacaacatcagatcggccactccagaggcactggcttttgtgagagccgtgactgaccacaaggctgctgtgccagcttctgagaagcttctgctcctgaaggatgccatccgtgcccagactgcatacacagtcatggccataacagggatggccattgacaaccacctgctggcactgcgggagctggcccgggccatgtgcaaggagctgcccgagatgttcatggatgaaacctacctgatgagcaaccggtttgtcctctccactagccaggtgcccacaaccacggagatgttctgctgctatggtcctgtggtcccaaatgggtatggtgcctgctacaacccccagccagagaccatccttttctgcatctctagctttcacagctgcaaagagacttcttctagcaagtttgcaaaagctgtggaagaaagcctcattgacatgagagacctctgcagtctgctgccgcctactgagagcaagccattggcaacaaaggaaaaagccacgaggcccagccagggacaccaaccttgactcctgccactaggtttcacctcccaaacccagcctctagaacagccagaccctgcag

SEQ ID NO: 5752 - DNA, 2286 bp, Homo sapiens
  source 1..2286: mol_type = unassigned DNA
cccgccccgttgaggctttgagaaaggagtaggagccgagcattccggcagaggaagaaaaacggcccatcttttagagtccgacctctggaaattcgggtggccgcggggacccgggcgacgtcggaggccctgccgggaacccaggctgcagcccccacccccgcgctgcgacacgccccccaccccttccggctcacacccccgcccacactcctgagtggtgcggtgcagcgtcggccgaggcagcagagccgaggagagcaggtccacacctctgcatccctgcaccaggactcaccaagacgcccatcctggaaaaggtcccccgtaagatggcagcaaaaactcccagcagtgaggagtctgggctgcccaaactgcccgtgcccccgctgcagcagaccctggccacgtacctgcagtgcatgcgacacttggtgtctgaggagcagttcaggaagagccaggccattgtgcagcagtttggggcccctggtggcctcggcgagaccctgcagcagaaactcctggagcggcaggagaagacagccaactgggtgtctgagtactggctgaatgacatgtatctcaacaaccgcctggccctgcctgtcaactccagccctgccgtgatctttgctcggcagcacttccctggcaccgatgaccagctgaggtttgcagccagcctcatctctggtgtactcagctacaaggccctgctggacagccactccattcccactgactgtgccaaaggccagctgtcagggcagcccctttgcatgaagcaatactatgggctcttctcctcctaccggctccccggccatacccaggacacgctggtggctcagaacagcagcatcatgccggagcctgagcacgtcatcgtagcctgctgcaatcagttctttgtcttggatgttgtcattaatttccgccgtctcagtgagggggatctgttcactcagttgagaaagatagtcaaaatggcttccaacgaggacgagcgtttgcctccaattggcctgctgacgtctgacgggaggagcgagtgggccgaggccaggacggtcctcgtgaaagactccaccaaccgggactcgctggacatgattgagcgctgcatctgccttgtatgcctggacgcgccaggaggcgtggagctcagcgacacccacagggcactccagctccttcacggcggaggctacagcaagaacggggccaatcgctggtacgacaagtccctgcagtttgtggtgggccgagacggcacctgcggtgtggtgtgcgaacactccccattcgatggcatcgtcctggtgcagtgcactgagcatctgctcaagcacgtgacgcagagcagcaggaagctgatccgagcagactccgtcagcgagctccccgccccccggaggctgcggtggaaatgctccccggaaattcaaggccacttagcctcctcggcagaaaaacttcaacgaatagtaaagaaccttgacttcattgtctataagtttgacaactatgggaaaacattcattaagaagcagaaatgcagccctgatgccttcatccaggtggccctccagctggccttctacaggctccatcgaagactggtgcccacctacgagagcgcgtccatccgccgattccaggagggacgcgtggacaacatcagatcggccactccagaggcactggcttttgtgagagccgtgactgaccacaaggctgctgtgccagcttctgagaagcttctgctcctgaaggatgccatccgtgcccagactgcatacacagtcatggccataacagggatggccattgacaaccacctgctggcactgcgggagctggcccgggccatgtgcaaggagctgcccgagatgttcatggatgaaacctacctgatgagcaaccggtttgtcctctccactagccaggtgcccacaaccacggagatgttctgctgctatggtcctgtggtcccaaatgggtatggtgcctgctacaacccccagccagagaccatccttttctgcatctctagctttcacagctgcaaagagacttcttctagcaagtttgcaaaagctgtggaagaaagcctcattgacatgagagacctctgcagtctgctgccgcctactgagagcaagccattggcaacaaaggaaaaagccacgaggcccagccagggacaccaaccttgactcctgccactaggtttcacctcccaaacccagcctctagaacagccagaccctgcag

SEQ ID NO: 5753 - DNA, 2114 bp, Homo sapiens
  source 1..2114: mol_type = unassigned DNA
cccgccccgttgaggctttgagaaaggagtaggagccgagcattccggcagaggaagaaaaacggcccatcttttagagtccgacctctggaaatgtccacacctctgcatccctgcaccaggactcaccaagacgcccatcctggaaaaggtcccccgtaagatggcagcaaaaactcccagcagtgaggagtctgggctgcccaaactgcccgtgcccccgctgcagcagaccctggccacgtacctgcagtgcatgcgacacttggtgtctgaggagcagttcaggaagagccaggccattgtgcagcagtttggggcccctggtggcctcggcgagaccctgcagcagaaactcctggagcggcaggagaagacagccaactgggtgtctgagtactggctgaatgacatgtatctcaacaaccgcctggccctgcctgtcaactccagccctgccgtgatctttgctcggcagcacttccctggcaccgatgaccagctgaggtttgcagccagcctcatctctggtgtactcagctacaaggccctgctggacagccactccattcccactgactgtgccaaaggccagctgtcagggcagcccctttgcatgaagcaatactatgggctcttctcctcctaccggctccccggccatacccaggacacgctggtggctcagaacagcagcatcatgccggagcctgagcacgtcatcgtagcctgctgcaatcagttctttgtcttggatgttgtcattaatttccgccgtctcagtgagggggatctgttcactcagttgagaaagatagtcaaaatggcttccaacgaggacgagcgtttgcctccaattggcctgctgacgtctgacgggaggagcgagtgggccgaggccaggacggtcctcgtgaaagactccaccaaccgggactcgctggacatgattgagcgctgcatctgccttgtatgcctggacgcgccaggaggcgtggagctcagcgacacccacagggcactccagctccttcacggcggaggctacagcaagaacggggccaatcgctggtacgacaagtccctgcagtttgtggtgggccgagacggcacctgcggtgtggtgtgcgaacactccccattcgatggcatcgtcctggtgcagtgcactgagcatctgctcaagcacgtgacgcagagcagcaggaagctgatccgagcagactccgtcagcgagctccccgccccccggaggctgcggtggaaatgctccccggaaattcaaggccacttagcctcctcggcagaaaaacttcaacgaatagtaaagaaccttgacttcattgtctataagtttgacaactatgggaaaacattcattaagaagcagaaatgcagccctgatgccttcatccaggtggccctccagctggccttctacaggctccatcgaagactggtgcccacctacgagagcgcgtccatccgccgattccaggagggacgcgtggacaacatcagatcggccactccagaggcactggcttttgtgagagccgtgactgaccacaaggctgctgtgccagcttctgagaagcttctgctcctgaaggatgccatccgtgcccagactgcatacacagtcatggccataacagggatggccattgacaaccacctgctggcactgcgggagctggcccgggccatgtgcaaggagctgcccgagatgttcatggatgaaacctacctgatgagcaaccggtttgtcctctccactagccaggtgcccacaaccacggagatgttctgctgctatggtcctgtggtcccaaatgggtatggtgcctgctacaacccccagccagagaccatccttttctgcatctctagctttcacagctgcaaagagacttcttctagcaagtttgcaaaagctgtggaagaaagcctcattgacatgagagacctctgcagtctgctgccgcctactgagagcaagccattggcaacaaaggaaaaagccacgaggcccagccagggacaccaaccttgactcctgccactaggtttcacctcccaaacccagcctctagaacagccagaccctgcag

SEQ ID NO: 5754 - DNA, 2528 bp, Homo sapiens
  source 1..2528: mol_type = unassigned DNA
aaatgctgagctaggggcaggaggcatgggcgggacagtgttctgtgcccccttctagagcctaaatttgttgcccgagttcctccgggaagcgctccgggtagattctgggggccgggagctgagatccctgggcggggagctggggaagggatggggctgaggacagcgaagaagagggggcttgggggaggggggaaatggaagagagaggagggaggaggtacaagaggaaggagagaagtgcggccagcttgctttctccagtcgggtggccgcggggacccgggcgacgtcggaggccctgccgggaacccaggctgcagcccccacccccgcgctgcgacacgccccccaccccttccggctcacacccccgcccacactcctgagtggtgcggtgcagcgtcggccgaggcagcagagccgaggagagcagtgagggaattcaccctactccacaccagagatgtggccggaatgcagagatgaagcactgagcacagtaggtccacacctctgcatccctgcaccaggactcaccaagacgcccatcctggaaaaggtcccccgtaagatggcagcaaaaactcccagcagtgaggagtctgggctgcccaaactgcccgtgcccccgctgcagcagaccctggccacgtacctgcagtgcatgcgacacttggtgtctgaggagcagttcaggaagagccaggccattgtgcagcagtttggggcccctggtggcctcggcgagaccctgcagcagaaactcctggagcggcaggagaagacagccaactgggtgtctgagtactggctgaatgacatgtatctcaacaaccgcctggccctgcctgtcaactccagccctgccgtgatctttgctcggcagcacttccctggcaccgatgaccagctgaggtttgcagccagcctcatctctggtgtactcagctacaaggccctgctggacagccactccattcccactgactgtgccaaaggccagctgtcagggcagcccctttgcatgaagcaatactatgggctcttctcctcctaccggctccccggccatacccaggacacgctggtggctcagaacagcagcatcatgccggagcctgagcacgtcatcgtagcctgctgcaatcagttctttgtcttggatgttgtcattaatttccgccgtctcagtgagggggatctgttcactcagttgagaaagatagtcaaaatggcttccaacgaggacgagcgtttgcctccaattggcctgctgacgtctgacgggaggagcgagtgggccgaggccaggacggtcctcgtgaaagactccaccaaccgggactcgctggacatgattgagcgctgcatctgccttgtatgcctggacgcgccaggaggcgtggagctcagcgacacccacagggcactccagctccttcacggcggaggctacagcaagaacggggccaatcgctggtacgacaagtccctgcagtttgtggtgggccgagacggcacctgcggtgtggtgtgcgaacactccccattcgatggcatcgtcctggtgcagtgcactgagcatctgctcaagcacgtgacgcagagcagcaggaagctgatccgagcagactccgtcagcgagctccccgccccccggaggctgcggtggaaatgctccccggaaattcaaggccacttagcctcctcggcagaaaaacttcaacgaatagtaaagaaccttgacttcattgtctataagtttgacaactatgggaaaacattcattaagaagcagaaatgcagccctgatgccttcatccaggtggccctccagctggccttctacaggctccatcgaagactggtgcccacctacgagagcgcgtccatccgccgattccaggagggacgcgtggacaacatcagatcggccactccagaggcactggcttttgtgagagccgtgactgaccacaaggctgctgtgccagcttctgagaagcttctgctcctgaaggatgccatccgtgcccagactgcatacacagtcatggccataacagggatggccattgacaaccacctgctggcactgcgggagctggcccgggccatgtgcaaggagctgcccgagatgttcatggatgaaacctacctgatgagcaaccggtttgtcctctccactagccaggtgcccacaaccacggagatgttctgctgctatggtcctgtggtcccaaatgggtatggtgcctgctacaacccccagccagagaccatccttttctgcatctctagctttcacagctgcaaagagacttcttctagcaagtttgcaaaagctgtggaagaaagcctcattgacatgagagacctctgcagtctgctgccgcctactgagagcaagccattggcaacaaaggaaaaagccacgaggcccagccagggacaccaaccttgactcctgccactaggtttcacctcccaaacccagcctctagaacagccagaccctgcag

SEQ ID NO: 5755 - DNA, 1839 bp, Homo sapiens
  source 1..1839: mol_type = unassigned DNA
gcggtgcagcgtcggccgaggcagcagagccgaggagagcaggtccacacctctgcatccctgcaccaggactcaccaagacgcccatcctggaaaaggtcccccgtaagatggcagcaaaaactcccagcagtgaggagtctgggctgcccaaactgcccgtgcccccgctgcagcagaccctggccacgtacctgcagtgcatgcgacacttggtgtctgaggagcagttcaggaagagccaggccattgtgcagcagtttggggcccctggtggcctcggcgagaccctgcagcagaaactcctggagcggcaggagaagacagccaactgggtgtctgagtactggctgaatgacatgtatctcaacaaccgcctggccctgcctgtcaactccagccctgccgtgatctttgctcggcagcacttccctggcaccgatgaccagctgaggtttgcagccagcctcatctctggtgtactcagctacaaggccctgctggacagccactccattcccactgactgtgccaaaggccagctgtcagggcagcccctttgcatgaagcaatactatgggctcttctcctcctaccggctccccggccatacccaggacacgctggtggctcagaacagcagcatcatgccggagcctgagcacgtcatcgtagcctgctgcaatcagttctttgtcttggatgttgtcattaatttccgccgtctcagtgagggggatctgttcactcagttgagaaagatagtcaaaatggcttccaacgaggacgagcgtttgcctccaattggcctgctgacgtctgacgggaggagcgagtgggccgaggccaggacggtcctcgtgaaagactccaccaaccgggactcgctggacatgattgagcgctgcatctgccttgtatgcctggacgcgccaggaggcgtggagctcagcgacacccacagggcactccagctccttcacggcggaggctacagcaagaacggggccaatcgctggtacgacaagtccctgcagtttgtggtgggccgagacggcacctgcggtgtggtgtgcgaacactccccattcgatggcatcgtcctggtgcagtgcactgagcatctgctcaagcacgtgacgcagagcagcaggaagctgatccgagcagactccgtcagcgagctccccgccccccggaggctgcggtggaaatgctccccggaaattcaaggccacttagcctcctcggcagaaaaacttcaacgaatagtaaagaaccttgacttcattgtctataagtttgacaactatgggaaaacattcattaagaagcagaaatgcagccctgatgccttcatccaggtggccctccagctggccttctacaggctccatcgaagactggtgcccacctacgagagcgcgtccatccgccgattccaggagggacgcgtggacaacatcagatcggccactccagaggcactggcttttgtgagagccgtgactgaccacaaggctgctgtgccagcttctgagaagcttctgctcctgaaggatgccatccgtgcccagactgcatacacagtcatggccataacagggatggccattgacaaccacctgctggcactgcgggagctggcccgggccatgtgcaaggagctgcccgagatgttcatggatgaaacctacctgatgagcaaccggtttgtcctctccactagccagctgtgttggccatagatggacatgaggtcatcctagagaagatagaagactggaatgtggtggaactcatggtgaatgaagaagtcatcttccactgcaacattaa

SEQ ID NO: 5756 - DNA, 2964 bp, Homo sapiens
  source 1..2964: mol_type = unassigned DNA
agtgtgcctttgtgagggtgtgtgtgccgccgggtctgtgcagtgggtgtgggtgtttgtctccctgtatccgccttctctcccgtccgggacttttagccttcctgggctcgccttcctcatgtcctttctcctccctcttggggctcaaattgggtgccctggtgaaggaggggggcacactccagaacctagtccaaccccagacgctgcctgaggcttccctccagctcccctcccttccttttctccctttcctccctccctctctttccctttctccctccccgctaaggctggcgtgccagggggtgggacatgccaatcactggctgtgcctctcccgctgccagcacagggcgcagctccccctgggagccaggtgtttgggtccctggagacgccgcaggcccccagggaggcagtggggctgaggaccctacagacccctcttcagccccgtggtgatgactttcccctgaggaagccctgtagcgtgcctggaggaaggggctctccaaccccagccccacctagccaccatgaacacttcagccccacctgctgtcagccccaacatcaccgtcctggcaccaggaaagggtccctggcaagtggccttcattgggatcaccacgggcctcctgtcgctagccacagtgacaggcaacctgctggtactcatctctttcaaggtcaacacggagctcaagacagtcaataactacttcctgctgagcctggcctgtgctgacctcatcatcggtaccttctccatgaacctctataccacgtacctgctcatgggccactgggctctgggcacgctggcttgtgacctctggctggccctggactatgtggccagcaatgcctccgtcatgaatctgctgctcatcagctttgaccgctacttctccgtgactcggcccctgagctaccgtgccaagcgcacaccccgccgggcagctctgatgatcggcctggcctggctggtttcctttgtgctctgggccccagccatcctcttctggcagtacctggtaggggagcggacagtgctagctgggcagtgctacatccagttcctctcccagcccatcatcacctttggcacagccatggctgccttctacctccctgtcacagtcatgtgcacgctctactggcgcatctaccgggagacagagaaccgagcacgggagctggcagcccttcagggctccgagacgccaggcaaagggggtggcagcagcagcagctcagagaggtctcagccaggggctgagggctcaccagagactcctccaggccgctgctgtcgctgctgccgggcccccaggctgctgcaggcctacagctggaaggaagaagaggaagaggacgaaggctccatggagtccctcacatcctcagagggagaggagcctggctccgaagtggtgatcaagatgccaatggtggaccccgaggcacaggcccccaccaagcagcccccacggagctccccaaatacagtcaagaggccgactaagaaagggcgtgatcgagctggcaagggccagaagccccgtggaaaggagcagctggccaagcggaagaccttctcgctggtcaaggagaagaaggcggctcggaccctgagtgccatcctcctggccttcatcctcacctggacaccgtacaacatcatggtgctggtgtccaccttctgcaaggactgtgttcccgagaccctgtgggagctgggctactggctgtgctacgtcaacagcaccatcaaccccatgtgctacgcactctgcaacaaagccttccgggacacctttcgcctgctgctgctttgccgctgggacaagagacgctggcgcaagatccccaagcgccctggctccgtgcaccgcactccctcccgccaatgctgatagtcccctctcctgcatccctccaccccagtccccgggaaaggccggtgggaagagggcaggggctgcatcctcagccccagggccctgctcaggcctcacctggcttcccaggaccctgggtcaccttcctgggcagcccagagagaccctgccaactttccagacttcgctattcccaggcagggagggaaacccggggaactggtttttctgttccctgctgggtgggaatgcgctcttcaccaggaagaaggcccgggaggaggatccgggctttggactccttgtttgcctttaggcaggaagtcaggagccagcagggcgggccaggagaaagaaggcttaacattaagtattccttggcccagcagcggcccagattgcggtgtgagatggtgccccctggggggcacagccagaaactgaactggccgctgggagaaaagccagatgacagggagctggggaatcccctcgcttcataggcagagcccgcccacctgggccctaggcatactctccaggattgtccacaaatgtcctcagagggtccctaggtgggtcaactccaaggcaaatgtccaagcatcagcaagacaatgacactggaagggtccggcttggctagtcacatatcaagtcccgaggcagcaacaggaccaggagccaggtgtcctgactgtcctacaatatcattttcctgggagtgggagtcaagtgtgcctgctatccagccgcaaatccataccccctgccccagagaagcctcagtccctccctcctggctcacagccaccacctggatggatctgctccatgcagatctagccaggcctcccgcatgctgcctgcctccggccctgccccacacaggcctggcccagccagcaggttctctcctgtgagctccccaatccaacccatgcatggcctcccagccacccggatctccaggcccagcctggccccaaatgttctttcctttcatcctcagcaagtgctgagtctgtgaataaagccacataaccagcgggca

SEQ ID NO: 5757 - DNA, 549 bp, Homo sapiens
  source 1..549: mol_type = unassigned DNA
cggtggcaagaatcaggttccaattctctggaacctctggtgacttctctacctgccacctgccccaggtgatgactttcccctgaggaagccctgtagcgtgcctggaggaaggggctctccaaccccagccccacctagccaccatgaacacttcagccccacctgctgtcagccccaacatcaccgtcctggcaccaggaaagggtccctggcaagtggccttcattgggatcaccacgggcctcctgtcgctagccacagtgacaggcaacctgctggtactcatctctttcaaggtcaacacggagctcaagacagtcaataactacttcctgctgagcctggcctgtgctgacctcatcatcggtaccttctccatgaacctctataccacgtacctgctcatgggccactgggctctgggcacgctggcttgtgacctctggctggccctggactatgtggccagcaatgcctccgtcatgaatctgctgctcatcagctttgaccgctacttctccgtgactcggcccctgagctaccgtg

SEQ ID NO: 5758 - DNA, 2123 bp, Homo sapiens
  source 1..2123: mol_type = unassigned DNA
atgtgcaggggggagggcgtgtgtgcgagggaagcaggcatgtgaataccagggcatgtgtgttggggcatggtgcacaggggctgggggctctaaggttgggtggggggaggagcccaaggaaacagtgtgcctttgtgagggtgtgtgtgccgccgggtctgtgcagtgggtgtgggtgtttgtctccctgtatccgccttctctcccgtccgggacttttagccttcctgggctcgccttcctcatgtcctttctcctccctcttggggctcaaattgggtgccctggtgaaggaggggggcacactccagaacctagtccaaccccagacgctgcctgaggcttccctccagctcccctcccttccttttctccctttcctccctccctctctttccctttctccctccccgctaaggctggcgtgccagggggtgggacatgccaatcactggctgtgcctctcccgctgccagcacagggcgcagctccccctgggagccaggtgtttgggtccctggagacgccgcaggcccccagggaggcagtggggctgaggaccctacagacccctcttcagccccgtgggcaccctgaaacccaccacccccgtccacctcagctcccccaagatggactgaatcaggctgctggccagatagagaagctagaagccaaggtgatgactttcccctgaggaagccctgtagcgtgcctggaggaaggggctctccaaccccagccccacctagccaccatgaacacttcagccccacctgctgtcagccccaacatcaccgtcctggcaccaggaaagggtccctggcaagtggccttcattgggatcaccacgggcctcctgtcgctagccacagtgacaggcaacctgctggtactcatctctttcaaggtcaacacggagctcaagacagtcaataactacttcctgctgagcctggcctgtgctgacctcatcatcggtaccttctccatgaacctctataccacgtacctgctcatgggccactgggctctgggcacgctggcttgtgacctctggctggccctggactatgtggccagcaatgcctccgtcatgaatctgctgctcatcagctttgaccgctacttctccgtgactcggcccctgagctaccgtgccaagcgcacaccccgccgggcagctctgatgatcggcctggcctggctggtttcctttgtgctctgggccccagccatcctcttctggcagtacctggtaggggagcggacagtgctagctgggcagtgctacatccagttcctctcccagcccatcatcacctttggcacagccatggctgccttctacctccctgtcacagtcatgtgcacgctctactggcgcatctaccgggagacagagaaccgagcacgggagctggcagcccttcagggctccgagacgccaggcaaagggggtggcagcagcagcagctcagagaggtctcagccaggggctgagggctcaccagagactcctccaggccgctgctgtcgctgctgccgggcccccaggctgctgcaggcctacagctggaaggaagaagaggaagaggacgaaggctccatggagtccctcacatcctcagagggagaggagcctggctccgaagtggtgatcaagatgccaatggtggaccccgaggcacaggcccccaccaagcagcccccacggagctccccaaatacagtcaagaggccgactaagaaagggcgtgatcgagctggcaagggccagaagccccgtggaaaggagcagctggccaagcggaagaccttctcgctggtcaaggagaagaaggcggctcggaccctgagtgccatcctcctggccttcatcctcacctggacaccgtacaacatcatggtgctggtgtccaccttctgcaaggactgtgttcccgagaccctgtgggagctgggctactggctgtgctacgtcaacagcaccatcaaccccatgtgctacgcactctgcaacaaagccttccgggacacctttcgcctgctgctgctttgccgctgggacaagagacgctggcgcaagatccccaagcgccctggctccgtgcaccgca

SEQ ID NO: 5759 - DNA, 1694 bp, Homo sapiens
  source 1..1694: mol_type = unassigned DNA
acagactagccaagtggctgagacgagtgtggggtgcgtgactctgcctgcgcgcgcgccagccccgcagctctcgccagagccttgggatcaagggagaaagagaaccggcagctggcctcggactctaagcggtgcgcagctccagcccgagcggatcggccctgaacccacaaaggactcctcgctccttcaagcctccaccacctcgcagccggggaggcaactggagcgaaaccagcgacaggtttaaatgtttatttgctacttggctactgattagagaacgcaaaatgaataactcaacaaactcctctaacaatagcctggctcttacaagtccttataagacatttgaagtggtgtttattgtcctggtggctggatccctcagtttggtgaccattatcgggaacatcctagtcatggtttccattaaagtcaaccgccacctccagaccgtcaacaattactttttattcagcttggcctgtgctgaccttatcataggtgttttctccatgaacttgtacaccctctacactgtgattggttactggcctttgggacctgtggtgtgtgacctttggctagccctggactatgtggtcagcaatgcctcagttatgaatctgctcatcatcagctttgacaggtacttctgtgtcacaaaacctctgacctacccagtcaagcggaccacaaaaatggcaggtatgatgattgcagctgcctgggtcctctctttcatcctctgggctccagccattctcttctggcagttcattgtaggggtgagaactgtggaggatggggagtgctacattcagtttttttccaatgctgctgtcacctttggtacggctattgcagccttctatttgccagtgatcatcatgactgtgctatattggcacatatcccgagccagcaagagcaggataaagaaggacaagaaggagcctgttgccaaccaagaccccgtttctccaagtctggtacaaggaaggatagtgaagccaaacaataacaacatgcccagcagtgacgatggcctggagcacaacaaaatccagaatggcaaagcccccagggatcctgtgactgaaaactgtgttcagggagaggagaaggagagctccaatgactccacctcagtcagtgctgttgcctctaatatgagagatgatgaaataacccaggatgaaaacacagtttccacttccctgggccattccaaagatgagaactctaagcaaacatgcatcagaattggcaccaagaccccaaaaagtgactcatgtaccccaactaataccaccgtggaggtagtggggtcttcaggtcagaatggagatgaaaagcagaatattgtagcccgcaagattgtgaagatgactaagcagcctgcaaaaaagaagcctcctccttcccgggaaaagaaagtcaccaggacaatcttggctattctgttggctttcatcatcacttgggccccatacaatgtcatggtgctcattaacaccttttgtgcaccttgcatccccaacactgtgtggacaattggttactggctttgttacatcaacagcactatcaaccctgcctgctatgcactttgcaatgccaccttcaagaagacctttaaacaccttctcatgtgtcattataagaacataggcgctacaaggtaa

SEQ ID NO: 5760 - DNA, 2530 bp, Homo sapiens
  source 1..2530: mol_type = unassigned DNA
acagactagccaagtggctgagacgagtgtggggtgcgtgactctgcctgcgcgcgcgccagccccgcagctctcgccagagccttgggatcaagggagaaagagaaccggcagctggcctcggactctaagcggtgcgcagctccagcccgagcggatcggccctgaacccacaaaggactcctcgctccttcaagcctccaccacctcgcagccggggaggcaactggagcgaaaccagcgacaggttgttagcgacatgagtacagggtctggatcttacccattcaagagtgtattctcagcacccaatgcctggcatatagtttaaatgtttatttgctacttggctactgattagagaacgcaaaatgaataactcaacaaactcctctaacaatagcctggctcttacaagtccttataagacatttgaagtggtgtttattgtcctggtggctggatccctcagtttggtgaccattatcgggaacatcctagtcatggtttccattaaagtcaaccgccacctccagaccgtcaacaattactttttattcagcttggcctgtgctgaccttatcataggtgttttctccatgaacttgtacaccctctacactgtgattggttactggcctttgggacctgtggtgtgtgacctttggctagccctggactatgtggtcagcaatgcctcagttatgaatctgctcatcatcagctttgacaggtacttctgtgtcacaaaacctctgacctacccagtcaagcggaccacaaaaatggcaggtatgatgattgcagctgcctgggtcctctctttcatcctctgggctccagccattctcttctggcagttcattgtaggggtgagaactgtggaggatggggagtgctacattcagtttttttccaatgctgctgtcacctttggtacggctattgcagccttctatttgccagtgatcatcatgactgtgctatattggcacatatcccgagccagcaagagcaggataaagaaggacaagaaggagcctgttgccaaccaagaccccgtttctccaagtctggtacaaggaaggatagtgaagccaaacaataacaacatgcccagcagtgacgatggcctggagcacaacaaaatccagaatggcaaagcccccagggatcctgtgactgaaaactgtgttcagggagaggagaaggagagctccaatgactccacctcagtcagtgctgttgcctctaatatgagagatgatgaaataacccaggatgaaaacacagtttccacttccctgggccattccaaagatgagaactctaagcaaacatgcatcagaattggcaccaagaccccaaaaagtgactcatgtaccccaactaataccaccgtggaggtagtggggtcttcaggtcagaatggagatgaaaagcagaatattgtagcccgcaagattgtgaagatgactaagcagcctgcaaaaaagaagcctcctccttcccgggaaaagaaagtcaccaggacaatcttggctattctgttggctttcatcatcacttgggccccatacaatgtcatggtgctcattaacaccttttgtgcaccttgcatccccaacactgtgtggacaattggttactggctttgttacatcaacagcactatcaaccctgcctgctatgcactttgcaatgccaccttcaagaagacctttaaacaccttctcatgtgtcattataagaacataggcgctacaaggtaaaatatctttgaaaaagatagaaggtgggcaaggggagcttgagaagaataaaagggataaacgagctcctagttttaaaatctctgccattgcactttatagtctgattacaaaacgtgcaattcaggagcccagcagtgacacacttatcacgcctaggctccagtttgcaaaaattgcaccttataaactgtcagtattaggagcaatgagacaatgaaagaaacatgttgggatcgtggatttaagaaactatacactgtttctcataatctcttgaagaagggcttctgattctacaattttatcagtctctgcacaagaggaataaccttgttccttttttgttacttttgttgttgttgttctcatgtgtccttaagagaaggaaatgccacagttacaaggtaaacatggagacttaaacataaagaaataggcactatacaatggggacataaaaaaagaaaatcaaagaaggatgcagaaattgtctccggagtgttaagcatattttattcttttgttacggtcctatttagaggattggaatgtaataaatgcttattttttgcctttctttttcccaccatgaagagaaagcaaacaaacagaaaccccaactaggtcacaccatttttcttcttgttatgccactattttgtacatccctgttctatattgtttatagggaaaacctacaggactttcactaaagctagccagagacagccatgaaaatggacgtttcacccctc

SEQ ID NO: 5761 - DNA, 2571 bp, Homo sapiens
  source 1..2571: mol_type = unassigned DNA
gtgactctgcctgcgcgcgcgccagccccgcagctctcgccagagccttgggatcaagggagaaagagaaccggcagctggcctcggactctaagcggtgcgcagctccagcccgagcggatcggccctgaacccacaaaggactcctcgctccttcaagcctccaccacctcgcagccggggaggcaactggagcgaaaccagcgacaggttgtccaggctgatcttatactcctggcctcaagtgatcctcctgcctcagtctccaaaagcactgggaatacataggttgttagcgacatgagtacagggtctggatcttacccattcaagagtgtattctcagcacccaatgcctggcatatagtttaaatgtttatttgctacttggctactgattagagaacgcaaaatgaataactcaacaaactcctctaacaatagcctggctcttacaagtccttataagacatttgaagtggtgtttattgtcctggtggctggatccctcagtttggtgaccattatcgggaacatcctagtcatggtttccattaaagtcaaccgccacctccagaccgtcaacaattactttttattcagcttggcctgtgctgaccttatcataggtgttttctccatgaacttgtacaccctctacactgtgattggttactggcctttgggacctgtggtgtgtgacctttggctagccctggactatgtggtcagcaatgcctcagttatgaatctgctcatcatcagctttgacaggtacttctgtgtcacaaaacctctgacctacccagtcaagcggaccacaaaaatggcaggtatgatgattgcagctgcctgggtcctctctttcatcctctgggctccagccattctcttctggcagttcattgtaggggtgagaactgtggaggatggggagtgctacattcagtttttttccaatgctgctgtcacctttggtacggctattgcagccttctatttgccagtgatcatcatgactgtgctatattggcacatatcccgagccagcaagagcaggataaagaaggacaagaaggagcctgttgccaaccaagaccccgtttctccaagtctggtacaaggaaggatagtgaagccaaacaataacaacatgcccagcagtgacgatggcctggagcacaacaaaatccagaatggcaaagcccccagggatcctgtgactgaaaactgtgttcagggagaggagaaggagagctccaatgactccacctcagtcagtgctgttgcctctaatatgagagatgatgaaataacccaggatgaaaacacagtttccacttccctgggccattccaaagatgagaactctaagcaaacatgcatcagaattggcaccaagaccccaaaaagtgactcatgtaccccaactaataccaccgtggaggtagtggggtcttcaggtcagaatggagatgaaaagcagaatattgtagcccgcaagattgtgaagatgactaagcagcctgcaaaaaagaagcctcctccttcccgggaaaagaaagtcaccaggacaatcttggctattctgttggctttcatcatcacttgggccccatacaatgtcatggtgctcattaacaccttttgtgcaccttgcatccccaacactgtgtggacaattggttactggctttgttacatcaacagcactatcaaccctgcctgctatgcactttgcaatgccaccttcaagaagacctttaaacaccttctcatgtgtcattataagaacataggcgctacaaggtaaaatatctttgaaaaagatagaaggtgggcaaggggagcttgagaagaataaaagggataaacgagctcctagttttaaaatctctgccattgcactttatagtctgattacaaaacgtgcaattcaggagcccagcagtgacacacttatcacgcctaggctccagtttgcaaaaattgcaccttataaactgtcagtattaggagcaatgagacaatgaaagaaacatgttgggatcgtggatttaagaaactatacactgtttctcataatctcttgaagaagggcttctgattctacaattttatcagtctctgcacaagaggaataaccttgttccttttttgttacttttgttgttgttgttctcatgtgtccttaagagaaggaaatgccacagttacaaggtaaacatggagacttaaacataaagaaataggcactatacaatggggacataaaaaaagaaaatcaaagaaggatgcagaaattgtctccggagtgttaagcatattttattcttttgttacggtcctatttagaggattggaatgtaataaatgcttattttttgcctttctttttcccaccatgaagagaaagcaaacaaacagaaaccccaactaggtcacaccatttttcttcttgttatgccactattttgtacatccctgttctatattgtttatagggaaaacctacaggactttcactaaagctagccagagacagccatgaaaatggacgtttcacccctc

SEQ ID NO: 5762 - DNA, 2474 bp, Homo sapiens
  source 1..2474: mol_type = unassigned DNA
acagactagccaagtggctgagacgagtgtgggatcaagggagaaagagaaccggcagctggcctcggactctaagcggtgcgcagctccagcccgagcggatcggccctgaacccacaaaggactcctcgctccttcaagcctccaccacctcgcagccggggaggcaactggagcgaaaccagcgacaggttgttagcgacatgagtacagggtctggatcttacccattcaagagtgtattctcagcacccaatgcctggcatatagtttaaatgtttatttgctacttggctactgattagagaacgcaaaatgaataactcaacaaactcctctaacaatagcctggctcttacaagtccttataagacatttgaagtggtgtttattgtcctggtggctggatccctcagtttggtgaccattatcgggaacatcctagtcatggtttccattaaagtcaaccgccacctccagaccgtcaacaattactttttattcagcttggcctgtgctgaccttatcataggtgttttctccatgaacttgtacaccctctacactgtgattggttactggcctttgggacctgtggtgtgtgacctttggctagccctggactatgtggtcagcaatgcctcagttatgaatctgctcatcatcagctttgacaggtacttctgtgtcacaaaacctctgacctacccagtcaagcggaccacaaaaatggcaggtatgatgattgcagctgcctgggtcctctctttcatcctctgggctccagccattctcttctggcagttcattgtaggggtgagaactgtggaggatggggagtgctacattcagtttttttccaatgctgctgtcacctttggtacggctattgcagccttctatttgccagtgatcatcatgactgtgctatattggcacatatcccgagccagcaagagcaggataaagaaggacaagaaggagcctgttgccaaccaagaccccgtttctccaagtctggtacaaggaaggatagtgaagccaaacaataacaacatgcccagcagtgacgatggcctggagcacaacaaaatccagaatggcaaagcccccagggatcctgtgactgaaaactgtgttcagggagaggagaaggagagctccaatgactccacctcagtcagtgctgttgcctctaatatgagagatgatgaaataacccaggatgaaaacacagtttccacttccctgggccattccaaagatgagaactctaagcaaacatgcatcagaattggcaccaagaccccaaaaagtgactcatgtaccccaactaataccaccgtggaggtagtggggtcttcaggtcagaatggagatgaaaagcagaatattgtagcccgcaagattgtgaagatgactaagcagcctgcaaaaaagaagcctcctccttcccgggaaaagaaagtcaccaggacaatcttggctattctgttggctttcatcatcacttgggccccatacaatgtcatggtgctcattaacaccttttgtgcaccttgcatccccaacactgtgtggacaattggttactggctttgttacatcaacagcactatcaaccctgcctgctatgcactttgcaatgccaccttcaagaagacctttaaacaccttctcatgtgtcattataagaacataggcgctacaaggtaaaatatctttgaaaaagatagaaggtgggcaaggggagcttgagaagaataaaagggataaacgagctcctagttttaaaatctctgccattgcactttatagtctgattacaaaacgtgcaattcaggagcccagcagtgacacacttatcacgcctaggctccagtttgcaaaaattgcaccttataaactgtcagtattaggagcaatgagacaatgaaagaaacatgttgggatcgtggatttaagaaactatacactgtttctcataatctcttgaagaagggcttctgattctacaattttatcagtctctgcacaagaggaataaccttgttccttttttgttacttttgttgttgttgttctcatgtgtccttaagagaaggaaatgccacagttacaaggtaaacatggagacttaaacataaagaaataggcactatacaatggggacataaaaaaagaaaatcaaagaaggatgcagaaattgtctccggagtgttaagcatattttattcttttgttacggtcctatttagaggattggaatgtaataaatgcttattttttgcctttctttttcccaccatgaagagaaagcaaacaaacagaaaccccaactaggtcacaccatttttcttcttgttatgccactattttgtacatccctgttctatattgtttatagggaaaacctacaggactttcactaaagctagccagagacagccatgaaaatggacgtttcacccctc

SEQ ID NO: 5763 - DNA, 5918 bp, Homo sapiens
  source 1..5918: mol_type = unassigned DNA
acacacgcacgaatacagacacgctctcctgctgtactaaaggcgccagggcgcaaagacctagggagcgcgcgcgggcacacacacacacacacacacacacacagacacacacacactcacacactccaggctgcgggttggccagagcctggaaatcgcagatttcaccaggaaatcgccgaggtacccgaataggtgttgcctcccaaaactaattcctacttccccaagcactttggtgaagaaatgaatccagcccagctcgccgaggcatccaggtctccattctattttggtctccaggctcttcgtgaaagccagatcaagggagaaagagaaccggcagctggcctcggactctaagcggtgcgcagctccagcccgagcggatcggccctgaacccacaaaggactcctcgctccttcaagcctccaccacctcgcagccggggaggcaactggagcgaaaccagcgacaggtttaaatgtttatttgctacttggctactgattagagaacgcaaaatgaataactcaacaaactcctctaacaatagcctggctcttacaagtccttataagacatttgaagtggtgtttattgtcctggtggctggatccctcagtttggtgaccattatcgggaacatcctagtcatggtttccattaaagtcaaccgccacctccagaccgtcaacaattactttttattcagcttggcctgtgctgaccttatcataggtgttttctccatgaacttgtacaccctctacactgtgattggttactggcctttgggacctgtggtgtgtgacctttggctagccctggactatgtggtcagcaatgcctcagttatgaatctgctcatcatcagctttgacaggtacttctgtgtcacaaaacctctgacctacccagtcaagcggaccacaaaaatggcaggtatgatgattgcagctgcctgggtcctctctttcatcctctgggctccagccattctcttctggcagttcattgtaggggtgagaactgtggaggatggggagtgctacattcagtttttttccaatgctgctgtcacctttggtacggctattgcagccttctatttgccagtgatcatcatgactgtgctatattggcacatatcccgagccagcaagagcaggataaagaaggacaagaaggagcctgttgccaaccaagaccccgtttctccaagtctggtacaaggaaggatagtgaagccaaacaataacaacatgcccagcagtgacgatggcctggagcacaacaaaatccagaatggcaaagcccccagggatcctgtgactgaaaactgtgttcagggagaggagaaggagagctccaatgactccacctcagtcagtgctgttgcctctaatatgagagatgatgaaataacccaggatgaaaacacagtttccacttccctgggccattccaaagatgagaactctaagcaaacatgcatcagaattggcaccaagaccccaaaaagtgactcatgtaccccaactaataccaccgtggaggtagtggggtcttcaggtcagaatggagatgaaaagcagaatattgtagcccgcaagattgtgaagatgactaagcagcctgcaaaaaagaagcctcctccttcccgggaaaagaaagtcaccaggacaatcttggctattctgttggctttcatcatcacttgggccccatacaatgtcatggtgctcattaacaccttttgtgcaccttgcatccccaacactgtgtggacaattggttactggctttgttacatcaacagcactatcaaccctgcctgctatgcactttgcaatgccaccttcaagaagacctttaaacaccttctcatgtgtcattataagaacataggcgctacaaggtaaaatatctttgaaaaagatagaaggtgggcaaggggagcttgagaagaataaaagggataaacgagctcctagttttaaaatctctgccattgcactttatagtctgattacaaaacgtgcaattcaggagcccagcagtgacacacttatcacgcctaggctccagtttgcaaaaattgcaccttataaactgtcagtattaggagcaatgagacaatgaaagaaacatgttgggatcgtggatttaagaaactatacactgtttctcataatctcttgaagaagggcttctgattctacaattttatcagtctctgcacaagaggaataaccttgttccttttttgttacttttgttgttgttgttctcatgtgtccttaagagaaggaaatgccacagttacaaggtaaacatggagacttaaacataaagaaataggcactatacaatggggacataaaaaaagaaaatcaaagaaggatgcagaaattgtctccggagtgttaagcatattttattcttttgttacggtcctatttagaggattggaatgtaataaatgcttattttttgcctttctttttcccaccatgaagagaaagcaaacaaacagaaaccccaactaggtcacaccatttttcttcttgttatgccactattttgtacatccctgttctatattgtttatagggaaaacctacaggactttcactaaagctagccagagacagccatgaaaatggacgtttcacccctcctcactgtgtcctttgcattcgttggggatatcaaggtctataaggatttagtgcacttataatcctatatgcgaaatgtttaaaccaatctgattttctcctaaatagccttttatatcaacagaatatcctacctaaaacataaacctgtttaagaaaccatcgtcactgtaaagttgaggtttcatcaaattaaataatggactatctagttggaccaagtttattaaagtcaggtgaattttaagattaaaaaatagaagtttaggactttctatttcaacctgaatttgcctgacccatgtatgaaatgttaacttatagaaaatgaactcctgactttctcagcagaaaggaatgctgttttatttatttggaatcctaaacaggattaacatactcacatagcaccagtgatttctgggccagtccctagagaatagaaccttctatccaatgcctgctaaaggatgatattcaaattataaccaagtgaggatgtctgcaattatcctatgaccccatgaaaggggaaaaaacgatattttaaaaactattactgaaacaattacatattccatattcctcaaattgtcaattctccctaacattatttaacttcaaaattctcttatcaatagaattatagtaatctttgtgacagaaatgtagtggctaactaaatagaggccaaacgagcttacagaatctgacagaaggaggtaggtggctgttgccatgccacatctcaccatctaattctagaccataataatcatgtcaggaactattatctaagtggtggcattatatagaatcttgccacgtagagattttttatttggtcgtctaaataaatataggattaggattatacggattcacatacaactagttatttttatcctttatatttttcttacagtatttgctgtagttttccaatgagattttctaaaaatggctcaatcaatggaaatcaaattataaacgcatttgcaaatttcatattttggattttagatttatgatatcttgttcagtaataataatgttagttacatggtaaatttatcaatattagaccccagcacttaaaagaattattttgtatgattagcctcatagatgccacctcaacattttggagagttaaggaggaaaaaaagcatgagggaaaaaaaaaaccaaaaaacttataagttagtaagaagcaaattgccagcagtatttatatttgacttatccttcgtaaaaacaatttcctgtttaaataacttcagtcattacccccccaaagtaatcttccatatttaaagcattcatttatagagattcccttacctacagttacttcaacatgcacttttacattttaaattcatatttattttcatattgtttcttcaaatgaaggaatcagttgaacggaaataacgtcaagccagtgggctcctcgagtttctgaaaaccagagaattgactagccaagtatttccctttttaatgtattgtattattattatgtagatttggcttcagttgggaagaaccctttggcatccaggattcaggattcagggtctttttttgtttgctctaataatccaacgcaccatgaatcaagcttttagtctctgctgccattgtatccttccttttcctccctctgttattgatccttgccacagccactgcaacctcattgaaagagaaactgtcactttaaagaaagaaattgaagataggctgacaccatggaaactacgtcaaacagataagaaaaatggaaggaatactgaaaatgatagatgattggagagatatggagattatattcaaggatttttattaaccactgctggatttgtctatttcagtggctctcaaacagagacaattcccctctccccgaaaggggacacttagcaatgcgtaaagacatttttggttgccacactgggaggaatgctattggtatctagtgcatagaggctgggaatgctgctaaatagcctataatgctcaggacattttcccccaacccctttaaacaaatattatttggctcaaaatgtcaatagttccaagattgagaaattcttgtctactttaagggatttctaaagcttgcctcttattagtgggaaaataaccctgcattatttttagaatatcaatgcaaattcctcacctgttagaaaaaggtaatactcaccaaccatgtatcagaaaaacttttctcctgagtctggtgtatgtgtcagtcacagattgggaactcaggccacatctacatatcaaaaatcaccagactatgcatatcgcacatcttttttccagcatcttaatgttcaattatgattgccacagatctagtcaattgaggttgcagtagttggccatcaaaatatttgcagttgatatgatcagtttctactggagctgcaatttttcctttcaaaaaatattaagagcctctttcagaaacaatatcatttatcttctttgcatttactggaaaggtgtatctgtaaggtctttgttttttctctcctcatagcaataatgtagctatcccagagtgatattataagaagaggagattaagaatatggaaaaagtctgttcatttcttcgaaacaagaaatgattttccttttaccagttcatcattaatttaacgccagctcccaagtattagggcagagtaatcaatatgagaagccacaacgggtaagctttctgatttgaaatgtacaagctggatgtccaacatactcctgctctttgttcatttgcttttttgatcctgaagatctgacattgggagagatgggaattcaaaatgatggcaacaattactcagcaatgcagtctgtttttattttctcctacttagttcattgacagtttcctcctcgccccagtttgataatatccctttcaacaaccatagtaccggtgttgcaaatagtttaggaaagcacccaaagctggatgaaattgtgcaaagtgtattctcagcatgtatattcaataccatgcctcttaaaaatgcttctcttaaagggtgcacgctgtagcatgaaatgtgtgcatatttaatgtatcttcctggaatatgctatgtgctaaatatatatatattctataaataaaataataaaatgtacaatagaaatacatatttctgtatgcaaataaatatattatacacaaactcttaa

SEQ ID NO: 5764 - DNA, 2014 bp, Homo sapiens
  source 1..2014: mol_type = unassigned DNA
acagactagccaagtggctgagacgagtgtgggatcaagggagaaagagaaccggcagctggcctcggactctaagcggtgcgcagctccagcccgagcggatcggccctgaacccacaaaggactcctcgctccttcaagcctccaccacctcgcagccggggaggcaactggagcgaaaccagcgacaggtttaaatgtttatttgctacttggctactgattagagaacgcaaaatgaataactcaacaaactcctctaacaatagcctggctcttacaagtccttataagacatttgaagtggtgtttattgtcctggtggctggatccctcagtttggtgaccattatcgggaacatcctagtcatggtttccattaaagtcaaccgccacctccagaccgtcaacaattactttttattcagcttggcctgtgctgaccttatcataggtgttttctccatgaacttgtacaccctctacactgtgattggttactggcctttgggacctgtggtgtgtgacctttggctagccctggactatgtggtcagcaatgcctcagttatgaatctgctcatcatcagctttgacaggtacttctgtgtcacaaaacctctgacctacccagtcaagcggaccacaaaaatggcaggtatgatgattgcagctgcctgggtcctctctttcatcctctgggctccagccattctcttctggcagttcattgtaggggtgagaactgtggaggatggggagtgctacattcagtttttttccaatgctgctgtcacctttggtacggctattgcagccttctatttgccagtgatcatcatgactgtgctatattggcacatatcccgagccagcaagagcaggataaagaaggacaagaaggagcctgttgccaaccaagaccccgtttctccaagtctggtacaaggaaggatagtgaagccaaacaataacaacatgcccagcagtgacgatggcctggagcacaacaaaatccagaatggcaaagcccccagggatcctgtgactgaaaactgtgttcagggagaggagaaggagagctccaatgactccacctcagtcagtgctgttgcctctaatatgagagatgatgaaataacccaggatgaaaacacagtttccacttccctgggccattccaaagatgagaactctaagcaaacatgcatcagaattggcaccaagaccccaaaaagtgactcatgtaccccaactaataccaccgtggaggtagtggggtcttcaggtcagaatggagatgaaaagcagaatattgtagcccgcaagattgtgaagatgactaagcagcctgcaaaaaagaagcctcctccttcccgggaaaagaaagtcaccaggacaatcttggctattctgttggctttcatcatcacttgggccccatacaatgtcatggtgctcattaacaccttttgtgcaccttgcatccccaacactgtgtggacaattggttactggctttgttacatcaacagcactatcaaccctgcctgctatgcactttgcaatgccaccttcaagaagacctttaaacaccttctcatgtgtcattataagaacataggcgctacaaggtaaaatatctttgaaaaagatagaaggtgggcaaggggagcttgagaagaataaaagggataaacgagctcctagttttaaaatctctgccattgcactttatagtctgattacaaaacgtgcaattcaggagcccagcagtgacacacttatcacgcctaggctccagtttgcaaaaattgcaccttataaactgtcagtattaggagcaatgagacaatgaaagaaacatgttgggatcgtggatttaagaaactatacactgtttctcataatctcttgaagaagggcttctgattctacaattttatcagtctctgcacaagaggaataaccttgttccttttttgttacttttgttgttgttgttctcatgtgt

SEQ ID NO: 5765 - DNA, 8778 bp, Homo sapiens
  source 1..8778: mol_type = unassigned DNA
gggcaatggcgggcgcccctcccccagcctcgttgccgccttgcagtttgatctcagactgctgtgctagcaatcagcgagactccgtgggcgtaggaccctccgagccaggtgtgggatatagtctcgtggtgcgccgtttcttaagctggtctgaaaagcgcaatattcgggtgggagtgacccgattttccaggtgcttccgtcacccctttctttgactcggaaagggaactccctgaccccttgcgcttcccaggtgaggcaatgcctcgccctgcttcggctcgcgcacggtgcgcgcacacactggcctgcgcccactgtctagcactccctagtgagatgaacccggtacctcagatggaaatgcagaaatcacccgtcttctgcgtcgctcacgctgggagctgtagaccggagctgttcctattcggccatcttggctcctagtatttttaattaagcacttgtgttctgattagtggccaaataaatgacagtcagaacttcagctaaggtacaataaggttttgctgtggcgtggcacctggtctctttctagaaggaaagttcaacatacagcacaattctggacacattgtattggtttgatgctcctacctggaacaggtggagctggtctcttgggcagcctgacatctggtccactcctctgtcctatgccgggatcatcatgaccgtagagattatgtcactgttttgcatccttgttacataactcagttcctggtagattactatgtcagagagtcacaatgaccttgcacaataacagtacaacctcgcctttgtttccaaacatcagctcctcctggatacacagcccctccgatgcagggctgcccccgggaaccgtcactcatttcggcagctacaatgtttctcgagcagctggcaatttctcctctccagacggtaccaccgatgaccctctgggaggtcataccgtctggcaagtggtcttcatcgctttcttaacgggcatcctggccttggtgaccatcatcggcaacatcctggtaattgtgtcatttaaggtcaacaagcagctgaagacggtcaacaactacttcctcttaagcctggcctgtgccgatctgattatcggggtcatttcaatgaatctgtttacgacctacatcatcatgaatcgatgggccttagggaacttggcctgtgacctctggcttgccattgactacgtagccagcaatgcctctgttatgaatcttctggtcatcagctttgacagatacttttccatcacgaggccgctcacgtaccgagccaaacgaacaacaaagagagccggtgtgatgatcggtctggcttgggtcatctcctttgtcctttgggctcctgccatcttgttctggcaatactttgttggaaagagaactgtgcctccgggagagtgcttcattcagttcctcagtgagcccaccattacttttggcacagccatcgctgctttttatatgcctgtcaccattatgactattttatactggaggatctataaggaaactgaaaagcgtaccaaagagcttgctggcctgcaagcctctgggacagaggcagagacagaaaactttgtccaccccacgggcagttctcgaagctgcagcagttacgaacttcaacagcaaagcatgaaacgctccaacaggaggaagtatggccgctgccacttctggttcacaaccaagagctggaaacccagctccgagcagatggaccaagaccacagcagcagtgacagttggaacaacaatgatgctgctgcctccctggagaactccgcctcctccgacgaggaggacattggctccgagacgagagccatctactccatcgtgctcaagcttccgggtcacagcaccatcctcaactccaccaagttaccctcatcggacaacctgcaggtgcctgaggaggagctggggatggtggacttggagaggaaagccgacaagctgcaggcccagaagagcgtggacgatggaggcagttttccaaaaagcttctccaagcttcccatccagctagagtcagccgtggacacagctaagacttctgacgtcaactcctcagtgggtaagagcacggccactctacctctgtccttcaaggaagccactctggccaagaggtttgctctgaagaccagaagtcagatcactaagcggaaaaggatgtccctggtcaaggagaagaaagcggcccagaccctcagtgcgatcttgcttgccttcatcatcacttggaccccatacaacatcatggttctggtgaacaccttttgtgacagctgcatacccaaaaccttttggaatctgggctactggctgtgctacatcaacagcaccgtgaaccccgtgtgctatgctctgtgcaacaaaacattcagaaccactttcaagatgctgctgctgtgccagtgtgacaaaaaaaagaggcgcaagcagcagtaccagcagagacagtcggtcatttttcacaagcgcgcacccgagcaggccttgtagaatgaggttgtatcaatagcagtgacaaaacgcacacatcaacccacagaccttaggaggaggaaggcgagggcggggtgacttctggtgatgataaaaatggttttatcacccagatgtgaaagaagctgcctgtttactgatccattgaataaacccattttaatagaaaaagtcaataccaattcagcaaaaagaaaaaaaaaacatactactgaatataaagaaatttattctgaaatagactttacgtgtttttttcttaaagaggagaaaaatattgcttgacggcaattatatacccaaagtgatttgcctgggtcctttaattcccattagctttggaatctcagatgagcatagctgacccagttcccacattcttcccaaggatcccaaaagtgggaatccagaccccaagtggaacactgcaggcttacgaatctgtggttccaaaattatttcatacgttgcaaagctgaatcttcttgtcccaatagagcttcctgtcttttctttggtgtgttgttaaactctatttgtggacttgattcttgattcttgcaaagtactgttttgtgcagttcaagtttcgtacaaataaaaatacttaagtatatatatatgtgtgagttctgcacgcacacacatagtgtatataatatcatgggaaacactgaactggcaaattattcctgcaacatacgctttcagtactttggtaactgaagttctctaggatcctaatgcaacattaacgtgaaataagcccagtgtaatgtttttgaaaccagggctgttttccacagagagcagccaggccttcccagcaggtctgtgcagagcggacaggctcgtgagtcagctgagcgccgtggcttcgccagacttggtgttaagcaacctcctttgttgatgtctcaacagagctaaatcggggcccctctgagctcaaagaatgaaccacatccacacgtttgaatttaatcatctaaatctgaatgtttcagaacaaaatttctgctatctaaactgcttgaaactcaataatagtgtcacgtttgaatgtcatacacagcaatatatatatatgtgtatatatatatatatggcaaagcaaaaaaaaaaacatggtaagagagaatgaaggagaacattgtgtttgattcttgctgaatggcaccttctcaaagaaaatagggcttgcacctttgttaatcagctgtggccagtgctttctggtgttcattgtgtaaccttcacccaggaataggtgaggttttaggaagttacatgtcctctgaagaaagaattacactctgaaaagtaatgcttcaaattgatttccttaccttttgggaaaaaaaaaaaattgtttttttgcattctcccttgaattgaccaaaatgttaactgtttcatttggggaggggatggggtgctgccatcattgtcgttgttgttgctgctgtagctgttggggtttcttttcctgttgccggggctgtttggggagagggaggggagggaggtgggagggccgcggagatatcttccctttgtacagggcattcgtgttgtgaacccagagctgggtagaagctgcttttgtattcagtgtgaggtggtgtttacagacgactttgacaacagtagaagtgtactcagtggtgtctgtgtatctgaactatttaatttcgtgttatgtttatatgcagaaatatttatggatactacaccaagtgtttatttaatgttgataaatatgactcttcagtcgtcagccatggtgtcctttcaaagtgattctttaaggtccacttgagcaatgaatagagtatattggagctttcctgtggctaagaagaagaaacatgtcatcctgttggcatcaccaagcacctaactctttctaggtaataaaaagtcaacggtcacttcaacgtaaatgtttaaaaccactctttagttaaatctgatgggaactgaacaaagctccaccattgtgtctgaaatcattttacacagggaaaaaaaaaaacaatcagcataattgtaagaatgatttttttgggcccacattcaaccaaagaacaagaaagaaacagacgattttctaatatgtacacagcaaactacagaatgtcatattatccacctgtgaaacatctagtaagcaattgcatctatattttatttctcaagttggcctggcactaataaatatgtgaaagcttattcaagtgtcccagtacttcagcacttcccatccttttggaaactcctatcttgcctccctcccaaaagggctgtttcttttattaaaaaaaaaaaagaaatagaattaaatttgagaaaaggagaaaccctgaaatttaacagaactttgagagtcacttccaatctccttaaacatgattatctccttatccttgtccttttgtgatgctaataatagcagaaaaggaacaaatccaagactctaggtctcccttttttgttttactggttttattatagaattgtttttaagcctcttatggatgaaagctgcatttaaatactatctactgattttatagaaaggtatgtccatttcttgggtcactttcagagaaagaaaacaagcaaaataggttcttttgaatatgaataatttaaaagcataattgaagatgtagtgagtatttataattggaccttagttacacgtgcatttctcaaagggcttgtcattacaggagatattcagcacttacctaagatcaaaatgtcttcatcccaaattgggaatcgaattatttcatgccatatgcatgaggtttgcagacatttcaagattagccactttgcttgaaagaagaaaatgatcaaacctaaaataaactacacatggagaatctctctctctctctctgcctctctctctctctttctccctcttcttccttctctctctctcacaagcacacacacacacactcaatctccattctccaggcattgccagatggttaggagaagtgagctctctctggtcccctagatccctcggctctgctctcctttgcccatcagctccctgtggcctctatgctagtcctccctattctcctagtcaccctttgcctcttaagcccagccttgactctctacatatttttcatttctctttaccctttagtgtacaatagttgtagactctgacggaatgaaaacaaacaagaagcctaagcgttagaccctgctgtggctaaagatctagaaggcatatcagttttctctgtcaggcttcctacgttgccctcgtgcagggctcattgctctgcagagcgctggaagccccttcatgtatcgagagagaagctggagcacagagctctgatgcacagttggctgtttcagctctgactcagggaggaaagaaggatgccaaggctctgtcacagcggagaagtctaataccagagtggcacagagaaggattccagggatcagtcagggtgtcctgtacctatctgagtagagatgattcaaggatggggacatattccaggaaattgcacaatcttcccctggcagcttcagaggacgagtgaaaatagtgcagtatagtcaaagaagcaatgaatttaggatgaggaacctgaagtttctggaccagtttggtcactgcttagttacatgtccttaggaatgcttgtcacttaacctaaactttctgggttttatcctcattgctcaaactaagcaacaacaccgaagcttctctaatttgccttctgatgccaaatcggtcaaaactgaggtcagcagctaccatgacgaaagtaaaatggtatattgggtgaatgtttgaaaatttcagattttatattctgtaaagttatttacttactctatttcaacaccacaaaatcttgaaatttggaaggtaaccaaggaagctttgaaatttgttggcaaacccggagtagtatggtttcaaataccactccaacccagcacctgaggtcgggcaaactcacaaaatagagtttctaggtagcaggtgtttgctttggttttgcaatagcatttctcataacagaactgaaactgtatagattacaacactccaaagttatttttttttaacctaaagaaccctacttctagcacctcctctgaaagaatattttgctccaataccacgtgcaacaaacttatttagacagtatcaactctagcccttaataggttcaaggacaagtttactgcttcctttctacacgcttaagttacactctcttctcctgttctgatgactctaaatcttcagcctctcccagcattaatgtgtgagtcaacattgcagacctgagaaaggtttctagaatggtaacccaatgttctttagaactggagaattccattttccttttctggctttagtgttaatgtctgggaagggaggctcatgataagaaaataaaaatgagaaaagaagatctagttcataaaatgactataccccacgtaagtttgtaactgcacagtgttttgttgtacggctcagaaatgagcaagtgttagtattattaggcacacatcacgttcacagcttcgcgcagagacggatagtgtatttggatatatggaagtcatccaaatgcgttgctagaatatcaggcctatgtttgttctggtagaaccacagagactcacacaaagttctgaccctaccactctggtctgggctgagaccaccccaaaaaatcatctagagaatcaaaggggctcacatctcagttgcattctatttaaaagataaaggggccatactctccactgcaaagaagcattagtaaaacttcccgcacccaaattataatccggcaaccctagcttcagctaaaaagattatccccagaatctaaaagcttactattgttctttcttggagtccaaaatgcttagcagttctgcagttcacatacaaaactcaaaactctttttatcctgtattctgtgagttccttgatgatagtaattgggtcttattcatcactctgtatcctgtggctcacacagaatctggcaaattgcatatattcaataaatgttgaatatctaataacctccttattaatataacaaatattatcaacattctgtgcacatcaatgtcccatgctgctactgtagtcaggagttatttggctgggaagtggaaagtgttcacaaacatgatgcttatctaataaaatatcactgagcaataaggagaaatattttaaatagatttgaagttgtgaacaaataatttagagtccaaagaggaaaaagaaaattaactctgttttttatccctagaactcagaaactttactggattggtcaacaaagacaaactttttattgtataaaacagtagaattcatggaagggataattcttttggaacaggcttctcggttacttgccttagtaaaagaagtatctggagggcctggagagttcataaacatagttttctgtgcaagtgaagatctgtagtttggcttaaaaatccttgcatgtagttttgcttggcgtggaaagttattaggagacaatcctttatcctgttctgcaagcaatcaaacacatgatctcccttctagccattcctcatccagtacatgggcatttccagcctcctacatgtaacacttcaaacttcctctgggcgtctgcttagagctatgtgatggccacagtttgggcaaagcccttctttcttttaaatataggaactgttaccaagtttggtgcaggcttgaggaataattacataaaaatgggcttccacgatggtgaatcagcatgctgatttctcttggcaggaagctctcagggaaatgtctgtgaatcatttaaagatgctctctggtggatagagaaaccgcagtccaaaaacagatgggtgtatatttgctttgtaagcaaagggcatgtatcatactcgcatctaaaacagtgtccacatctttgccaaaggcactgaattttacctttttttattacctcgtggccagcacttcctcagtaggcatttcaggtgtgtcacaaaccatgttcatttttaatcttgaaaaagtcaatcgtctgtagtctgtactataaaatgatgcctgcaactttgtggtgaatattatccccaagttaacagtgaaataagtaaataaaactattattgaacaaa

SEQ ID NO: 5766 - DNA, 587 bp, Homo sapiens
  source 1..587: mol_type = unassigned DNA
ttttagtacggtattgttgcagctgacctgtatacgtaaggaattactgggtcatcagctctggggaatgtcttttgattatgaacacattttcagcatgtgtccactgaaggtggagctggtctcttgggcagcctgacatctggtccactcctctgtcctatgccgggatcatcatgaccgtagagattatgtcactgttttgcatccttgttacataactcagttcctggtagattactatgtcagagagtcacaatgaccttgcacaataacagtacaacctcgcctttgtttccaaacatcagctcctcctggatacacagcccctccgatgcagggctgcccccgggaaccgtcactcatttcggcagctacaatgtttctcgagcagctggcaatttctcctctccagacggtaccaccgatgaccctctgggaggtcataccgtctggcaagtggtcttcatcgctttcttaacgggcatcctggccttggtgaccatcatcggcaacatcctggtaattgtgtcatttaaggtcaacaagcagctgaagacggtcaacaactacttcctcttaagcct

SEQ ID NO: 5767 - DNA, 1468 bp, Homo sapiens
  source 1..1468: mol_type = unassigned DNA
atggccaacttcacacctgtcaatggcagctcgggcaatcagtccgtgcgcctggtcacgtcatcatcccacaatcgctatgagacggtggaaatggtcttcattgccacagtgacaggctccctgagcctggtgactgtcgtgggcaacatcctggtgatgctgtccatcaaggtcaacaggcagctgcagacagtcaacaactacttcctcttcagcctggcgtgtgctgatctcatcataggcgccttctccatgaacctctacaccgtgtacatcatcaagggctactggcccctgggcgccgtggtctgcgacctgtggctggccctggactacgtggtgagcaacgcctccgtcatgaaccttctcatcatcagctttgaccgctacttctgcgtcaccaagcctctcacctaccctgcccggcgcaccaccaagatggcaggcctcatgattgctgctgcctgggtactgtccttcgtgctctgggcgcctgccatcttgttctggcagtttgtggtgggtaagcggacggtgcccgacaaccagtgcttcatccagttcctgtccaacccagcagtgacctttggcacagccattgctgccttctacctgcctgtggtcatcatgacggtgctgtacatccacatctccctggccagtcgcagccgagtccacaagcaccggcccgagggcccgaaggagaagaaagccaagacgctggccttcctcaagagcccactaatgaagcagagcgtcaagaagcccccgcccggggaggccgcccgggaggagctgcgcaatggcaagctggaggaggcccccccgccagcgctgccaccgccaccgcgccccgtggctgataaggacacttccaatgagtccagctcaggcagtgccacccagaacaccaaggaacgcccagccacagagctgtccaccacagaggccaccacgcccgccatgcccgcccctcccctgcagccgcgggccctcaacccagcctccagatggtccaagatccagattgtgacgaagcagacaggcaatgagtgtgtgacagccattgagattgtgcctgccacgccggctggcatgcgccctgcggccaacgtggcccgcaagttcgccagcatcgctcgcaaccaggtgcgcaagaagcggcagatggcggcccgggagcgcaaagtgacacgaacgatctttgccattctgctagccttcatcctcacctggacgccctacaacgtcatggtcctggtgaacaccttctgccagagctgcatccctgacacggtgtggtccattggctactggctctgctacgtcaacagcaccatcaaccctgcctgctatgctctgtgcaacgccacctttaaaaagaccttccggcacctgctgctgtgccagtatcggaacatcggcactgccaggtaggcaggcaggagtgccctaggaggtgctg

SEQ ID NO: 5768 - DNA, 3043 bp, Homo sapiens
  source 1..3043: mol_type = unassigned DNA
atcagatcaactgctgttaccagataaaggcaaaactcacccttctggttctataatcctatccaaatggagtcttcatctaccgcatactatcctaactaatgctacaggattatcaggaatacagatataaagacactgcaagaaataaaacactggcaaaataaaacatgaaaggaaagtagagaaggcattttgggtctcgaagcttactatttccagccagagttcaaattactgagcttcaaacaaaccactgccaggaacctaggaaatcattctcagccttgcaacttaaaatatggtacatggatcagtagcatcaagaatactcaggagcttttcagaaatgtgcaattgtgaaatatggccaagatggcggattagaagcagcggcagcccgcagctctcatgcaaaggaatgaaaggtgtgagtgaatacagcgccttcaactgaaatatccaggttctcgctttgggactaattgggcaaacaacttgacccacagaaaacaaagaaaagcagggtggggtgacggcccacctgggagcagcacagagccaaaggaacccccacctccagccaagggaagcgatgctggccaagaagagctgaaatagaaaacagcctagaacctaacactatttactgtaaaatttttgcaccaggatggaaggggattcttaccacaatgcaaccaccgtcaatggcaccccagtaaatcaccagcctttggaacgccacaggttgtgggaagtcatcaccattgcagctgtgactgctgtggtaagcctgatcaccattgtgggcaatgtcttggtcatgatctccttcaaagtcaacagccagctcaagacagttaacaactattacctgctcagcttagcctgtgcagatctcatcattggaatcttctccatgaacctctacaccacctacatcctcatgggacgctgggctctcgggagtctggcttgtgacctttggcttgcactggactacgtggccagcaacgcttctgtcatgaaccttctggtgatcagttttgaccgttacttttccatcacaagacccttgacatatcgggccaagcgtactccgaaaagggctggcatcatgattggcttggcctggctgatctccttcatcctctgggccccagcaatcctctgctggcagtacttggttgggaagcggacagttccactggatgagtgccagatccagtttctctctgagcccaccatcacttttggcactgccattgctgccttctacatccctgtttctgtcatgaccatcctctactgtcgaatctaccgggaaacagagaagcgaaccaaggacctggctgacctccagggttctgactctgtgaccaaagctgagaagagaaagccagctcatagggctctgttcagatcctgcttgcgctgtcctcgacccaccctggcccagcgggaaaggaaccaggcctcctggtcatcctcccgcaggagcacctccaccactgggaagccatcccaagccactggcccaagcgccaattgggccaaagctgagcagctcaccacctgtagcagctacccttcctcagaggatgaggacaagcccgccactgaccctgtcctccaagtggtctacaagagtcagggtaaggaaagcccaggggaagaattcagtgctgaagagactgaggaaacttttgtgaaagctgaaactgaaaaaagtgactatgacaccccaaactaccttctgtctccagcagctgctcatagacccaagagtcagaaatgtgtggcctataagttccgattggtggtaaaagctgacgggaaccaggagaccaacaatggctgtcacaaggtgaaaatcatgccctgccccttcccagtggccaaggaaccttcaacgaaaggcctcaatcccaaccccagccatcaaatgaccaaacgaaagagagtggtcctagtcaaagagaggaaagcagcccagacactgagtgccattctcctggccttcatcatcacatggaccccgtataacatcatggtcctggtttctaccttctgtgacaagtgtgtcccagtcaccctgtggcacttgggctattggttgtgctatgtcaatagcactgtcaaccccatctgctatgccctctgcaacagaaccttcaggaagacctttaagatgctgcttctctgccgatggaaaaagaaaaaagtggaagagaagttgtactggcaggggaacagcaagctaccctgaaaagtcaacaactcctctcgaaagaacaatgaccacagtcaacatcctctgaggatgagcaagctgattctggtttgtatattttcaaaaagaagacatctcattttgagtccttgaagatttttgtaaaggctcaagtttggttgccaaatggaaggggccatagctgcagcaattgctgacatattaaatgactcttgcctatgaccaaggccatttgatgccaggggagtttgccaatgaagtaaagggataggctcatggcccttcacaagaggaagcacactgggtaacaatgaacagtgactcagggaacttatgccccttctgtaggaaacagcagagaccaggtggaaaccttttcctgtggaaacctgtcatagaattttgtgcaatatgtatgtgtctatgaagctgtcttgtgccagtgagaaccagcaggagaatgtacaacagtgtcacttgttaacgagactgatattcaacaggcttctaagaatatgtatcttcataaactgatcactatctattatgcagctattatgtggtctatactatactgtggtttgttttcctgtccccacatctgagtgaaggtcttgctcttccctttcatatccaatgtcaattccttgtactcactgaacccatgctgatctccagggaaccatccttcctctcagaatccagagtctggaaggactgaaacctggtcatacccagtcctttcaaggggcctcttttctactaataaagatggatcaagtctccaca

SEQ ID NO: 5769 - DNA, 2687 bp, Homo sapiens
  source 1..2687: mol_type = unassigned DNA
agtggtacaagatgtggaggtggaagacagtgatattgtgtccggaatttattccttcttgtgggttctcggtctcactaacttcaagaatgaagccgcagaccgtcgcggtgtgttacagttcttaaagatggtgtgtccagagtttgttccttcagatgttcagatgtgtcgagtttcttccttccggtgggttcgtggtctccctgacttcagaagtgaagccacataccttcgcaatgctggccaagaagagctgaaatagaaaacagcctagaacctaacactatttactgtaaaatttttgcaccaggatggaaggggattcttaccacaatgcaaccaccgtcaatggcaccccagtaaatcaccagcctttggaacgccacaggttgtgggaagtcatcaccattgcagctgtgactgctgtggtaagcctgatcaccattgtgggcaatgtcttggtcatgatctccttcaaagtcaacagccagctcaagacagttaacaactattacctgctcagcttagcctgtgcagatctcatcattggaatcttctccatgaacctctacaccacctacatcctcatgggacgctgggctctcgggagtctggcttgtgacctttggcttgcactggactacgtggccagcaacgcttctgtcatgaaccttctggtgatcagttttgaccgttacttttccatcacaagacccttgacatatcgggccaagcgtactccgaaaagggctggcatcatgattggcttggcctggctgatctccttcatcctctgggccccagcaatcctctgctggcagtacttggttgggaagcggacagttccactggatgagtgccagatccagtttctctctgagcccaccatcacttttggcactgccattgctgccttctacatccctgtttctgtcatgaccatcctctactgtcgaatctaccgggaaacagagaagcgaaccaaggacctggctgacctccagggttctgactctgtgaccaaagctgagaagagaaagccagctcatagggctctgttcagatcctgcttgcgctgtcctcgacccaccctggcccagcgggaaaggaaccaggcctcctggtcatcctcccgcaggagcacctccaccactgggaagccatcccaagccactggcccaagcgccaattgggccaaagctgagcagctcaccacctgtagcagctacccttcctcagaggatgaggacaagcccgccactgaccctgtcctccaagtggtctacaagagtcagggtaaggaaagcccaggggaagaattcagtgctgaagagactgaggaaacttttgtgaaagctgaaactgaaaaaagtgactatgacaccccaaactaccttctgtctccagcagctgctcatagacccaagagtcagaaatgtgtggcctataagttccgattggtggtaaaagctgacgggaaccaggagaccaacaatggctgtcacaaggtgaaaatcatgccctgccccttcccagtggccaaggaaccttcaacgaaaggcctcaatcccaaccccagccatcaaatgaccaaacgaaagagagtggtcctagtcaaagagaggaaagcagcccagacactgagtgccattctcctggccttcatcatcacatggaccccgtataacatcatggtcctggtttctaccttctgtgacaagtgtgtcccagtcaccctgtggcacttgggctattggttgtgctatgtcaatagcactgtcaaccccatctgctatgccctctgcaacagaaccttcaggaagacctttaagatgctgcttctctgccgatggaaaaagaaaaaagtggaagagaagttgtactggcaggggaacagcaagctaccctgaaaagtcaacaactcctctcgaaagaacaatgaccacagtcaacatcctctgaggatgagcaagctgattctggtttgtatattttcaaaaagaagacatctcattttgagtccttgaagatttttgtaaaggctcaagtttggttgccaaatggaaggggccatagctgcagcaattgctgacatattaaatgactcttgcctatgaccaaggccatttgatgccaggggagtttgccaatgaagtaaagggataggctcatggcccttcacaagaggaagcacactgggtaacaatgaacagtgactcagggaacttatgccccttctgtaggaaacagcagagaccaggtggaaaccttttcctgtggaaacctgtcatagaattttgtgcaatatgtatgtgtctatgaagctgtcttgtgccagtgagaaccagcaggagaatgtacaacagtgtcacttgttaacgagactgatattcaacaggcttctaagaatatgtatcttcataaactgatcactatctattatgcagctattatgtggtctatactatactgtggtttgttttcctgtccccacatctgagtgaaggtcttgctcttccctttcatatccaatgtcaattccttgtactcactgaacccatgctgatctccagggaaccatccttcctctcagaatccagagtctggaaggactgaaacctggtcatacccagtcctttcaaggggcctcttttctactaataaagatggatcaagtctccaca

SEQ ID NO: 5770 - DNA, 572 bp, Homo sapiens
  source 1..572: mol_type = unassigned DNA
cagataatgttttttaaagcagcttgatttggaagcgtgtgtaattctgaaatacgaacaagcagaacttttccagggggtcaaatgcatataggaacaaccaggatttctcattgctgaagcattcaatgaatctttaataagttctcaacactcagattgtttgtgatcagatcaactgctgttaccagataaaggcaaaactcacccttctggttctataatcctatccaaatggagtcttcatctaccgcatactatcctaactaatgctacaggattatcaggaatacagatataaagacactgcaagaaataaaacactggcaaaataaaacatgaaaggaaagtagagaaggcattttgggtctcgaagcttactatttccagccagagttcaaattactgagcttcaaacaaaccactgccagatgctggccaagaagagctgaaatagaaaacagcctagaacctaacactatttactgtaaaatttttgcaccaggatggaaggggattcttaccacaatgcaaccaccgtcaatggcaccccagtaaatcaccagcctttg

SEQ ID NO: 5771 - DNA, 1980 bp, Homo sapiens
  source 1..1980: mol_type = unassigned DNA
cagccagagtgccagtgagaagcacaggccaccactctgccctggtccacacaagctccggtagcccatggagccctggcctctcctcctgctctttagcctttgctcagctggcctcgtcctgggctccgaacatgagacccgtctggtggcaaagctatttaaagactacagcagcgtggtgcggccagtggaagaccaccgccaggtcgtggaggtcaccgtgggcctgcagctgatacagctcatcaatgtggatgaagtaaatcagatcgtgacaaccaatgtgcgtctgaaacagggtgacatggtagatctgccacgccccagctgcgtgactttgggagttcctttgttttctcatctgcagaatgagcaatgggtggattacaacctaaaatggaatccagatgactatggcggtgtgaaaaaaattcacattccttcagaaaagatctggcgcccagaccttgttctctataacaatgcagatggtgactttgctattgtcaagttcaccaaagtgctcctgcagtacactggccacatcacgtggacacctccagccatctttaaaagctactgtgagatcatcgtcacccactttccctttgatgaacagaactgcagcatgaagctgggcacctggacctacgacggctctgtcgtggccatcaacccggaaagcgaccagccagacctgagcaacttcatggagagcggggagtgggtgatcaaggagtcccggggctggaagcactccgtgacctattcctgctgccccgacaccccctacctggacatcacctaccacttcgtcatgcagcgcctgcccctctacttcatcgtcaacgtcatcatcccctgcctgctcttctccttcttaactggcctggtattctacctgcccacagactcaggggagaagatgactctgagcatctctgtcttactgtctttgactgtgttccttctggtcatcgtggagctgatcccctccacgtccagtgctgtgcccttgattggaaaatacatgctgttcaccatggtgttcgtcattgcctccatcatcatcactgtcatcgtcatcaacacacaccaccgctcacccagcacccatgtcatgcccaactgggtgcggaaggtttttatcgacactatcccaaatatcatgtttttctccacaatgaaaagaccatccagagaaaagcaagacaaaaagatttttacagaagacattgatatctctgacatttctggaaagccagggcctccacccatgggcttccactctcccctgatcaaacaccccgaggtgaaaagtgccatcgagggcatcaagtacatcgcagagaccatgaagtcagaccaggagtctaacaatgcggcggcagagtggaagtacgttgcaatggtgatggaccacatactcctcggagtcttcatgcttgtttgcatcatcggaaccctagccgtgtttgcaggtcgactcattgaattaaatcagcaaggatgagcagaaaatgagctgagcttagctctgccctggaacctaccagagcagagaagggcaggagaggaagatttgtctacttgctccactcgcacttatcaaacgtgttatattccatacttattattgatgataagatttacctttatgtaagtttatggccttgaagtgttttcatattgcttctccctttagttctgctgtctccctgaagagtgaaccctctttagtaaatgaaactaatcactaaaaaaagtgttcatttccagtgtctggaagagtttttgccaggataaccgaggttttctgttgcattgtcattgctgttatatttatatatttacttattttgtctaaccacgagaccactagggagttgctgatgttctaaatgaagtgtattctttgcttaagagtcagttttgtacctactaagaaaaccccatctaccagtcctaaagagataa

SEQ ID NO: 5772 - DNA, 1984 bp, Homo sapiens
  source 1..1984: mol_type = unassigned DNA
agacaagcacccagccagagtgccagtgagaagcacaggccaccactctgccctggtccacacaagctccggtagcccatggagccctggcctctcctcctgctctttagcctttgctcagctggcctcgtcctgggctccgaacatgagacccgtctggtggcaaagctatttaaagactacagcagcgtggtgcggccagtggaagaccaccgccaggtcgtggaggtcaccgtgggcctgcagctgatacagctcatcaatgtggatgaagtaaatcagatcgtgacaaccaatgtgcgtctgaaacagcaatgggtggattacaacctaaaatggaatccagatgactatggcggtgtgaaaaaaattcacattccttcagaaaagatctggcgcccagaccttgttctctataacaatgcagatggtgactttgctattgtcaagttcaccaaagtgctcctgcagtacactggccacatcacgtggacacctccagccatctttaaaagctactgtgagatcatcgtcacccactttccctttgatgaacagaactgcagcatgaagctgggcacctggacctacgacggctctgtcgtggccatcaacccggaaagcgaccagccagacctgagcaacttcatggagagcggggagtgggtgatcaaggagtcccggggctggaagcactccgtgacctattcctgctgccccgacaccccctacctggacatcacctaccacttcgtcatgcagcgcctgcccctctacttcatcgtcaacgtcatcatcccctgcctgctcttctccttcttaactggcctggtattctacctgcccacagactcaggggagaagatgactctgagcatctctgtcttactgtctttgactgtgttccttctggtcatcgtggagctgatcccctccacgtccagtgctgtgcccttgattggaaaatacatgctgttcaccatggtgttcgtcattgcctccatcatcatcactgtcatcgtcatcaacacacaccaccgctcacccagcacccatgtcatgcccaactgggtgcggaaggtttttatcgacactatcccaaatatcatgtttttctccacaatgaaaagaccatccagagaaaagcaagacaaaaagatttttacagaagacattgatatctctgacatttctggaaagccagggcctccacccatgggcttccactctcccctgatcaaacaccccgaggtgaaaagtgccatcgagggcatcaagtacatcgcagagaccatgaagtcagaccaggagtctaacaatgcggcggcagagtggaagtacgttgcaatggtgatggaccacatactcctcggagtcttcatgcttgtttgcatcatcggaaccctagccgtgtttgcaggtcgactcattgaattaaatcagcaaggatgagcagaaaatgagctgagcttagctctgccctggaacctaccagagcagagaagggcaggagaggaagatttgtctacttgctccactcgcacttatcaaacgtgttatattccatacttattattgatgataagatttacctttatgtaagtttatggccttgaagtgttttcatattgcttctccctttagttctgctgtctccctgaagagtgaaccctctttagtaaatgaaactaatcactaaaaaaagtgttcatttccagtgtctggaagagtttttgccaggataaccgaggttttctgttgcattgtcattgctgttatatttatatatttacttattttgtctaaccacgagaccactagggagttgctgatgttctaaatgaagtgtattctttgcttaagagtcagttttgtacctactaagaaaaccccatctaccagtcctaaagagataaggcatttgatttggagagagaggaagcagtagaaatgaaataaactaaaatgcaaactgcatcaaaaa

SEQ ID NO: 5773 - DNA, 1945 bp, Homo sapiens
  source 1..1945: mol_type = unassigned DNA
taattttgccctaggtctggccaggaggcctcacatccagagacctgcccccgctcttgcagtgccagggccatggggctccggagccaccacctcagcctgggccttctgcttctgtttctactccctgcagagtgcctgggagctgagggccggctggctctcaagctgttccgtgacctctttgccaactacacaagtgccctgagacctgtggcagacacagaccagactctgaatgtgaccctggaggtgacactgtcccagatcatcgacatggatgaacggaaccaggtgctgaccctgtatctgtggatacggcaggagtggacagatgcctacctacgatgggaccccaatgcctatggtggcctggatgccatccgcatccccagcagtcttgtgtggcggccagacatcgtactctataacaaagccgacgcgcagcctccaggttccgccagcaccaacgtggtcctgcgccacgatggcgccgtgcgctgggacgcgccggccatcacgcgcagctcgtgccgcgtggatgtagcagccttcccgttcgacgcccagcactgcggcctgacgttcggctcctggactcacggcgggcaccaactggatgtgcggccgcgcggcgctgcagccagcctggcggacttcgtggagaacgtggagtggcgcgtgctgggcatgccggcgcggcggcgcgtgctcacctacggctgctgctccgagccctaccccgacgtcaccttcacgctgctgctgcgccgccgcgccgccgcctacgtgtgcaacctgctgctgccctgcgtgctcatctcgctgcttgcgccgctcgccttccacctgcctgccgactcaggcgagaaggtgtcgctgggcgtcaccgtgctgctggcgctcaccgtcttccagttgctgctggccgagagcatgccaccggccgagagcgtgccgctcatcgggaagtactacatggccactatgaccatggtcacattctcaacagcactcaccatccttatcatgaacctgcattactgtggtcccagtgtccgcccagtgccagcctgggctagggccctcctgctgggacacctggcacggggcctgtgcgtgcgggaaagaggggagccctgtgggcagtccaggccacctgagttatctcctagcccccagtcgcctgaaggaggggctggccccccagcgggcccttgccacgagccacgatgtctgtgccgccaggaagccctactgcaccacgtagccaccattgccaataccttccgcagccaccgagctgcccagcgctgccatgaggactggaagcgcctggcccgtgtgatggaccgcttcttcctggccatcttcttctccatggccctggtcatgagcctcctggtgctggtgcaggccctgtgagggctgggactaagtcacagggatctgctgcagccacagctcctccagaaagggacagccacggccaagtggttgctggtctttgggccagccagtctctccccactgctcctaagatcctgagacacttgacttcacaatccacaagggagcactcattgtctacacaccctaactaaaggaagtccagagcctgccactcccctaattccaaaaaaaagaggaactctacaaaggccaagatcacagagtacagtcttggagggacagaattgtttgtgctgggtattggagctctcagtggggagcacatgggttataatgagaaactgaactgtactgctgcatttcctgtcttccttcctaggtggctgctttgcagggctttggctgttacctttccctgctgaggggctcagggaaaagggtcggggattctcagtcgagtttccagagcaggaggccctacagacatttggccccaaatccctgactcaataaagtaagcgtgtacctagca

SEQ ID NO: 5774 - DNA, 4066 bp, Homo sapiens
  source 1..4066: mol_type = unassigned DNA
agagaggctgtgtgtgtgtgtgtgtgtgtgtatgtgtgtgtgtgtgtgagagagagagagaacagcgtgagcctgtgtgcttgtgtgctgagccctcatcccctcctggggccaggcttgggtttcacctgcagaatcgcttgtgctgggctgcctgggctgtcctcagtggcacctgcatgaagccgttctggctgccagagctggacagccccaggaaaacccacctctctgcagagcttgcccagctgtccccgggaagccaaatgcctctcatgtaagtcttctgctcgacggggtgtctcctaaaccctcactcttcagcctctgtttgaccatgaaatgaagtgactgagctctattctgtacctgccactctatttctggggtgacttttgtcagctgcccagaatctccaagccaggctggttctctgcatcctttcaatgacctgttttcttctgtaaccacaggttcggtggtgagaggaagcctcgcagaatccagcagaatcctcacagaatccagcagcagctctgctggggacatggtccatggtgcaacccacagcaaagccctgacctgacctcctgatgctcaggagaagccatgggcccctcctgtcctgtgttcctgtccttcacaaagctcagcctgtggtggctccttctgaccccagcaggtggagaggaagctaagcgcccacctcccagggctcctggagacccactctcctctcccagtcccacggcattgccgcagggaggctcgcataccgagactgaggaccggctcttcaaacacctcttccggggctacaaccgctgggcgcgcccggtgcccaacacttcagacgtggtgattgtgcgctttggactgtccatcgctcagctcatcgatgtggatgagaagaaccaaatgatgaccaccaacgtctggctaaaacaggagtggagcgactacaaactgcgctggaaccccactgattttggcaacatcacatctctcagggtcccttctgagatgatctggatccccgacattgttctctacaacaatgcagatggggagtttgcagtgacccacatgaccaaggcccacctcttctccacgggcactgtgcactgggtgcccccggccatctacaagagctcctgcagcatcgacgtcaccttcttccccttcgaccagcagaactgcaagatgaagtttggctcctggacttatgacaaggccaagatcgacctggagcagatggagcagactgtggacctgaaggactactgggagagcggcgagtgggccatcgtcaatgccacgggcacctacaacagcaagaagtacgactgctgcgccgagatctaccccgacgtcacctacgccttcgtcatccggcggctgccgctcttctacaccatcaacctcatcatcccctgcctgctcatctcctgcctcactgtgctggtcttctacctgccctccgactgcggcgagaagatcacgctgtgcatttcggtgctgctgtcactcaccgtcttcctgctgctcatcactgagatcatcccgtccacctcgctggtcatcccgctcatcggcgagtacctgctgttcaccatgatcttcgtcaccctgtccatcgtcatcaccgtcttcgtgctcaatgtgcaccaccgctcccccagcacccacaccatgccccactgggtgcggggggcccttctgggctgtgtgccccggtggcttctgatgaaccggcccccaccacccgtggagctctgccaccccctacgcctgaagctcagcccctcttatcactggctggagagcaacgtggatgccgaggagagggaggtggtggtggaggaggaggacagatgggcatgtgcaggtcatgtggccccctctgtgggcaccctctgcagccacggccacctgcactctggggcctcaggtcccaaggctgaggctctgctgcaggagggtgagctgctgctatcaccccacatgcagaaggcactggaaggtgtgcactacattgccgaccacctgcggtctgaggatgctgactcttcggtgaaggaggactggaagtatgttgccatggtcatcgacaggatcttcctctggctgtttatcatcgtctgcttcctggggaccatcggcctctttctgcctccgttcctagctggaatgatctgactgcacctccctcgagctggctcccagggcacccccgctgaccatcttttgaccgtctctgctacagctgcctctggtgtcccctttgggatgagcaggtgcctctccgcggagtctggacactgacccagggattgcaggcttccatccagcttaacgttattgtaccagggctgacagcctgctgggtgcaaagccctgttttggatacggaggagctggggaagctctgcagaaggtcgcaatagtgtggtgaccaagtggggcagagtaagattctcctggaggagcagtgcagaccctaagtgacagaagggtcaaccagggggacagtggggccagggtgacgaggaagggaatgcagacctcaaaggaggggccgtgggggcaaaggggagggttcttggatgtggaagggctttgaacaatgtttagatttggagatgagcccaaagtgccagggagaacagccaggtgaggtgggaggttggagagccaggtgaggtctctgtaagtcaggctggggttgaagtttggagtctgtccgagtttgcagggtgctgagctgtatggtccagcaggggagtaataagggctcttctggaaggggaggaagcgggaggcagggcctgcacctgatgtggaggtacagggcagatcttccctaccggggagggatggatggttggatacaggtggctgggctattccatccatctggaagcacatttgagcctccaggcttctccttgacgtcattcctctccttccttgctgcaaaatggctctgcaccagccggcccccaggaggtctggcagagctgagagccatggcctgcaggggctccatatgtccctacgcgtgcagcaggcaaacaagaaagaccatcctgagctgctcctgacccacctcaaactcatctcatttggcctgtcctccctcccttcacccctccttccctccccaggaaccctgttccctgtgcctggctccatcaggaggaggcctcacttgggagttgaagatctttgcctttagttcctttgattctgaacttctcaaaggcaggtactctgcctgttatttttcccacccccagcacctagcacagcgccgggtgagtggggtcagcacttagggcgtttgttctgagtggttgaggggagcaagctggattgtttgggccccaggactgttgtgtagatggcaaagctgtggtcccgtcccttatcagcctgcctcgtctctcccagagccccgaggtgtgttgacctgctctgaacccttcagagcagcctgtgtgtgcaccttggaatgcaatgcaccaccccacagtctgaggctgcacccaggatcccaggccgagctgctgctcctgggatcgggcaacagacctccccccaactctgtccagactggagggtgggacattggcagctaacagatgtgggcatcgggttctcgggacagcatggaggctccaggcaggaagccgagcagggcgagcttccagtttccttttggtcctaggggtcccctccttccaaaccccaaaatgtctctccctgacactctcaggggaaaccagcctggctgtgacgccctggcccaggccctgccatgcctcacttctctcccacaacccccctgctcatggcacatctggtctctggctcctgtctactcgtgtgcatgcagcccccagcgccccctctcctcccacttgctctccggaggcctcagagctctcgggtccaggctcccagacccactctcctgagacagtgatgttcacttctgttatccatgtctcccatccatcttgcatgtgaataaagagattaaataaagctgcacctactgctg

SEQ ID NO: 5775 - DNA, 2245 bp, Homo sapiens
  source 1..2245: mol_type = unassigned DNA
tttcttgggcttgctcaggttcggtggtgagaggaagcctcgcagaatccagcagaatcctcacagaatccagcagcagctctgctggggacatggtccatggtgcaacccacagcaaagccctgacctgacctcctgatgctcaggagaagccatgggcccctcctgtcctgtgttcctgtccttcacaaagctcagcctgtggtggctccttctgaccccagcaggtggagaggaagctaagcgcccacctcccagggctcctggagacccactctcctctcccagtcccacggcattgccgcagggaggctcgcataccgagactgaggaccggctcttcaaacacctcttccggggctacaaccgctgggcgcgcccggtgcccaacacttcagacgtggtgattgtgcgctttggactgtccatcgctcagctcatcgatgtggatgagaagaaccaaatgatgaccaccaacgtctggctaaaacaggagtggagcgactacaaactgcgctggaaccccactgattttggcaacatcacatctctcagggtcccttctgagatgatctggatccccgacattgttctctacaacaatgcagatggggagtttgcagtgacccacatgaccaaggcccacctcttctccacgggcactgtgcactgggtgcccccggccatctacaagagctcctgcagcatcgacgtcaccttcttccccttcgaccagcagaactgcaagatgaagtttggctcctggacttatgacaaggccaagatcgacctggagcagatggagcagactgtggacctgaaggactactgggagagcggcgagtgggccatcgtcaatgccacgggcacctacaacagcaagaagtacgactgctgcgccgagatctaccccgacgtcacctacgccttcgtcatccggcggctgccgctcttctacaccatcaacctcatcatcccctgcctgctcatctcctgcctcactgtgctggtcttctacctgccctccgactgcggcgagaagatcacgctgtgcatttcggtgctgctgtcactcaccgtcttcctgctgctcatcactgagatcatcccgtccacctcgctggtcatcccgctcatcggcgagtacctgctgttcaccatgatcttcgtcaccctgtccatcgtcatcaccgtcttcgtgctcaatgtgcaccaccgctcccccagcacccacaccatgccccactgggtgcggggggcccttctgggctgtgtgccccggtggcttctgatgaaccggcccccaccacccgtggagctctgccaccccctacgcctgaagctcagcccctcttatcactggctggagagcaacgtggatgccgaggagagggaggtggtggtggaggaggaggacagatgggcatgtgcaggtcatgtggccccctctgtgggcaccctctgcagccacggccacctgcactctggggcctcaggtcccaaggctgaggctctgctgcaggagggtgagctgctgctatcaccccacatgcagaaggcactggaaggtgtgcactacattgccgaccacctgcggtctgaggatgctgactcttcggtgaaggaggactggaagtatgttgccatggtcatcgacaggatcttcctctggctgtttatcatcgtctgcttcctggggaccatcggcctctttctgcctccgttcctagctggaatgatctgactgcacctccctcgagctggctcccagggcacccccgctgaccatcttttgaccgtctctgctacagctgcctctggtgtcccctttgggatgagcaggtgcctctccgcggagtctggacactgacccagggattgcaggcttccatccagcttaacgttattgtaccagggctgacagcctgctgggtgcaaagccctgttttggatacggaggagctggggaagctctgcagaaggtcgcaatagtgtggtgaccaagtggggcagagtaagattctcctggaggagcagtgcagaccctaagtgacagaagggtcaaccagggggacagtggggccagggtgacgaggaagggaatgcagacctcaaaggaggggccgtgggggcaaaggggagggttcttggatgtggaagggctttgaacaatgtttagatttggagatgagcccaaagtgccagggagaacagccaggtgaggtgggaggttggagagccaggt

SEQ ID NO: 5776 - DNA, 3202 bp, Homo sapiens
  source 1..3202: mol_type = unassigned DNA
ccttcctggtggtggtgacagcacctgctcagatctggtcggacgccgccggccggagcacccagcccggcggagaaggagctcgcccggcgctggggactgggacctggagccccttcccctaccgcacgtacgccccgccccgcgcacgcccgcccgcccgcccgcgcctggcgcagcttcactccggatggttcctgtcctcccgcgggtccgagggcgctggaaacccagcggcggcgaagcggagaggagccccgcgcgtctccgcccgcacggctccaggtctggggtctgcgctggagccgcgcggggagaggccgtctctgcgaccgccgcgcccgctcccgaccgtccgggtccgcggccagcccggccaccagccatgggctctggcccgctctcgctgcccctggcgctgtcgccgccgcggctgctgctgctgctgctgctgtctctgctgccagtggccagggcctcagaggctgagcaccgtctatttgagcggctgtttgaagattacaatgagatcatccggcctgtagccaacgtgtctgacccagtcatcatccatttcgaggtgtccatgtctcagctggtgaaggtggatgaagtaaaccagatcatggagaccaacctgtggctcaagcaaatctggaatgactacaagctgaaatggaacccctctgactatggtggggcagagttcatgcgtgtccctgcacagaagatctggaagccagacattgtgctgtataacaatgctgttggggatttccaggtggacgacaagaccaaagccttactcaagtacactggggaggtgacttggatacctccggccatctttaagagctcctgtaaaatcgacgtgacctacttcccgtttgattaccaaaactgtaccatgaagttcggttcctggtcctacgataaggcgaaaatcgatctggtcctgatcggctcttccatgaacctcaaggactattgggagagcggcgagtgggccatcatcaaagccccaggctacaaacacgacatcaagtacaactgctgcgaggagatctaccccgacatcacatactcgctgtacatccggcgcctgcccttgttctacaccatcaacctcatcatcccctgcctgctcatctccttcctcactgtgctcgtcttctacctgccctccgactgcggtgagaaggtgaccctgtgcatttctgtcctcctctccctgacggtgtttctcctggtgatcactgagaccatcccttccacctcgctggtcatccccctgattggagagtacctcctgttcaccatgatttttgtaaccttgtccatcgtcatcaccgtcttcgtgctcaacgtgcactacagaaccccgacgacacacacaatgccctcatgggtgaagactgtattcttgaacctgctccccagggtcatgttcatgaccaggccaacaagcaacgagggcaacgctcagaagccgaggcccctctacggtgccgagctctcaaatctgaattgcttcagccgcgcagagtccaaaggctgcaaggagggctacccctgccaggacgggatgtgtggttactgccaccaccgcaggataaaaatctccaatttcagtgctaacctcacgagaagctctagttctgaatctgttgatgctgtgctgtccctctctgctttgtcaccagaaatcaaagaagccatccaaagtgtcaagtatattgctgaaaatatgaaagcacaaaatgaagccaaagagattcaagatgattggaagtatgttgccatggtgattgatcgtatttttctgtgggttttcaccctggtgtgcattctagggacagcaggattgtttctgcaacccctgatggccagggaagatgcataagcactaagctgtgtgcctgcctgggagacttccttgtgtcagggcaggaggaggctgcttcctagtaagaacgtactttctgttatcaagctaccagctttgtttttggcatttcgaggtttacttattttccacttatcttggaatcatgcaaaaaaaaaaatgtcaagagtatttattaccgataaatgaacatttaactagcctttttggtatggtaaagagatgtcaaaatgtgattctatgtgattagtatgctatgctatggaatatacatgtaaaaatgtttccttttagttgttgaaacaaaactggatagaaaaatgctgttcagaaatatgaaaagtcattcagttatcactacagatctcccagtaatttttcttatttagcccataatctctttgaaggtttatactaattcagcaatcccccatcgttacccatttcttaccatgcatttctcgttctttactgggtctaaagggctatgcctccatttcagagagcttcaactacttctcttgcatacttctaaattataccatgagaaatcatgcctagttattcattgttaatataactgtcttagtacaccataaactgggtggattataaacaacagaaacttctcagttttggaggttgggaggtccaaggtcaaggcaccagcaaatttggtgtctggtgagggtcctcttcctcaaagggtgccttctagctgtgtcctcacatgactgaagggactagctatctctgtggggtctattttataagggcactaaccccattcatgagagcagagcccccatggcctaatcacctttccaaggccccaccttctatctaagacaatcacgctgggaataggtttcaacatatgaattgggggaggacacatttggaccacagcatgaacctttagaacagggtttctcagccttagcactatggacattttgggctggataaatatgtgttggtacagaatgggggtatcctgtgcattgtaggatctttagcagtaccctagcctcaactcactagatgccaatgacataccttgcttcttcaccagttatgataaccaagaatgtctccattgttaaatgttcccttaggagcaaaattgcccctggttgagaaacattgctttagacaaattgttaagagtatcatgtactacacttctgaaacttaacgtgatcatcaccactgacagatgattcacagagactgtttgaatcttgtctcactagtttttcctgtgcaaaaataaaatggacagaattgcagccc

SEQ ID NO: 5777 - DNA, 2238 bp, Homo sapiens
  source 1..2238: mol_type = unassigned DNA
accaaagccttactcaagtacactggggaggtgacttggatacctccggccatctttaagagctcctgtaaaatcgacgtgacctacttcccgtttgattaccaaaactgtaccatgaagttcggttcctggtcctacgataaggcgaaaatcgatctggtcctgatcggctcttccatgaacctcaaggactattgggagagcggcgagtgggccatcatcaaagccccaggctacaaacacgacatcaagtacaactgctgcgaggagatctaccccgacatcacatactcgctgtacatccggcgcctgcccttgttctacaccatcaacctcatcatcccctgcctgctcatctccttcctcactgtgctcgtcttctacctgccctccgactgcggtgagaaggtgaccctgtgcatttctgtcctcctctccctgacggtgtttctcctggtgatcactgagaccatcccttccacctcgctggtcatccccctgattggagagtacctcctgttcaccatgatttttgtaaccttgtccatcgtcatcaccgtcttcgtgctcaacgtgcactacagaaccccgacgacacacacaatgccctcatgggtgaagactgtattcttgaacctgctccccagggtcatgttcatgaccaggccaacaagcaacgagggcaacgctcagaagccgaggcccctctacggtgccagtccaaaggctgcaaggagggaaatcaaagaagccatccaaagtgtcaagtatattgctgaaaatatgaaagcacaaaatgaagccaaagagattcaagatgattggaagtatgttgccatggtgattgatcgtatttttctgtgggttttcaccctggtgtgcattctagggacagcaggattgtttctgcaacccctgatggccagggaagatgcataagcactaagctgtgtgcctgcctgggagacttccttgtgtcagggcaggaggaggctgcttcctagtaagaacgtactttctgttatcaagctaccagctttgtttttggcatttcgaggtttacttattttccacttatcttggaatcatgcaaaaaaaaaaatgtcaagagtatttattaccgataaatgaacatttaactagcctttttggtatggtaaagagatgtcaaaatgtgattctatgtgattagtatgctatgctatggaatatacatgtaaaaatgtttccttttagttgttgaaacaaaactggatagaaaaatgctgttcagaaatatgaaaagtcattcagttatcactacagatctcccagtaatttttcttatttagcccataatctctttgaaggtttatactaattcagcaatcccccatcgttacccatttcttaccatgcatttctcgttctttactgggtctaaagggctatgcctccatttcagagagcttcaactacttctcttgcatacttctaaattataccatgagaaatcatgcctagttattcattgttaatataactgtcttagtacaccataaactgggtggattataaacaacagaaacttctcagttttggaggttgggaggtccaaggtcaaggcaccagcaaatttggtgtctggtgagggtcctcttcctcaaagggtgccttctagctgtgtcctcacatgactgaagggactagctatctctgtggggtctattttataagggcactaaccccattcatgagagcagagcccccatggcctaatcacctttccaaggccccaccttctatctaagacaatcacgctgggaataggtttcaacatatgaattgggggaggacacatttggaccacagcatgaacctttagaacagggtttctcagccttagcactatggacattttgggctggataaatatgtgttggtacagaatgggggtatcctgtgcattgtaggatctttagcagtaccctagcctcaactcactagatgccaatgacataccttgcttcttcaccagttatgataaccaagaatgtctccattgttaaatgttcccttaggagcaaaattgcccctggttgagaaacattgctttagacaaattgttaagagtatcatgtactacacttctgaaacttaacgtgatcatcaccactgacagatgattcacagagactgtttgaatcttgtctcactagtttttcctgtgcaaaaataaaatggacagaattgcagccc

SEQ ID NO: 5778 - DNA, 2030 bp, Homo sapiens
  source 1..2030: mol_type = unassigned DNA
gtccttcccagggtgtgttagcgtctctcctacggcgcccgcctagcccggtggtcccaaccccctgcgggagctgcacacgccccggaaacctgggacagaaactgagtccctctccttcctggtggtggtgacagcacctgctcagatctggtcggacgccgccggccggagcacccagcccggcggagaaggagctcgcccggcgctggggactgggacctggagccccttcccctaccgcacgtacgccccgccccgcgcacgcccgcccgcccgcccgcgcctggcgcagcttcactccggatggttcctgtcctcccgcgggtccgagggcgctggaaacccagcggcggcgaagcggagaggagccccgcgcgtctccgcccgcacggctccaggtctggggtctgcgctggagccgcgcggggagaggccgtctctgcgaccgccgcgcccgctcccgaccgtccgggtccgcggccagcccggccaccagccatgggctctggcccgctctcgctgcccctggcgctgtcgccgccgcggctgctgctgctgctgctgctgtctctgctgccagtggccagggcctcagaggctgagcaccgtctatttgagcggctgtttgaagattacaatgagatcatccggcctgtagccaacgtgtctgacccagtcatcatccatttcgaggtgtccatgtctcagctggtgaaggtggatgaagtaaaccagatcatggagaccaacctgtggctcaagcaaatctggaatgactacaagctgaaatggaacccctctgactatggtggggcagagttcatgcgtgtccctgcacagaagatctggaagccagacattgtgctgtataacaatgctgttggggatttccaggtggacgacaagaccaaagccttactcaagtacactggggaggtgacttggatacctccggccatctttaagagctcctgtaaaatcgacgtgacctacttcccgtttgattaccaaaactgtaccatgaagttcggttcctggtcctacgataaggcgaaaatcgatctggtcctgatcggctcttccatgaacctcaaggactattgggagagcggcgagtgggccatcatcaaagccccaggctacaaacacgacatcaagtacaactgctgcgaggagatctaccccgacatcacatactcgctgtacatccggcgcctgcccttgttctacaccatcaacctcatcatcccctgcctgctcatctccttcctcactgtgctcgtcttctacctgccctccgactgcggtgagaaggtgaccctgtgcatttctgtcctcctctccctgacggtgtttctcctggtgatcactgagaccatcccttccacctcgctggtcatccccctgattggagagtacctcctgttcaccatgatttttgtaaccttgtccatcgtcatcaccgtcttcgtgctcaacgtgcactacagaaccccgacgacacacacaatgccctcatgggtgaagactgtattcttgaacctgctccccagggtcatgttcatgaccaggccaacaagcaacgagggcaacgctcagaagccgaggcccctctacggtgccgagctctcaaatctgaattgcttcagccgcgcagagtccaaaggctgcaaggagggctacccctgccaggacgggatgtgtggttactgccaccaccgcaggataaaaatctccaatttcagtgctaacctcacgagaagctctagttctgaatctgttgatgctgtgctgtccctctctgctttgtcaccagaaatcaaagaagccatccaaagtgtcaagtatattgctgaaaatatgaaagcacaaaatgaagccaaagaggaacaaaaagcccaagagatccaacaattgaaacgaaaagaaaagtccacagaaacatccgatcaagaacctgggctatgaatttccaatcttcaacaacctgttaggaaaaaaataaaaatgcattaaataattgtaaa

SEQ ID NO: 5779 - DNA, 1889 bp, Homo sapiens
  source 1..1889: mol_type = unassigned DNA
gaggccgtctctgcgaccgccgcgcccgctcccgaccgtccgggtccgcggccagcccggccaccagccatgggctctggcccgctctcgctgcccctggcgctgtcgccgccgcggctgctgctgctgctgctgctgtctctgctgccagtggccagggcctcagaggctgagcaccgtctatttgagcggctgtttgaagattacaatgagatcatccggcctgtagccaacgtgtctgacccagtcatcatccatttcgaggtgtccatgtctcagctggtgaaggtggatgaagtaaaccagatcatggagaccaacctgtggctcaagcaaatctggaatgactacaagctgaaatggaacccctctgactatggtggggcagagttcatgcgtgtccctgcacagaagatctggaagccagacattgtgctgtataacaatgctgttggggatttccaggtggacgacaagaccaaagccttactcaagtacactggggaggtgacttggatacctccggccatctttaagagctcctgtaaaatcgacgtgacctacttcccgtttgattaccaaaactgtaccatgaagttcggttcctggtcctacgataaggcgaaaatcgatctggtcctgatcggctcttccatgaacctcaaggactattgggagagcggcgagtgggccatcatcaaagccccaggctacaaacacgacatcaagtacaactgctgcgaggagatctaccccgacatcacatactcgctgtacatccggcgcctgcccttgttctacaccatcaacctcatcatcccctgcctgctcatctccttcctcactgtgctcgtcttctacctgccctccgactgcggtgagaaggtgaccctgtgcatttctgtcctcctctccctgacggtgtttctcctggtgatcactgagaccatcccttccacctcgctggtcatccccctgattggagagtacctcctgttcaccatgatttttgtaaccttgtccatcgtcatcaccgtcttcgtgctcaacgtgcactacagaaccccgacgacacacacaatgccctcatgggtgaagactgtattcttgaacctgctccccagggtcatgttcatgaccaggccaacaagcaacgagggcaacgctcagaagccgaggcccctctacggtgccgagctctcaaatctgaattgcttcagccgcgcagagtccaaaggctgcaaggagggctacccctgccaggacgggatgtgtggttactgccaccaccgcaggataaaaatctccaatttcagtgctaacctcacgagaagctctagttctgaatctgttgatgctgtgctgtccctctctgctttgtcaccagaaatcaaagaagccatccaaagtgtcaagtatattgctgaaaatatgaaagcacaaaatgaagccaaagagattcaagatgattggaagtatgttgccatggtgattgatcgtatttttctgtgggttttcaccctggtgtgcattctagggacagcaggattgtttctgcaacccctgatggccagggaagatgcataagcactaagctgtgtgcctgcctgggagacttccttgtgtcagggcaggaggaggctgcttcctagctggagtgcaatggcgtgatctcagctcaccgcaacctccgccacctgggttcaagcgattctcctgccgcagcctcccaggtagctgggattacaggaacaaaaagcccaagagatccaacaattgaaacgaaaagaaaagtccacagaaacatccgatcaagaacctgggctatgaatttccaatcttcaacaacctgttaggaaaaaaataaaaatgcattaaataattgtaaa

SEQ ID NO: 5780 - DNA, 5027 bp, Homo sapiens
  source 1..5027: mol_type = unassigned DNA
gcaccagaacccggggaggcgccgaggctggaccgagcccaccctggctgtgcctgtgccgagctgagcctgctgtggctgtgttgctgcacatttaccagtgctgacggggacttcgcggtcacccacctgaccaaggcccacctgttccatgacgggcgggtgcagtggactcccccggccatttacaagagctcctgcagcatcgacgtcaccttcttccccttcgaccagcagaactgcaccatgaaattcggctcctggacctacgacaaggccaagatcgacctggtgaacatgcacagccgcgtggaccagctggacttctgggagagtggcgagtgggtcatcgtggatgccgtgggcacctacaacaccaggaagtacgagtgctgtgccgagatctacccggacatcacctatgccttcgtcatccggcggctgccgctcttctacaccatcaacctcatcatcccctgcctgctcatctcctgcctcaccgtgctggtcttctacctgccctccgagtgtggcgagaagatcacgctgtgcatctccgtgctgctgtcgctcaccgtcttcctgctgctcatcaccgagatcatcccgtccacctcactggtcatcccactcatcggcgagtacctgctgttcaccatgatcttcgtcaccctgtccatcgtcatcacggtcttcgtgctcaacgtgcaccaccgctcgccacgcacgcacaccatgcccacctgggtacgcagggtcttcctggacatcgtgccacgcctgctcctcatgaagcggccgtccgtggtcaaggacaattgccggcggctcatcgagtccatgcataagatggccagtgccccgcgcttctggcccgagccagaaggggagccccctgccacgagcggcacccagagcctgcacccgccctcaccgtccttctgtgtccccctggatgtgccggctgagcctgggccttcctgcaagtcaccctccgaccagctccctcctcagcagcccctggaagctgagaaagccagcccccacccctcgcctggaccctgccgcccgccccacggcacccaggcaccagggctggccaaagccaggtccctcagcgtccagcacatgtccagccctggcgaagcggtggaaggcggcgtccggtgccggtctcggagcatccagtactgtgttccccgagacgatgccgcccccgaggcagatggccaggctgccggcgccctggcctctcgcaacacccactcggctgagctcccacccccagaccagccctctccgtgcaaatgcacatgcaagaaggagccctcttcggtgtccccgagcgccacggtcaagacccgcagcaccaaagcgccgcccccgcacctgcccctgtcgccggccctgacccgggcggtggagggcgtccagtacattgcagaccacctgaaggccgaagacacagacttctcggtgaaggaggactggaagtacgtggccatggtcatcgaccgcatcttcctctggatgttcatcatcgtctgcctgctggggacggtgggcctcttcctgccgccctggctggctggcatgatctaggaagggaccgggagcctgcgtggcctggggctgccgtgcacggggccagcatccatgcggccggcctggggccgggctggcttctccctggactctgtggggccacacgtttgccaaattttccttcctgttctgtgtctgctgtaagacggccttggacggggacacggcctctggggagaccgagtgtggagctgcttccagttggactgtggcctcaggaggcagtggcttggagcagaggtgggggtcggcgccttctacctgcaggactcgggctaagtccagttcaagagtctcctgagctcccctgcagatggaactcactcctcccagtctctcagcagatctggtgatggtcccgaccgccccaaggggcccttgaagggagttcacgccccttcagccccaagcgccccgtcttctggaggcccggccgcctctcccacccaccgtgtcctgcgcctgtgtgggcttcaacttctcccccagggtccttgagcctctcgggccccatgagggtgagccagcagcgctccaatctgcttcgctaggagagggtccaggcagggattgtgtttggttgtgttttgggtaagttagtgagaactcaagtcttgtgcctaaggagccttggagaacagagttttgtggagctggttccgcgtggggagaatcgggaggcccacgcgggaccagctctcccctgcgcaggccctccgcgggggacaggaacacccagccccagcgagtctggagaccaggactctgccttccaggcgtagggccagggctctggcaggtggccagggctccacgggggcctagtggcttcagcccctggggtacttctgtgttgtgattccccggagctgggaaggtcccgaatggagtccagacctgggccctggttcccccaggaccctgagggtttccaccttggcgcgcagcccgggagatccgccctgggctctgggttcgggaagaaggacttcctgctacagtagctgtggggagctggtgggggcatccttgaggacctccacctgggagatgctgggaccctcggggcaggaagtccctgagaagcctcatgggagtcagggagccctggggtttccacacaggcccatgccctccgtcctggcagggcaggcagagctcagcacagcctcacccctgcaggcggtatccagaggtgagggaggcctgaaatgtttccaggcatgaccctggagcccggcagtgcaccccctaaagatggcgcacccggcagccccccagtgtccccaggggcacacttccccttgggatgggcacaggctgccccacccctccatgattccaagggcccagaggggcggggccaggatggcgtgtcccctgcctgtgagtgacatcggttcaggaggagacagtcaggaagcctcctgctgagtggtccacattctgctgcccccagaccccatccagccaggggtggggatggggttgggctctgcgtcccactgagtctcattcctctgtccccgagccgagctctcctgggccagggtctcgtcaggaggtgcctgagagcagaatgaataattgaggttaggaacccggcatgccgagtgccccagaaatgccgctgtgtccccgcgggcagtgacgtgagtggggaggagactcaggcccacattgcccacacctgcctctgaactgctgctggtcacccccacccccgggtgcctgtgaccggggtcctgaggctggggcttttgtgccaggagtgggtgggacacagagacccccgtgccaaatcctgggcatccccagccccctggcccctcccacatcccccgtgtattcaggaccccatctgctgagctctgacctgcccccgctctgccatcagcccctgctgctcctcggccagagctcccaggacgcagggagaccctgggagagtgaggtcatcccggggccatggaagctggcaggagacactggtctcagaggagggatagagacgcagatttcagatgtaagaagcccgatccacattgcataagtggacccagctgccagatgtgtgggcagctgcagggagtggcccggggtgctgggcccagctgtggttgttcttttctgggtcaggagtgactgcggagtggctgggacgctcctgccgggggaccctcctgccgggggtggccgcttgcctgggggaagacccctttccctttctttttttttttgaggctcaaaaaaaaaatccaaataaagcaccatattcccaccacgccaaattaaccttgacaacaatgttggcgtatttgcgtccagtgctgtttttattaattaaggtaaaatttacatatggtgagatgcatgctcttcagtggagacccagcccctagaaggtccctccagcccttcctgtcggcgtccctccccatctgtggctctgacttaagcaccgtggattgacctctccggctcacgaccttcgaggagtcagaatcctgcagttggagcctttgatgtctggcttcttcatcctatgacttagagcttcatccgtgctgttgtgtgtgtccgtagctccttgctgtctgttccttcgtttttaattgtgagcagtgttcttctgtctgaataaactaagacgcagtttgtccatcacctgttagtggactttgcttgcagctgtcggtgattaggaatggaggtgccggtgtgtgcatggcactctatccgttatgcatgtttattttctgcatctgttaatgttttaacatctttcagacccaggactgctcctcctagggccagttagttcccgggggtggacagcttgcctagaacccaccttgccagggctgtgacccccgaccccctatcaaagtctcacactaagccaacgtttccccgccctgtgccaggcaccaggcagcgggagacactgctgcagctcgaagcctgccggggcgccggcccctctgcggctgcttgcgccatcctgccccctccttcccaggggaggccccagtgaaggccctggccagggcttcccagccccttctgcctccggaccggcctgggtgcttcccgtgtggcccggcctggggcgacgtggccctcctctcaggaagcgtggtaatctctcaatggctggcctccggagttgtcactcaggctcccttgtaagttaaggccgggcccaggacactctagggcacgcagctgctgtgggactgctgggttaggtgtcccctggagcagaggcggcttcggatttctaaagtggctgagtcctttcaccttgcaccagaaatgctggatcaggcgcagcacacacagcacctggggatgcaagcccggccagccccatggaccaagccccgccgaccgtgtggcccgccgagcccaggtgcggc

SEQ ID NO: 5781 - DNA, 4776 bp, Homo sapiens
  source 1..4776: mol_type = unassigned DNA
gctgaggcgggcagggccgggcggggccgcgccacggagcccacagcccggcgctccctgccgcgccgccgccgcaccgcgccccacaggagaagacgaaccgggcccggcggccgaagcggcccgcgaggcgcgggaggcatgaagttgggcgcgcacgggcctcgaagcggcggggagccgggagccgcccgcatctagagcccgcgaggtgcgtgcgccatggagctagggggccccggagcgccgcggctgctgccgccgctgctgctgcttctggggaccggcctcctgcgcgccagcagccatgtggagacccgggcccacgccgaggagcggctcctgaagaaactcttctccggttacaacaagtggtcccgacccgtggccaacatctcggacgtggtcctcgtccgcttcggcctgtccatcgctcagctcattgacgtggatgagaagaaccagatgatgaccacgaacgtatgggtgaagcaggagtggcacgactacaagctgcgctgggacccagctgactatgagaatgtcacctccatccgcatcccctccgagctcatctggcggccggacatcgtcctctacaacaatgctgacggggacttcgcggtcacccacctgaccaaggcccacctgttccatgacgggcgggtgcagtggactcccccggccatttacaagagctcctgcagcatcgacgtcaccttcttccccttcgaccagcagaactgcaccatgaaattcggctcctggacctacgacaaggccaagatcgacctggtgaacatgcacagccgcgtggaccagctggacttctgggagagtggcgagtgggtcatcgtggatgccgtgggcacctacaacaccaggaagtacgagtgctgtgccgagatctacccggacatcacctatgccttcgtcatccggcggctgccgctcttctacaccatcaacctcatcatcccctgcctgctcatctcctgcctcaccgtgctggtcttctacctgccctccgagtgtggcgagaagatcacgctgtgcatctccgtgctgctgtcgctcaccgtcttcctgctgctcatcaccgagatcatcccgtccacctcactggtcatcccactcatcggcgagtacctgctgttcaccatgatcttcgtcaccctgtccatcgtcatcacggtcttcgtgctcaacgtgcaccaccgctcgccacgcacgcacaccatgcccacctgggtacgcagggtcttcctggacatcgtgccacgcctgctcctcatgaagcggccgtccgtggtcaaggacaattgccggcggctcatcgagtccatgcataagatggccagtgccccgcgcttctggcccgagccagaaggggagccccctgccacgagcggcacccagagcctgcacccgccctcaccgtccttctgtgtccccctggatgtgccggctgagcctgggccttcctgcaagtcaccctccgaccagctccctcctcagcagcccctggaagctgagaaagccagcccccacccctcgcctggaccctgccgcccgccccacggcacccaggcaccagggctggccaaagccaggtccctcagcgtccagcacatgtccagccctggcgaagcggtggaaggcggcgtccggtgccggtctcggagcatccagtactgtgttccccgagacgatgccgcccccgaggcagatggccaggctgccggcgccctggcctctcgcaacacccactcggctgagctcccacccccagaccagccctctccgtgcaaatgcacatgcaagaaggagccctcttcggtgtccccgagcgccacggtcaagacccgcagcaccaaagcgccgcccccgcacctgcccctgtcgccggccctgacccgggcggtggagggcgtccagtacattgcagaccacctgaaggccgaagacacagacttctcggtgaaggaggactggaagtacgtggccatggtcatcgaccgcatcttcctctggatgttcatcatcgtctgcctgctggggacggtgggcctcttcctgccgccctggctggctggcatgatctaggaagggaccgggagcctgcgtggcctggggctgccgtgcacggggccagcatccatgcggccggcctggggccgggctggcttctccctggactctgtggggccacacgtttgccaaattttccttcctgttctgtgtctgctgtaagacggccttggacggggacacggcctctggggagaccgagtgtggagctgcttccagttggactgtggcctcaggaggcagtggcttggagcagaggtgggggtcggcgccttctacctgcaggactcgggctaagtccagttcaagagtctcctgagctcccctgcagatggaactcactcctcccagtctctcagcagatctggtgatggtcccgaccgccccaaggggcccttgaagggagttcacgccccttcagccccaagcgccccgtcttctggaggcccggccgcctctcccacccaccgtgtcctgcgcctgtgtgggcttcaacttctcccccagggtccttgagcctctcgggccccatgagggtgagccagcagcgctccaatctgcttcgctaggagagggtccaggcagggattgtgtttggttgtgttttgggtaagttagtgagaactcaagtcttgtgcctaaggagccttggagaacagagttttgtggagctggttccgcgtggggagaatcgggaggcccacgcgggaccagctctcccctgcgcaggccctccgcgggggacaggaacacccagccccagcgagtctggagaccaggactctgccttccaggcgtagggccagggctctggcaggtggccagggctccacgggggcctagtggcttcagcccctggggtacttctgtgttgtgattccccggagctgggaaggtcccgaatggagtccagacctgggccctggttcccccaggaccctgagggtttccaccttggcgcgcagcccgggagatccgccctgggctctgggttcgggaagaaggacttcctgctacagtagctgtggggagctggtgggggcatccttgaggacctccacctgggagatgctgggaccctcggggcaggaagtccctgagaagcctcatgggagtcagggagccctggggtttccacacaggcccatgccctccgtcctggcagggcaggcagagctcagcacagcctcacccctgcaggcggtatccagaggtgagggaggcctgaaatgtttccaggcatgaccctggagcccggcagtgcaccccctaaagatggcgcacccggcagccccccagtgtccccaggggcacacttccccttgggatgggcacaggctgccccacccctccatgattccaagggcccagaggggcggggccaggatggcgtgtcccctgcctgtgagtgacatcggttcaggaggagacagtcaggaagcctcctgctgagtggtccacattctgctgcccccagaccccatccagccaggggtggggatggggttgggctctgcgtcccactgagtctcattcctctgtccccgagccgagctctcctgggccagggtctcgtcaggaggtgcctgagagcagaatgaataattgaggttaggaacccggcatgccgagtgccccagaaatgccgctgtgtccccgcgggcagtgacgtgagtggggaggagactcaggcccacattgcccacacctgcctctgaactgctgctggtcacccccacccccgggtgcctgtgaccggggtcctgaggctggggcttttgtgccaggagtgggtgggacacagagacccccgtgccaaatcctgggcatccccagccccctggcccctcccacatcccccgtgtattcaggaccccatctgctgagctctgacctgcccccgctctgccatcagcccctgctgctcctcggccagagctcccaggacgcagggagaccctgggagagtgaggtcatcccggggccatggaagctggcaggagacactggtctcagaggagggatagagacgcagatttcagatgtaagaagcccgatccacattgcataagtggacccagctgccagatgtgtgggcagctgcagggagtggcccggggtgctgggcccagctgtggttgttcttttctgggtcaggagtgactgcggagtggctgggacgctcctgccgggggaccctcctgccgggggtggccgcttgcctgggggaagacccctttccctttctttttttttttgaggctcaaaaaaaaaatccaaataaagcaccatattcccaccacgccaaattaaccttgacaacaatgttggcgtatttgcgtccagtgctgtttttattaattaaggtaaaatttacatatggtgagatgcatgctcttcagtggagacccagcccctagaaggtccctccagcccttcctgtcggcgtccctccccatctgtggctctgacttaagcaccgtggattgacctctccggctcacgaccttcgaggagtcagaatcctgcagttggagcctttgatgtctggcttcttcatcctatgacttagagcttcatccgtgctgttgtgtgtgtccgtagctccttgctgtctgttccttcgtttttaattgtgagcagtgttcttctgtctgaataaactaagacgcagtttgtccatca

SEQ ID NO: 5782 - DNA, 2075 bp, Homo sapiens
  source 1..2075: mol_type = unassigned DNA
ccacaggagaagacgaaccgggcccagcagccatgtggagacccgggcccacgccgaggagcggctcctgaagaaactcttctccggttacaacaagtggtcccgacccgtggccaacatctcggacgtggtcctcgtccgcttcggcctgtccatcgctcagctcattgacgtggatgagaagaaccagatgatgaccacgaacgtatgggtgaagcaggagtggcacgactacaagctgcgctgggacccagctgactatgagaatgtcacctccatccgcatcccctccgagctcatctggcggccggacatcgtcctctacaacaactgcaggagagcccttttgggcaggagtgcttttcgccatcagaccccatcctggcctttctgggagaatagtgtggactgcagggtgccctggagagggtgctgacggggacttcgcggtcacccacctgaccaaggcccacctgttccatgacgggcgggtgcagtggactcccccggccatttacaagagctcctgcagcatcgacgtcaccttcttccccttcgaccagcagaactgcaccatgaaattcggctcctggacctacgacaaggccaagatcgacctggtgaacatgcacagccgcgtggaccagctggacttctgggagagtggcgagtgggtcatcgtggatgccgtgggcacctacaacaccaggaagtacgagtgctgtgccgagatctacccggacatcacctatgccttcgtcatccggcggctgccgctcttctacaccatcaacctcatcatcccctgcctgctcatctcctgcctcaccgtgctggtcttctacctgccctccgagtgtggcgagaagatcacgctgtgcatctccgtgctgctgtcgctcaccgtcttcctgctgctcatcaccgagatcatcccgtccacctcactggtcatcccactcatcggcgagtacctgctgttcaccatgatcttcgtcaccctgtccatcgtcatcacggtcttcgtgctcaacgtgcaccaccgctcgccacgcacgcacaccatgcccacctgggtacgcagggtcttcctggacatcgtgccacgcctgctcctcatgaagcggccgtccgtggtcaaggacaattgccggcggctcatcgagtccatgcataagatggccagtgccccgcgcttctggcccgagccagaaggggagccccctgccacgagcggcacccagagcctgcacccgccctcaccgtccttctgtgtccccctggatgtgccggctgagcctgggccttcctgcaagtcaccctccgaccagctccctcctcagcagcccctggaagctgagaaagccagcccccacccctcgcctggaccctgccgcccgccccacggcacccaggcaccagggctggccaaagccaggtccctcagcgtccagcacatgtccagccctggcgaagcggtggaaggcggcgtccggtgccggtctcggagcatccagtactgtgttccccgagacgatgccgcccccgaggcagatggccaggctgccggcgccctggcctctcgcaacacccactcggctgagctcccacccccagaccagccctctccgtgcaaatgcacatgcaagaaggagccctcttcggtgtccccgagcgccacggtcaagacccgcagcaccaaagcgccgcccccgcacctgcccctgtcgccggccctgacccgggcggtggagggcgtccagtacattgcagaccacctgaaggccgaagacacagacttctcggtgaaggaggactggaagtacgtggccatggtcatcgaccgcatcttcctctggatgttcatcatcgtctgcctgctggggacggtgggcctcttcctgccgccctggctggctggcatgatctaggaagggaccgggagcctgcgtggcctggggctgccgtgcacggggccagcatccatgcggccggcctggggccgggctggcttctccctggactctgtggggccacacgtttgccaaattttccttcctgttctgtgtctgctg

SEQ ID NO: 5783 - DNA, 3623 bp, Homo sapiens
  source 1..3623: mol_type = unassigned DNA
acatgcgtcccgagcccgccagaagctgctaggctgaggctgctgtcccggcgggagctgtggcgcggagcggcccctctgctgcgtctgccctcgttttgtctcacgactcacactcagtgctccattccccaagagttcgcgttccccgcgcggcggtcgagaggcggctgcccgcggtcccgcgcgggcgcggggcgatggcggcgcgggggtcagggccccgcgcgctccgcctgctgctcttggtccagctggtcgcggggcgctgcggtctagcgggcgcggcgggcggcgcgcagagaggattatctgaaccttcttctattgcaaaacatgaagatagtttgcttaaggatttatttcaagactacgaaagatgggttcgtcctgtggaacacctgaatgacaaaataaaaataaaatttggacttgcaatatctcaattggtggatgtggatgagaaaaatcagttaatgacaacaaacgtctggttgaaacaggaatggatagatgtaaaattaagatggaaccctgatgactatggtggaataaaagttatacgtgttccttcagactctgtctggacaccagacatcgttttgtttgataatgcagatggacgttttgaagggaccagtacgaaaacagtcatcaggtacaatggcactgtcacctggactccaccggcaaactacaaaagttcctgtaccatagatgtcacgtttttcccatttgaccttcagaactgttccatgaaatttggttcttggacttatgatggatcacaggttgatataattctagaggaccaagatgtagacaagagagatttttttgataatggagaatgggagattgtgagtgcaacagggagcaaaggaaacagaaccgacagctgttgctggtatccgtatgtcacttactcatttgtaatcaagcgcctgcctctcttttataccttgttccttataataccctgtattgggctctcatttttaactgtacttgtcttctatcttccttcaaatgaaggtgaaaagatttgtctctgcacttcagtacttgtgtctttgactgtcttccttctggttattgaagagatcataccatcatcttcaaaagtcatacctctaattggagagtatctggtatttaccatgatttttgtgacactgtcaattatggtaaccgtcttcgctatcaacattcatcatcgttcttcctcaacacataatgccatggcgcctttggtccgcaagatatttcttcacacgcttcccaaactgctttgcatgagaagtcatgtagacaggtacttcactcagaaagaggaaactgagagtggtagtggaccaaaatcttctagaaacacattggaagctgcgctcgattctattcgctacattacaagacacatcatgaaggaaaatgatgtccgtgaggttgttgaagattggaaattcatagcccaggttcttgatcggatgtttctgtggacttttcttttcgtttcaattgttggatctcttgggctttttgttcctgttatttataaatgggcaaatatattaataccagttcatattggaaatgcaaataagtgaagcctcccaagggactgaagtatacatttagttaacacacatatatctgatggcacctataaaattatgaaaatgtaagttatgtgttaaatttagtgcaagctttaacagactaagttgctaacctcaatttatgttaacagatgatccatttgaacagttggctgtatgactgaagtaataactgatgagatacatttgatcttgtaaaaatagcaaaatattatctgaactggactagtgaaaaatctagtatttgtatcctggcaaataatactaatttataatccacagtaaagttcatcctttgactgtgctggagaattccagttgtatttgaagactgattttaaaacttttctgcatttggtaaaggtatgtaaactttcctgtactcactgagtaacagctaatctttaatataatattatactgctatatttaaaaagctgactacttgatataattacttaatgtgatgcttgatataataattacttaatgtggccgggcacggtggctcacacctgtaatcccagcactttgggaggtcgaggtgggcgtatcacctgaggttgggagttcgagaccagcctgaccaacgtggagaaaccccgtctctactaaaaatatgaaattagccagggtggtggtgcacacctgtaatcccagctacctgggaggctgcggcaggagaatcgcttgaacccaggtggcggaggttgcggtgagctgagatcacgccattgcactccagcctgggcaacaagagcaaaactcagtctcaaataataataataacaacaacttaatgtgctgctgcttttccataaccaacattttaaaaataaatgaaaaacaggaattgggaactcctttaaggcttactttattctttagatgcttaattattgtgttaactatttctgtagcttagcttccactgtaaagtcatacagtagacaactcctgtggacacgcagtagcatatccttaacattaatttcagtcctcttgtccacatttcccacaattaatagaaccatcttctatataaattgtggtagtatctctttatccttgatcttagaatagtcagtccactacaattacatgaaccccatttaaaaaacatatttagggccgggggcagtggctcacatctgtaatccaagcactttgggaggctgaggcaggtggatcaccagaggttaggagttcgagactagcctgaccaacatggtgaagccccgtctctactaagaatacaaaaaattagtcgggcatggtagcaggcgcctgtagtcccagctactcaagaggctgaggcaggagaatcgcttgaacctgggaggtggaggctgcagtgagccgagactgcgccattgcactccagcctggcaacaagagcaaaactctgtctcaaacatattttggtctaaatcattctgtgagaaaacaatcttctaatatgaaacacagtattctaatttggtatatgcacactgttatatacctgtaatatttcagttttctctccttcattctaacaattacaataatagaatcttagagttgcaagggcctttagatgtaatcaatcttagcctattactagtacagcgtaaatgatttagtacagtataatgtatcacagttaaaacagttaaattccatctctaaatgtcaccacttcaggtgtgaccaggtagcaaacactgacagaaaccctcgttcaatttagaactcttagctgttgagatcacaaacacctcatttatttataataagtaacctatctaagttcaagccaatgctctttggaaggcggaggagaccctatctaatttgcatttaatcgtaggcaggtgtttaatgccatttaatgagtgaaagcctggtgtgatgaatttagattgcctgccagctacctaccttagttcgtatacatccctgatccctcttatactaccattactgttacttatgatttttatatataaatttttatcgaca

SEQ ID NO: 5784 - DNA, 2400 bp, Homo sapiens
  source 1..2400: mol_type = unassigned DNA
agaaagatctcagccactcacaggtgttcatcctcccggggtcctgtctgccccagcatttcttttctgcttttcttcccctttcttgcatgaagagacatctaggctgtcaggaaatgtgatgactcatctgacatcagatcgaatcttttttattcgcccttcatgtctgcctcagtctctgatcctggtaataaccgtgtgaagtcccggggatgttttgatttctgagaagacacacacggattgcagtgggcttctgatgatgtcaaggttggatgcatgtggctgactgatagctctttgttttccacaatcctttgcctaggaaaaaggaatccaagtgtgttttaaccatgctgaccagcaaggggcagggattccttcatgggggcttgtgtctctggctgtgtgtgttcacacctttctttaaaggctgtgtgggctgtgcaactgaggagaggctcttccacaaactgttttctcattacaaccagttcatcaggcctgtggaaaacgtttccgaccctgtcacggtacactttgaagtggccatcacccagctggccaacgtggatgaagtaaaccagatcatggaaaccaatttgtggctgcgtcacatctggaatgattataaattgcgctgggatccaatggaatatgatggcattgagactcttcgcgttcctgcagataagatttggaagcccgacattgttctctataacaatgctgttggtgacttccaagtagaaggcaaaacaaaagctcttcttaaatacaatggcatgataacctggactccaccagctatttttaagagttcctgccctatggatatcacctttttcccttttgatcatcaaaactgttccctaaaatttggttcctggacgtatgacaaagctgaaattgatcttctaatcattggatcaaaagtggatatgaatgatttttgggaaaacagtgaatgggaaatcattgatgcctctggctacaaacatgacatcaaatacaactgttgtgaagagatatacacagatataacctattctttctacattagaagattgccgatgttttacacgattaatctgatcatcccttgtctctttatttcatttctaaccgtgttggtcttttaccttccttcggactgtggtgaaaaagtgacgctttgtatttcagtcctgctttctctgactgtgtttttgctggtcatcacagaaaccatcccatccacatctctggtggtcccactggtgggtgagtacctgctgttcaccatgatctttgtcacactgtccatcgtggtgactgtgtttgtgttgaacatacactaccgcaccccaaccacgcacacaatgcccaggtgggtgaagacagttttcctgaagctgctgccccaggtcctgctgatgaggtggcctctggacaagacaaggggcacaggctctgatgcagtgcccagaggccttgccaggaggcctgccaaaggcaagcttgcaagccatggggaacccagacatcttaaagaatgcttccattgtcacaaatcaaatgagcttgccacaagcaagagaagattaagtcatcagccattacagtgggtggtggaaaattcggagcactcgcctgaagttgaagatgtgattaacagtgttcagttcatagcagaaaacatgaagagccacaatgaaaccaaggaggtagaagatgactggaaatacgtggccatggtggtggacagagtatttctttgggtatttataattgtctgtgtatttggaactgcagggctatttctacagccactacttgggaacacaggaaaatcttaaaatgtattttcttttatgttcagaaatttacagacaccatatttgttctgcattccctgccacaaggaaaggaaagcaaaggcttcccacccaagtcccccatctgctaaaactgatggctacatggaaaaagaggactttcttgcacattaggaagcagaatatcctccagtgtagcacagggggagaagtgagaagtgttatgacattagtgccctgattgggcagcacccacggctacagtatcaggtcaggtttctcgtgtctgtgtgtttggcttctaaagacaagaatgacttacaatacagcctaattatgtaattaacatcaagccacactaaaaagttctgctgtacctccagtggatgctgtttctcagtattatgacatgtgacaggtgaactctgggaattggaccatgcaacatttgtgaactgtttgcaacactttgtgaactattgcatccttgatttcttgtgcatgtctctgtaatgtaactcaccctcctcagcattatttgatacactgattgttagttttaaaaaaaaaaaaaaaaaaa

SEQ ID NO: 5785 - DNA, 1872 bp, Homo sapiens
  source 1..1872: mol_type = unassigned DNA
agtctctgatcctggtaataaccgtgtgaagtcccggggatgttttgatttctgagaagacacacacggattgcagtgggcttctgatgatgtcaaggttggatgcatgtggctgactgatagctctttgttttccacaatcctttgcctaggaaaaaggaatccaagtgtgttttaaccatgctgaccagcaaggggcagggattccttcatgggggcttgtgtctctggctgtgtgtgttcacacctttctttaaaggctgtgtgggctgtgcaactgaggagaggctcttccacaaactgttttctcattacaaccagttcatcaggcctgtggaaaacgtttccgaccctgtcacggtacactttgaagtggccatcacccagctggccaacgtgatctggaatgattataaattgcgctgggatccaatggaatatgatggcattgagactcttcgcgttcctgcagataagatttggaagcccgacattgttctctataacaatgctgttggtgacttccaagtagaaggcaaaacaaaagctcttcttaaatacaatggcatgataacctggactccaccagctatttttaagagttcctgccctatggatatcacctttttcccttttgatcatcaaaactgttccctaaaatttggttcctggacgtatgacaaagctgaaattgatcttctaatcattggatcaaaagtggatatgaatgatttttgggaaaacagtgaatgggaaatcattgatgcctctggctacaaacatgacatcaaatacaactgttgtgaagagatatacacagatataacctattctttctacattagaagattgccgatgttttacacgattaatctgatcatcccttgtctctttatttcatttctaaccgtgttggtcttttaccttccttcggactgtggtgaaaaagtgacgctttgtatttcagtcctgctttctctgactgtgtttttgctggtcatcacagaaaccatcccatccacatctctggtggtcccactggtgggtgagtacctgctgttcaccatgatctttgtcacactgtccatcgtggtgactgtgtttgtgttgaacatacactaccgcaccccaaccacgcacacaatgcccaggtgggtgaagacagttttcctgaagctgctgccccaggtcctgctgatgaggtggcctctggacaagacaaggggcacaggctctgatgcagtgcccagaggccttgccaggaggcctgccaaaggcaagcttgcaagccatggggaacccagacatcttaaagaatgcttccattgtcacaaatcaaatgagcttgccacaagcaagagaagattaagtcatcagccattacagtgggtggtggaaaattcggagcactcgcctgaagttgaagatgtgattaacagtgttcagttcatagcagaaaacatgaagagccacaatgaaaccaaggaggtagaagatgactggaaatacgtggccatggtggtggacagagtatttctttgggtatttataattgtctgtgtatttggaactgcagggctatttctacagccactacttgggaacacaggaaaatcttaaaatgtattttcttttatgttcagaaatttacagacaccatatttgttctgcattccctgccacaaggaaaggaaagcaaaggcttcccacccaagtcccccatctgctaaaactgatggctacatggaaaaagaggactttcttgcacattaggaagcagaatatcctccagtgtagcacagggggagaagtgagaagtgttatgacattagtgccctgattgggcagcacccacggctacagtatcaggtc

SEQ ID NO: 5786 - DNA, 5669 bp, Homo sapiens
  source 1..5669: mol_type = unassigned DNA
gagccgagcggcgaggtgcctctgtggccgcaggcgcaggcccgggcgacagccgagacgtggagcgcgccggctcgctgcagctccgggactcaacatgcgctgctcgccgggaggcgtctggctggcgctggccgcgtcgctcctgcacgtgtccctgcaaggcgagttccagaggaagctttacaaggagctggtcaagaactacaatcccttggagaggcccgtggccaatgactcgcaaccactcaccgtctacttctccctgagcctcctgcagatcatggacgtggatgagaagaaccaagttttaaccaccaacatttggctgcaaatgtcttggacagatcactatttacagtggaatgtgtcagaatatccaggggtgaagactgttcgtttcccagatggccagatttggaaaccagacattcttctctataacagtgctgatgagcgctttgacgccacattccacactaacgtgttggtgaattcttctgggcattgccagtacctgcctccaggcatattcaagagttcctgctacatcgatgtacgctggtttccctttgatgtgcagcactgcaaactgaagtttgggtcctggtcttacggaggctggtccttggatctgcagatgcaggaggcagatatcagtggctatatccccaatggagaatgggacctagtgggaatccccggcaagaggagtgaaaggttctatgagtgctgcaaagagccctaccccgatgtcaccttcacagtgaccatgcgccgcaggacgctctactatggcctcaacctgctgatcccctgtgtgctcatctccgccctcgccctgctggtgttcctgcttcctgcagattccggggagaagatttccctggggataacagtcttactctctcttaccgtcttcatgctgctcgtggctgagatcatgcccgcaacatccgattcggtaccattgatagcccagtacttcgccagcaccatgatcatcgtgggcctctcggtggtggtgacagtgatcgtgctgcagtaccaccaccacgaccccgacgggggcaagatgcccaagtggaccagagtcatccttctgaactggtgcgcgtggttcctgcgaatgaagaggcccggggaggacaaggtgcgcccggcctgccagcacaagcagcggcgctgcagcctggccagtgtggagatgagcgccgtggcgccgccgcccgccagcaacgggaacctgctgtacatcggcttccgcggcctggacggcgtgcactgtgtcccgacccccgactctggggtagtgtgtggccgcatggcctgctcccccacgcacgatgagcacctcctgcacggcgggcaaccccccgagggggacccggacttggccaagatcctggaggaggtccgctacattgccaaccgcttccgctgccaggacgaaagcgaggcggtctgcagcgagtggaagttcgccgcctgtgtggtggaccgcctgtgcctcatggccttctcggtcttcaccatcatctgcaccatcggcatcctgatgtcggctcccaacttcgtggaggccgtgtccaaagactttgcgtaaccacgcctggttctgtacatgtggaaaactcacagatgggcaaggcctttggcttggcgagatttgggggtgctaatccaggacagcattacacgccacaactccagtgttcccttctggctgtcagtcgtgttgcttacggtttctttgttactttaggtagtagaatctcagcactttgtttcatattctcagatgggctgatagatatccttggcacatccgtaccatcggtcagcagggccactgagtagtcattttgcccattagcccactgcctggaaagcccttcggagagctccccatggctcctcaccaccgagacagttggttttgcatgtctgcatgaaggtctacctgaaaattcaacatttgctttttgcttgtgtacaaacccagattgaagctaaaataaaccagactcactaaatcctttccaataattgactggtggaaggaaaacaaaaaacaaaaactaaaaacctcttagcttttctgcaattcaactttttatttttatttttatttctatcaaagacggtagagagaaacagcttgatgctgtttctacattaaaaaaaaaaaaaaaagacagactgttggtcttactaaggatgtttttaccagcctgcctgacttctgcaaacctaccctgtcaaggagatcaaagggacgcaggtttctgtttattctgaacaagggccaggccccgcggagtgtctttggtggatcccagataactcctaggtgctgctctcagacactgaggagttgagcaaatctgttctattctgcagaacccacaggacaaataagagttctactagaattaacagcccaaaagaatagctacagctaagtgaagccacttacgtgggctttaaaaaaataatgtgttagctgattcacatgcactggagttaattagtcttagaaatgtgtgcatccatacaaatgcacaacataaagtgaacatattcctaggccctttctgcctgtgtcagggccaggaagtagaggctgggaactcttctggtccccagtatggcaggcgccagggaggggatggtgtggcccatcccttctctggatacctggccagtggcaggcagcagggaggagctggccgaccctcagtgactgacaagccagcaattctgagttctggcctttgggagtctgcctgctccaagccagtccaccccagctgcagccccaaaagctggctcaaagtccttgggtggattcactggagatgggcaacttaaaacaagagaaactttaatttttaaacctaagtgatgatacagctcttcccttagattatcgcccaggctggagtgcagtggcatgatctcagctcactgcaagctccacctcctgggttcatgccattctcctgcctcagcctccccccgagtaactgggaatacaggcgcccgccaccatgcctggctaattttttgtatttttagtagagatagggtttcatcatgttagccaggatggtctcattcttattctttaatgagatcagagggtaattcaccaagaaagacctctcctgttccattgtgtcatccaacaactgctcagagctcaaaattatagaaggcttctgagcccctagagatttttaatttgcttctaatccctgaggtgggaacatcatgagggaagatttgattttcagagttaaataaattgtatgtgcttttccagccatctggctcactcatttctgggtaatgcacatgactttgtttgcactggaggaagatggaagcttgcgtgtgtgcggtgtgtgtgtgtgtgtaagtgtgaggtaccttgtgtgtgacaagagacctcacttacgagaaagttggtggatcaggacattccagcctcaggcggcttggagcaggatcattcctcagcaggcattccttccacatgctatggatgaaccatgcacaagattttcggtttttttttttttttctgttacagtgtctttagaaacaagtagaagtgttttgatatataaaaggaatgcttcatttcttatcattatcccaaaattgatccctcccacatttttgctttaaaaagaaacctttttggttttgtattttatacaggaacacaaaatgcaaacaagttgtgcatattttggactctcaaataacttctctgtcctttaataaagtaataataaggaatagatgtgcacatagttagaaaagtatgagtggttaaaaacaacagtctcccatactgcctgttttctctctcagaggggaccactaatgagcttctaagggcatttctagaaaggaagaaaagaagataagaggccaaagaaggagggacgggggttatggagagagaccttccctttccagcactaacgctctgtgaagggcgctgcaccttgcattcttcatgtggtgttttgtcttagaggtcgtcccataataacatataaagatctacctcattcctcctagtagctgcttagcattccattatctcagcggactatcatttatttgaatagccttttattggtgaacatatggatacttccagtttttatttttatatacaaatctataattggcatacttgtacatacatcttgacatagttttgtgactaaaacggtataaattccaacttagaaatggaattgctgggtttaaggctacatgtatttaaaattttgatagctattgccagattatcttctagaaactgatcgaaggatgtaactccatcaagagtacaataaaaggcccaatttctcagctttctataatagcactgggtattttcaaacttaatgtttttcccaatataattggtgaaacatgatatttacgaatattattctgattttggtttattttgtgtataaaatgggacatcttttaaaatttttttgtagttttaattttgatacatttatatattttacccagttcctaattgggttatttggctttttcttaatttgctcatgcactttgggacatttttgtcttatgtctttaaaatatttttatcatttgtctttcgatgttatttattgatttccttatttattggcatagagtttaaatttttatgttgtcaatttgtgagtatttttctttgtcgatcgtgggatttgtttccagtttttaaaagccttcctcattctgagattataaatagacttactcgcattttcttctgaaactttatggttttattggtttaccttcacatcttcagactccctggaattcatttgttgcaggacatgagggaaaaatccatactttttcctcgaaatggtggtcagcagtatcaataaatatgtaataatgcatttctaaaatacagtcatagtgttttccccagttgttcaaaatgcagccttatttgtaaactaaatttctttaagtgtttggttctgtttctgttctatttatctctatgaatgcctttcatttctaaagcattattcatactaatatcagtattttcaagtcaacactcccatcaactctgaatctctctctcatatgaatcttttttcaattagagtcacaatgaatttacagattgagtcttcctattcaaaagcatgaaatcttgtgtttaagtctaattttatgtaacttagtagtgttttatgattttgttcactaaggtgctttgaatttatagtttatttctagatgttttatcatttggctatcattttcaatagaatgatttattccactttattttctattttatcccattgtataagaaagtagttggtttttatgtatgaatgttataatcaaccacaaattgtgattcctacttgtttctaaggtatacttttgacttctcctttccaatgtgtctcttatttctttcttgtatctagttgatttgagatcagtgttgagtcacagtgattcaggtggcatgcttatcttgttcgtgacatcagtgggacgttttaatgtctcagcgtttaacttgtatgaagacatgtattttccttgccataataaaaaagtatctgtgtgttctcaaa

SEQ ID NO: 5787 - DNA, 773 bp, Homo sapiens
  source 1..773: mol_type = unassigned DNA
atgcaaaaatattgcatctaccagcattttcagttccaattgctaatccagcatttgtggatagctgcaaactgtgatatatgggccaaggttgctcgggtgattggtttactggcttcgcacaaaactgatctccaggaaaatacacctgttgttgaggccttccctaacagtcccagaactcctacattgcctggtgtgctgacctaaagccctcattaagaccagtaacaaatcaagcctatcttatcaactgacaacacattctggaaccatggcgtgtccatggataagacatgaagtccttctttcaagacttggttttctggtactggaaaataccaatatggataaaagaccttcaaagctgctacgatgggtaaggaacaatgcacacagtataccattaaggcaaagaagatagtcttaatcctgtatgaaatgccaatgaagatgtaattaatgaatagacatttcattgaaatgaaatcaaaagacattttccttctctgacataacagagtagaactctctagtaagaacacaaaactgaccagcctgaccaatgtgataaaaccccctgtctctactaaaaagacaaaaattagccatgcatggtagcagatgcttgtaatcccagctactcaagaggctcaggcatgagaatctcttgaacccaaaaggtggaggctgcagtgagtcgagatcgcacaactgcacttcaccctgggcgacaaagcaagactttgttttttaaaaaaaagaagaagaag

SEQ ID NO: 5788 - DNA, 1239 bp, Homo sapiens
  source 1..1239: mol_type = unassigned DNA
atgcaaaaatattgcatctaccagcattttcagttccaattgctaatccagcatttgtggatagctgcaaactgtgatattgctgatgagcgctttgacgccacattccacactaacgtgttggtgaattcttctgggcattgccagtacctgcctccaggcatattcaagagttcctgctacatcgatgtacgctggtttccctttgatgtgcagcactgcaaactgaagtttgggtcctggtcttacggaggctggtccttggatctgcagatgcaggaggcagatatcagtggctatatccccaatggagaatgggacctagtgggaatccccggcaagaggagtgaaaggttctatgagtgctgcaaagagccctaccccgatgtcaccttcacagtgaccatgcgccgcaggacgctctactatggcctcaacctgctgatcccctgtgtgctcatctccgccctcgccctgctggtgttcctgcttcctgcagattccggggagaagatttccctggggataacagtcttactctctcttaccgtcttcatgctgctcgtggctgagatcatgcccgcaacatccgattcggtaccattgatagcccagtacttcgccagcaccatgatcatcgtgggcctctcggtggtggtgacagtgatcgtgctgcagtaccaccaccacgaccccgacgggggcaagatgcccaagtggaccagagtcatccttctgaactggtgcgcgtggttcctgcgaatgaagaggcccggggaggacaaggtgcgcccggcctgccagcacaagcagcggcgctgcagcctggccagtgtggagatgagcgccgtggcgccgccgcccgccagcaacgggaacctgctgtacatcggcttccgcggcctggacggcgtgcactgtgtcccgacccccgactctggggtagtgtgtggccgcatggcctgctcccccacgcacgatgagcacctcctgcacggcgggcaaccccccgagggggacccggacttggccaagatcctggaggaggtccgctacattgccaaccgcttccgctgccaggacgaaagcgaggcggtctgcagcgagtggaagttcgccgcctgtgtggtggaccgcctgtgcctcatggccttctcggtcttcaccatcatctgcaccatcggcatcctgatgtcggctcccaacttcgtggaggccgtgtccaaagactttgcgtaa

SEQ ID NO: 5789 - DNA, 516 bp, Homo sapiens
  source 1..516: mol_type = unassigned DNA
ggccgcaggcgcaggcccgggcgacagccgagacgtggagcgcgccggctcgctgcagctccgggactcaacatgcgctgctcgccgggaggcgtctggctggcgctggccgcgtcgctcctgcacgtgtccctgcaaggcgagttccagaggaagctttacaaggagctggtcaagaactacaatcccttggagaggcccgtggccaatgactcgcaaccactcaccgtctacttctccctgagcctcctgcagatcatggacgtggatgagaagaaccaagttttaaccaccaacatttggctgcaaatgtcttggacagatcactatttacagtggaatgtgtcagaatatccaggggtgaagactgttcgtttcccagatggccagatttggaaaccagacattcttctctataacagcagttatgaccaacagcaggaagtgctggcctatgggatgcactgctggagcccacagtttggacccacatcctcgtctatgttccctgttgtg

SEQ ID NO: 5790 - DNA, 1855 bp, Homo sapiens
  source 1..1855: mol_type = unassigned DNA
atgaccaacagcaggaagtgctggcctatgggatgcactgctggagcccacagtttggacccacatcctcgtctatgttccctgttgtgcattggagagttctgtggcagagatggctgcagtgctgatgagcgctttgacgccacattccacactaacgtgttggtgaattcttctgggcattgccagtacctgcctccaggcatattcaagagttcctgctacatcgatgtacgctggtttccctttgatgtgcagcactgcaaactgaagtttgggtcctggtcttacggaggctggtccttggatctgcagatgcaggaggcagatatcagtggctatatccccaatggagaatgggacctagtgggaatccccggcaagaggagtgaaaggttctatgagtgctgcaaagagccctaccccgatgtcaccttcacagtgaccatgcgccgcaggacgctctactatggcctcaacctgctgatcccctgtgtgctcatctccgccctcgccctgctggtgttcctgcttcctgcagattccggggagaagatttccctggggataacagtcttactctctcttaccgtcttcatgctgctcgtggctgagatcatgcccgcaacatccgattcggtaccattgatagcccagtacttcgccagcaccatgatcatcgtgggcctctcggtggtggtgacagtgatcgtgctgcagtaccaccaccacgaccccgacgggggcaagatgcccaagtggaccagagtcatccttctgaactggtgcgcgtggttcctgcgaatgaagaggcccggggaggacaaggtgcgcccggcctgccagcacaagcagcggcgctgcagcctggccagtgtggagatgagcgccgtggcgccgccgcccgccagcaacgggaacctgctgtacatcggcttccgcggcctggacggcgtgcactgtgtcccgacccccgactctggggtagtgtgtggccgcatggcctgctcccccacgcacgatgagcacctcctgcacggcgggcaaccccccgagggggacccggacttggccaagatcctggaggaggtccgctacattgccaaccgcttccgctgccaggacgaaagcgaggcggtctgcagcgagtggaagttcgccgcctgtgtggtggaccgcctgtgcctcatggccttctcggtcttcaccatcatctgcaccatcggcatcctgatgtcggctcccaacttcgtggaggccgtgtccaaagactttgcgtaaccacgcctggttctgtacatgtggaaaactcacagatgggcaaggcctttggcttggcgagatttgggggtgctaatccaggacagcattacacgccacaactccagtgttcccttctggctgtcagtcgtgttgcttacggtttctttgttactttaggtagtagaatctcagcactttgtttcatattctcagatgggctgatagatatccttggcacatccgtaccatcggtcagcagggccactgagtagtcattttgcccattagcccactgcctggaaagcccttcggagagctccccatggctcctcaccaccgagacagttggttttgcatgtctgcatgaaggtctacctgaaaattcaacatttgctttttgcttgtgtacaaacccagattgaagctaaaataaaccagactcactaaatcctttccaataattgactggtggaaggaaaacaaaaaacaaaaactaaaaacctcttagcttttctgcaattcaactttttatttttatttttatttctatcaaagacggtagagagaaacagcttgatgctgtttctacatt

SEQ ID NO: 5791 - DNA, 3428 bp, Homo sapiens
  source 1..3428: mol_type = unassigned DNA
aaaggcgcgcgagccgagcggcgaggtgcctctgtggccgcaggcgcaggcccgggcgacagccgagacgtggagcgcgccggctcgctgcagctccgggactcaacatgcgctgctcgccgggaggcgtctggctggcgctggccgcgtcgctcctgcacggtaaagccactgcctccccgccctccactcctccgtgggatcccgggcacatcccgggcgcctctgtgcgccccgcgcctgggccagtgtccctgcaaggcgagttccagaggaagctttacaaggagctggtcaagaactacaatcccttggagaggcccgtggccaatgactcgcaaccactcaccgtctacttctccctgagcctcctgcagatcatggacgtggatgagaagaaccaagttttaaccaccaacatttggctgcaaatgtcttggacagatcactatttacagtggaatgtgtcagaatatccaggggtgaagactgttcgtttcccagatggccagatttggaaaccagacattcttctctataacagtgctgatgagcgctttgacgccacattccacactaacgtgttggtgaattcttctgggcattgccagtacctgcctccaggcatattcaagagttcctgctacatcgatgtacgctggtttccctttgatgtgcagcactgcaaactgaagtttgggtcctggtcttacggaggctggtccttggatctgcagatgcaggaggcagatatcagtggctatatccccaatggagaatgggacctagtgggaatccccggcaagaggagtgaaaggttctatgagtgctgcaaagagccctaccccgatgtcaccttcacagtgaccatgcgccgcaggacgctctactatggcctcaacctgctgatcccctgtgtgctcatctccgccctcgccctgctggtgttcctgcttcctgcagattccggggagaagatttccctggggataacagtcttactctctcttaccgtcttcatgctgctcgtggctgagatcatgcccgcaacatccgattcggtaccattgatagcccagtacttcgccagcaccatgatcatcgtgggcctctcggtggtggtgacagtgatcgtgctgcagtaccaccaccacgaccccgacgggggcaagatgcccaagtggaccagagtcatccttctgaactggtgcgcgtggttcctgcgaatgaagaggcccggggaggacaaggtgcgcccggcctgccagcacaagcagcggcgctgcagcctggccagtgtggagatgagcgccgtggcgccgccgcccgccagcaacgggaacctgctgtacatcggcttccgcggcctggacggcgtgcactgtgtcccgacccccgactctggggtagtgtgtggccgcatggcctgctcccccacgcacgatgagcacctcctgcacggcgggcaaccccccgagggggacccggacttggccaagatcctggaggaggtccgctacattgccaaccgcttccgctgccaggacgaaagcgaggcggtctgcagcgagtggaagttcgccgcctgtgtggtggaccgcctgtgcctcatggccttctcggtcttcaccatcatctgcaccatcggcatcctgatgtcggctcccaacttcgtggaggccgtgtccaaagactttgcgtaaccacgcctggttctgtacatgtggaaaactcacagatgggcaaggcctttggcttggcgagatttgggggtgctaatccaggacagcattacacgccacaactccagtgttcccttctggctgtcagtcgtgttgcttacggtttctttgttactttaggtagtagaatctcagcactttgtttcatattctcagatgggctgatagatatccttggcacatccgtaccatcggtcagcagggccactgagtagtcattttgcccattagcccactgcctggaaagcccttcggagagctccccatggctcctcaccaccgagacagttggttttgcatgtctgcatgaaggtctacctgaaaattcaacatttgctttttgcttgtgtacaaacccagattgaagctaaaataaaccagactcactaaatcctttccaataattgactggtggaaggaaaacaaaaaacaaaaactaaaaacctcttagcttttctgcaattcaactttttatttttatttttatttctatcaaagacggtagagagaaacagcttgatgctgtttctacattaaaaaaaaaaaaaaaagacagactgttggtcttactaaggatgtttttaccagcctgcctgacttctgcaaacctaccctgtcaaggagatcaaagggacgcaggtttctgtttattctgaacaagggccaggccccgcggagtgtctttggtggatcccagataactcctaggtgctgctctcagacactgaggagttgagcaaatctgttctattctgcagaacccacaggacaaataagagttctactagaattaacagcccaaaagaatagctacagctaagtgaagccacttacgtgggctttaaaaaaataatgtgttagctgattcacatgcactggagttaattagtcttagaaatgtgtgcatccatacaaatgcacaacataaagtgaacatattcctaggccctttctgcctgtgtcagggccaggaagtagaggctgggaactcttctggtccccagtatggcaggcgccagggaggggatggtgtggcccatcccttctctggatacctggccagtggcaggcagcagggaggagctggccgaccctcagtgactgacaagccagcaattctgagttctggcctttgggagtctgcctgctccaagccagtccaccccagctgcagccccaaaagctggctcaaagtccttgggtggattcactggagatgggcaacttaaaacaagagaaactttaatttttaaacctaagtgatgatacagctcttcccttagattatcgcccaggctggagtgcagtggcatgatctcagctcactgcaagctccacctcctgggttcatgccattctcctgcctcagcctccccccgagtaactgggaatacaggcgcccgccaccatgcctggctaattttttgtatttttagtagagatagggtttcatcatgttagccaggatggtctcattcttattctttaatgagatcagagggtaattcaccaagaaagacctctcctgttccattgtgtcatccaacaactgctcagagctcaaaattatagaaggcttctgagcccctagagatttttaatttgcttctaatccctgaggtgggaacatcatgagggaagatttgattttcagagttaaataaattgtatgtgcttttccagcca

SEQ ID NO: 5792 - DNA, 1785 bp, Homo sapiens
  source 1..1785: mol_type = unassigned DNA
cgtggagcgcgccggctcgctgcagctccgggactcaacatgcgctgctcgccgggaggcgtctggctggcgctggccgcgtcgctcctgcacgtgtccctgcaaggcgagttccagaggaagctttacaaggagctggtcaagaactacaatcccttggagaggcccgtggccaatgactcgcaaccactcaccgtctacttctccctgagcctcctgcagatcatggacgtggatgagaagaaccaagttttaaccaccaacatttggctgcaaatggcatattcaagagttcctgctacatcgatgtacgctggtttccctttgatgtgcagcactgcaaactgaagtttgggtcctggtcttacggaggctggtccttggatctgcagatgcaggaggcagatatcagtggctatatccccaatggagaatgggacctagtgggaatccccggcaagaggagtgaaaggttctatgagtgctgcaaagagccctaccccgatgtcaccttcacagtgaccatgcgccgcaggacgctctactatggcctcaacctgctgatcccctgtgtgctcatctccgccctcgccctgctggtgttcctgcttcctgcagattccggggagaagatttccctggggataacagtcttactctctcttaccgtcttcatgctgctcgtggctgagatcatgcccgcaacatccgattcggtaccattgatagcccagtacttcgccagcaccatgatcatcgtgggcctctcggtggtggtgacagtgatcgtgctgcagtaccaccaccacgaccccgacgggggcaagatgcccaagtggaccagagtcatccttctgaactggtgcgcgtggttcctgcgaatgaagaggcccggggaggacaaggtgcgcccggcctgccagcacaagcagcggcgctgcagcctggccagtgtggagatgagcgccgtggcgccgccgcccgccagcaacgggaacctgctgtacatcggcttccgcggcctggacggcgtgcactgtgtcccgacccccgactctggggtagtgtgtggccgcatggcctgctcccccacgcacgatgagcacctcctgcacggcgggcaaccccccgagggggacccggacttggccaagatcctggaggaggtccgctacattgccaaccgcttccgctgccaggacgaaagcgaggcggtctgcagcgagtggaagttcgccgcctgtgtggtggaccgcctgtgcctcatggccttctcggtcttcaccatcatctgcaccatcggcatcctgatgtcggctcccaacttcgtggaggccgtgtccaaagactttgcgtaaccacgcctggttctgtacatgtggaaaactcacagatgggcaaggcctttggcttggcgagatttgggggtgctaatccaggacagcattacacgccacaactccagtgttcccttctggctgtcagtcgtgttgcttacggtttctttgttactttaggtagtagaatctcagcactttgtttcatattctcagatgggctgatagatatccttggcacatccgtaccatcggtcagcagggccactgagtagtcattttgcccattagcccactgcctggaaagcccttcggagagctccccatggctcctcaccaccgagacagttggttttgcatgtctgcatgaaggtctacctgaaaattcaacatttgctttttgcttgtgtacaaacccagattgaagctaaaataaaccagactcact

SEQ ID NO: 5793 - DNA, 2276 bp, Homo sapiens
  source 1..2276: mol_type = unassigned DNA
atgcaatgcaagcctgagctctcccgccataaggctgcagcggtgtgggctccttgtgcccagatcctttgtattcatagggggaagtggaagaccacgctgcctgactgagactttattatagaggctcaggaaaaagatgaactggtcccattcctgcatctccttttgctggatctactttgctgcttccagactgagagctgcagagacggcagatggaaaatatgctcagaagttgtttaatgacctttttgaagattattctaatgctcttcgtccagtggaagatacagataaagtcctgaatgtgaccctgcagattacgctctctcagattaaggatatggatgaaagaaaccaaattctgactgcttatttgtggatccgccaaatctggcacgatgcctatctcacgtgggaccgagatcagtacgatggcctagactccatcaggatccccagtgacctcgtgtggaggccagacatcgtcttatataacaaggctgatgatgaatcttcagagcctgtgaacaccaatgtggtcctgcggtatgatgggctgatcacctgggatgcaccggccatcaccaaaagctcctgtgtggtggatgtcacctacttcccttttgacaaccagcagtgcaacctgacttttggttcctggacctacaatggcaatcaggtggacatattcaacgccttggacagcggagatctctctgacttcattgaagatgtggaatgggaggtccatggcatgcccgctgtgaagaatgtgatctcctatggctgctgctctgagccttacccggatgtcacattcaccctccttctgaagaggaggtcctcgttctatatcgtcaacctcctcatcccatgcgtcctcatatcttttctggctcctctgagtttttatctcccagcagcctccggagaaaaggtctccctgggagtgaccatcctgttggccatgactgtatttcagctaatggtggcagaaatcatgccggcctcagaaaatgtgcccctgataggtaaatactacatagccacgatggccctgatcacagcctccactgcgttgaccatcatggtgatgaatatccacttctgtggggccgaggcccggccggtgccacactgggccagggtggtcatcctgaaatacatgtccagggtcttgtttgtctatgatgtgggtgaaagctgcctcagcccgcaccacagtagagagcgggaccacctcacgaaagtttatagcaaactcccagagtctaacctgaaagcagccaggaacaaagacctttccagaaagaaggacatgaacaaacgcttaaagaacgacctgggctgccagggtaagaaccctcaggaggccgagagttactgtgcacagtacaaagtgctgacgaggaatattgagtacatcgccaagtgcctcaaagaccacaaggccaccaattccaaggggagtgaatggaagaaggtggcgaaagtcatagaccgattcttcatgtggatttttttcattatggtgtttgtgatgactattttgatcatagcaagagcggattagtcacagatattggctttgctatctgggtagaaattaatacaattccctgtgatctattccaatgttcttccaagatttttgttcatctataatttaggggttatgttgtctgtgctttttatttttagcttcaaatgaatgtcgaagctatctgctctgttaaattaagcagaagaaccaaaatttcaagggtaggaagatggaagaaatagggaaagagcccttttatagcccaccgtagtggtgggtgactggcctctagtttatataattatttacctctttggcagtacagataacaaaatacactttactggtaaaatttaaaacaaaaaaggcaaaacaaaacaaactcattttccccttagttcccattaaaatatgcatttgaaaaatgaaatagtcatatatatattagtgtgatttaagtctcaatggtaccttattcaggcatagtgcatttgaagtcatatctcaaatagtggaataaaaggttttgtcccatgtaaagaaagtctaagcatcagctgtttaatggggaaaagaactttcttcataatggtgatgtcgtatatgttggttatgttttatataaacccaaaagatgaagtcattcctgcatttaccctttgattaaaatatgatagatgaagctgttcctgcatttagtcttgtattaaaataaggtgattagcaa

SEQ ID NO: 5794 - DNA, 2557 bp, Homo sapiens
  source 1..2557: mol_type = unassigned DNA
gtcacttcccctgtgctggcggtcccagcggctctctgagcgaagtcactgagcgagccgccaggctatgaccccaggggctctgctgatgctgctgggggcgctgggggcgccgctcgccccaggcgtccgcggctcggaggcggagggtcgactccgggagaaacttttctctggctatgatagctccgtgcggccagcgcgggaggtgggagaccgtgtcagggtcagcgttggtctcatcctggcgcaactcatcagcctgaacgagaaggatgaagagatgagcacaaaggtgtacttagacctggagtggactgactacaggctgagctgggaccctgcggagcacgacggcatcgattcgctccgcatcacggcggaatccgtgtggctccctgacgtggtgctactgaacaacaatgatgggaattttgacgtggctctggacattagcgtcgtggtgtcctccgacggctccgtgcgttggcaacccccgggcatctatcgcagcagctgcagcatccaggtcacctacttccccttcgactggcagaattgcactatggtgttcagctcctacagctacgacagctcggaggtcagcctgcagacaggcctgggtcctgacgggcaagggcatcaggaaatccacattcatgaagggactttcattgagaatggccagtgggagattatccacaagccctctcggctaatccagcctccaggcgatcctaggggagggagggaaggacagcgccaggaagtcatcttctacctcatcatccgccgcaagcctctcttctacctggtcaacgtcattgccccatgcatcctcatcactcttctggccatcttcgtcttctacctgccaccagatgcaggagagaagatggggctctcaatctttgccctgctgacccttactgtgttcctgctgctgctggctgacaaagtacctgagacctcactatcagtacccattattatcaagtacctcatgtttaccatggtcctcgtcaccttctcagtcatccttagtgtcgtggttctcaacctgcaccaccgctcaccccacacccaccaaatgcccctttgggtccgtcagatcttcattcacaaacttccgctgtacctgcgtctaaaaaggcccaaacccgagagagacctgatgccggagccccctcactgttcttctccaggaagtggctggggtcggggaacagatgaatatttcatccggaagccgccaagtgattttctcttccccaaacccaataggttccagcctgaactgtctgcccctgatctgcggcgatttatcgatggtccaaaccgggctgtggccctgcttccggagctacgggaggtcgtctcctctatcagctacatcgctcgacagctgcaggaacaggaggaccacgatgcgctgaaggaggactggcagtttgtggccatggtagtggaccgcctcttcctgtggactttcatcatcttcaccagcgttgggaccctagtcatcttcctggacgccacgtaccacttgccccctccagacccctttccttgaagactggagggttgagacccaggccccctgccagttgaagtgagagtttggtgatactgtcaagccctatccttctctgcctcttaactccttcacgaggaatctgggcctcttatttcgtttctggggactgcattggactgagggctgggtaggcaggtgtcttggacccacctgaaatgcagtatcatctgatttactctttgggatcttgaagaagctcttttgggtatcaacacctaggtcgccagtgaaatagaacacagaacaggaactagattataagccttatgaggtcaagaaatgtgacttggccgggcgcggtggctcacgcctgtaatcccagcactttgggaggccaaggcgggcggatcacctgaggtcgggagtttgagaccagcccgaccaacatggagaaaccctgtctctactaaaaatacaaaattagccaggtgtggtggtacatgcctgtaatcccagctactagggaggctgaggcaggagaatcactcgaacccgggaggcagaggttgcagtgagtcaagatcacgccattgcactccagcctgggcaacaagagcgaaactccatctcaaaaaaaaaaaagtgtcttgttcactgcagcatgcccagtgccacgcacaggtgctgacctatagtaagtgcttaacatttgttgaataggggaaagaaatttccggaagtaaatacagcaattaataatgtttataagctgggcatggtcgctcaggccagtaatcccagtgacttaggaggctgaggtgggaggattacttgaaacccacagtttgagaccagcctgggcaacatagtgagaccctgtctctaaaaaaataaaaatagaaataaagtagtgcttattgtttgcatgttgggtcttgtggtcgttttctttttacctttctgtaatttattatgttttgtaatgtgtactatctctgggattaaaaaaagttatttcta

SEQ ID NO: 5795 - DNA, 1604 bp, Homo sapiens
  source 1..1604: mol_type = unassigned DNA
gagatggaccagcctttggtgaagattggatcgaaatcagaccaatggacaagctctggccgtgggtggtggacgggcctggagtagaactggaacgagaaggatgaagagatgagcacaaaggtgtacttagacctggagtggactgactacaggctgagctgggaccctgcggagcacgacggcatcgattcgctccgcatcacggcggaatccgtgtggctccctgacgtggtgctactgaacaacaatgatgggaattttgacgtggctctggacattagcgtcgtggtgtcctccgacggctccgtgcgttggcaacccccgggcatctatcgcagcagctgcagcatccaggtcacctacttccccttcgactggcagaattgcactatggtgttcagctcctacagctacgacagctcggaggtcagcctgcagacaggcctgggtcctgacgggcaagggcatcaggaaatccacattcatgaagggactttcattgagaatggccagtgggagattatccacaagccctctcggctaatccagcctccaggcgatcctaggggagggagggaaggacagcgccaggaagtcatcttctacctcatcatccgccgcaagcctctcttctacctggtcaacgtcattgccccatgcatcctcatcactcttctggccatcttcgtcttctacctgccaccagatgcaggagagaagatggggctctcaatctttgccctgctgacccttactgtgttcctgctgctgctggctgacaaagtacctgagacctcactatcagtacccattattatcaagtacctcatgtttaccatggtcctcgtcaccttctcagtcatccttagtgtcgtggttctcaacctgcaccaccgctcaccccacacccaccaaatgcccctttgggtccgtcagatcttcattcacaaacttccgctgtacctgcgtctaaaaaggcccaaacccgagagagacctgatgccggagccccctcactgttcttctccaggaagtggctggggtcggggaacagatgaatatttcatccggaagccgccaagtgattttctcttccccaaacccaataggttccagcctgaactgtctgcccctgatctgcggcgatttatcgatggtccaaaccgggctgtggccctgcttccggagctacgggaggtcgtctcctctatcagctacatcgctcgacagctgcaggaacaggaggaccacgatgcgctgaaggaggactggcagtttgtggccatggtagtggaccgcctcttcctgtggactttcatcatcttcaccagcgttgggaccctagtcatcttcctggacgccacgtaccacttgccccctccagacccctttccttgaagactggagggttgagacccaggccccctgccagttgaagtgagagtttggtgatactgtcaagccctatccttctctgcctcttaactccttcacgaggaatctgggcctcttatttcgtttctggggactgcattggactgagggctgggtaggcaggtgtcttggacccacctgaaatgcagtatcatctgatttactct

SEQ ID NO: 5796 - DNA, 5867 bp, Homo sapiens
  source 1..5867: mol_type = unassigned DNA
ctcctccccctcaccgtcccaattgtattccctggaagagcagccggaaaagcctccgcctgctcataccaggataggcaagaagctggtttctcctcgcagccggctccctgaggcccaggaaccaccgcggcggccggcaccacctggacccagctccaggcgggcgcggcttcagcaccacggacagcgccccacccgcggccctccccccggcggcgcgctccagccggtgtaggcgaggcagcgagctatgcccgcggcatggcccggcgctgcggccccgtggcgctgctccttggcttcggcctcctccggctgtgctcaggggtgtggggtacggatacagaggagcggctggtggagcatctcctggatccttcccgctacaacaagcttatccgcccagccaccaatggctctgagctggtgacagtacagcttatggtgtcactggcccagctcatcagtgtgcatgagcgggagcagatcatgaccaccaatgtctggctgacccaggagtgggaagattatcgcctcacctggaagcctgaagagtttgacaacatgaagaaagttcggctcccttccaaacacatctggctcccagatgtggtcctgtacaacaatgctgacggcatgtacgaggtgtccttctattccaatgccgtggtctcctatgatggcagcatcttctggctgccgcctgccatctacaagagcgcatgcaagattgaagtaaagcacttcccatttgaccagcagaactgcaccatgaagttccgttcgtggacctacgaccgcacagagatcgacttggtgctgaagagtgaggtggccagcctggacgacttcacacctagtggtgagtgggacatcgtggcgctgccgggccggcgcaacgagaaccccgacgactctacgtacgtggacatcacgtatgacttcatcattcgccgcaagccgctcttctacaccatcaacctcatcatcccctgtgtgctcatcacctcgctagccatccttgtcttctacctgccatccgactgtggcgagaagatgacgttgtgcatctcagtgctgctggcgctcacggtcttcctgctgctcatctccaagatcgtgcctcccacctccctcgacgtgccgctcgtcggcaagtacctcatgttcaccatggtgcttgtcaccttctccatcgtcaccagcgtgtgcgtgctcaacgtgcaccaccgctcgcccaccacgcacaccatggcgccctgggtgaaggtcgtcttcctggagaagctgcccgcgctgctcttcatgcagcagccacgccatcattgcgcccgtcagcgcctgcgcctgcggcgacgccagcgtgagcgcgagggcgctggagccctcttcttccgcgaagccccaggggccgactcctgcacgtgcttcgtcaaccgcgcgtcggtgcaggggttggccggggccttcggggctgagcctgcaccagtggcgggccccgggcgctcaggggagccgtgtggctgtggcctccgggaggcggtggacggcgtgcgcttcatcgcagaccacatgcggagcgaggacgatgaccagagcgtgagtgaggactggaagtacgtcgccatggtgatcgaccgcctcttcctctggatctttgtctttgtctgtgtctttggcaccatcggcatgttcctgcagcctctcttccagaactacaccaccaccaccttcctccactcagaccactcagcccccagctccaagtgaggcccttcctcatctccatgctctttcaccctgccaccctctgctgcacagtagtgttgggtggaggatggacgagtgagctaccaggaagaggggcgctgcccccacagatccatccttttgcttcatctggagtccctcctcccccacgcctccatccacacacagcagctccaacctggaggctggaccaactgctttgttttggctgctctccatctcttgtaccagcccaggcaatagtgttgaggaggggagcaaggctgctaagtggaagacagagatggcagagccatccaccctgaggagtgatgggcaaggggccaggaaggggacaggattgtctgctgcctccaagtcatgggagaagaggggtataggacaaggggtggaagggcaggagctcacaccgcaccgggctggcctgacacaatggtagctctgaagggaggggaagagagaggcctgggtgtgacctgacacctgccgctgcttgagtggacagcagctggactgggtgggccccacagtggtcagcgattcctgccaagtagggtttagccgggccccatggtcacagacccctgggggaggcttccagctcagtcccacagccccttgcttctaagggatccagagacctgctccagatcctctttccccactgaagaattctgcaccctctggacttccctcttcttccttcctttctcaggctcaaggtgtggggggcaaggctgagtattaggggagcttctgagttctgaatctttgggtgacctgcttggagtctcaggtccaaatacttgaaatctgtgagaagtccaagttcatgggcttttggaactggaagaactttgtacagccatggattccaacataagccatgttgcagatgaagaaactgacccacacggtgagacaagcacaggtgggtctgactcttcctccctgccctgagatccatctgtcgagtgccctgttttttccccactttgaactgactggttactctaaggaagtgaactgaggatgttagctttaagccaacccagcctctttgtccacagcagagctgaggtgaacagctggaaccctgctacatccgtgctgctccagtctgttctgctcatggctccatccttctggctgtcactcttcctcttccccttcccaaccaaacctgagcagctttgaagcagaacttgggaaggacagggctgctgctgccagcgacacctcagaaagcatagcctcggcttcctgccccatgtgtccctggaagctgtaccctgactctgcttccagaggccagcagatggtgggttacagacgggtcagcctgccaagtgcacctgagggacctgacctgacacaagccattttgtccctagagcccagctgggactcctgcttctctaggcagggcagagggaggagacacagcacaggcacagagcatgggacagggacccccgagtctggattcaagtcctggccctgctagtaactcatgtgagccagcttgagcaagtcccttcatcttgctagagctcagcttccttgcctataaaacgtaggtggcaatgccctcttcctgaggttgctgggaggataaggcagtgcttgtgaaaaagtctagcgctgtacctggcacagagtagatgcttcatgaatgttgagtctgacaggcaactggagctggtgagaatggggtcccctgactgtcatgccagcctccctcccaggcccactcttcccccctcttccctgaggaaaccaagtctcccttatcaggaagagctgggggagctgggaggaacattacaggaacaccagagggagtctagcgggtgggcaggcttctctctgcagccccctcagcagtttcattccattcctgggctgaacccttgccctggccctgcctcccttctgggtcagcacctcctgacacaggtgtgtgctcagggaccccaggctctagtcctgtactggctgtggaagcctatcactgggacaggaagccagtggctgcaggagacaggcctcagcgcatctcgtctgtcaggatgggctcacggacaccttttcttggtagcagggagtgtctctgcactatggaaactttccctcttctagagcggattgggagttgcctgtattatgcctgaaccctccttgaactcatggtcctggggaaggcgtcttggaaccagaaacagcaacaggaaaggagcctccctctgaagggtaggatgccggcctgaggccctccctcttggctctcccagggcctgggctaccccgaggccccagcagctgctgctgtggctgtacttgcttttaatatttcccatacatggctgttgtccaagttaagtcaccaaatggtgctagaggggatggcagagagcagcttgtccagctcctctccatgacccggttaacacacgagtaaacaggcctagagcttgtctgctgtttgacctcttttaagacccggctgtgctgcatctacaaaatgaagatgacagagctagccgaggtcttcagcaaggaagaaaggggtcagtgtatatgaaagggttacctgggcagtgtcattccctccatctctgtacgcagccctttgggaaccatcacaataaggaagaggtgagggcagaggtgaaggatccactgcccaggcaaggtgctaccatgtggtgggagagtgtgaaccctcaagtgcactgggaagctttggggaaccacagtctcttccacccttgggtcgtgtgtcgtcctcttctcttgatgtcagggaagcccctatgcctccttcccgtggtggggctatctctgcagagaatcgggtgcccagcttaatgctgggcaaggactggaggaagctccagatctggaggtggcagagatactggatggaaacctggagcaagggtttgggaggggaagtgaggaaacaggttgagactatctccatcagagatggcaaggccacaggtgatctgagaactatttttgtctgaaaagaaggcatgcacaggctctctgcttttgacaggtggcgttgcagtgggaggaaggcagcttcctggcggggagatagaaatactagaacagctggtaccaagttattgaaaatttaaaagcaaacaagacacagcagcccccaggtggtgtgttctactgaggaaggctacggcagaggaagggcaagaccgtttcccccaatggtcttgaaacggaagaggaaacagggagggctctttggatggtttggggacctggggctgtttgtatcccagtattagctcctgttactaagggtctgctctgcgccaggtcctcagcatgcgttgtctttattccgcgtgacaatcctatgggaaggggcctccacctacgtaacagaaatgcggctcagaaagaccaagtgacagctagtgagtagtgctgggcctgaaccccaaagtccacactcttgctatagccgctgaggcaggcagaagagctccttgggaggaaagtaaggggcattcaaagccttctctgaatcactccccaagccagagtagacctggttccagttgtcccccccttgtttccgggcagagtcaggcaggtgtcataccatccctccccgcccaaccagtgctggccagactcccattcaccgaccttgactagacagcgaacagccaccttttagtattcatcccaacaggtccaggcggtcagtgtgatagccacgcagttcctaagggactgtaggtctaggaatcattaggacactcactcagccaccctcgatgcccccatcttccccacactgcccttggcctccccgctctgcacgcctggagtatttgcactggtctagcctactccaggtcagactcattaggaactcaagattctcgtaaagaaagttgtttccaaagttgtcttgtcactctatttgggggttgggagagagcccgtgggggccagcgttggcgaatacaggaaaaagggagaatgctggagaaactggactcgtgagagcttaaagacatcacaagaatccaaagaaaaagtgagtggtgaca

SEQ ID NO: 5797 - DNA, 2294 bp, Homo sapiens
  source 1..2294: mol_type = unassigned DNA
tgttgctgtcctcttgggttccacttcggattttgaacccctgtattttcttttcaaaacccccttttccagtggaaatgctctgttgttaaaaaggaagaaactgtctttctgaaactgacatcacgatgctcccagattttatgctggttctcatcgtccttggcatcccttcctcagccaccacaggtttcaactcaatcgccgaaaatgaagatgccctcctcagacatttgttccaaggttatcagaaatgggtccgccctgtattacattctaatgacaccataaaagtatattttggattgaaaatatcccagcttgtagatgtggatgaaaagaatcagctgatgacaaccaatgtgtggctcaaacaggaatggacagaccacaagttacgctggaatcctgatgattatggtgggatccattccattaaagttccatcagaatctctgtggcttcctgacatagttctctttgaaaatgctgacggccgcttcgaaggctccctgatgaccaaggtcatcgtgaaatcaaacggaactgttgtctggacccctcccgccagctacaaaagctcctgcaccatggacgtcacgtttttcccgttcgaccgacagaactgctccatgaagtttggatcctggacttatgatggcaccatggttgacctcattttgatcaatgaaaatgtcgacagaaaagacttcttcgataacggagaatgggaaatactgaacgcaaaggggatgaaggggaacagaagggacggcgtgtactcctatccctttatcacgtattccttcgtcctgagacgcctgcctttattctataccctctttctcatcatcccctgcctggggctgtctttcctaacagttcttgtgttctatttaccttcggatgaaggagaaaaactttcattatccacatcggtcttggtttctctgacagttttccttttagtgattgaagaaatcatcccatcgtcttccaaagtcattcctctcattggagagtacctgctgttcatcatgatttttgtgaccctgtccatcattgttaccgtgtttgtcattaacgttcaccacagatcttcttccacgtaccaccccatggccccctgggttaagaggctctttctgcagaaacttccaaaattactttgcatgaaagatcatgtggatcgctactcatccccagagaaagaggagagtcaaccagtagtgaaaggcaaagtcctcgaaaaaaagaaacagaaacagcttagtgatggagaaaaagttctagttgcttttttggaaaaagctgctgattccattagatacatttcgagacatgtgaagaaagaacattttatcagccaggtagtacaagactggaaatttgtagctcaagttcttgaccgaatcttcctgtggctctttctgatagtgtcagtaacaggctcggttctgatttttacccctgctttgaagatgtggctacatagttaccattaggaatttaaaagacataagactaaattacaccttagacctgacatctggctatcacacagacagaatccaaatgcatgtgcttgttctacgaaccccgaatgcgttgtctttgtggaaatggaacatctcctcatgggagaaactctggtaaatgtgctcatttgtggttgccatgagagtgagctgcttttaaagaaagtggagcctcctcagacccctgccttggctttcccagacattcagggagggatcataggtccaggcttgagctcacatgtggccagagtgcacaaaaagctgttgctacttggtggaggaacacctcctagaagcagcaggcctcggtggtgggggaggggggattcacctggaattaaggaagtctcggtgtcgagctatctgtgtgggcagagcctggatctcccaccctgcactggcctccttggtggttttgtctgagctgcaaactggggccgtgttatgcttgttagcaatgggccaggcaaatctcaacaagggtttggggattacactggcaggatagctggcactgcacacttaacaataacacagattccaagttgcctggcctaccgaagcaggtgttattcatggtttattcccagcatgataaggctttcagatggtgaaactggagcccactgtgagctgtgacttcctttaaggtcatgcataccaaaataactcacaatagaaacaaagccctttgctaccagaagtggattcattaatacccattatcttttcctagtaaactagtgtacagaa

SEQ ID NO: 5798 - DNA, 2623 bp, Homo sapiens
  source 1..2623: mol_type = unassigned DNA
ccgccagcaaacctcgggggccaggaccggcgctcactcgaccgcgcggctcacgggtgccctgtgaccccacagcggagctcgcggcggctgccacccggccccgccggccatgaggcgcgcgccttccctggtccttttcttcctggtcgccctttgcgggcgcgggaactgccgcgtggccaatgcggaggaaaagctgatggacgaccttctgaacaaaacccgttacaataacctgatccgcccagccaccagctcctcacagctcatctccatcaagctgcagctctccctggcccagcttatcagcgtgaatgagcgagagcagatcatgaccaccaatgtctggctgaaacaggaatggactgattaccgcctgacctggaacagctcccgctacgagggtgtgaacatcctgaggatccctgcaaagcgcatctggttgcctgacatcgtgctttacaacaacgccgacgggacctatgaggtgtctgtctacaccaacttgatagtccggtccaacggcagcgtcctgtggctgccccctgccatctacaagagcgcctgcaagattgaggtgaagtactttcccttcgaccagcagaactgcaccctcaagttccgctcctggacctatgaccacacggagatagacatggtcctcatgacgcccacagccagcatggatgactttactcccagtggtgagtgggacatagtggccctcccagggagaaggacagtgaacccacaagaccccagctacgtggacgtgacttacgacttcatcatcaagcgcaagcctctgttctacaccatcaacctcatcatcccctgcgtgctcaccaccttgctggccatcctcgtcttctacctgccatccgactgcggcgagaagatgacactgtgcatctcagtgctgctggcactgacattcttcctgctgctcatctccaagatcgtgccacccacctccctcgatgtgcctctcatcggcaagtacctcatgttcaccatggtgctggtcaccttctccatcgtcaccagcgtctgtgtgctcaatgtgcaccaccgctcgcccagcacccacaccatggcaccctgggtcaagcgctgcttcctgcacaagctgcctaccttcctcttcatgaagcgccctggccccgacagcagcccggccagagccttcccgcccagcaagtcatgcgtgaccaagcccgaggccaccgccacctccaccagcccctccaacttctatgggaactccatgtactttgtgaaccccgcctctgcagcttccaagtctccagccggctctaccccggtggctatccccagggatttctggctgcggtcctctgggaggttccgacaggatgtgcaggaggcattagaaggtgtcagcttcatcgcccagcacatgaagaatgacgatgaagaccagagtgtcgttgaggactggaagtacgtggctatggtggtggaccggctgttcctgtgggtgttcatgtttgtgtgcgtcctgggcactgtggggctcttcctaccgcccctcttccagacccatgcagcttctgaggggccctacgctgcccagcgtgactgagggccccctgggttgtggggtgagaggatgtgagtggccgggtgggcactttgctgcttctttctgggttgtggctgatgaggccctaagtaaatatgtgagcattggccatcaaccccatcaaaccagccacagccgtggaacaggcaaggatgggggcctgggctgtcctctctgaatgccttggagggatcccaggaagccccagtaggagggagcttcagacagttcaattctggcctgtcttccttccctgcaccgggcaatggggataaagatgacttcgtagcagcacctactatgcttcaggcatggtgccggcctgcctctccatcaccatctctctccacttccccttgtccagttcctcacacacttctagattcttcccagctcagaggcttggcatttgccatatcatcatctttttttttttcttttaaacggagtcttgctatatcgcccaggctcaagtgattctcctgcctcaacctcccaagtagctgggattacagaaagccgccaccgtgcccagctaatttttgtatttttgttggccaggctgatttcgaactcctgacctcaaatgacccacctgcctcggcctcccaaagtgctaggattacaagtgtgagccactatgcctggccttccctatcttctacctgaaccttcttcctcttcccccagggcttcccaagctctttccacagccacatcagtcagggcatggctccaatccattctttgctccaatgtcacctcctctgagaggccttccctaaccacccaatcattctaaagcagcctccctacagtcacgttaccctgcctccttcctcgagcactcctgtgtacctgtcgctcttatctggtggcatgtatgtcatccacagctcacccactagagtgtgagctccatgagaacagggacctgctccttcacattcgtggtagtatccccagggcctaggacagagcttggcacacagtaggtgctcaataaatgtttgt

SEQ ID NO: 5799 - DNA, 1355 bp, Homo sapiens
  source 1..1355: mol_type = unassigned DNA
ccgccagcaaacctcgggggccaggaccggcgctcactcgaccgcgcggctcacgggtgccctgtgaccccacagcggagctcgcggcggctgccacccggccccgccggccatgaggcgcgcgccttccctggtccttttcttcctggtcgccctttgcgggcgcgggaactgccgcgtggccaatgcggaggaaaagctgatggacgaccttctgaacaaaacccgttacaataacctgatccgcccagccaccagctcctcacagctcatctccatcaagctgcagctctccctggcccagcttatcagcgtgaatgagcgagagcagatcatgaccaccaatgtctggctgaaacaggaatggactgattaccgcctgacctggaacagctcccgctacgagggtgtgaacatcctgaggatccctgcaaagcgcatctggttgcctgacatcgtgctttacaacaagtcgttgaggactggaagtacgtggctatggtggtggaccggctgttcctgtgggtgttcatgtttgtgtgcgtcctgggcactgtggggctcttcctaccgcccctcttccagacccatgcagcttctgaggggccctacgctgcccagcgtgactgagggccccctgggttgtggggtgagaggatgtgagtggccgggtgggcactttgctgcttctttctgggttgtggctgatgaggccctaagtaaatatgtgagcattggccatcaaccccatcaaaccagccacagccgtggaacaggcaaggatgggggcctgggctgtcctctctgaatgccttggagggatcccaggaagccccagtaggagggagcttcagacagttcaattctggcctgtcttccttccctgcaccgggcaatggggataaagatgacttcgtagcagcacctactatgcttcaggcatggtgccggcctgcctctccatcaccatctctctccacttccccttgtccagttcctcacacacttctagattcttcccagctcagaggcttggcatttgccatatcatcatctttttttttttcttttaaacggagtcttgctatatcgcccaggctcaagtgattctcctgcctcaacctcccaagtagctgggattacagaaagccgccaccgtgcccagctaatttttgtatttttgttggccaggctgatttcgaactcctgacctcaaatgacccacctgcctcggcctcccaaagtgctaggattacaagtgtgagccactatgcctggccttccctatcttctacctgaaccttcttcctcttcccccagggcttcccaagctctttccacagccacatcagtca

SEQ ID NO: 5800 - DNA, 2112 bp, Homo sapiens
  source 1..2112: mol_type = unassigned DNA
gggcagatgcacgtcccagtcagagggatgggatggaggggccagtgctgacactggggctgctggctgccctggcggtgtgtggcagctgggggctgaacgaggaggagcggctgatccggcacctgtttcaagagaagggctacaacaaggagctccggcccgtggcacacaaagaggagagtgtggacgttgccctggccctcacactctccaacctcatctccctgaaagaagttgaggagaccctcactaccaatgtgtggatagagcacggctggacagacaaccggctgaagtggaatgctgaagaatttggaaacatcagtgtcctgcgcctccccccggacatggtgtggctcccagagattgtgctggagaacaacaatgacggctccttccagatctcctactcctgcaacgtgcttgtctaccactacggcttcgtgtactggctgccacctgccatcttccgctcctcctgccccatctctgtcacctatttccccttcgactggcagaactgctccctcaagttcagttccctcaagtatacggccaaagagatcaccctgagcctgaaacaggatgccaaggagaaccgcacctaccccgtggagtggatcatcattgatcctgaaggcttcacagagaacggggagtgggagatagtccaccggccggccagggtcaacgtggaccccagagcccctctggacagccccagccgccaggacatcaccttctacctcatcatccgccgcaagcccctcttctacatcatcaacatcctggtgccctgcgtgctcatctccttcatggtcaacctggtcttctacctaccggctgacagtggtgagaagacatcagtggccatctcggtgctcctggctcagtctgtcttcctgctgctcatctccaagcgtctgcctgccacatccatggccatcccccttatcggcaagttcctgctcttcggcatggtgctggtcaccatggttgtggtgatctgtgtcatcgtgctcaacatccacttccgaacacccagcacccatgtgctgtctgagggggtcaagaagctcttcctggagaccctgccggagctcctgcacatgtcccgcccagcagaggatggacccagccctggggccctggtgcggaggagcagctccctgggatacatctccaaggccgaggagtacttcctgctcaagtcccgcagtgacctcatgttcgagaagcagtcagagcggcatgggctggccaggcgcctcaccactgcacgccggcccccagcaagctctgagcaggcccagcaggaactcttcaatgagctgaagccagctgtggatggggcaaacttcattgttaaccacatgagggaccagaacaattacaatgaggagaaagacagctggaaccgagtggcccgcacagtggaccgcctctgcctgtttgtggtgacgcctgtcatggtggtgggcacagcctggatcttcctgcagggcgtttacaaccagccaccaccccagccttttcctggggacccctactcctacaacgtgcaggacaagcgcttcatctagggtgggcctgttggggagccaggagacagcagggtctgagagaggagccacagtccctaatgacacccactcctagccctgaggctcgtgcccctcagactggggaagagtccaaggaagggagggagcagccactcctcaatgctcaatggctcccctgaaatcaagacaggggccacccgagatggtctgagggtggacatcggctacagtgggtgggcaggacgatttggggggaggcccgaggctggctcaggggccagggaggaggccactcagggtggcctcagggggagagctctgataggggtgagacagatagggccccttctctgcttctcctcccccaaggtgtggggtagagcaggcaggaatctgcgccttcactctctggcccctccagcctccctcttcctacctacccttcaacctcaggcttctgaggcctcacctgggactgaggttgaggacacctccctccctccagaccccagagtatcctttcctagctctttctgccttgacc

SEQ ID NO: 5801 - DNA, 3022 bp, Homo sapiens
  source 1..3022: mol_type = unassigned DNA
tccgagctgcggggagtcccagcctgggatctttgcctcatgtccttgggctcctgccctggctggcccgtcccccaccgccatgaggtgtcagattgtgtttccggctgcctcttcccgttgaccccctcctcccccaacacctgtcccctctcccgcccaccctcattccacagccctgtagacaggaggggcagatgcacgtcccagtcagagggatgggatggaggggccagtgctgacactggggctgctggctgccctggcggtgtgtggcagctgggggctgaacgaggaggagcggctgatccggcacctgtttcaagagaagggctacaacaaggagctccggcccgtggcacacaaagaggagagtgtggacgttgccctggccctcacactctccaacctcatctccctgaaagaagttgaggagaccctcactaccaatgtgtggatagagcacggctggacagacaaccggctgaagtggaatgctgaagaatttggaaacatcagtgtcctgcgcctccccccggacatggtgtggctcccagagattgtgctggagaacaacaatgacggctccttccagatctcctactcctgcaacgtgcttgtctaccactacggcttcgtgtactggctgccacctgccatcttccgctcctcctgccccatctctgtcacctatttccccttcgactggcagaactgctccctcaagttcagagaacggggagtgggagatagtccaccggccggccagggtcaacgtggaccccagagcccctctggacagccccagccgccaggacatcaccttctacctcatcatccgccgcaagcccctcttctacatcatcaacatcctggtgccctgcgtgctcatctccttcatggtcaacctggtcttctacctaccggctgacagtggtgagaagacatcagtggccatctcggtgctcctggctcagtctgtcttcctgctgctcatctccaagcgtctgcctgccacatccatggccatcccccttatcggcaagttcctgctcttcggcatggtgctggtcaccatggttgtggtgatctgtgtcatcgtgctcaacatccacttccgaacacccagcacccatgtgctgtctgagggggtcaagaagctcttcctggagaccctgccggagctcctgcacatgtcccgcccagcagaggatggacccagccctggggccctggtgcggaggagcagctccctgggatacatctccaaggccgaggagtacttcctgctcaagtcccgcagtgacctcatgttcgagaagcagtcagagcggcatgggctggccaggcgcctcaccactgcacgccggcccccagcaagctctgagcaggcccagcaggaactcttcaatgagctgaagccagctgtggatggggcaaacttcattgttaaccacatgagggaccagaacaattacaatgaggagaaagacagctggaaccgagtggcccgcacagtggaccgcctctgcctgtttgtggtgacgcctgtcatggtggtgggcacagcctggatcttcctgcagggcgtttacaaccagccaccaccccagccttttcctggggacccctactcctacaacgtgcaggacaagcgcttcatctagggtgggcctgttggggagccaggagacagcagggtctgagagaggagccacagtccctaatgacacccactcctagccctgaggctcgtgcccctcagactggggaagagtccaaggaagggagggagcagccactcctcaatgctcaatggctcccctgaaatcaagacaggggccacccgagatggtctgagggtggacatcggctacagtgggtgggcaggacgatttggggggaggcccgaggctggctcaggggccagggaggaggccactcagggtggcctcagggggagagctctgataggggtgagacagatagggccccttctctgcttctcctcccccaaggtgtggggtagagcaggcaggaatctgcgccttcactctctggcccctccagcctccctcttcctacctacccttcaacctcaggcttctgaggcctcacctgggactgaggttgaggacacctccctccctccagaccccagagtatcctttcctagctctttctgccttgacctctctgcctaggtccctttgggaagttgaggactggagtggaaaggtcaggatcgacatccacaaagacttggggtcagcctgaggttgcacacacaatcctagaggaccagaacgcagcacctctccccaaagggtccctgccccccagcacctactcctctccaaattagggttgtcatgcattatttggggcatacatattctaaaaaatcattcgttgtttctctgaaatttgtcccctatttttatttgctaaatctagcaaccctatcccaaaggcagcctccactcaatcttatcctgagggccaaaggccaaggctgcaggaattgggagacaagggtctgtttgtatggtggtccacctccaagatggccccagtgatgcccagtattcacacccttgtgcagtcccctcactctgtaccagggtgggtctgggtaaccaatagaatgaggcagaagtgatggtacctcacttcccagatttggttaggaaagacactatggcctctttcttgctcattagccctcattctcacatcagttggatctctcactttggggaagccagctggcatgttaaggagccctatggagaggcccacatggcaaggaactaaggcctcctgccaacagccacgtgagtgaatgtggaagtggatcctctgccccagtagggccttcggatgagatcacagcccagtagacatcttatgtgcagccccatgaaagtccctaagccagaaccaccagctaagtgactcctggattcctgacccccagaaactgtgtgagataataaatgtgtgttgttttaagtgacaa

SEQ ID NO: 5802 - DNA, 1325 bp, Homo sapiens
  source 1..1325: mol_type = unassigned DNA
agatgcacgtcccagtcagagggatgggatggaggggccagtgctgacactggggctgctggctgccctggcggtgtgtggcagctgggggctgaacgaggaggagcggctgatccggcacctgtttcaagagaagggctacaacaaggagctccggcccgtggcacacaaagaggagagtgtggacgttgccctggccctcacactctccaacctcatctccctgaaagaagttgaggagaccctcactaccaatgtgtggatagagcacggctggacagacaaccggctgaagtggaatgctgaagaatttggaaacatcagtgtcctgcgcctccccccggacatggtgtggctcccagagattgtgctggagaacaacaatgacggctccttccagatctcctactcctgcaacgtgcttgtctaccactacggcttcgtgtactggctgccacctgccatcttccgctcctcctgccccatctctgtcacctatttccccttcgactggcagaactgctccctcaagttcaggtggtgagaagacatcagtggccatctcggtgctcctggctcagtctgtcttcctgctgctcatctccaagcgtctgcctgccacatccatggccatcccccttatcggcaagttcctgctcttcggcatggtgctggtcaccatggttgtggtgatctgtgtcatcgtgctcaacatccacttccgaacacccagcacccatgtgctgtctgagggggtcaagaagctcttcctggagaccctgccggagctcctgcacatgtcccgcccagcagaggatggacccagccctggggccctggtgcggaggagcagctccctgggatacatctccaaggccgaggagtacttcctgctcaagtcccgcagtgacctcatgttcgagaagcagtcagagcggcatgggctggccaggcgcctcaccactgcacgccggcccccagcaagctctgagcaggcccagcaggaactcttcaatgagctgaagccagctgtggatggggcaaacttcattgttaaccacatgagggaccagaacaattacaatgaggagaaagacagctggaaccgagtggcccgcacagtggaccgcctctgcctgtttgtggtgacgcctgtcatggtggtgggcacagcctggatcttcctgcagggcgtttacaaccagccaccaccccagccttttcctggggacccctactcctacaacgtgcaggacaagcgcttcatctagggtgggcctgttggggagccaggagacagcagggtctgagagaggagccacagt

SEQ ID NO: 5803 - DNA, 952 bp, Homo sapiens
  source 1..952: mol_type = unassigned DNA
agatgcacgtcccagtcagagggatgggatggaggggccagtgctgacactggggctgctggctgccctggcggtgtgtggcagctgggggctgaacgaggaggagcggctgatccggcacctgtttcaagagaagggctacaacaaggagctccggcccgtggcacacaaagaggagagtgtggacgttgccctggccctcacactctccaacctcatctccctgaaagaagttgaggagaccctcactaccaatgtgtggatagagcacggctggacagacaaccggctgaagtggaatgctgaagaatttggaaacatcagtgtcctgcgcctccccccggacatggtgtggctcccagagattgtgctggagaacaacaatgacggctccttccagatctcctactcctgcaacgtgcttgtctaccactacggcttcgtgtactggctgccacctgccatcttccgctcctcctgccccatctctgtcacctatttccccttcgactggcagaactgctccctcaagttcagagaacggggagtgggagatagtccaccggccggccagggtcaacgtggaccccagagcccctctggacagccccagccgccaggacatcaccttctacctcatcatccgccgcaagcccctcttctacatcatcaacatcctggtgccctgcgtgctcatctccttcatggtcaacctggtcttctacctaccggctgacagtggtgagaagacatcagtggccatctcggtgctcctggctcagtctgtcttcctgctgctcatctccaagcgtctgcctgccacatccatggccatcccccttatcggcaagttcctgctcttcggcatggtgctggtcaccatggttgtggtgatctgtgtcatcgtgctcaacatccacttccgaacacccagcacccatgtgctgtctga

SEQ ID NO: 5804 - DNA, 1828 bp, Homo sapiens
  source 1..1828: mol_type = unassigned DNA
attccacagccctgtagacaggaggggcagatgcacgtcccagtcagagggatgggatggaggggccagtgctgacactggggctgctggctgccctggcggtgtgtggcagctgggggctgaacgaggaggagcggctgatccggcacctgtttcaagagaagggctacaacaaggagctccggcccgtggcacacaaagaggagagtgtggacgttgccctggccctcacactctccaacctcatctccctgggctggacagacaaccggctgaagtggaatgctgaagaatttggaaacatcagtgtcctgcgcctccccccggacatggtgtggctcccagagattgtgctggagaacaacaatgacggctccttccagatctcctactcctgcaacgtgcttgtctaccactacggcttcgtgtactggctgccacctgccatcttccgctcctcctgccccatctctgtcacctatttccccttcgactggcagaactgctccctcaagttcagttccctcaagtatacggccaaagagatcaccctgagcctgaaacaggatgccaaggagaaccgcacctaccccgtggagtggatcatcattgatcctgaaggcttcacagagaacggggagtgggagatagtccaccggccggccagggtcaacgtggaccccagagcccctctggacagccccagccgccaggacatcaccttctacctcatcatccgccgcaagcccctcttctacatcatcaacatcctggtgccctgcgtgctcatctccttcatggtcaacctggtcttctacctaccggctgacagtggtgagaagacatcagtggccatctcggtgctcctggctcagtctgtcttcctgctgctcatctccaagcgtctgcctgccacatccatggccatcccccttatcggcaagttcctgctcttcggcatggtgctggtcaccatggttgtggtgatctgtgtcatcgtgctcaacatccacttccgaacacccagcacccatgtgctgtctgagggggtcaagaagctcttcctggagaccctgccggagctcctgcacatgtcccgcccagcagaggatggacccagccctggggccctggtgcggaggagcagctccctgggatacatctccaaggccgaggagtacttcctgctcaagtcccgcagtgacctcatgttcgagaagcagtcagagcggcatgggctggccaggcgcctcaccactgcacgccggcccccagcaagctctgagcaggcccagcaggaactcttcaatgagctgaagccagctgtggatggggcaaacttcattgttaaccacatgagggaccagaacaattacaatgaggagaaagacagctggaaccgagtggcccgcacagtggaccgcctctgcctgtttgtggtgacgcctgtcatggtggtgggcacagcctggatcttcctgcagggcgtttacaaccagccaccaccccagccttttcctggggacccctactcctacaacgtgcaggacaagcgcttcatctagggtgggcctgttggggagccaggagacagcagggtctgagagaggagccacagtccctaatgacacccactcctagccctgaggctcgtgcccctcagactggggaagagtccaaggaagggagggagcagccactcctcaatgctcaatggctcccctgaaatcaagacaggggccacccgagatggtctgagggtggacatcggctacagtgggtgggcaggacgatttggggggaggcccgaggctggctcaggggccag

SEQ ID NO: 5805 - DNA, 2455 bp, Homo sapiens
  source 1..2455: mol_type = unassigned DNA
cacgcagcaggatggcaagggctccgcttggggtcctgctcctcttggggcttctcggcaggggtgtggggaagaacgaggaactgcgtctttatcaccatctcttcaacaactatgacccaggaagccggccagtgcgggagcctgaggatactgtcaccatcagcctcaaggtcaccctgacgaatctcatctcactgaatgaaaaagaggagactctcaccactagcgtctggattggaatcgattggcaggattaccgactcaactacagcaaggacgactttgggggtatagaaaccctgcgagtcccttcagaactcgtgtggctgccagagattgtgctggaaaacaatattgatggccagttcggagtggcctacgacgccaacgtgctcgtctacgagggcggctccgtgacgtggctgcctccggccatctaccgcagcgtctgcgcagtggaggtcacctacttccccttcgattggcagaactgttcgcttattttccgctctcagacgtacaatgccgaagaggtggagttcacttttgccgtagacaacgacggcaagaccatcaacaagatcgacatcgacacagaggcctatactgagaacggcgagtgggccatcgacttctgcccgggggtgatccgccgccaccacggtggcgccaccgacggcccaggggagactgacgtcatctactcgctcatcatccgccggaagccgctcttctacgtcattaacatcatcgtgccctgtgtgctcatctcgggcctggtgctgctcgcctacttcctgccggcgcaggccggcggccagaaatgcacggtctccatcaacgtcctgctcgcccagaccgtcttcttgttcctcattgcccagaaaatcccagagacttctctgagcgtgccgctcctgggcaggttccttattttcgtcatggtggtcgccacgctcattgtcatgaattgcgtcatcgtgctcaacgtgtcccagcggacgcccaccacccacgccatgtccccgcggctgcgccacgttctcctggagctgctgccgcgcctcctgggctccccgccgccgcccgaggccccccgggccgcctcgcccccaaggcgggcgtcgtcggtgggcttattgctccgcgcggaggagctgatactgaaaaagccacggagcgagctcgtgtttgaggggcagaggcaccggcaggggacctggacggctgccttctgccagagcctgggcgccgccgcccccgaggtccgctgctgtgtggatgccgtgaacttcgtggccgagagcacgagagatcaggaggccaccggcgaggaagtgtccgactgggtgcgcatggggaatgcccttgacaacatctgcttctgggccgctctggtgctcttcagcgtgggctccagcctcatcttcctcggggcctacttcaaccgagtgcctgatctcccctacgcgccgtgtatccagccttagctcgcaccgacttcaatttcccacccatctccagtaggaaattgattttgaaaaagtaggctgccgccaccacggcattatgatcccttccccctgctgatcaatctgcagtttgtgaacttcacaagaatggtgtgtgcccgttccctggcgtgtgtaggcctggccgcagtccaggggtcagcaggaggaaagggttcacataggctctcaggtgccagtcttccagaaagcaaggactgcccttcattcagccttgctgacctcccagcctttctaaggctcagccccacgggactctggtggctgccagcttgtgagctatctatctatattcatttcatagccaaacaggagacccctttgcaggacttgcacacagggaggctgtagccaggaaaccctcttcttccctggtctggctctgctggagcgggtgggaaccaaacaccttcagtgctggtggccctcaggcccacaggtttaaggctgaggctgccctgacccttccacagtcatttcttctaggttttcttggcccagcactgcccatcccaccccatgaggctcactcattgcagatcccagcccaccctgcccctttcttccccaccctggaggctctctctgcctagtctacagtactgacagaaagcaaggacatgcggcctgcatggtgggagctggttgaattgtctttattaacaaacaggatatccaaggccactacattgaggaggggtggggggggagggagaagggttacttgctgctcacactatatacagatgcaagcaaggggcgtggagagtgagggctccctgctccctccctccaccggggaagggcatgggctagaagaggagaggggggtcgggaatggggggaatgttttggctggcggggtcccccctccattccctggagtttgggggaaggggaatcattaaagtgctttcaga

SEQ ID NO: 5806 - DNA, 2262 bp, Homo sapiens
  source 1..2262: mol_type = unassigned DNA
actgcagagagctgaggcaccatgcatgggggccaggggccgctgctcctcctgctgctgctggctgtctgcctgggggcccagggccggaaccaggaggagcgcctgctcgcagacctgatgcaaaactacgaccccaacctgcggcccgcggaacgagactcggatgtggtcaatgtcagcctgaagctaaccctcaccaacctcatctccctgaacgagcgagaggaagccctcaccaccaatgtctggatagagatgcagtggtgcgactatcgcctgcgctgggatccgcgagactacgaaggcctgtgggtgctgagggtgccgtccaccatggtgtggcggccggatatcgtgctggagaacaacgtggacggtgtcttcgaggtggccctctactgcaatgtgctcgtgtcccctgacggctgtatctactggctgccgcctgccatcttccgttccgcctgctctatctcagtcacctacttccccttcgactggcagaactgctcccttatcttccagtcccagacttacagcaccaatgagattgatctgcagctgagtcaggaagatggccagaccatcgagtggattttcattgaccctgaggccttcacagagaatggggagtgggccatccagcaccgaccagccaagatgctcctggacccagcggcgccagcccaggaagcaggccaccagaaggtggtgttctacctgctcatccagcgcaagcccctcttctacgtcatcaacatcatcgccccctgtgtgctcatctcctctgtcgccatcctcatccacttccttcctgccaaggctgggggccagaagtgtaccgtcgccatcaacgtgctcctggcccagactgtcttcctcttccttgtggccaagaaggtgcctgaaacctcccaggcggtgccactcatcagcaagtacctgaccttcctcctggtggtgaccatcctcattgtcgtgaatgctgtggttgtgctcaatgtctccttgcggtctccacacacacactccatggcccgaggggtccgcaaggtgttcctgaggctcttgccccagctgctgaggatgcacgttcgcccgctggccccggcagctgtgcaggacacccagtcccggctacagaatggctcctcgggatggtcgatcacaactggggaggaggtggccctctgcctgcctcgcagtgaactcctcttccagcagtggcagcggcaagggctggtggcggcagcgctggagaagctagagaaaggcccggagttagggctgagccagttctgtggcagcctgaagcaggctgccccagccatccaggcctgtgtggaagcctgcaacctcattgcctgtgcccggcaccagcagagtcactttgacaatgggaatgaggagtggttcctggtgggccgagtgctggaccgcgtctgcttcctggccatgctctcgctcttcatctgtggcacagctggcatcttcctcatggcccactacaaccgggtgccggccctgccattccctggagatccacgcccctacctgccctcaccagactgagccaaccaaccactgtggggcatgtgggagtcacacacgtgggtcacactgagtcttatcagccacgttctcctactgaggtcctaagtgtgctctttgggaagtgcccttcaggactgtgtgagccaaacagccctgagaaaagctggggaaacagtctgagctggagtccgagagtggttgggggtgggccgtggctagtgtcctgctgcagtcagcacacacgtgggattggctagctcatcctggcaccagccacccctccactcagtgcactcccctcacttaggcaaagcattattcattcccatcagtctgaagcccgaaggactgttttgtataataccttcggacttgggactggctccccttttacaagttctccctgaaagagggcagtcacaagaggtgtgaagagtagcagccgatgctctctccaaagcagggcagcagcccataccagctggcatctcccccccgtgccttctgggtacaataagcacccaattctcaacagccccagtggcctttccattcatgtgcatttttctgccactgaccacaagacgatttcctgagttttgtaatcctcttttttttttttttttttttagtttttgatgtgttgttgttgttttgtttagttttgagatagagcctcactcttgtcatgcaagttggagtgga

SEQ ID NO: 5807 - DNA, 2739 bp, Homo sapiens
  source 1..2739: mol_type = unassigned DNA
actgcagagagctgaggcaccatgcatgggggccaggggccgctgctcctcctgctgctgctggctgtctgcctgggggcccagggccggaaccaggaggagcgcctgctcgcagacctgatgcaaaactacgaccccaacctgcggcccgcggaacgagactcggatgtggtcaatgtcagcctgaagctaaccctcaccaacctcatctccctgaacgagcgagaggaagccctcaccaccaatgtctggatagagatgcagtggtgcgactatcgcctgcgctgggatccgcgagactacgaaggcctgtgggtgctgagggtgccgtccaccatggtgtggcggccggatatcgtgctggagaacaacgtggacggtgtcttcgaggtggccctctactgcaatgtgctcgtgtcccctgacggctgtatctactggctgccgcctgccatcttccgttccgcctgctctatctcagtcacctacttccccttcgactggcagaactgctcccttatcttccagtcccagacttacagcaccaatgagattgatctgcagctgagtcaggaagatggccagaccatcgagtggattttcattgaccctgaggccttcacagagaatggggagtgggccatccagcaccgaccagccaagatgctcctggacccagcggcgccagcccaggaagcaggccaccagaaggtggtgttctacctgctcatccagcgcaagcccctcttctacgtcatcaacatcatcgccccctgtgtgctcatctcctctgtcgccatcctcatccacttccttcctgccaaggctgggggccagaagtgtaccgtcgccatcaacgtgctcctggcccagactgtcttcctcttccttgtggccaagaaggtgcctgaaacctcccaggcggtgccactcatcagcaagtacctgaccttcctcctggtggtgaccatcctcattgtcgtgaatgctgtggttgtgctcaatgtctccttgcggtctccacacacacactccatggcccgaggggtccgcaaggtgttcctgaggctcttgccccagctgctgaggatgcacgttcgcccgctggccccggcagctgtgcaggacacccagtcccggctacagaatggctcctcgggatggtcgatcacaactggggaggaggtggccctctgcctgcctcgcagtgaactcctcttccagcagtggcagcggcaagggctggtggcggcagcgctggagaagctagagaaaggcccggagttagggctgagccagttctgtggcagcctgaagcaggctgccccagccatccaggcctgtgtggaagcctgcaacctcattgcctgtgcccggcaccagcagagtcactttgacaatgggaatgaggagtggttcctggtgggccgagtgctggaccgcgtctgcttcctggccatgctctcgctcttcatctgtggcacagctggcatcttcctcatggcccactacaaccgggtgccggccctgccattccctggagatccacgcccctacctgccctcaccagactgagccaaccaaccactgtggggcatgtgggagtcacacacgtgggtcacactgagtcttatcagccacgttctcctactgaggtcctaagtgtgctctttgggaagtgcccttcaggactgtgtgagccaaacagccctgagaaaagctggggaaacagtctgagctggagtccgagagtggttgggggtgggccgtggctagtgtcctgctgcagtcagcacacacgtgggattggctagctcatcctggcaccagccacccctccactcagtgcactcccctcacttaggcaaagcattattcattcccatcagtctgaagcccgaaggactgttttgtataataccttcggacttgggactggctccccttttacaagttctccctgaaagagggcagtcacaagaggtgtgaagagtagcagccgatgctctctccaaagcagggcagcagcccataccagctggcatctcccccccgtgccttctgggtacaataagcacccaattctcaacagccccagtggcctttccattcatgtgcatttttctgccactgaccacaagacgatttcctgagttttgtaatcctcttttttttttttttttttttagtttttgatgtgttgttgttgttttgtttagttttgagatagagcctcactcttgtcatgcaagttggagtggagtgagctgtgatcatgtgactgcactccagcctgatgacacagtaagaccctgtctcaaaaaaaataaaaaaattacaaaactgaaaaaagaaaagtgaaagtgccacataaaggcctgacgacaggatatgctggcaggaggggaccttggaaatatgccctccctccaagcacaggattgctgtctttgggattcaatcaccagcaagttcgtattatttactccagtgtgagtctgtgtctgtgcatgcacagtgtgtttgaagcaagagcagagtcagagctatagagaactagaggagttagggagagtgggggagaacttcaatcagggagggaatctgatgacagtggggccatttccggttcccaccagccccttactagttgtgtatctggcacaagtctctcaacctctctgaaagcctcagagggcagaggattagctccttgtacacaataaacactcaaatgtt

SEQ ID NO: 5808 - DNA, 1739 bp, Homo sapiens
  source 1..1739: mol_type = unassigned DNA
aaagagggcggcagacccgagcgcctaggactcgccgctgcccgcgccccgccgccgctgctgcccccagccccggccccaggcgtcccagccatggtccgcccaatgctcttgctcagcctcggcctcctggctggtctgctgccggcgctggccgcctgcccccagaactgccactgccacagcgacctgcagcacgtcatctgcgacaaggtggggctgcagaagatccccaaggtgtcagagaagaccaagctgctcaacctacagcgcaacaacttcccggtgctggctgccaattcgttccgggccatgccgaacctcgtgtcattgcacctgcagcactgccagatccgcgaggtggccgccggtgccttccgcggcctcaagcaacttatctacttgtacctgtcccataacgacatccgcgtgctgcgcgcaggtgccttcgacgacctgaccgagctgacctacctctacctggaccacaacaaggtcactgagctgccccgggggttgctctccccgctggtcaacctcttcatcttgcagctcaacaacaacaagatccgtgagctgcgcgcaggcgccttccagggagccaaggacctgcgctggctctacctgtcggaaaacgcgttgagctccctgcagcccggggccctggacgacgtggagaacctcgccaaattccacgtggacaggaaccagctgtccagctacccctcagctgccctgagcaagctacgggtggtggaggagctgaagctgtcccacaaccccctgaaaagcatcccggacaatgccttccagtcctttggcagatacctggagaccctctggctggacaacaccaacctggagaagttctcagatggtgccttcctgggtgtaaccacgctgaaacacgtccatttggagaacaaccgcttgaaccagctaccctccaacttccccttcgacagcctggagaccctcgcccttaccaataacccctggaagtgtacctgccagctccggggccttcggcggtggctggaagccaaggcctcccgcccagatgccacctgtgcctcacctgccaagttcaagggccagcacatccgtgacacggacgccttccgcagctgcaagttccccaccaagaggtccaagaaagctggccgccattaaacaggtgggggccaggttctgacccagccagtcctggtgactggcctctgccttccaccggagagactactgaccttctcacctccacccataccttctccccacagcctctgctgatgcacagagctgcctacacctagacacgtcctggcagggggcctcgggcactccactaccaacccagctccacccagcagtgtcctggggagaaggaaggctgagcctctccccagccttcatgccttccccaccctccagctcctcttggagaagctgttgctgagaccccccccccaagtcaatcagaaccacaacaggttggtcatcaggatggccaccctcccaggatcatccttcctctgttcctctttccctgccacgtggaaacaatcatcagatccttgccccaccccttgcttccagaaagggttttaaagcccatgccccaactctgccagcccccacctgccaggacgttctagcaggacatcggtgctttgctgtccatcttcccatgctgcaatttcttcctgagatttctataaatataaatgtatgtatgtatt

SEQ ID NO: 5809 - DNA, 594 bp, Homo sapiens
  source 1..594: mol_type = unassigned DNA
aggcctcccgcccagatgccacctgtgcctcacctgccaagttcaagggccagcacatccgtgacacggacgccttccgcagctgcaagttccccaccaagaggtccaagaaagctggccgccattaaacagcctctgctgatgcacagagctgcctacacctagacacgtcctggcagggggcctcgggcactccactaccaacccagctccacccagcagtgtcctggggagaaggaaggctgagcctctccccagccttcatgccttccccaccctccagctcctcttggagaagctgttgctgagaccccccccccaagtcaatcagaaccacaacaggttggtcatcaggatggccaccctcccaggatcatccttcctctgttcctctttccctgccacgtggaaacaatcatcagatccttgccccaccccttgcttccagaaagggttttaaagcccatgccccaactctgccagcccccacctgccaggacgttctagcaggacatcggtgctttgctgtccatcttcccatgctgcaatttcttcctgagatttctataaatataaatgtatgtatgtattata

SEQ ID NO: 5810 - DNA, 1789 bp, Homo sapiens
  source 1..1789: mol_type = unassigned DNA
ggcctcgatgctccacgtaggagctggctcggctgccggctgcggtcagggccaccgtataaagagggcggcagacccgagcgcctaggactcgccgctgcccgcgccccgccgccgctgctgcccccagccccggccccaggcgtcccagccatggtccgcccaatgctcttgctcagcctcggcctcctggctggtctgctgccggcgctggccgcctgcccccagaactgccactgccacagcgacctgcagcacgtcatctgcgacaaggtggggctgcagaagatccccaaggtgtcagagaagaccaagctgctcaacctacagcgcaacaacttcccggtgctggctgccaattcgttccgggccatgccgaacctcgtgtcattgcacctgcagcactgccagatccgcgaggtggccgccggtgccttccgcggcctcaagcaacttatctacttgtacctgtcccataacgacatccgcgtgctgcgcgcaggtgccttcgacgacctgaccgagctgacctacctctacctggaccacaacaaggtcactgagctgccccgggggttgctctccccgctggtcaacctcttcatcttgcagctcaacaacaacaagatccgtgagctgcgcgcaggcgccttccagggagccaaggacctgcgctggctctacctgtcggaaaacgcgttgagctccctgcagcccggggccctggacgacgtggagaacctcgccaaattccacgtggacaggaaccagctgtccagctacccctcagctgccctgagcaagctacgggtggtggaggagctgaagctgtcccacaaccccctgaaaagcatcccggacaatgccttccagtcctttggcagatacctggagaccctctggctggacaacaccaacctggagaagttctcagatggtgccttcctgggtgtaaccacgctgaaacacgtccatttggagaacaaccgcttgaaccagctaccctccaacttccccttcgacagcctggagaccctcgcccttaccaataacccctggaagtgtacctgccagctccggggccttcggcggtggctggaagccaaggcctcccgcccagatgccacctgtgcctcacctgccaagttcaagggccagcacatccgtgacacggacgccttccgcagctgcaagttccccaccaagaggtccaagaaagctggccgccattaaacaggttctgacccagccagtcctggtgactggcctctgccttccaccggagagactactgaccttctcacctccacccataccttctccccacagcctctgctgatgcacagagctgcctacacctagacacgtcctggcagggggcctcgggcactccactaccaacccagctccacccagcagtgtcctggggagaaggaaggctgagcctctccccagccttcatgccttccccaccctccagctcctcttggagaagctgttgctgagaccccccccccaagtcaatcagaaccacaacaggttggtcatcaggatggccaccctcccaggatcatccttcctctgttcctctttccctgccacgtggaaacaatcatcagatccttgccccaccccttgcttccagaaagggttttaaagcccatgccccaactctgccagcccccacctgccaggacgttctagcaggacatcggtgctttgctgtccatcttcccatgctgcaatttcttcctgagatttctataaatataaatgtatgtatgtatta

SEQ ID NO: 5811 - DNA, 3013 bp, Homo sapiens
  source 1..3013: mol_type = unassigned DNA
cggccgcggctgaggctccagtgccgagcgcaagaaccctgcgcagcccagagcagctgctggaggggaatcgaggcgcggctccggggattcggctcgggccgctggctctgctctgcggggagggagcgggcccgcccgcggggcccgagccctccggatccgccccctccccggtcccgccccctcggagactcctctggctgctctgggggttcgccggggccggggacccgcggtccgggcgccatgcgggcatcgctgctgctgtcggtgctgcggcccgcagggcccgtggccgtgggcatctccctgggcttcaccctgagcctgctcagcgtcacctgggtggaggagccgtgcggcccaggcccgccccaacctggagactctgagctgccgccgcgcggcaacaccaacgcggcgcgccggcccaactcggtgcagcccggagcggagcgcgagaagcccggggccggcgaaggcgccggggagaattgggagccgcgcgtcttgccctaccaccctgcacagcccggccaggccgccaaaaaggccgtcaggacccgctacatcagcacggagctgggcatcaggcagaggctgctggtggcggtgctgacctctcagaccacgctgcccacgctgggcgtggccgtgaaccgcacgctggggcaccggctggagcgtgtggtgttcctgacgggcgcacggggccgccgggccccacctggcatggcagtggtgacgctaggcgaggagcgacccattggacacctgcacctggcgctgcgccacctgctggagcagcacggcgacgactttgactggttcttcctggtgcctgacaccacctacaccgaggcgcacggcctggcacgcctaactggccacctcagcctggcctccgccgcccacctgtacctgggccggccccaggacttcatcggcggagagcccacccccggccgctactgccacggaggctttggggtgctgctgtcgcgcatgctgctgcaacaactgcgcccccacctggaaggctgccgcaacgacatcgtcagtgcgcgccctgacgagtggctgggtcgctgcattctcgatgccaccggggtgggctgcactggtgaccacgagggggtgcactatagccatctggagctgagccctggggagccagtgcaggagggggaccctcatttccgaagtgccctgacagcccaccctgtgcgtgaccctgtgcacatgtaccagctgcacaaagctttcgcccgagctgaactggaacgcacgtaccaggagatccaggagttacagtgggagatccagaataccagccatctggccgttgatggggaccaggcagctgcttggcccgtgggtattccagcaccatcccgcccggcctcccgctttgaggtgctgcgctgggactacttcacggagcagcacgctttctcctgcgccgatggctcaccccgctgcccactgcgtggggctgaccgggctgatgtggccgatgttctggggacagctctagaggagctgaaccgccgctaccacccggccttgcggctccagaagcagcagctggtgaatggctaccgacgctttgatccggcccggggtatggaatacacgctggacttgcagctggaggcactgaccccccagggaggccgccggcccctcactcgccgagtgcagctgctccggccgctgagccgcgtggagatcttgcctgtgccctatgtcactgaggcctcacgtctcactgtgctgctgcctctagctgcggctgagcgtgacctggcccctggcttcttggaggcctttgccactgcagcactggagcctggtgatgctgcggcagccctgaccctgctgctactgtatgagccgcgccaggcccagcgcgtggcccatgcagatgtcttcgcacctgtcaaggcccacgtggcagagctggagcggcgtttccccggtgcccgggtgccatggctcagtgtgcagacagccgcaccctcaccactgcgcctcatggatctactctccaagaagcacccgctggacacactgttcctgctggccgggccagacacggtgctcacgcctgacttcctgaaccgctgccgcatgcatgccatctccggctggcaggccttctttcccatgcatttccaagccttccacccagctgtggccccaccacaagggcctgggcccccagagctgggccgtgacactggccgctttgatcgccaggcagccagcgaggcctgcttctacaactccgactatgtggcagcccgtgggcgcctggcggcagcctcagaacaagaagaggagctgctggagagcctggatgtgtacgagctgttcctccacttctccagtctgcatgtgctgcgggcggtggagccggcgctgctgcagcgctaccgggcccagacgtgcagcgcgaggctcagtgaggacctgtaccaccgctgcctccagagcgtgcttgagggcctcggctcccgaacccagctggccatgctactctttgaacaggagcagggcaacagcacctgaccccaccctgtccccgtgggccgtggcatggccacaccccaccccacttctcccccaaaaccagagccacctgccagcctcgctgggcagggctggccgtagccagaccccaagctggcccactggtcccctctctggctctgtgggtccctgggctctggacaagcactgggggacgtgcccccagagccacccacttctcatcccaaacccagtttccctgccccctgacgctgctgattcgggctgtggcctccacgtatttatgcagtacagtctgcctgacgccagccctgcctctgggccctgggggctgggctgtagaagagttgttggggaaggagggagctgaggagggggcatctcccaacttctcccttttggaccctgccgaagctccctgcctttaataaactggccaagtgtggacttgtga

SEQ ID NO: 5812 - DNA, 2210 bp, Homo sapiens
  source 1..2210: mol_type = unassigned DNA
aacttccgatggccctgccttcccgagagccgtggggccagtccgagactttctctgggccctatcccggcctgggctgaacttactggactgtgtcctaaaccggctcgacccgatggcgccccagagatcctactagctccctggctgggctgctggtgttagagaaatgacttatatatagggacccgctacatcagcacggagctgggcatcaggcagaggctgctggtggcggtgctgacctctcagaccacgctgcccacgctgggcgtggccgtgaaccgcacgctggggcaccggctggagcgtgtggtgttcctgacgggcgcacggggccgccgggccccacctggcatggcagtggtgacgctaggcgaggagcgacccattggacacctgcacctggcgctgcgccacctgctggagcagcacggcgacgactttgactggttcttcctggtgcctgacaccacctacaccgaggcgcacggcctggcacgcctaactggccacctcagcctggcctccgccgcccacctgtacctgggccggccccaggacttcatcggcggagagcccacccccggccgctactgccacggaggctttggggtgctgctgtcgcgcatgctgctgcaacaactgcgcccccacctggaaggctgccgcaacgacatcgtcagtgcgcgccctgacgagtggctgggtcgctgcattctcgatgccaccggggtgggctgcactggtgaccacgagggggtgcactatagccatctggagctgagccctggggagccagtgcaggagggggaccctcatttccgaagtgccctgacagcccaccctgtgcgtgaccctgtgcacatgtaccagctgcacaaagctttcgcccgagctgaactggaacgcacgtaccaggagatccaggagttacagtgggagatccagaataccagccatctggccgttgatggggaccaggcagctgcttggcccgtgggtattccagcaccatcccgcccggcctcccgctttgaggtgctgcgctgggactacttcacggagcagcacgctttctcctgcgccgatggctcaccccgctgcccactgcgtggggctgaccgggctgatgtggccgatgttctggggacagctctagaggagctgaaccgccgctaccacccggccttgcggctccagaagcagcagctggtgaatggctaccgacgctttgatccggcccggggtatggaatacacgctggacttgcagctggaggcactgaccccccagggaggccgccggcccctcactcgccgagtgcagctgctccggccgctgagccgcgtggagatcttgcctgtgccctatgtcactgaggcctcacgtctcactgtgctgctgcctctagctgcggctgagcgtgacctggcccctggcttcttggaggcctttgccactgcagcactggagcctggtgatgctgcggcagccctgaccctgctgctactgtatgagccgcgccaggcccagcgcgtggcccatgcagatgtcttcgcacctgtcaaggcccacgtggcagagctggagcggcgtttccccggtgcccgggtgccatggctcagtgtgcagacagccgcaccctcaccactgcgcctcatggatctactctccaagaagcacccgctggacacactgttcctgctggccgggccagacacggtgctcacgcctgacttcctgaaccgctgccgcatgcatgccatctccggctggcaggccttctttcccatgcatttccaagccttccacccagctgtggccccaccacaagggcctgggcccccagagctgggccgtgacactggccgctttgatcgccaggcagccagcgaggcctgcttctacaactccgactatgtggcagcccgtgggcgcctggcggcagcctcagaacaagaagaggagctgctggagagcctggatgtgtacgagctgttcctccacttctccagtctgcatgtgctgcgggcggtggagccggcgctgctgcagcgctaccgggcccagacgtgcagcgcgaggctcagtgaggacctgtaccaccgctgcctccagagcgtgcttgagggcctcggctcccgaacccagctggccatgctactctttgaacaggagcagggcaacagcacctgaccccaccctgt

SEQ ID NO: 5813 - DNA, 3973 bp, Homo sapiens
  source 1..3973: mol_type = unassigned DNA
aggggctgtgaggtggcagcggctgcagcggcggagccggcgcctcagcgggcactggggtctgttcccccttccccgtccctgctccctgccaggcgcgtgcgggacgccgctcttggtccccacgcctccgccccgccccctcccgggacgccgggagaccccggccgtcctttatccggtgtccgccggcccccggccctgaaacccgggcctcctccccgagggccttgggcgtccctcctggtcctgcgctcgcggcctcgatgctgtctctggcgcggcctccgctcccgccgactggcctgagaacgaggtctgtgccccagtctcccagccgcgacctccgaccccgcctcgcagaacgacccgagctggtctcccgagcccccttctcagcagcccggtgacgtggccagtttatttctgttttgagacgaacggcgaagactcgcgtcgggtcttcgttctagggctagacttggtctctgatcgccgagaggtagcgcaggggctgtgggcccccggcaggggtcctgtcggaagctggccgcgcttctgtttgcgttcccaggaccctggcattgtctctagttgctgcttgtgctctctctttgcttttggtttgcttcatttggcccctggggccctggtaaaaccaggcaccgaatcgctcgcacacagagttccagtccccgcctgctgtctcctcagcagctggggttccgaggagaatgccctgcaagatggctccatcggccatggcgctcctgagaggctgtcagtgctgagtcaccgatctacctcattcgggtgggcagaacttatgtgtgccatgcgagtggctccagaccgctcctgagtgggaggaggggttcctgtagccgttgcgtcttctcaaacacggggagcagagtagaaagaggctctggccccttcccttgtgcccaccgggcctgccgcagtggctcagcagccccttcagtagcccgcctgaggaccgatgccagaggcaggcattcttccggaaaggcccactgaggcaggctccggctcctctggttggggctgttgttttgatggatcgtgtgcttttcccttacctcttatcacttgctgtcatctgttgacttaggcccagtctgcagatgtgtgtagtgttcctttttgggttagctttggcagtattgagttttacttcctcctctttttagtggaagacagaccataatcccagtgtgagtgaaattgattgtttcatttattaccgttttggctgggggttagttccgacaccttcacagttgaagagcaggcagaaggagttgtgaagacaggacaatcttcttggggatgctggtcctggaagccagcgggcctcgctctgtctttggcctcattgaccccaggttctctggttaaaactgaaagcctactactggcctggtgcccatcaatccattgatccttgaggctgtgcccctggggcacccacctggcagggcctaccaccatgcgactgagctccctgttggctctgctgcggccagcgcttcccctcatcttagggctgtctctggggtgcagcctgagcctcctgcgggtttcctggatccagggggagggagaagatccctgtgtcgaggctgtaggggagcgaggagggccacagaatccagattccagagctcggctagaccaaagtgatgaagacttcaaaccccggattgtcccctactacagggaccccaacaagccctacaagaaggtgctcaggactcggtacatccagacagagctgggctcccgtgagcggttgctggtggctgtcctgacctcccgagctacactgtccactttggccgtggctgtgaaccgtacggtggcccatcacttccctcggttactctacttcactgggcagcggggggcccgggctccagcagggatgcaggtggtgtctcatggggatgagcggcccgcctggctcatgtcagagaccctgcgccaccttcacacacactttggggccgactacgactggttcttcatcatgcaggatgacacatatgtgcaggccccccgcctggcagcccttgctggccacctcagcatcaaccaagacctgtacttaggccgggcagaggagttcattggcgcaggcgagcaggcccggtactgtcatgggggctttggctacctgttgtcacggagtctcctgcttcgtctgcggccacatctggatggctgccgaggagacattctcagtgcccgtcctgacgagtggcttggacgctgcctcattgactctctgggcgtcggctgtgtctcacagcaccaggggcagcagtatcgctcatttgaactggccaaaaatagggaccctgagaaggaagggagctcggctttcctgagtgccttcgccgtgcaccctgtctccgaaggtaccctcatgtaccggctccacaaacgcttcagcgctctggagttggagcgggcttacagtgaaatagaacaactgcaggctcagatccggaacctgaccgtgctgacccccgaaggggaggcagggctgagctggcccgttgggctccctgctcctttcacaccacactctcgctttgaggtgctgggctgggactacttcacagagcagcacaccttctcctgtgcagatggggctcccaagtgcccactacagggggctagcagggcggacgtgggtgatgcgttggagactgccctggagcagctcaatcggcgctatcagccccgcctgcgcttccagaagcagcgactgctcaacggctatcggcgcttcgacccagcacggggcatggagtacaccctggacctgctgttggaatgtgtgacacagcgtgggcaccggcgggccctggctcgcagggtcagcctgctgcggccactgagccgggtggaaatcctacctatgccctatgtcactgaggccacccgagtgcagctggtgctgccactcctggtggctgaagctgctgcagccccggctttcctcgaggcctttgcagccaatgtcctggagccacgagaacatgcattgctcaccctgttgctggtctacgggccacgagaaggtggccgtggagctccagacccatttcttggggtgaaggctgcagcagcggagttagagcgacggtaccctgggacgaggctggcctggctcgctgtgcgagcagaggccccttcccaggtgcgactcatggacgtggtctcgaagaagcaccctgtggacactctcttcttccttaccaccgtgtggacaaggcctgggcccgaagtcctcaaccgctgtcgcatgaatgccatctctggctggcaggccttctttccagtccatttccaggagttcaatcctgccctgtcaccacagagatcacccccagggcccccgggggctggccctgaccccccctcccctcctggtgctgacccctcccggggggctcctataggggggagatttgaccggcaggcttctgcggagggctgcttctacaacgctgactacctggcggcccgagcccggctggcaggtgaactggcaggccaggaagaggaggaagccctggaggggctggaggtgatggatgttttcctccggttctcagggctccacctctttcgggccgtagagccagggctggtgcagaagttctccctgcgagactgcagcccacggctcagtgaagaactctaccaccgctgccgcctcagcaacctggaggggctagggggccgtgcccagctggctatggctctctttgagcaggagcaggccaatagcacttagcccgcctgggggccctaacctcattacctttcctttgtctgcctcagccccaggaagggcaaggcaagatggtggacagatagagaattgttgctgtattttttaaatatgaaaatgttattaaacatgtcttctgccaaa

SEQ ID NO: 5814 - DNA, 3517 bp, Homo sapiens
  source 1..3517: mol_type = unassigned DNA
aggggctgtgaggtggcagcggctgcagcggcggagccggcgcctcagcgggcactggggtctgttcccccttccccgtccctgctccctgccaggcgcgtgcgggacgccgctcttggtccccacgcctccgccccgccccctcccgggacgccgggagaccccggccgtcctttatccggtgtccgccggcccccggccctgaaacccgggcctcctccccgagggccttgggcgtccctcctggtcctgcgctcgcggcctcgatgctgtctctggcgcggcctccgctcccgccgactggcctgagaacgaggtctgtgccccagtctcccagccgcgacctccgaccccgcctcgcagaacgacccgagctggtctcccgagcccccttctcagcagcccggtgacgtggccagtttatttctgttttgagacgaacggcgaagactcgcgtcgggtcttcgttctagggctagacttggtctctgatcgccgagaggtagcgcaggggctgtgggcccccggcaggggtcctgtcggaagctggccgcgcttctgtttgcgttcccaggaccctggcattgtctctagttgctgcttgtgctctctctttgcttttggtttgcttcatttggcccctggggccctggtaaaaccaggcaccgaatcgctcgcacacagagttccagtccccgcctgctgtctcctcagcagctggggttccgaggagaatgccctgcaagatggctccatcggccatggcgctcctgagaggctgtcagtgctgagtcaccgatctacctcattcgggtgggcagaacttatgtgtgccatgcgagtggctccagaccgctcctgagtgggaggaggggttcctgtagccgttgcgtcttctcaaacacggggagcagagtagaaagaggctctggccccttcccttgtgcccaccgggcctgccgcagtggctcagcagccccttcagtagcccgcctgaggaccgatgccagaggcaggcattcttccggaaaggcccactgaggcaggctccggctcctctggttggggctgttgttttgatggatcgtgtgcttttcccttacctcttatcacttgctgtcatctgttgacttaggcccagtctgcagatgtgtgtagtgttcctttttgggttagctttggcagtattgagttttacttcctcctctttttagtggaagacagaccataatcccagtgtgagtgaaattgattgtttcatttattaccgttttggctgggggttagttccgacaccttcacagttgaagagcaggcagaaggagttgtgaagacaggacaatcttcttggggatgctggtcctggaagccagcgggcctcgctctgtctttggcctcattgaccccaggttctctggttaaaactgaaagcctactactggcctggtgcccatcaatccattgatccttgaggctgtgcccctggggcacccacctggcagggcctaccaccatgcgactgagctccctgttggctctgctgcggccagcgcttcccctcatcttagggctgtctctggggtgcagcctgagcctcctgcgggtttcctggatccagggggagggagaagatccctgtgtcgaggctgtaggggagcgaggagggccacagaatccagattccagagctcggctagaccaaagtgatgaagacttcaaaccccggattgtcccctactacagggaccccaacaagccctacaagaaggtgctcaggactcggtacatccagacagagctgggctcccgtgagcggttgctggtggctgtcctgacctcccgagctacactgtccactttggccgtggctgtgaaccgtacggtggcccatcacttccctcggttactctacttcactgggcagcggggggcccgggctccagcagggatgcaggtggtgtctcatggggatgagcggcccgcctggctcatgtcagagaccctgcgccaccttcacacacactttggggccgactacgactggttcttcatcatgcaggatgacacatatgtgcaggccccccgcctggcagcccttgctggccacctcagcatcaaccaagacctgtacttaggccgggcagaggagttcattggcgcaggcgagcaggcccggtactgtcatgggggctttggctacctgttgtcacggagtctcctgcttcgtctgcggccacatctggatggctgccgaggagacattctcagtgcccgtcctgacgagtggcttggacgctgcctcattgactctctgggcgtcggctgtgtctcacagcaccaggggcagcagtatcgctcatttgaactggccaaaaatagggaccctgagaaggaagggagctcggctttcctgagtgccttcgccgtgcaccctgtctccgaaggtaccctcatgtaccggctccacaaacgcttcagcgctctggagttggagcgggcttacagtgaaatagaacaactgcaggctcagatccggaacctgaccgtgctgacccccgaaggggaggcagggctgagctggcccgttgggctccctgctcctttcacaccacactctcgctttgaggtgctgggctgggactacttcacagagcagcacaccttctcctgtgcagatggggctcccaagtgcccactacagggggctagcagggcggacgtgggtgatgcgttggagactgccctggagcagctcaatcggcgctatcagccccgcctgcgcttccagaagcagcgactgctcaacggctatcggcgcttcgacccagcacggggcatggagtacaccctggacctgctgttggaatgtgtgacacagcgtgggcaccggcgggccctggctcgcagggtcagcctgctgcggccactgagccgggtggaaatcctacctatgccctatgtcactgaggccacccgagtgcagctggtgctgccactcctggtggctgaagctgctgcagccccggctttcctcgaggcctttgcagccaatgtcctggagccacgagaacatgcattgctcaccctgttgctggtctacgggccacgagaaggtggccgtggagctccagacccatttcttggggtgaaggctgcagcagcggagttagagcgacggtaccctgggacgaggctggcctggctcgctgtgcgagcagaggccccttcccaggtgcgactcatggacgtggtctcgaagaagcaccctgtggacactctcttcttccttaccaccgtgtggacaaggcctgggcccgaagtcctcaaccgctgtcgcatgaatgccatctctggctggcaggccttctttccagtccatttccaggagttcaatcctgccctgtcaccacagagatcacccccacctaacctcattacctttcctttgtctgcctcagccccaggaagggcaaggcaagatggtggacagatagagaattgttgctgtattttttaa

SEQ ID NO: 5815 - DNA, 8290 bp, Homo sapiens
  source 1..8290: mol_type = unassigned DNA
gcgcccaggagcagagccgcgctcgctccactcagctcccagctcccaggactccgctggctcctcgcaagtcctgccgcccagcccgccgggatgcagtccgggccgcggcccccacttccagcccccggcctggccttggctttgaccctgactatgttggccagacttgcatccgcggcttccttcttcggtgagaaccacctggaggtgcctgtggccacggctctgaccgacatagacctgcagctgcagttctccacgtcccagcccgaagccctccttctcctggcagcaggcccagctgaccacctcctgctgcagctctactctggacgcctgcaggtcagacttgttctgggccaggaggagctgaggctgcagactccagcagagacgctgctgagtgactccatcccccacactgtggtgctgactgtcgtagagggctgggccacgttgtcagtcgatgggtttctgaacgcctcctcagcagtcccaggagcccccctagaggtcccctatgggctctttgttgggggcactgggacccttggcctgccctacctgaggggaaccagccgacccctgaggggttgcctccatgcagccaccctcaatggccgcagcctcctccggcctctgacccccgatgtgcatgagggctgtgctgaagagttttctgccagtgatgatgtggccctgggcttctctgggccccactctctggctgccttccctgcctggggcactcaggacgaaggaaccctagagtttacactcaccacacagagccggcaggcacccttggccttccaggcagggggccggcgtggggacttcatctatgtggacatatttgagggccacctgcgggccgtggtggagaagggccagggtaccgtattgctccacaacagtgtgcctgtggccgatgggcagccccatgaggtcagtgtccacatcaatgctcaccggctggaaatctccgtggaccagtaccctacgcatacttcgaaccgaggagtcctcagctacctggagccacggggcagtctccttctcggggggctggatgcagaggcctctcgtcacctccaggaacaccgcctgggcctgacaccagaggccaccaatgcctccctgctgggctgcatggaagacctcagtgtcaatggccagaggcgggggctgcgggaagctttgctgacgcgcaacatggcagccggctgcaggctggaggaggaggagtatgaggacgatgcctatggacattatgaagctttctccaccctggcccctgaggcttggccagccatggagctgcctgagccatgcgtgcctgagccagggctgcctcctgtctttgccaatttcacccagctgctgactatcagcccactggtggtggccgaggggggcacagcctggcttgagtggaggcatgtgcagcccacgctggacctgatggaggctgagctgcgcaaatcccaggtgctgttcagcgtgacccgaggggcacgccatggcgagctcgagctggacatcccgggagcccaggcacgaaaaatgttcaccctcctggacgtggtgaaccgcaaggcccgcttcatccacgatggctctgaggacacctccgaccagctggtgctggaggtgtcggtgacggctcgggtgcccatgccctcatgccttcggaggggccaaacatacctcctgcccatccaggtcaaccctgtcaatgacccaccccacatcatcttcccacatggcagcctcatggtgatcctggaacacacgcagaagccgctggggcctgaggttttccaggcctatgacccggactctgcctgtgagggcctcaccttccaggtccttggcacctcctctggcctccccgtggagcgccgagaccagcctggggagccggcgaccgagttctcctgccgggagttggaggccggcagcctagtctatgtccaccgcggtggtcctgcacaggacttgacgttccgggtcagcgatggactgcaggccagccccccggccacgctgaaggtggtggccatccggccggccatacagatccaccgcagcacagggttgcgactggcccaaggctctgccatgcccatcttgcccgccaacctgtcggtggagaccaatgccgtggggcaggatgtgagcgtgctgttccgcgtcactggggccctgcagtttggggagctgcagaagcagggggcaggtggggtggagggtgctgagtggtgggccacacaggcgttccaccagcgggatgtggagcagggccgcgtgaggtacctgagcactgacccacagcaccacgcttacgacaccgtggagaacctggccctggaggtgcaggtgggccaggagatcctgagcaatctgtccttcccagtgaccatccagagagccactgtgtggatgctgcggctggagccactgcacactcagaacacccagcaggagaccctcaccacagcccacctggaggccaccctggaggaggcaggcccaagccccccaaccttccattatgaggtggttcaggctcccaggaaaggcaaccttcaactacagggcacaaggctgtcagatggccagggcttcacccaggatgacatacaggctggccgggtgacctatggggccacagcacgtgcctcagaggcagtcgaggacaccttccgtttccgtgtcacagctccaccatatttctccccactctataccttccccatccacattggtggtgacccagatgcgcctgtcctcaccaatgtcctcctcgtggtgcctgagggtggtgagggtgtcctctctgctgaccacctctttgtcaagagtctcaacagtgccagctacctctatgaggtcatggagcggccccgccatgggaggttggcttggcgtgggacacaggacaagaccactatggtgacatccttcaccaatgaagacctgttgcgtggccggctggtctaccagcatgatgactccgagaccacagaagatgatatcccatttgttgctacccgccagggcgagagcagtggtgacatggcctgggaggaggtacggggtgtcttccgagtggccatccagcccgtgaatgaccacgcccctgtgcagaccatcagccggatcttccatgtggcccggggtgggcggcggctgctgactacagacgacgtggccttcagcgatgctgactcgggctttgctgacgcccagctggtgcttacccgcaaggacctcctctttggcagtatcgtggccgtagatgagcccacgcggcccatctaccgcttcacccaggaggacctcaggaagaggcgagtactgttcgtgcactcaggggctgaccgtggctggatccagctgcaggtgtccgacgggcaacaccaggccactgcgctgctggaggtgcaggcctcggaaccctacctccgtgtggccaacggctccagccttgtggtccctcaaggaggccagggcaccatcgacacggccgtgctccacctggacaccaacctcgacatccgcagtggggatgaggtccactaccacgtcacagctggccctcgctggggacagctagtccgggctggtcagccagccacagccttctcccagcaggacctgctggatggggccgttctctatagccacaatggcagcctcagcccccgcgacaccatggccttctccgtggaagcagggccagtgcacacggatgccaccctacaagtgaccattgccctagagggcccactggccccactgaagctggtccggcacaagaagatctacgtcttccagggagaggcagctgagatcagaagggaccagctggaggcagcccaggaggcagtgccacctgcagacatcgtattctcagtgaagagcccaccgagtgccggctacctggtgatggtgtcgcgtggcgccttggcagatgagccacccagcctggaccctgtgcagagcttctcccaggaggcagtggacacaggcagggtcctgtacctgcactcccgccctgaggcctggagcgatgccttctcgctggatgtggcctcaggcctgggtgctcccctcgagggcgtccttgtggagctggaggtgctgcccgctgccatcccactagaggcgcaaaacttcagcgtccctgagggtggcagcctcaccctggcccctccactgctccgtgtctccgggccctacttccccactctcctgggcctcagcctgcaggtgctggagccaccccagcatggagccctgcagaaggaggacggacctcaagccaggaccctcagcgccttctcctggagaatggtggaagagcagctgatccgctacgtgcatgacgggagcgagacactgacagacagttttgtcctgatggctaatgcctccgagatggatcgccagagccatcctgtggccttcactgtcactgtcctgcctgtcaatgaccaaccccccatcctcactacaaacacaggcctgcagatgtgggagggggccactgcgcccatccctgcggaggctctgaggagcacggacggcgactctgggtctgaggatctggtctacaccatcgagcagcccagcaacgggcgggtagtgctgcggggggcgccgggcactgaggtgcgcagcttcacgcaggcccagctggacggcgggctcgtgctgttctcacacagaggaaccctggatggaggcttccgcttccgcctctctgacggcgagcacacttcccccggacacttcttccgagtgacggcccagaagcaagtgctcctctcgctgaagggcagccagacactgactgtctgcccagggtccgtccagccactcagcagtcagaccctcagggccagctccagcgcaggcactgacccccagctcctgctctaccgtgtggtgcggggcccccagctaggccggctgttccacgcccagcaggacagcacaggggaggccctggtgaacttcactcaggcagaggtctacgctgggaatattctgtatgagcatgagatgccccccgagcccttttgggaggcccatgataccctagagctccagctgtcctcgccgcctgcccgggacgtggccgccacccttgctgtggctgtgtcttttgaggctgcctgtccccagcgccccagccacctctggaagaacaaaggtctctgggtccccgagggccagcgggccaggatcaccgtggctgctctggatgcctccaatctcttggccagcgttccatcaccccagcgctcagagcatgatgtgctcttccaggtcacacagttccccagccggggccagctgttggtgtccgaggagcccctccatgctgggcagccccacttcctgcagtcccagctggctgcagggcagctagtgtatgcccacggcggtgggggcacccagcaggatggcttccactttcgtgcccacctccaggggccagcaggggcctccgtggctggaccccaaacctcagaggcctttgccatcacggtgagggatgtaaatgagcggccccctcagccacaggcctctgtcccactccggctcacccgaggctctcgtgcccccatctcccgggcccagctgagtgtggtggacccagactcagctcctggggagattgagtacgaggtccagcgggcaccccacaacggcttcctcagcctggtgggtggtggcctggggcccgtgacccgcttcacgcaagccgatgtggattcagggcggctggccttcgtggccaacgggagcagcgtggcaggcatcttccagctgagcatgtctgatggggccagcccacccctgcccatgtccctggctgtggacatcctaccatccgccatcgaggtgcagctgcgggcacccctggaggtgccccaagctttggggcgctcctcactgagccagcagcagctccgggtggtttcagatcgggaggagccagaggcagcataccgcctcatccagggaccccagtatgggcatctcctggtgggcgggcggcccacctcggccttcagccaattccagatagaccagggcgaggtggtctttgccttcaccaacttctcctcctctcatgaccacttcagagtcctggcactggctaggggtgtcaatgcatcagccgtagtgaacgtcactgtgagggctctgctgcatgtgtgggcaggtgggccatggccccagggtgccaccctgcgcctggaccccaccgtcctagatgctggcgagctggccaaccgcacaggcagtgtgccgcgcttccgcctcctggagggaccccggcatggccgcgtggtccgcgtgccccgagccaggacggagcccgggggcagccagctggtggagcagttcactcagcaggaccttgaggacgggaggctggggctggaggtgggcaggccagaggggagggcccccggccccgcaggtgacagtctcactctggagctgtgggcacagggcgtcccgcctgctgtggcctccctggactttgccactgagccttacaatgctgcccggccctacagcgtggccctgctcagtgtccccgaggccgcccggacggaagcagggaagccagagagcagcacccccacaggcgagccaggccccatggcatccagccctgagcccgctgtggccaagggaggcttcctgagcttccttgaggccaacatgttcagcgtcatcatccccatgtgcctggtacttctgctcctggcgctcatcctgcccctgctcttctacctccgaaaacgcaacaagacgggcaagcatgacgtccaggtcctgactgccaagccccgcaacggcctggctggtgacaccgagacctttcgcaaggtggagccaggccaggccatcccgctcacagctgtgcctggccaggggccccctccaggaggccagcctgacccagagctgctgcagttctgccggacacccaaccctgcccttaagaatggccagtactgggtgtgaggcctggcctgggcccagatgctgatcgggccagggacaggcttgcccatgtcccgggccccattgcttccatgcctggtgctgtctgagtatccccagagcaagagagacctggagacaccaggggtggagggtcctgggagatagtcccaggggtccgggacagagtggagtcaagagctggaacctccctcagctcactccgagcctggagaactgcaggggccaaggtggaggcaggcttaagttcagtcctcctgccctggagctggtttgggctgtcaaaaccagggtaacctcctacatgggtcatgactctgggtcctgggtctgtgaccttgggtaagtcgcgcctgacccaggctgctaagagggcaaggagaaggaagtaccctggggagggaagggacagaggaagctattcctggcttttccactccaacccaggccaccctttgtctctgccccagagttgagaaaaaaacttcctcccctggttttttagggagatggtatcccctggagtagagggcaagaggagagagcgcctccagtctagaaggcataagccaataggataatatattcagggtgcagggtgggtaggttgctctggggatgggtttatttaagggagattgcaaggaagctatttaacatggtgctgagctagccaggactgatggagcccctgggggtgtgggatggaggagggtctgcagccagttcattcccagggccccatcttgatgggccaagggctaaacatgcatgtgtcagtggctttggagcaggttaggctggggctcatcgagggtctcaggccgaggccactgcggtgccagtgcccccctgaggactagggcaggcagctgggggcacttggttccatggagcctggataaacagtgctttggaggctctggacagctgtgtggtgtttgtgtcttaactatgcactgggcccttgtctgcgtcggcttgcatacagagggcccctggggtcggccctccggcctggcctcagccagtgggatggacagggccaggcaggcctctgaacttccacctcctggggcctcccagacctcctgtgcccccacctgtgtgggcaggtgggccagtcttcgggtgatgggaccaaaccccttcagttcagtagagaaaggctaggtcctctacaaagagctgcaagacaaaaattaaaataaatgctccccaccctaga

SEQ ID NO: 5816 - DNA, 981 bp, Homo sapiens
  source 1..981: mol_type = unassigned DNA
gagcagcatcgggaggagccagaggcagcataccgcctcatccagggaccccagtatgggcatctcctggtgggcgggcggcccacctcggccttcagccaattccagatagaccagggcgaggtggtctttgccttcaccaacttctcctcctctcatgaccacttcagagtcctggcactggctaggggtgtcaatgcatcagccgtagtgaacgtcactgtgagggctctgctgcatgtgtgggcaggtgggccatggccccagggtgccaccctgcgcctggaccccaccgtcctagatgctggcgagctggccaaccgcacaggcagtgtgccgcgcttccgcctcctggagggaccccggcatggccgcgtggtccgcgtgccccgagccaggacggagcccgggggcagccagctggtggagcagttcactcagcaggaccttgaggacgggaggctggggctggaggtgggcaggccagaggggagggcccccggccccgcaggtgacagtctcactctggagctgtgggcacagggcgtcccgcctgctgtggcctccctggactttgccactgagccttacaatgctgcccggccctacagcgtggccctgctcagtgtccccgaggccgcccggacggaagcagggaagccagagagcagcacccccacaggcgagccaggccccatggcatccagccctgagcccgctgtggccaagggaggcttcctgagcttccttgaggccaacatgttcagcgtcatcatccccatgtgcctggtacttctgctcctggcgctcatcctgcccctgctcttctacctccgaaaacgcaacaagacgggcaagcatgacgtccaggtcctgactgccaagccccgcaacggcctggctggtgacaccgagacctttcgcaaggtggagccaggccaggccatcccgctcacagctgtgcctggccaggggccccct

SEQ ID NO: 5817 - DNA, 4550 bp, Homo sapiens
  source 1..4550: mol_type = unassigned DNA
ggcgagctaagccggaggatgtgcagctgcggcggcggcgccggctacgaagaggacggggacaggcgccgtgcgaaccgagcccagccagccggaggacgcgggcagggcgggacgggagcccggactcgtctgccgccgccgtcgtcgccgtcgtgccggccccgcgtccccgcgcgcgagcgggaggagccgccgccacctcgcgcccgagccgccgctagcgcgcgccgggcatggtcccctcttaaaggcgcaggccgcggcggcgggggcgggcgtgcggaacaaagcgccggcgcggggcctgcgggcggctcgggggccgcgatgggcgcggcgggcccgcggcggcggcggcgctgcccgggccgggcctcgcggcgctagggcgggctggcctccgcgggcgggggcagcgggctgagggcgcgcggagcctgcggcggcggcccggcgggcggagcggcgcgggcatggccgcgcgcggccggcgcgcctggctcagcgtgctgctcgggctcgtcctgggcttcgtgctggcctcgcggctcgtcctgccccgggcttccgagctgaagcgagcgggcccacggcgccgcgccagccccgagggctgccggtccgggcaggcggcggcttcccaggccggcggggcgcgcggcgatgcgcgcggggcgcagctctggccgcccggctcggacccagatggcggcccgcgcgacaggaactttctcttcgtgggagtcatgaccgcccagaaatacctgcagactcgggccgtggccgcctacagaacatggtccaagacaattcctgggaaagttcagttcttctcaagtgagggttctgacacatctgtaccaattccagtagtgccactacggggtgtggacgactcctacccgccccagaagaagtccttcatgatgctcaagtacatgcacgaccactacttggacaagtatgaatggtttatgagagcagatgatgacgtgtacatcaaaggagaccgtctggagaacttcctgaggagtttgaacagcagcgagcccctctttcttgggcagacaggcctgggcaccacggaagaaatgggaaaactggccctggagcctggtgagaacttctgcatgggggggcctggcgtgatcatgagccgggaggtgcttcggagaatggtgccgcacattggcaagtgtctccgggagatgtacaccacccatgaggacgtggaggtgggaaggtgtgtccggaggtttgcaggggtgcagtgtgtctggtcttatgagatgcagcagcttttttatgagaattacgagcagaacaaaaaggggtacattagagatctccataacagtaaaattcaccaagctatcacattacaccccaacaaaaacccaccctaccagtacaggctccacagctacatgctgagccgcaagatatccgagctccgccatcgcacaatacagctgcaccgcgaaattgtcctgatgagcaaatacagcaacacagaaattcataaagaggacctccagctgggaatccctccctccttcatgaggtttcagccccgccagcgagaggagattctggaatgggagtttctgactggaaaatacttgtattcggcagttgacggccagccccctcgaagaggaatggactccgcccagagggaagccttggacgacattgtcatgcaggtcatggagatgatcaatgccaacgccaagaccagagggcgcatcattgacttcaaagagatccagtacggctaccgccgggtgaaccccatgtatggggctgagtacatcctggacctgctgcttctgtacaaaaagcacaaagggaagaaaatgacggtccctgtgaggaggcacgcgtatttacagcagactttcagcaaaatccagtttgtggagcatgaggagctggatgcacaagagttggccaagagaatcaatcaggaatctggatccttgtcctttctctcaaactccctgaagaagctcgtcccctttcagctccctgggtcgaagagtgagcacaaagaacccaaagataaaaagataaacatactgattcctttgtctgggcgtttcgacatgtttgtgagatttatgggaaactttgagaagacgtgtcttatccccaatcagaacgtcaagctcgtggttctgcttttcaattctgactccaaccctgacaaggccaaacaagttgaactgatgagagattaccgcattaagtaccctaaagccgacatgcagattttgcctgtgtctggagagttttcaagagccctggccctggaagtaggatcctcccagtttaacaatgaatctttgctcttcttctgcgacgtcgacctcgtgtttactacagaattccttcagcgatgtcgagcaaatacagttctgggccaacaaatatattttccaatcatcttcagccagtatgacccaaagattgtttatagtgggaaagttcccagtgacaaccattttgcctttactcagaaaactggcttctggagaaactatgggtttggcatcacgtgtatttataagggagatcttgtccgagtgggtggctttgatgtttccatccaaggctgggggctggaggatgtggaccttttcaacaaggttgtccaggcaggtttgaagacgtttaggagccaggaagtaggagtagtccacgtccaccatcctgtcttttgtgatcccaatcttgaccccaaacagtacaaaatgtgcttggggtccaaagcatcgacctatgggtccacccagcagctggctgagatgtggctggaaaaaaatgatccaagttacagtaaaagcagcaataataatggctcagtgaggacagcctaatgtccagctttgctggaaaagacgtttttaattatctaatttatttttcaaaaattttttgtatgatcagtttttgaagtccgtatacaaggatatattttacaagtggttttcttacataggactcctttaagattgagctttctgaacaagaaggtgatcagtgtttgcctttgaacacatcttcttgctgaacattatgtagcagacctgcttaactttgacttgaaatgtacctgatgaacaaaacttttttaaaaaaatgttttcttttgagaccctttgctccagtcctatggcagaaaacgtgaacattcctgcaaagtattattgtaacaaaacactgtaactctggtaaatgttctgttgtgattgttaacattccacagattctaccttttgtgttttgttttttttttttacaattgttttaaagccatttcatgttccagttgtaagataaggaaatgtgataatagctgtttcatcattgtcttcaggagagctttccagagttgatcatttcctctcatggtactctgctcagcatggccacgtaggttttttgtttgttttgttttgttctttttttgagacggagtctcactctgttacccaggctggaatgcagtggcgcaatcttggctcactttaacctccacttccctggttcaagcaattcccctgcctttgcctcccgagtagctgggattacaggcacacaccaccacgcccagctagtttttttgtatttttagtagagacggggtttcaccatgcaagcccagctggccacgtaggttttaaagcaaggggcgtgaagaaggcacagtgaggtatgtggctgttctcgtggtagttcattcggcctaaatagacctggcattaaatttcaagaaggatttggcattttctcttcttgacccttctctttaaagggtaaaatattaatgtttagaatgacaaagatgaattattacaataaatctgatgtacacagactgaaacatacacacatacaccctaatcaaaacgttggggaaaaatgtatttggttttgttcctttcatcctgtctgtgttatgtgggtggagatggttttcattctttcattactgttttgttttatcctttgtatctgaaatacctttaatttatttaatatctgttgttcagagctctgccatttcttgagtacctgttagttagtattatttatgtgtatcgggagtgtgtttagtctgttttatttgcagtaaaccgatctccaaagatttccttttggaaacgctttttcccctccttaatttttatattccttactgttttactaaatattaagtgttctttgacaattttggtgctcatgtgttttggggacaaaagtgaaatgaatctgtcattataccagaaagttaaattctcagatcaaatgtgccttaataaatttgttttcatttagatttcaaacagtgatagacttgccattttaatacacgtcattggagggctgcgtatttgtaaatagcctgatgctcatttggaaaaataaaccagtgaacaatatttttctattgtacttttcgaaccattttgtctcattattcctgttttagctgaagaattgtattacatttggagagtaaaaaacttaaacacgattca

SEQ ID NO: 5818 - DNA, 3850 bp, Homo sapiens
  source 1..3850: mol_type = unassigned DNA
gggtggcagcctaggagcggacgcgttgccgccgccgctgctcctcctcctcctcctgcagctcctccagctgccgctgctgccgccgctgccgccaccgccgccgccgggagaagtttcactcccgacccttgctcggagccccggcccagagctgagcgggagcccggcaggcagctgcagcccgcggcagtcgaggcgtccgcggcgcttcgacctccagccggtgtcggcgcctaggcggccggctgcggccgcggctgggggcgcaaaggcggaggaggggcgggtgtgagccggggaaaccgcgtgccgcgccgcgacagcccagcgagcgtccgcgcccgggacagccgcgatggctgtgcgctctcgccgcccgtggatgagcgtggcattagggctggtgctgggcttcaccgccgcgtcctggctcatcgcccccagggtggcggagctgagcgagaggaagagacgtggctccagcctctgctcctactacggtcgctctgctgctggcccccgcgccggcgctcagcagccgctcccccagccccagtcccgaccacggcaggagcagtcgccgccccccgcgcgccaggatctccaggggccaccgctgcccgaggcagcacccgggatcaccagttttcgaagcagcccctggcagcagccacctccgctgcagcagcggcggcgaggacgcgagcctgagggcgcgacggggcttcccggtgctccagcggccgagggggagcccgaggaggaggacgggggcgcggctgggcagcggagagacggccggccggggagtagccacaacggcagcggggacgggggcgctgccgccccgagcgcccgaccccgggacttcctgtacgtgggggtgatgaccgcgcagaagtacctgggcagccgcgcgctggccgcgcagcggacctgggcgcgtttcatcccgggccgcgtggagttcttttccagccagcagccccccaacgccggccagcccccgccacccctgcctgtcatcgcgctaccgggtgtggacgactcctatcctccccagaaaaagtccttcatgatgatcaagtacatgcacgaccactacctggacaagtatgagtggttcatgcgcgccgacgacgatgtctacatcaaaggtgataaattagaagagtttcttagatcgctaaacagcagtaagcctctctacctgggacagactggcctggggaatattgaagagcttggaaagctgggactggagcctggggaaaacttctgtatgggaggacctggcatgatctttagccgagaagttctcaggaggatggtgccacatattggtgaatgccttagagaaatgtacacgactcatgaggatgtggaagtaggaagatgcgttcgccgttttggtgggactcagtgtgtctggtcttacgagatgcaacaactgttccatgaaaattatgaacacaatcggaagggttacatccaagaccttcacaatagcaaaatccatgcagccataacacttcatcccaacaaaaggcctgcataccaatacaggctgcataattacatgctcagccgcaaaatttctgaacttcgctaccgcaccatccagctccacagggaaagtgccctgatgagcaagctcagtaacacagaagtgagcaaagaggaccagcagctgggagtgataccttctttcaaccacttccagcctcgggagagaaatgaagtgatagaatgggagttcctgacagggaagcttctatactcagcagctgagaaccagccccctcgacagagcctcagtagcattttaagaacagcactggatgataccgtcctacaggtgatggagatgatcaatgagaatgccaagagcagaggacggctcattgacttcaaggaaattcagtatggctaccgcagagttaaccccatgcacggggtggagtacattttggatttactccttttatacaaaagacacaagggaaggaaactgactgtgccagtgagacgtcatgcctatcttcagcagttgttcagcaagcctttcttcagagagaccgaagagctagatgtcaacagtcttgtggagagtattaacagtgaaactcagtcattctcctttatatctaattctttaaagatattatcttcttttcaaggtgccaaagaaatgggagggcacaatgaaaagaaagtacacattctcgttcctctcatcggaaggtatgacattttcttgagattcatggagaactttgaaaacatgtgtcttatcccaaagcagaatgtaaagttggtcattatccttttcagtagggattctggccaagactccagcaagcatattgagctgataaaagggtaccagaacaagtaccccaaagcagaaatgaccctgatcccaatgaagggagagttttccagaggtcttggtcttgaaatggcttctgcccagtttgacaatgacactttgctgctattttgtgatgttgacttgatcttcagagaagattttctccaacgatgtagagacaatacaattcagggacaacaggtgtactatcccatcatctttagccagtatgacccaaaggtaacaaacgggggaaatcctcccactgatgattacttcatattctcaaaaaagactggattttggagagactatggatatggcatcacctgtatttacaaaagtgatcttctaggtgcaggtggatttgatacctcaatacaaggctggggactagaagatgtagatctctacaataaagtcattctatctggcttaaggccattcagaagccaagaagtaggagtggtgcatattttccatccagttcattgtgatcctaacttggaccctaagcagtataagatgtgcttaggatccaaggcaagtactttcgcctcaaccatgcaactggctgaactctggcttgaaaaacatttaggtgtcaggtacaatcgaactctctcctgacagtccaggcaacacattttgccttttttaaggggagtttacctcattgttggttgttgttatttttattgtattattgttattttattattattattgttataattttattttgttgtcctggtcttaaactactcttggttgtcttcctaagggtgtttgttgacctcaagcaagaagagtctgcagttcactgatgtttcagatttctactgaagtcaatatgttattacttttatataactttatttgagattgagttaaatcatagcaatcaaatgacttttgaaacgcattcatcacaagagacagcttagaagaatgttctcttggggcttaaagatgcaatatcgacttttatttggtttctcaaattcaatgtgatacaaatatttactggtgaaaggtaccacaaaagtgctttatgcttcctatggggaagggactctgtaacataaacttgagttttgtaatttatacaaggacttaaatatataaacaataattttcttcatctttagaatttttaaagtaaatgaatacctatgattgtatgtttattttttaaaaaaagttttaaaaattgaggagttttgttccacaagcaaccggtactggctaccctggtcttatgacaattatgagctcctcacaactgtctgctataaatgcgaatgaactttattttctcaaggaaatatgatttaattaaatattcatgtacattttagaagctttatgaaacaatgtccttcatttgctggcaagaagataaaatatgacagaacctgtttatttaaaataaaacacaggtatagcagtattctttttcaaaaacactga

SEQ ID NO: 5819 - DNA, 3521 bp, Homo sapiens
  source 1..3521: mol_type = unassigned DNA
cccgggtcagcgcccgcccgcccgcgctcctcccggccgctcctcccgccccgcccggcccggcgccgactctgcggccgcccgacgagcccctcgcggcactgccccggccccggccccggccccggccccctcccgccgcaccgcccccggcccggccctccgccctccgcactcccgcctccctccctccgcccgctcccgcgccctcctccctccctcctccccagctgtcccgttcgcgtcatgccgagcctcccggccccgccggccccgctgctgctcctcgggctgctgctgctcggctcccggccggcccgcggcgccggcccagagccccccgtgctgcccatccgttctgagaaggagccgctgcccgttcggggagcggcaggctgcaccttcggcgggaaggtctatgccttggacgagacgtggcacccggacctaggggagccattcggggtgatgcgctgcgtgctgtgcgcctgcgaggcgcctcagtggggtcgccgtaccaggggccctggcagggtcagctgcaagaacatcaaaccagagtgcccaaccccggcctgtgggcagccgcgccagctgccgggacactgctgccagacctgcccccaggagcgcagcagttcggagcggcagccgagcggcctgtccttcgagtatccgcgggacccggagcatcgcagttatagcgaccgcggggagccaggcgctgaggagcgggcccgtggtgacggccacacggacttcgtggcgctgctgacagggccgaggtcgcaggcggtggcacgagcccgagtctcgctgctgcgctctagcctccgcttctctatctcctacaggcggctggaccgccctaccaggatccgcttctcagactccaatggcagtgtcctgtttgagcaccctgcagcccccacccaagatggcctggtctgtggggtgtggcgggcagtgcctcggttgtctctgcggctccttagggcagaacagctgcatgtggcacttgtgacactcactcacccttcaggggaggtctgggggcctctcatccggcaccgggccctggctgcagagaccttcagtgccatcctgactctagaaggccccccacagcagggcgtagggggcatcaccctgctcactctcagtgacacagaggactccttgcattttttgctgctcttccgagggctgctggaacccaggagtgggggactaacccaggttcccttgaggctccagattctacaccaggggcagctactgcgagaacttcaggccaatgtctcagcccaggaaccaggctttgctgaggtgctgcccaacctgacagtccaggagatggactggctggtgctgggggagctgcagatggccctggagtgggcaggcaggccagggctgcgcatcagtggacacattgctgccaggaagagctgcgacgtcctgcaaagtgtcctttgtggggctgatgccctgatcccagtccagacgggtgctgccggctcagccagcctcacgctgctaggaaatggctccctgatctatcaggtgcaagtggtagggacaagcagtgaggtggtggccatgacactggagaccaagcctcagcggagggatcagcgcactgtcctgtgccacatggctggactccagccaggaggacacacggccgtgggtatctgccctgggctgggtgcccgaggggctcatatgctgctgcagaatgagctcttcctgaacgtgggcaccaaggacttcccagacggagagcttcgggggcacgtggctgccctgccctactgtgggcatagcgcccgccatgacacgctgcccgtgcccctagcaggagccctggtgctaccccctgtgaagagccaagcagcagggcacgcctggctttccttggatacccactgtcacctgcactatgaagtgctgctggctgggcttggtggctcagaacaaggcactgtcactgcccacctccttgggcctcctggaacgccagggcctcggcggctgctgaagggattctatggctcagaggcccagggtgtggtgaaggacctggagccggaactgctgcggcacctggcaaaaggcatggcctccctgatgatcaccaccaagggtagccccagaggggagctccgagggcaggtgcacatagccaaccaatgtgaggttggcggactgcgcctggaggcggccggggccgagggggtgcgggcgctgggggctccggatacagcctctgctgcgccgcctgtggtgcctggtctcccggccctagcgcccgccaaacctggtggtcctgggcggccccgagaccccaacacatgcttcttcgaggggcagcagcgcccccacggggctcgctgggcgcccaactacgacccgctctgctcactctgcacctgccagagacgaacggtgatctgtgacccggtggtgtgcccaccgcccagctgcccacacccggtgcaggctcccgaccagtgctgccctgtttgccctgagaaacaagatgtcagagacttgccagggctgccaaggagccgggacccaggagagggctgctattttgatggtgaccggagctggcgggcagcgggtacgcggtggcaccccgttgtgcccccctttggcttaattaagtgtgctgtctgcacctgcaaggggggcactggagaggtgcactgtgagaaggtgcagtgtccccggctggcctgtgcccagcctgtgcgtgtcaaccccaccgactgctgcaaacagtgtccagtggggtcgggggcccacccccagctgggggaccccatgcaggctgatgggccccggggctgccgttttgctgggcagtggttcccagagagtcagagctggcacccctcagtgcccccttttggagagatgagctgtatcacctgcagatgtggggcaggggtgcctcactgtgagcgggatgactgttcactgccactgtcctgtggctcggggaaggagagtcgatgctgttcccgctgcacggcccaccggcggccagccccagagaccagaactgatccagagctggagaaagaagccgaaggctcttagggagcagccagagggccaagtgaccaagaggatggggcctgagctggggaaggggtggcatcgaggaccttcttgcattctcctgtgggaagcccagtgcctttgctcctctgtcctgcctctactcccacccccactacctctgggaaccacagctccacaagggggagaggcagctgggccagaccgaggtcacagccactccaagtcctgccctgccaccctcggcctctgtcctggaagccccacccctttcctcctgtacataatgtcactggcttgttgggatttttaatttatcttcactcagcaccaagggcccccgacactccactcctgctgcccctgagctgagcagagtcattattggagagttttgtatttattaaaacatttctttttcagtc

SEQ ID NO: 5820 - DNA, 531 bp, Homo sapiens
  source 1..531: mol_type = unassigned DNA
cccgggtcagcgcccgcccgcccgcgctcctcccggccgctcctcccgccccgcccggcccggcgccgactctgcggccgcccgacgagcccctcgcggcactgccccggccccggccccggccccggccccctcccgccgcaccgcccccggcccggccctccgccctccgcactcccgcctccctccctccgcccgctcccgcgccctcctccctccctcctccccagctgtcccgttcgcgtcatgccgagcctcccggccccgccggccccgctgctgctcctcgggctgctgctgctcggctcccggccggcccgcggcgccggcccagagccccccgtgctgcccatccgttctgagaaggagccgctgcccgttcggggagcggcaggctgcaccttcggcgggaaggtctatgccttggacgagacgtggcacccggacctaggggagccattcggggtgatgcgctgcgtgctgtgcgcctgcgaggcgacagggaccttgaggcccagagagatgaagtag

SEQ ID NO: 5821 - DNA, 2310 bp, Homo sapiens
  source 1..2310: mol_type = unassigned DNA
ggagagcacctgtctcagaaaggcccacatgtgcggccttgcaggactaacccaggttcccttgaggctccagattctacaccaggggcagctactgcgagaacttcaggccaatgtctcagcccaggtgagtggggatctggctctcgctgccacctgtcttggcctcttgctattgcccatcacaccctgctctgtccccaggaaccaggctttgctgaggtgctgcccaacctgacagtccaggagatggactggctggtgctgggggagctgcagatggccctggagtgggcaggcaggccagggctgcgcatcagtggacacattgctgccaggaagagctgcgacgtcctgcaaagtgtcctttgtggggctgatgccctgatcccagtccagacgggtgctgccggctcagccagcctcacgctgctaggaaatggctccctgatctatcaggtgcaagtggtagggacaagcagtgaggtggtggccatgacactggagaccaagcctcagcggagggatcagcgcactgtcctgtgccacatggctggactccagccaggaggacacacggccgtgggtatctgccctgggctgggtgcccgaggggctcatatgctgctgcagaatgagctcttcctgaacgtgggcaccaaggacttcccagacggagagcttcgggggcacgtggctgccctgccctactgtgggcatagcgcccgccatgacacgctgcccgtgcccctagcaggagccctggtgctaccccctgtgaagagccaagcagcagggcacgcctggctttccttggatacccactgtcacctgcactatgaagtgctgctggctgggcttggtggctcagaacaaggcactgtcactgcccacctccttgggcctcctggaacgccagggcctcggcggctgctgaagggattctatggctcagaggcccagggtgtggtgaaggacctggagccggaactgctgcggcacctggcaaaaggcatggcctccctgatgatcaccaccaagggtagccccagaggggagctccgagggcaggtgcacatagccaaccaatgtgaggttggcggactgcgcctggaggcggccggggccgagggggtgcgggcgctgggggctccggatacagcctctgctgcgccgcctgtggtgcctggtctcccggccctagcgcccgccaaacctggtggtcctgggcggccccgagaccccaacacatgcttcttcgaggggcagcagcgcccccacggggctcgctgggcgcccaactacgacccgctctgctcactctgcacctgccagagacgaacggtgatctgtgacccggtggtgtgcccaccgcccagctgcccacacccggtgcaggctcccgaccagtgctgccctgtttgccctgagaaacaagatgtcagagacttgccagggctgccaaggagccgggacccaggagagggggggcactggagaggtgcactgtgagaaggtgcagtgtccccggctggcctgtgcccagcctgtgcgtgtcaaccccaccgactgctgcaaacagtgtccagtggggtcgggggcccacccccagctgggggaccccatgcaggctgatgggccccggggctgccgttttgctgggcagtggttcccagagagtcagagctggcacccctcagtgcccccttttggagagatgagctgtatcacctgcagatgtggggcaggggtgcctcactgtgagcgggatgactgttcactgccactgtcctgtggctcggggaaggagagtcgatgctgttcccgctgcacggcccaccggcggccagccccagagaccagaactgatccagagctggagaaagaagccgaaggctcttagggagcagccagagggccaagtgaccaagaggatggggcctgagctggggaaggggtggcatcgaggaccttcttgcattctcctgtgggaagcccagtgcctttgctcctctgtcctgcctctactcccacccccactacctctgggaaccacagctccacaagggggagaggcagctgggccagaccgaggtcacagccactccaagtcctgccctgccaccctcggcctctgtcctggaagccccacccctttcctcctgtacataatgtcactggcttgttgggatttttaatttatcttcactcagcaccaagggcccccgacactccactcctgctgcccctgagctgagcagagtcattattggagagttttgtatttattaaaacatttctttttcagtc

SEQ ID NO: 5822 - DNA, 3155 bp, Homo sapiens
  source 1..3155: mol_type = unassigned DNA
atgccgagcctcccggccccgccggccccgctgctgctcctcgggctgctgctgctcggctcccggccggcccgcggcgccggcccagagccccccgtgctgcccatccgttctgagaaggagccgctgcccgttcggggagcggcaggctgcaccttcggcgggaaggtctatgccttggacgagacgtggcacccggacctaggggagccattcggggtgatgcgctgcgtgctgtgcgcctgcgaggcgcctcagtggggtcgccgtaccaggggccctggcagggtcagctgcaagaacatcaaaccagagtgcccaaccccggcctgtgggcagccgcgccagctgccgggacactgctgccagacctgcccccaggagcgcagcagttcggagcggcagccgagcggcctgtccttcgagtatccgcgggacccggagcatcgcagttatagcgaccgcggggagccaggcgctgaggagcgggcccgtggtgacggccacacggacttcgtggcgctgctgacagggccgaggtcgcaggcggtggcacgagcccgagtctcgctgctgcgctctagcctccgcttctctatctcctacaggcggctggaccgccctaccaggatccgcttctcagactccaatggcagtgtcctgtttgagcaccctgcagcccccacccaagatggcctggtctgtggggtgtggcgggcagtgcctcggttgtctctgcggctccttagggcagaacagctgcatgtggcacttgtgacactcactcacccttcaggggaggtctgggggcctctcatccggcaccgggccctggctgcagagaccttcagtgccatcctgactctagaaggccccccacagcagggcgtagggggcatcaccctgctcactctcagtgacacagaggactccttgcattttttgctgctcttccgagggctgctggaacccaggagtgggggactaacccaggttcccttgaggctccagattctacaccaggggcagctactgcgagaacttcaggccaatgtctcagcccaggaaccaggctttgctgaggtgctgcccaacctgacagtccaggagatggactggctggtgctgggggagctgcagatggccctggagtgggcaggcaggccagggctgcgcatcagtggacacattgctgccaggaagagctgcgacgtcctgcaaagtgtcctttgtggggctgatgccctgatcccagtccagacgggtgctgccggctcagccagcctcacgctgctaggaaatggctccctgatctatcaggccgtgggtatctgccctgggctgggtgcccgaggggctcatatgctgctgcagaatgagctcttcctgaacgtgggcaccaaggacttcccagacggagagcttcgggggcacgtggctgccctgccctactgtgggcatagcgcccgccatgacacgctgcccgtgcccctagcaggagccctggtgctaccccctgtgaagagccaagcagcagggcacgcctggctttccttggatacccactgtcacctgcactatgaagtgctgctggctgggcttggtggctcagaacaaggcactgtcactgcccacctccttgggcctcctggaacgccagggcctcggcggctgctgaagggattctatggctcagaggcccagggtgtggtgaaggacctggagccggaactgctgcggcacctggcaaaaggcatggcctccctgatgatcaccaccaagggtagccccagaggggagctccgagggcaggtgcacatagccaaccaatgtgaggttggcggactgcgcctggaggcggccggggccgagggggtgcgggcgctgggggctccggatacagcctctgctgcgccgcctgtggtgcctggtctcccggccctagcgcccgccaaacctggtggtcctgggcggccccgagaccccaacacatgcttcttcgaggggcagcagcgcccccacggggctcgctgggcgcccaactacgacccgctctgctcactctgcacctgccagagacgaacggtgatctgtgacccggtggtgtgcccaccgcccagctgcccacacccggtgcaggctcccgaccagtgctgccctgtttgccctgagaaacaagatgtcagagacttgccagggctgccaaggagccgggacccaggagagggctgctattttgatggtgaccggagctggcgggcagcgggtacgcggtggcaccccgttgtgcccccctttggcttaattaagtgtgctgtctgcacctgcaaggggggcactggagaggtgcactgtgagaaggtgcagtgtccccggctggcctgtgcccagcctgtgcgtgtcaaccccaccgactgctgcaaacagtgtccagtggggtcgggggcccacccccagctgggggaccccatgcaggctgatgggccccggggctgccgttttgctgggcagtggttcccagagagtcagagctggcacccctcagtgcccccttttggagagatgagctgtatcacctgcagatgtggggcaggggtgcctcactgtgagcgggatgactgttcactgccactgtcctgtggctcggggaaggagagtcgatgctgttcccgctgcacggcccaccggcggccagccccagagaccagaactgatccagagctggagaaagaagccgaaggctcttagggagcagccagagggccaagtgaccaagaggatggggcctgagctggggaaggggtggcatcgaggaccttcttgcattctcctgtgggaagcccagtgcctttgctcctctgtcctgcctctactcccacccccactacctctgggaaccacagctccacaagggggagaggcagctgggccagaccgaggtcacagccactccaagtcctgccctgccaccctcggcctctgtcctggaagccccacccctttcctcctgtacataatgtcactggcttgttgggatttttaatttatcttcactcagcaccaagggcccccgacactccactcctgctgcccctgagctgagcagagtcattattggagagttttgtatttattaaaacatttctttttcagtc

SEQ ID NO: 5823 - DNA, 2536 bp, Homo sapiens
  source 1..2536: mol_type = unassigned DNA
tcttaagcttcctagggcaccctggaggttcctttccatgttcctttttcataagccctgcctgggcatcctaattggcctagcctgcacagtgtctgagcgtagggccttcttgtctctctgctccaggtctgtggggtgtggcgggcagtgcctcggttgtctctgcggctccttagggcagaacagctgcatgtggcacttgtgacactcactcacccttcaggggaggtctgggggcctctcatccggcaccgggccctggctgcagagaccttcagtgccatcctgactctagaaggccccccacagcagggcgtagggggcatcaccctgctcactctcagtgacacagaggactccttgcattttttgctgctcttccgagggctgctggaacccaggagtgggggtaagtgggatgggggcaaaacacgtgagaaggttagggagagcacctgtctcagaaaggcccacatgtgcggccttgcaggactaacccaggttcccttgaggctccagattctacaccaggggcagctactgcgagaacttcaggccaatgtctcagcccaggtgagtggggatctggctctcgctgccacctgtcttggcctcttgctattgcccatcacaccctgctctgtccccaggaaccaggctttgctgaggtgctgcccaacctgacagtccaggagatggactggctggtgctgggggagctgcagatggccctggagtgggcaggcaggccagggctgcgcatcagtggacacattgctgccaggaagagctgcgacgtcctgcaaagtgtcctttgtggggctgatgccctgatcccagtccagacgggtgctgccggctcagccagcctcacgctgctaggaaatggctccctgatctatcaggtgcaagtggtagggacaagcagtgaggtggtggccatgacactggagaccaagcctcagcggagggatcagcgcactgtcctgtgccacatggctggactccagccaggaggacacacggccgtgggtatctgccctgggctgggtgcccgaggggctcatatgctgctgcagaatgagctcttcctgaacgtgggcaccaaggacttcccagacggagagcttcgggggcacgtggctgccctgccctactgtgggcatagcgcccgccatgacacgctgcccgtgcccctagcaggagccctggtgctaccccctgtgaagagccaagcagcagggcacgcctggctttccttggatacccactgtcacctgcactatgaagtgctgctggctgggcttggtggctcagaacaaggcactgtcactgcccacctccttgggcctcctggaacgccagggcctcggcggctgctgaagggattctatggctcagaggcccagggtgtggtgaaggacctggagccggaactgctgcggcacctggcaaaaggcatggcctccctgatgatcaccaccaagggtagccccagaggggagctccgagggcagagacgaacggtgatctgtgacccggtggtgtgcccaccgcccagctgcccacacccggtgcaggctcccgaccagtgctgccctgtttgccctgagaaacaagatgtcagagacttgccagggctgccaaggagccgggacccaggagagggctgctattttgatggtgaccggagctggcgggcagcgggtacgcggtggcaccccgttgtgcccccctttggcttaattaagtgtgctgtctgcacctgcaaggggggcactggagaggtgcactgtgagaaggtgcagtgtccccggctggcctgtgcccagcctgtgcgtgtcaaccccaccgactgctgcaaacagtgtccagtggggtcgggggcccacccccagctgggggaccccatgcaggctgatgggccccggggctgccgttttgctgggcagtggttcccagagagtcagagctggcacccctcagtgcccccttttggagagatgagctgtatcacctgcagatgtggggcaggggtgcctcactgtgagcgggatgactgttcactgccactgtcctgtggctcggggaaggagagtcgatgctgttcccgctgcacggcccaccggcggccagccccagagaccagaactgatccagagctggagaaagaagccgaaggctcttagggagcagccagagggccaagtgaccaagaggatggggcctgagctggggaaggggtggcatcgaggaccttcttgcattctcctgtgggaagcccagtgcctttgctcctctgtcctgcctctactcccacccccactacctctgggaaccacagctccacaagggggagaggcagctgggccagaccgaggtcacagccactccaagtcctgccctgccaccctcggcctctgtcctggaagccccacccctttcctcctgtacataatgtcactggcttgttgggatttttaatttatcttcactcagcaccaagggcccccgacactccactcctgctgcc

SEQ ID NO: 5824 - DNA, 3935 bp, Homo sapiens
  source 1..3935: mol_type = unassigned DNA
actctagctctcgccacaacctgccagccccagacctcggacgagagcgccccggggagctcggagcgcgtgcacgcgtggcagacggagaaggccagtgcccaggttagtgagcagtgcccggcgcccgcttccctcacctccttttccagcctttgcacagcttgaaggttctgtcaccttttgcagtggtccaaatgagaaaaaagtggaaaatgggaggcatgaaatacatcttttcgttgttgttctttcttttgctagaaggaggcaaaacagagcaagtaaaacattcagagacatattgcatgtttcaagacaagaagtacagagtgggtgagagatggcatccttacctggaaccttatgggttggtttactgcgtgaactgcatctgctcagagaatgggaatgtgctttgcagccgagtcagatgtccaaatgttcattgcctttctcctgtgcatattcctcatctgtgctgccctcgctgcccagactccttacccccagtgaacaataaggtgaccagcaagtcttgcgagtacaatgggacaacttaccaacatggagagctgttcgtagctgaagggctctttcagaatcggcaacccaatcaatgcacccagtgcagctgttcggagggaaacgtgtattgtggtctcaagacttgccccaaattaacctgtgccttcccagtctctgttccagattcctgctgccgggtatgcagaggagatggagaactgtcatgggaacattctgatggtgatatcttccggcaacctgccaacagagaagcaagacattcttaccaccgctctcactatgatcctccaccaagccgacaggctggaggtctgtcccgctttcctggggccagaagtcaccggggagctcttatggattcccagcaagcatcaggaaccattgtgcaaattgtcatcaataacaaacacaagcatggacaagtgtgtgtttccaatggaaagacctattctcatggcgagtcctggcacccaaacctccgggcatttggcattgtggagtgtgtgctatgtacttgtaatgtcaccaagcaagagtgtaagaaaatccactgccccaatcgatacccctgcaagtatcctcaaaaaatagacggaaaatgctgcaaggtgtgtccaggtaaaaaagcaaaagaacttccaggccaaagctttgacaataaaggctacttctgcggggaagaaacgatgcctgtgtatgagtctgtattcatggaggatggggagacaaccagaaaaatagcactggagactgagagaccacctcaggtagaggtccacgtttggactattcgaaagggcattctccagcacttccatattgagaagatctccaagaggatgtttgaggagcttcctcacttcaagctggtgaccagaacaaccctgagccagtggaagatcttcaccgaaggagaagctcagatcagccagatgtgttcaagtcgtgtatgcagaacagagcttgaagatttagtcaaggttttgtacctggagagatctgaaaagggccactgttaggcaagacagacagtattggatagggtaaagcaagaaaactcaagctgcagctggactgcaggcttattttgcttaagtcaacagtgccctaaaactccaaactcaaatgcagtcaattattcacgccatgcacagcataatttgctcctttgtgtggagtggtgtgtcagcccttgaacatctcctccaaagagactagaagagtcttaaattatatgtgggaggaggagggatagaacatcacaacactgctctagtttcttggagaatcacatttctttacaggttaaagacaaacaagaccccagggtttttatctagaaagttattcaagtgaaagaaagagaagggaattgcttagtaggagttctgcagtatagaacaattacttgtatgaaattatacctttgaattttagaatgtcatgtgttcttttaaaaaaattagctccccatcctccctcctcactccctccctccctccttctctctctctctctctctccctccctctctcacagacacacacacacacacacacacacacacacacacgcacgtccacactcacattaaacgaaagctttatttgaagcaaagctagccaagattctacgttacttttcccttgactggatcccaagtagcttggaagtttttgtgcccaggagagtaaataactgtgaacaagaggctctgcccttaggtctttgtggctgtttaagtcaccaacaatagagtcagggtaaagaataaaaacactttcatagcctcattcattcacttagaagtggtaataatttttccctaatgataccacttttcttttccccctgtacctatgggacttccagaaagaagttaaattgagtaaaatcatcagaaactgaatccatgtaagaaaaaataattgttgaagaaagaagttgatagaattcaaaaaggccatctttttgctttcacatcaataaaatttaccaagtaatagatcagtactcactaatatttttgagaccatagttgtctggtcagaaaaattatattaaattagtaaattctagaagctctttaaaagggaagttttccttcttctccaattataggagttgatttttactttgcaaagtggctcggtcctcatgagcatctgcatgttgactcttcagttaagaaaattgttgttcatttagggaggtggatattctgatgaagatctttatcctaaaccttcctactatccttgtcttattcatcaagcagatattttagtcaagaattccagagaaggctgctcctaaaatgtctacttgcagcccaataccagagcataaactatccattctggggtctggctttagaaatcatctttgtgggaagacctaattcttcacagcaaggatctcaggcatgccttctagatttgttccctctgaggggcaggaatgaactgtagaaatgttttaaggacccagaaaccccatatgtctcattccatgactataggtgagagaattctttcctaagagggtttgataccaataggggaaaatgtaaaatgttcagtctttatgacaacctggcataaaggagtcaattcttatgaaagagacacaagggccttatggccagggtttcttgggacaagactctcaccagcacatcacacacgttctccttggaagagagaagcagtacatcccggttgagaggtcacaaagcattagtttgtgtgtgtgtgtgtgtgtgtgtgtgtgtgtgtgtgtgtgtgtgtgtggtaaaggggggaaggtgttatgcggctgctccctccgtcccagaggtggcagtgattccataatgtggagactagtaactagatcctaaggcaaagaggtgtttctccttctggatgattcatcccaaagccttcccacccaggtgttctctgaaagcttagccttaagagaacacgcagagagtttccctagatatactcctgcctccaggtgctgggacacacctttgcaaaatgctgtgggaagcaggagctggggagctgtgttaagtcaaagtagaaaccctccagtgtttggtgttgtgtagagaataggacatagggtaaagaggccaagctgcctgtagttagtagagaagaatggatgtggttcttcttgtgtatttatttgtatcataaacacttggaacaacaaagaccataagcatcatttagcagttgtagccattttctagttaactcatgtaaacaagtaagagtaacataacagtattaccctttcactgttctcacaggacatgtacctaattatggtacttatttatgtagtcactgtatttctggatttttaaattaataaaaaagttaattttg

SEQ ID NO: 5825 - DNA, 1934 bp, Homo sapiens
  source 1..1934: mol_type = unassigned DNA
cggacgagagcgccccggggagctcggagcgcgtgcacgcgtggcagacggagaaggccagtgcccagcttgaaggttctgtcaccttttgcagtggtccaaatgagaaaaaagtggaaaatgggaggcatgaaatacatcttttcgttgttgttctttcttttgctagaaggaggcaaaacagagcaagtaaaacattcagagacatattgcatgtttcaagacaagaagtacagagtgggtgagagatggcatccttacctggaaccttatgggttggtttactgcgtgaactgcatctgctcagagaatgggaatgtgctttgcagccgagtcagatgtccaaatgttcattgcctttctcctgtgcatattcctcatctgtgctgccctcgctgcccagaagactccttacccccagtgaacaataaggtgaccagcaagtcttgcgagtacaatgggacaacttaccaacatggagagctgttcgtagctgaagggctctttcagaatcggcaacccaatcaatgcacccagtgcagctgttcggagggaaacgtgtattgtggtctcaagacttgccccaaattaacctgtgccttcccagtctctgttccagattcctgctgccgggtatgcagaggagatggagaactgtcatgggaacattctgatggtgatatcttccggcaacctgccaacagagaagcaagacattcttaccaccgctctcactatgatcctccaccaagccgacaggctggaggtctgtcccgctttcctggggccagaagtcaccggggagctcttatggattcccagcaagcatcaggaaccattgtgcaaattgtcatcaataacaaacacaagcatggacaagtgtgtgtttccaatggaaagacctattctcatggcgagtcctggcacccaaacctccgggcatttggcattgtggagtgtgtgctatgtacttgtaatgtcaccaagcaagagtgtaagaaaatccactgccccaatcgatacccctgcaagtatcctcaaaaaatagacggaaaatgctgcaaggtgtgtccaggtaaaaaagcaaaagaagaacttccaggccaaagctttgacaataaaggctacttctgcggggaagaaacgatgcctgtgtatgagtctgtattcatggaggatggggagacaaccagaaaaatagcactggagactgagagaccacctcaggtagaggtccacgtttggactattcgaaagggcattctccagcacttccatattgagaagatctccaagaggatgtttgaggagcttcctcacttcaagctggtgaccagaacaaccctgagccagtggaagatcttcaccgaaggagaagctcagatcagccagatgtgttcaagtcgtgtatgcagaacagagcttgaagatttagtcaaggttttgtacctggagagatctgaaaagggccactgttaggcaagacagacagtattggatagggtaaagcaagaaaactcaagctgcagctggactgcaggcttattttgcttaagtcaacagtgccctaaaactccaaactcaaatgcagtcaattattcacgccatgcacagcataatttgctcctttgtgtggagtggtgtgtcagcccttgaacatctcctccaaagagactagaagagtcttaaattatatgtgggaggaggagggatagaacatcacaacactgctctagtttcttggagaatcacatttctttacaggttaaagacaaacaagaccccagggtttttatctagaaagttattcaagtgaaagaaagagaagggaattgcttagtaggagttctgcagtatagaacaattacttgtatgaaattatacctttgaattttagaatgtcatgtgttcttttaaaaaaattagctccccat

SEQ ID NO: 5826 - DNA, 3860 bp, Homo sapiens
  source 1..3860: mol_type = unassigned DNA
gacggagaaggccagtgcccaggttagtgagcagtgcccggcgcccgcttccctcacctccttttccagcctttgcacagcttgaaggttctgtcaccttttgcagtggtccaaatgagaaaaaagtggaaaatgggaggcatgaaatacatcttttcgttgttgttctttcttttgctagaaggaggcaaaacagagcaagtaaaacattcagagacatattgcatgtttcaagacaagaagtacagagtgggtgagagatggcatccttacctggaaccttatgggttggtttactgcgtgaactgcatctgctcagagaatgggaatgtgctttgcagccgagtcagatgtccaaatgttcattgcctttctcctgtgcatattcctcatctgtgctgccctcgctgcccagactccttacccccagtgaacaataaggtgaccagcaagtcttgcgagtacaatgggacaacttaccaacatggagagctgttcgtagctgaagggctctttcagaatcggcaacccaatcaatgcacccagtgcagctgttcggagggaaacgtgtattgtggtctcaagacttgccccaaattaacctgtgccttcccagtctctgttccagattcctgctgccgggtatgcagaggagatggagaactgtcatgggaacattctgatggtgatatcttccggcaacctgccaacagagaagcaagacattcttaccaccgctctcactatgatcctccaccaagccgacaggctggaggtctgtcccgctttcctggggccagaagtcaccggggagctcttatggattcccagcaagcatcaggaaccattgtgcaaattgtcatcaataacaaacacaagcatggacaagtgtgtgtttccaatggaaagacctattctcatggcgagtcctggcacccaaacctccgggcatttggcattgtggagtgtgtgctatgtacttgtaatgtcaccaagcaagagtgtaagaaaatccactgccccaatcgatacccctgcaagtatcctcaaaaaatagacggaaaatgctgcaaggtgtgtccaggtaaaaaagcaaaagaacttccaggccaaagctttgacaataaaggctacttctgcggggaagaaacgatgcctgtgtatgagtctgtattcatggaggatggggagacaaccagaaaaatagcactggagactgagagaccacctcaggtagaggtccacgtttggactattcgaaagggcattctccagcacttccatattgagaagatctccaagaggatgtttgaggagcttcctcacttcaagctggtgaccagaacaaccctgagccagtggaagatcttcaccgaaggagaagctcagatcagccagatgtgttcaagtcgtgtatgcagaacagagcttgaagatttagtcaaggttttgtacctggagagatctgaaaagggccactgttaggcaagacagacagtattggatagggtaaagcaagaaaactcaagctgcagctggactgcaggcttattttgcttaagtcaacagtgccctaaaactccaaactcaaatgcagtcaattattcacgccatgcacagcataatttgctcctttgtgtggagtggtgtgtcagcccttgaacatctcctccaaagagactagaagagtcttaaattatatgtgggaggaggagggatagaacatcacaacactgctctagtttcttggagaatcacatttctttacaggttaaagacaaacaagaccccagggtttttatctagaaagttattcaagtgaaagaaagagaagggaattgcttagtaggagttctgcagtatagaacaattacttgtatgaaattatacctttgaattttagaatgtcatgtgttcttttaaaaaaattagctccccatcctccctcctcactccctccctccctccttctctctctctctctctctccctccctctctcacagacacacacacacacacacacacacacacacacacgcacgtccacactcacattaaacgaaagctttatttgaagcaaagctagccaagattctacgttacttttcccttgactggatcccaagtagcttggaagtttttgtgcccaggagagtaaataactgtgaacaagaggctctgcccttaggtctttgtggctgtttaagtcaccaacaatagagtcagggtaaagaataaaaacactttcatagcctcattcattcacttagaagtggtaataatttttccctaatgataccacttttcttttccccctgtacctatgggacttccagaaagaagttaaattgagtaaaatcatcagaaactgaatccatgtaagaaaaaataattgttgaagaaagaagttgatagaattcaaaaaggccatctttttgctttcacatcaataaaatttaccaagtaatagatcagtactcactaatatttttgagaccatagttgtctggtcagaaaaattatattaaattagtaaattctagaagctctttaaaagggaagttttccttcttctccaattataggagttgatttttactttgcaaagtggctcggtcctcatgagcatctgcatgttgactcttcagttaagaaaattgttgttcatttagggaggtggatattctgatgaagatctttatcctaaaccttcctactatccttgtcttattcatcaagcagatattttagtcaagaattccagagaaggctgctcctaaaatgtctacttgcagcccaataccagagcataaactatccattctggggtctggctttagaaatcatctttgtgggaagacctaattcttcacagcaaggatctcaggcatgccttctagatttgttccctctgaggggcaggaatgaactgtagaaatgttttaaggacccagaaaccccatatgtctcattccatgactataggtgagagaattctttcctaagagggtttgataccaataggggaaaatgtaaaatgttcagtctttatgacaacctggcataaaggagtcaattcttatgaaagagacacaagggccttatggccagggtttcttgggacaagactctcaccagcacatcacacacgttctccttggaagagagaagcagtacatcccggttgagaggtcacaaagcattagtttgtgtgtgtgtgtgtgtgtgtgtgtgtgtgtgtgtgtgtgtgtgtgtggtaaaggggggaaggtgttatgcggctgctccctccgtcccagaggtggcagtgattccataatgtggagactagtaactagatcctaaggcaaagaggtgtttctccttctggatgattcatcccaaagccttcccacccaggtgttctctgaaagcttagccttaagagaacacgcagagagtttccctagatatactcctgcctccaggtgctgggacacacctttgcaaaatgctgtgggaagcaggagctggggagctgtgttaagtcaaagtagaaaccctccagtgtttggtgttgtgtagagaataggacatagggtaaagaggccaagctgcctgtagttagtagagaagaatggatgtggttcttcttgtgtatttatttgtatcataaacacttggaacaacaaagaccataagcatcatttagcagttgtagccattttctagttaactcatgtaaacaagtaagagtaacataacagtattaccctttcactgttctcacaggacatgtacctaattatggtacttatttatgtagtcactgtatttctggatttttaaattaataaaaaagttaattttgaaaaatca

SEQ ID NO: 5827 - DNA, 2413 bp, Homo sapiens
  source 1..2413: mol_type = unassigned DNA
gacggagaaggccagtgcccagcttgaaggttctgtcaccttttgcagtggtccaaatgagaaaaaagtggaaaatgggaggcatgaaatacatcttttcgttgttgttctttcttttgctagaaggaggcaaaacagagcaagtaaaacattcagagacatattgcatgtttcaagacaagaagtacagagtgggtgagagatggcatccttacctggaaccttatgggttggtttactgcgtgaactgcatctgctcagagaatgggaatgtgctttgcagccgagtcagatgtccaaatgttcattgcctttctcctgtgcatattcctcatctgtgctgccctcgctgcccagactccttacccccagtgaacaataaggtgaccagcaagtcttgcgagtacaatgggacaacttaccaacatggagagctgttcgtagctgaagggctctttcagaatcggcaacccaatcaatgcacccagtgcagctgttcggagggaaacgtgtattgtggtctcaagacttgccccaaattaacctgtgccttcccagtctctgttccagattcctgctgccgggtatgcagaggagatggagaactgtcatgggaacattctgatggtgatatcttccggcaacctgccaacagagaagcaagacattcttaccaccgctctcactatgatcctccaccaagccgacaggctggaggtctgtcccgctttcctggggccagaagtcaccggggagctcttatggattcccagcaagcatcaggaaccattgtgcaaattgtcatcaataacaaacacaagcatggacaagtgtgtgtttccaatggaaagacctattctcatggcgagtcctggcacccaaacctccgggcatttggcattgtggagtgtgtgctatgtacttgtaatgtcaccaagcaagagtgtaagaaaatccactgccccaatcgatacccctgcaagtatcctcaaaaaatagacggaaaatgctgcaaggtgtgtccaggtaaaaaagcaaaagaacttccaggccaaagctttgacaataaaggctacttctgcggggaagaaacgatgcctgtgtatgagtctgtattcatggaggatggggagacaaccagaaaaatagcactggagactgagagaccacctcaggtagaggtccacgtttggactattcgaaagggcattctccagcacttccatattgagaagatctccaagaggatgtttgaggagcttcctcacttcaagctggtgaccagaacaaccctgagccagtggaagatcttcaccgaaggagaagctcagatcagccagatgtgttcaagtcgtgtatgcagaacagagcttgaagatttagtcaaggttttgtacctggagagatctgaaaagggccactgttaggcaagacagacagtattggatagggtaaagcaagaaaactcaagctgcagctggactgcaggcttattttgcttaagtcaacagtgccctaaaactccaaactcaaatgcagtcaattattcacgccatgcacagcataatttgctcctttgtgtggagtggtgtgtcagcccttgaacatctcctccaaagagactagaagagtcttaaattatatgtgggaggaggagggatagaacatcacaacactgctctagtttcttggagaatcacatttctttacaggttaaagacaaacaagaccccagggtttttatctagaaagttattcaagtgaaagaaagagaagggaattgcttagtaggagttctgcagtatagaacaattacttgtatgaaattatacctttgaattttagaatgtcatgtgttcttttaaaaaaattagctccccatcctccctcctcactccctccctccctccttctctctctctctctctctccctccctctctcacagacacacacacacacacacacacacacacacacacgcacgtccacactcacattaaacgaaagctttatttgaagcaaagctagccaagattctacgttacttttcccttgactggatcccaagtagcttggaagtttttgtgcccaggagagtaaataactgtgaacaagaggctctgcccttaggtctttgtggctgtttaagtcaccaacaatagagtcagggtaaagaataaaaacactttcatagcctcattcattcacttagaagtggtaataatttttccctaatgataccacttttcttttccccctgtacctatgggacttccagaaagaagttaaattgagtaaaatcatcagaaactgaatccatgtaagaaaaaataattgttgaagaaagaagttgatagaattcaaaaaggccatctttttgctttcacatcaataaaatttaccaagtaata

SEQ ID NO: 5828 - DNA, 3850 bp, Homo sapiens
  source 1..3850: mol_type = unassigned DNA
gtgcttgcggacttcccgccagcgccgagcggccggcttctcgggccaagtggggagcgagcgggagggcgggcaggtggccccgggccgccgcgcccgcgccttggctctgcccccgggagccgagcaagccgctgctccctcgtggtgtgagggcggtgatgtttttcctcccacccacttttgagttccccctcccccctcgcgcgcactctagctctcgccacaacctgccagccccagacctcggacgagagcgccccggggagctcggagcgcgtgcacgcgtggcagacggagaaggccagtgcccagcttgaaggttctgtcaccttttgcagtggtccaaatgagaaaaaagtggaaaatgggaggcatgaaatacatcttttcgttgttgttctttcttttgctagaaggaggcaaaacagagcaagtaaaacattcagagacatattgcatgtttcaagacaagaagtacagagtgggtgagagatggcatccttacctggaaccttatgggttggtttactgcgtgaactgcatctgctcagagaatgggaatgtgctttgcagccgagtcagatgtccaaatgttcattgcctttctcctgtgcatattcctcatctgtgctgccctcgctgcccaggagatggagaactgtcatgggaacattctgatggtgatatcttccggcaacctgccaacagagaagcaagacattcttaccaccgctctcactatgatcctccaccaagccgacaggctggaggtctgtcccgctttcctggggccagaagtcaccggggagctcttatggattcccagcaagcatcaggaaccattgtgcaaattgtcatcaataacaaacacaagcatggacaagtgtgtgtttccaatggaaagacctattctcatggcgagtcctggcacccaaacctccgggcatttggcattgtggagtgtgtgctatgtacttgtaatgtcaccaagcaagagtgtaagaaaatccactgccccaatcgatacccctgcaagtatcctcaaaaaatagacggaaaatgctgcaaggtgtgtccaggtaaaaaagcaaaagaacttccaggccaaagctttgacaataaaggctacttctgcggggaagaaacgatgcctgtgtatgagtctgtattcatggaggatggggagacaaccagaaaaatagcactggagactgagagaccacctcaggtagaggtccacgtttggactattcgaaagggcattctccagcacttccatattgagaagatctccaagaggatgtttgaggagcttcctcacttcaagctggtgaccagaacaaccctgagccagtggaagatcttcaccgaaggagaagctcagatcagccagatgtgttcaagtcgtgtatgcagaacagagcttgaagatttagtcaaggttttgtacctggagagatctgaaaagggccactgttaggcaagacagacagtattggatagggtaaagcaagaaaactcaagctgcagctggactgcaggcttattttgcttaagtcaacagtgccctaaaactccaaactcaaatgcagtcaattattcacgccatgcacagcataatttgctcctttgtgtggagtggtgtgtcagcccttgaacatctcctccaaagagactagaagagtcttaaattatatgtgggaggaggagggatagaacatcacaacactgctctagtttcttggagaatcacatttctttacaggttaaagacaaacaagaccccagggtttttatctagaaagttattcaagtgaaagaaagagaagggaattgcttagtaggagttctgcagtatagaacaattacttgtatgaaattatacctttgaattttagaatgtcatgtgttcttttaaaaaaattagctccccatcctccctcctcactccctccctccctccttctctctctctctctctctccctccctctctcacagacacacacacacacacacacacacacacacacacgcacgtccacactcacattaaacgaaagctttatttgaagcaaagctagccaagattctacgttacttttcccttgactggatcccaagtagcttggaagtttttgtgcccaggagagtaaataactgtgaacaagaggctctgcccttaggtctttgtggctgtttaagtcaccaacaatagagtcagggtaaagaataaaaacactttcatagcctcattcattcacttagaagtggtaataatttttccctaatgataccacttttcttttccccctgtacctatgggacttccagaaagaagttaaattgagtaaaatcatcagaaactgaatccatgtaagaaaaaataattgttgaagaaagaagttgatagaattcaaaaaggccatctttttgctttcacatcaataaaatttaccaagtaatagatcagtactcactaatatttttgagaccatagttgtctggtcagaaaaattatattaaattagtaaattctagaagctctttaaaagggaagttttccttcttctccaattataggagttgatttttactttgcaaagtggctcggtcctcatgagcatctgcatgttgactcttcagttaagaaaattgttgttcatttagggaggtggatattctgatgaagatctttatcctaaaccttcctactatccttgtcttattcatcaagcagatattttagtcaagaattccagagaaggctgctcctaaaatgtctacttgcagcccaataccagagcataaactatccattctggggtctggctttagaaatcatctttgtgggaagacctaattcttcacagcaaggatctcaggcatgccttctagatttgttccctctgaggggcaggaatgaactgtagaaatgttttaaggacccagaaaccccatatgtctcattccatgactataggtgagagaattctttcctaagagggtttgataccaataggggaaaatgtaaaatgttcagtctttatgacaacctggcataaaggagtcaattcttatgaaagagacacaagggccttatggccagggtttcttgggacaagactctcaccagcacatcacacacgttctccttggaagagagaagcagtacatcccggttgagaggtcacaaagcattagtttgtgtgtgtgtgtgtgtgtgtgtgtgtgtgtgtgtgtgtgtgtgtgtggtaaaggggggaaggtgttatgcggctgctccctccgtcccagaggtggcagtgattccataatgtggagactagtaactagatcctaaggcaaagaggtgtttctccttctggatgattcatcccaaagccttcccacccaggtgttctctgaaagcttagccttaagagaacacgcagagagtttccctagatatactcctgcctccaggtgctgggacacacctttgcaaaatgctgtgggaagcaggagctggggagctgtgttaagtcaaagtagaaaccctccagtgtttggtgttgtgtagagaataggacatagggtaaagaggccaagctgcctgtagttagtagagaagaatggatgtggttcttcttgtgtatttatttgtatcataaacacttggaacaacaaagaccataagcatcatttagcagttgtagccattttctagttaactcatgtaaacaagtaagagtaacataacagtattaccctttcactgttctcacaggacatgtacctaattatggtacttatttatgtagtcactgtatttctggatttttaaattaataaaaaagttaattttg

SEQ ID NO: 5829 - DNA, 1658 bp, Homo sapiens
  source 1..1658: mol_type = unassigned DNA
ccagacctcggacgagagcgccccggggagctcggagcgcgtgcacgcgtggcagacggagaaggccagtgcccagcttgaaggttctgtcaccttttgcagtggtccaaatgagaaaaaagtggaaaatgggaggcatgaaatacatcttttcgttgttgttctttcttttgctagaaggaggcaaaacagagcaagtaaaacattcagagacatattgcatgtttcaagacaagaagtacagagtgggtgagagatggcatccttacctggaaccttatgggttggtttactgcgtgaactgcatctgctcagagaatgggaatgtgctttgcagccgagtcagatgtccaaatgttcattgcctttctcctgtgcatattcctcatctgtgctgccctcgctgcccagactccttacccccagtgaacaataaggtgaccagcaagtcttgcgagtacaatgggacaacttaccaacatggagagctgttcgtagctgaagggctctttcagaatcggcaacccaatcaatgcacccagtgcagctgttcggagggaaacgtgtattgtggtctcaagacttgccccaaattaacctgtgccttcccagtctctgttccagattcctgctgccgggtatgcagaggagatggagaactgtcatgggaacattctgatggtgatatcttccggcaacctgccaacagagaagcaagacattcttaccaccgctctcactatgatcctccaccaagccgacaggctggaggtctgtcccgctttcctggggccagaagtcaccggggagctcttatggattcccagcaagcatcaggaaccattgtgcaaattgtcatcaataacaaacacaagcatggacaagtgtgtgtttccaatggaaagacctattctcatggcgagtcctggcacccaaacctccgggcatttggcattgtggagtgtgtgctatgtacttgtaatgtcaccaagcaagagtgtaagaaaatccactgccccaatcgatacccctgcaagtatcctcaaaaaatagacggaaaatgctgcaaggtgtgtccaggtaaaaaagcaaaagaagaacttccaggccaaagctttgacaataaaggctacttctgcggggaagaaacgatgcctgtgtatgagtctgtattcatggaggatggggagacaaccagaaaaatagcactggagactgagagaccacctcaggtagaggtccacgtttggactattcgaaagggcattctccagcacttccatattgagaagatctccaagaggatgtttgaggagcttcctcacttcaagctggtgaccagaacaaccctgagccagtggaagatcttcaccgaaggagaagctcagatcagccagatgtgttcaagtcgtgtatgcagaacagagcttgaagatttagtcaaggttttgtacctggagagatctgaaaagggccactgttaggcaagacagacagtattggatagggtaaagcaagaaaactcaagctgcagctggactgcaggcttattttgcttaagtcaacagtgccctaaaactccaaactcaaatgcagtcaattattcacgccatgcacagcataatttgctcctttgtgtggagtggtgtgtcagccct

SEQ ID NO: 5830 - DNA, 1537 bp, Homo sapiens
  source 1..1537: mol_type = unassigned DNA
ccagacctcggacgagagcgccccggggagctcggagcgcgtgcacgcgtggcagacggagaaggccagtgcccagcttgaaggttctgtcaccttttgcagtggtccaaatgagaaaaaagtggaaaatgggaggcatgaaatacatcttttcgttgttgttctttcttttgctagaaggaggcaaaacagagcaagtaaaacattcagagacatattgcatgtttcaagacaagaagtacagagtgggtgagagatggcatccttacctggaaccttatgggttggtttactgcgtgaactgcatctgctcagagaatgggaatgtgctttgcagccgagtcagatgtccaaatgttcattgcctttctcctgtgcatattcctcatctgtgctgccctcgctgcccaggagatggagaactgtcatgggaacattctgatggtgatatcttccggcaacctgccaacagagaagcaagacattcttaccaccgctctcactatgatcctccaccaagccgacaggctggaggtctgtcccgctttcctggggccagaagtcaccggggagctcttatggattcccagcaagcatcaggaaccattgtgcaaattgtcatcaataacaaacacaagcatggacaagtgtgtgtttccaatggaaagacctattctcatggcgagtcctggcacccaaacctccgggcatttggcattgtggagtgtgtgctatgtacttgtaatgtcaccaagcaagagtgtaagaaaatccactgccccaatcgatacccctgcaagtatcctcaaaaaatagacggaaaatgctgcaaggtgtgtccaggtaaaaaagcaaaagaagaacttccaggccaaagctttgacaataaaggctacttctgcggggaagaaacgatgcctgtgtatgagtctgtattcatggaggatggggagacaaccagaaaaatagcactggagactgagagaccacctcaggtagaggtccacgtttggactattcgaaagggcattctccagcacttccatattgagaagatctccaagaggatgtttgaggagcttcctcacttcaagctggtgaccagaacaaccctgagccagtggaagatcttcaccgaaggagaagctcagatcagccagatgtgttcaagtcgtgtatgcagaacagagcttgaagatttagtcaaggttttgtacctggagagatctgaaaagggccactgttaggcaagacagacagtattggatagggtaaagcaagaaaactcaagctgcagctggactgcaggcttattttgcttaagtcaacagtgccctaaaactccaaactcaaatgcagtcaattattcacgccatgcacagcataatttgctcctttgtgtggagtggtgtgtcagcccttgaacatctcctccaaagagactagaagagtcttaaattatatgtgggaggaggagggatagaacatcacaacactgctctagtttcttggagaatcacatttctttacaggttaa

SEQ ID NO: 5831 - DNA, 1712 bp, Homo sapiens
  source 1..1712: mol_type = unassigned DNA
ccctttctttgatcgcctctcccttctgctggaccttccttcgtctctccatctctccctcctttccccgcgttctctttccacctttctcttcttcccaccttagacctcccttcctgccctcctttcctgcccaccgctgcttcctggcccttctccgaccccgctctagcagcagacctcctggggtctgtgggttgatctgtggcccctgtgcctccgtgtccttttcgtctcccttcctcccgactccgctcccggaccagcggcctgaccctggggaaaggatggttcccgaggtgagggtcctctcctccttgctgggactcgcgctgctctggttccccctggactcccacgctcgagcccgcccagacatgttctgccttttccatgggaagagatactcccccggcgagagctggcacccctacttggagccacaaggcctgatgtactgcctgcgctgtacctgctcagagggcgcccatgtgagttgttaccgcctccactgtccgcctgtccactgcccccagcctgtgacggagccacagcaatgctgtcccaagtgtgtggaacctcacactccctctggactccgggccccaccaaagtcctgccagcacaacgggaccatgtaccaacacggagagatcttcagtgcccatgagctgttcccctcccgcctgcccaaccagtgtgtcctctgcagctgcacagagggccagatctactgcggcctcacaacctgccccgaaccaggctgcccagcacccctcccgctgccagactcctgctgccaggcctgcaaagatgaggcaagtgagcaatcggatgaagaggacagtgtgcagtcgctccatggggtgagacatcctcaggatccatgttccagtgatgctgggagaaagagaggcccgggcaccccagcccccactggcctcagcgcccctctgagcttcatccctcgccacttcagacccaagggagcaggcagcacaactgtcaagatcgtcctgaaggagaaacataagaaagcctgtgtgcatggcgggaagacgtactcccacggggaggtgtggcacccggccttccgtgccttcggccccttgccctgcatcctatgcacctgtgaggatggccgccaggactgccagcgtgtgacctgtcccaccgagtacccctgccgtcaccccgagaaagtggctgggaagtgctgcaagatttgcccagaggacaaagcagaccctggccacagtgagatcagttctaccaggtgtcccaaggcaccgggccgggtcctcgtccacacatcggtatccccaagcccagacaacctgcgtcgctttgccctggaacacgaggcctcggacttggtggagatctacctctggaagctggtaaaagatgaggaaactgaggctcagagaggtgaagtacctggcccaaggccacacagccagaatcttccacttgactcagatcaagaaagtcaggaagcaagacttccagaaagaggcacagcacttccgactgctcgctggcccccacgaaggtcactggaacgtcttcctagcccagaccctggagctgaaggtcacggccagtccagacaaagtgaccaagacataacaaagacctaacagttgcagatatgagctgtataattgttgttattatatattaataaataagaagttgcattaccctca

SEQ ID NO: 5832 - DNA, 1028 bp, Homo sapiens
  source 1..1028: mol_type = unassigned DNA
cagcctgtgacggagccacagcaatgctgtcccaagtgtgtggaacctcacactccctctggactccgggccccaccaaagtcctgccagcacaacgggaccatgtaccaacacggagagatcttcagtgcccatgagctgttcccctcccgcctgcccaaccagtgtgtcctctgcagctgcacagagggccagatctactgcggcctcacaacctgccccgaaccaggctgcccagcacccctcccgctgccagactcctgctgccaggcctgcaaagctggctccagctggggcctgctatgctcagtcagtgactttcatccttcctgccatttgcagagacatcctcaggatccatgttccagtgatgctgggagaaagagaggcccgggcaccccagcccccactggcctcagcgcccctctgagcttcatccctcgccacttcagacccaagggagcaggcagcacaactgtcaagatcgtcctgaaggagaaacataagaaagcctgtgtgcatggcgggaagacgtactcccacggggaggtgtggcacccggccttccgtgccttcggccccttgccctgcatcctatgcacctgtgaggatggccgccaggactgccagcgtgtgacctgtcccaccgagtacccctgccgtcaccccgagaaagtggctgggaagtgctgcaagatttgcccagaggacaaagcagaccctggccacagtgagatcagttctaccaggtgtcccaaggcaccgggccgggtcctcgtccacacatcggtatccccaagcccagacaacctgcgtcgctttgccctggaacacgaggcctcggacttggtggagatctacctctggaagctggtaaaaggtgtcttcctagcccagaccctggagctgaaggtcacggccagtccagacaaagtgaccaagacataacaaagacctaacagttgcagatatgagctgtataattgttgttattatatattaataaataagaagttgcattaccctca

SEQ ID NO: 5833 - DNA, 1867 bp, Homo sapiens
  source 1..1867: mol_type = unassigned DNA
gccgccgcgccgccgccgctgctgggaccgccgccccgccgggccccaggcccccgcggcccgaccccgagcccaccgagcagggggcgccggccgcctctagcccgcgcgcccgcaacacccgctggtcccgcgcgcctcgcccggcgctgcgcgctcggcagacgccggtcctctccctgctttctcctcctctccctctcaccttccccctttctttgatcgcctctcccttctgctggaccttccttcgtctctccatctctccctcctttccccgcgttctctttccacctttctcttcttcccaccttagacctcccttcctgccctcctttcctgcccaccgctgcttcctggcccttctccgaccccgctctagcagcagacctcctggggtctgtgggttgatctgtggcccctgtgcctccgtgtccttttcgtctcccttcctcccgactccgctcccggaccagcggcctgaccctggggaaaggatggttcccgaggtgagggtcctctcctccttgctgggactcgcgctgctctggttccccctggactcccacgctcgagcccgcccagacatgttctgccttttccatgggaagagatactcccccggcgagagctggcacccctacttggagccacaaggcctgatgtactgcctgcgctgtacctgctcagagggcgcccatgtgagttgttaccgcctccactgtccgcctgtccactgcccccagcctgtgacggagccacagcaatgctgtcccaagtgtgtggaacctcacactccctctggactccgggccccaccaaagtcctgccagcacaacgggaccatgtaccaacacggagagatcttcagtgcccatgagctgttcccctcccgcctgcccaaccagtgtgtcctctgcagctgcacagagggccagatctactgcggcctcacaacctgccccgaaccaggctgcccagcacccctcccgctgccagactcctgctgccaggcctgcaaagatgaggcaagtgagcaatcggatgaagaggacagtgtgcagtcgctccatggggtgagacatcctcaggatccatgttccagtgatgctgggagaaagagaggcccgggcaccccagcccccactggcctcagcgcccctctgagcttcatccctcgccacttcagacccaagggagcaggcagcacaactgtcaagatcgtcctgaaggagaaacataagaaagcctgtgtgcatggcgggaagacgtactcccacggggaggtgtggcacccggccttccgtgccttcggccccttgccctgcatcctatgcacctgtgaggatggccgccaggactgccagcgtgtgacctgtcccaccgagtacccctgccgtcaccccgagaaagtggctgggaagtgctgcaagatttgcccagaggacaaagcagaccctggccacagtgagatcagttctaccaggtgtcccaaggcaccgggccgggtcctcgtccacacatcggtatccccaagcccagacaacctgcgtcgctttgccctggaacacgaggcctcggacttggtggagatctacctctggaagctggtaaaaggaatcttccacttgactcagatcaagaaagtcaggaagcaagacttccagaaagaggcacagcacttccgactgctcgctggcccccacgaaggtcactggaacgtcttcctagcccagaccctggagctgaaggtcacggccagtccagacaaagtgaccaagacataacaaagacctaacagttgcagatatgagctgtataattgttgttattatatattaataaataagaagttgcattaccctca

SEQ ID NO: 5834 - DNA, 1462 bp, Homo sapiens
  source 1..1462: mol_type = unassigned DNA
cgcctctcccttctgctggaccttccttcgtctctccatctctccctcctttccccgcgttctctttccacctttctcttcttcccaccttagacctcccttcctgccctcctttcctgcccaccgctgcttcctggcccttctccgaccccgctctagcagcagacctcctggggtctgtgggttgatctgtggcccctgtgcctccgtgtccttttcgtctcccttcctcccgactccgctcccggaccagcggcctgaccctggggaaaggatggttcccgaggtgagggtcctctcctccttgctgggactcgcgctgctctggttccccctggactcccacgctcgagcccgcccagacatgttctgccttttccatgggaagagatactcccccggcgagagctggcacccctacttggagccacaaggcctgatgtactgcctgcgctgtacctgctcagagggcgcccatgtgagttgttaccgcctccactgtccgcctgtccactgcccccagcctgtgacggagccacagcaatgctgtcccaagtgtgtggaacctcacactccctctggactccgggccccaccaaagtcctgccagcacaacgggaccatgtaccaacacggagagatcttcagtgcccatgagctgttcccctcccgcctgcccaaccagtgtgtcctctgcagctgcacagagggccagatctactgcggcctcacaacctgccccgaaccaggctgcccagcacccctcccgctgccagactcctgctgccaggcctgcaaagatgaggcaagtgagcaatcggatgaagaggacagtgtgcagtcgctccatggggtgagacatcctcaggatccatgttccagtgatgctgggagaaagagaggcccgggcaccccagcccccactggcctcagcgcccctctgagcttcatccctcgccacttcagacccaagggagcaggcagcacaactgtcaagatcgtcctgaaggagaaacataagaaagcctgtgtgcatggcgggaagacgtactcccacggggaggtgtggcacccggccttccgtgccttcggccccttgccctgcatcctatgcacctgtgaggatggccgccaggactgccagcgtgtgacctgtcccaccgagtacccctgccgtcaccccgagaaagtggctgggaagtgctgcaagatttgcccagaggacaaagcagaccctggccacagtgagatcagttctaccaggtgtcccaaggcaccgggccgggtcctcgtccacacatcggtatccccaagcccagacaacctgcgtcgctttgccctggaacacgaggcctcggacttggtggagatctacctctggaagctggtaaaagacgtcttcctagcccagaccctggagctgaaggtcacggccagtccagacaaagtgaccaagacataa

SEQ ID NO: 5835 - DNA, 917 bp, Homo sapiens
  source 1..917: mol_type = unassigned DNA
tgcaggaaagcctcaagtagaggagggttgaggcttcagtccagcacctttctcgggtcacggcctcctcctggctcccaggaccccaccataggcagaggcaggccttcctacaccctactccctgtgcctccagcctcgactagtccctagcactcgacgactgagtctctgaggtcacttcaccgtggtctccgcctcacccttggcgctggaccagtgagaggagagggctggggcgctccgctgagccactcctgcgcccccctggccttgtctacctcttgccccccgaggggttagtgtcgagctcaccccagcatcctatcacctcctggtggccttgccgcccccacaaccccgaggtataaagccaggtacacgaggcaggggacgcaccaaggatggagatgttccaggggctgctgctgttgctgctgctgagcatgggcgggacatgggcatccaaggagccgcttcggccacggtgccgccccatcaatgccaccctggctgtggagaaggagggctgccccgtgtgcatcaccgtcaacaccaccatctgtgccggctactgccccaccatgacccgcgtgctgcagggggtcctgccggccctgcctcaggtggtgtgcaactaccgcgatgtgcgcttcgagtccatccggctccctggctgcccgcgcggcgtgaaccccgtggtctcctacgccgtggctctcagctgtcaatgtgcactctgccgccgcagcaccactgactgcgggggtcccaaggaccaccccttgacctgtgatgacccccgcttccaggactcctcttcctcaaaggcccctccccccagccttccaagcccatcccgactcccggggccctcggacaccccgatcctcccacaataaaggcttctcaatccg

SEQ ID NO: 5836 - DNA, 917 bp, Homo sapiens; identical to SEQ ID NO: 5835
  source 1..917: mol_type = unassigned DNA

SEQ ID NO: 5837 - DNA, 900 bp, Homo sapiens
  source 1..900: mol_type = unassigned DNA
atgtacacagaaacaggtggggtcaagcagggagagagaactggccagggtataaaaagggcccacaagagaccggctctaggatcccaaggcccaactccccgaaccactcagggtcctgtggacagctcacctagtggcaatggctccaggctcccggacgtccctgctcctggcttttgccctgctctgcctgccctggcttcaagaggctggtgccgtccaaaccgttcccttatccaggctttttgaccacgctatgctccaagcccatcgcgcgcaccagctggccattgacacctaccaggagtttgaagaaacctatatcccaaaggaccagaagtattcattcctgcatgactcccagacctccttctgcttctcagactctattccgacaccctccaacatggaggaaacgcaacagaaatccaatctagagctgctccgcatctccctgctgctcatcgagtcgtggctggagcccgtgcggttcctcaggagtatgttcgccaacaacctggtgtatgacacctcggacagcgatgactatcacctcctaaaggacctagaggaaggcatccaaacgctgatggggaggctggaagacggcagccgccggactgggcagatcctcaagcagacctacagcaagtttgacacaaactcgcacaaccatgacgcactgctcaagaactacgggctgctctactgcttcaggaaggacatggacaaggtcgagacattcctgcgcatggtgcagtgccgctctgtggagggcagctgtggcttctaggtgcccgagtagcatcctgtgacccctccccagtgcctctcctggccctgaaggtgccactccagtgcccaccagccttgtcctaataaaattaagttgtatca

SEQ ID NO: 5838 - DNA, 1073 bp, Homo sapiens
  source 1..1073: mol_type = unassigned DNA
accggctctaggatcccaaggcccaactccccgaaccactcagggtcctgtggacagctcacctagtggcaatggctccaggctcccggacgtccctgctcctggcttttgccctgctctgcctgccctggcttcaagaggctggtgccgtccaaaccgttcccttatccaggctttttgaccacgctatgctccaagcccatcgcgcgcaccagctggccattgacacctaccaggagtttgaagaaacctatatcccaaaggaccagaagtattcattcctgcatgactcccagacctccttctgcttctcagactctattccgacaccctccaacatggaggaaacgcaacagaaatccaatctagagctgctccgcatctccctgctgctcatcgagtcgtggctggagcccgtgcggttcctcaggagtatgttcgccaacaacctggtgtatgacacctcggacagcgatgactatcacctcctaaaggacctagaggaaggcatccaaacgctgatgggggtgagggtggcgccaggggtcaccaatcctggaaccccactggcttcgagggctgggggagagaaatactgctgccctctttttagcagtaaggcgctgacccaagagaactcaccttattcttcatttcgcctggtgaatcctccaggcctttctctacaccctgaaggggagggaggaaaatggataaatgagagagggagggaacagtgcccaagcgcttggcctctccttctcttccttcactttgcagaggctggaagacggcagccgccggactgggcagatcctcaagcagacctacagcaagtttgacacaaactcgcacaaccatgacgcactgctcaagaactacgggctgctctactgcttcaggaaggacatggacaaggtcgagacattcctgcgcatggtgcagtgccgctctgtggagggcagctgtggcttctaggtgcccgagtagcatcctgtgacccctccccagtgcctctcctggccctgaaggtgccactccagtgcccaccagccttgtcctaataaaattaa

SEQ ID NO: 5839 - DNA, 546 bp, Homo sapiens
  source 1..546: mol_type = unassigned DNA
gaactggccagggtataaaaagggcccacaagagaccggctctaggatcccaaggcccaactccccgaaccactcagggtcctgtggacagctcacctagtggcaatggctccaggctcccggacgtccctgctcctggcttttgccctgctctgcctgccctggcttcaagaggctggtgccgtccaaaccgttcccttatccaggctttttgaccacgctatgctccaagcccatcgcgcgcaccagctggccattgacacctaccaggagtttaggctggaagacggcagccgccggactgggcagatcctcaagcagacctacagcaagtttgacacaaactcgcacaaccatgacgcactgctcaagaactacgggctgctctactgcttcaggaaggacatggacaaggtcgagacattcctgcgcatggtgcagtgccgctctgtggagggcagctgtggcttctaggtgcccgagtagcatcctgtgacccctccccagtgcctctcctggccctgaaggtgccactccagtgcccac

SEQ ID NO: 5840 - DNA, 699 bp, Homo sapiens
  source 1..699: mol_type = unassigned DNA
ctccccgaaccactcagggtcctgtggacagctcacctagtggcaatggctccaggctcccggacgtccctgctcctggcttttgccctgctctgcctgccctggcttcaagaggctgaaacctatatcccaaaggaccagaagtattcattcctgcatgactcccagacctccttctgcttctcagactctattccgacaccctccaacatggaggaaacgcaacagaaatccaatctagagctgctccgcatctccctgctgctcatcgagtcgtggctggagcccgtgcggttcctcaggagtatgttcgccaacaacctggtgtatgacacctcggacagcgatgactatcacctcctaaaggacctagaggaaggcatccaaacgctgatggggaggctggaagacggcagccgccggactgggcagatcctcaagcagacctacagcaagtttgacacaaactcgcacaaccatgacgcactgctcaagaactacgggctgctctactgcttcaggaaggacatggacaaggtcgagacattcctgcgcatggtgcagtgccgctctgtggagggcagctgtggcttctaggtgcccgagtagcatcctgtgacccctccccagtgcctctcctggccctgaaggtgccactccagtgcccaccagccttgtcctaataaaattaagttgtat

SEQ ID NO: 5841 - DNA, 1173 bp, Homo sapiens
  source 1..1173: mol_type = unassigned DNA
ccatgcataaatgtacacagaaacaggtggggtcaagcagggagagagaactggccagggtataaaaagggcccacaagagaccggctctaggatcccaaggcccaactccccgaaccactcagggtcctgtggacagctcacctagcggcaatggctgcaggctcccggacgtccctgctcctggcttttgccctgctctgcctgccctggcttcaagaggctggtgccgtccaaaccgttccgttatccaggctttttgaccacgctatgctccaagcccatcgcgcgcaccagctggccattgacacctaccaggagtttgaagaaacctatatcccaaaggaccagaagtattcattcctgcatgactcccagacctccttctgcttctcagactctattccgacaccctccaacatggaggaaacgcaacagaaatccaatctagagctgctccgcatctccctgctgctcatcgagtcgtggctggagcccgtgcggttcctcaggagtatgttcgccaacaacctggtgtatgacacctcggacagcgatgactatcacctcctaaaggacctagaggaaggcatccaaacgctgatgggggtgagggtggcgccaggggtcgccaatcctggaaccccactggcttagagggctgggggagagaaacactgctgccctctttgtagcagtcaggcgctgacccaagagaactcaccttattcttcatttcgcctggtgaatcctccaggcccttctctacaccctgaaggggagggaggaaaatggatgaatgagagagggagggaacagtgcccaagcgcttggcctctccttctcttccttcactttgcagaggctggaagacggcagccgccggactgggcagatcctcaagcagacctacagcaagtttgacacaaactcacacaaccatgacgcactgctcaagaactacgggctgctctactgcttcaggaaggacatggacaaggtcgagacattcctgcgcatggtgcagtgccgctctgtagagggtagctgtggcttctaggtgcccgcgtggcatcctgtgaccgacccctccccagtgcctctcctggccctggaaggtgccactccagtgcccatcagccttgtcctaataaaattaagttgtatcatttca

SEQ ID NO: 5842 - DNA, 550 bp, Homo sapiens
  source 1..550: mol_type = unassigned DNA
gaactggccagggtataaaaagggcccacaagagaccggctctaggatcccaaggcccaactccccgaaccactcagggtcctgtggacagctcacctagcggcaatggctgcaggctcccggacgtccctgctcctggcttttgccctgctctgcctgccctggcttcaagaggctggtgccgtccaaaccgttccgttatccaggctttttgaccacgctatgctccaagcccatcgcgcgcaccagctggccattgacacctaccaggagtttaggctggaagacggcagccgccggactgggcagatcctcaagcagacctacagcaagtttgacacaaactcacacaaccatgacgcactgctcaagaactacgggctgctctactgcttcaggaaggacatggacaaggtcgagacattcctgcgcatggtgcagtgccgctctgtagagggtagctgtggcttctaggtgcccgcgtggcatcctgtgaccgacccctccccagtgcctctcctggccctggaaggtgccactccagtgccca

SEQ ID NO: 5843 - DNA, 920 bp, Homo sapiens
  source 1..920: mol_type = unassigned DNA
ccatgcataaatgtacacagaaacaggtggggtcaagcagggagagagaactggccagggtataaaaagggcccacaagagaccggctctaggatcccaaggcccaactccccgaaccactcagggtcctgtggacagctcacctagcggcaatggctgcaggctcccggacgtccctgctcctggcttttgccctgctctgcctgccctggcttcaagaggctggtgccgtccaaaccgttccgttatccaggctttttgaccacgctatgctccaagcccatcgcgcgcaccagctggccattgacacctaccaggagtttgaagaaacctatatcccaaaggaccagaagtattcattcctgcatgactcccagacctccttctgcttctcagactctattccgacaccctccaacatggaggaaacgcaacagaaatccaatctagagctgctccgcatctccctgctgctcatcgagtcgtggctggagcccgtgcggttcctcaggagtatgttcgccaacaacctggtgtatgacacctcggacagcgatgactatcacctcctaaaggacctagaggaaggcatccaaacgctgatggggaggctggaagacggcagccgccggactgggcagatcctcaagcagacctacagcaagtttgacacaaactcacacaaccatgacgcactgctcaagaactacgggctgctctactgcttcaggaaggacatggacaaggtcgagacattcctgcgcatggtgcagtgccgctctgtagagggtagctgtggcttctaggtgcccgcgtggcatcctgtgaccgacccctccccagtgcctctcctggccctggaaggtgccactccagtgcccatcagccttgtcctaataaaattaagttgtatcatttca

SEQ ID NO: 5844 - DNA, 749 bp, Homo sapiens
  source 1..749: mol_type = unassigned DNA
ccatgcataaatgtacacagaaacaggtggggtcaagcagggagagagaactggccagggtataaaaagggcccacaagagaccggctctaggatcccaaggcccaactccccgaaccactcagggtcctgtggacagctcacctagcggcaatggctgcaggctcccggacgtccctgctcctggcttttgccctgctctgcctgccctggcttcaagaggctgactctattccgacaccctccaacatggaggaaacgcaacagaaatccaatctagagctgctccgcatctccctgctgctcatcgagtcgtggctggagcccgtgcggttcctcaggagtatgttcgccaacaacctggtgtatgacacctcggacagcgatgactatcacctcctaaaggacctagaggaaggcatccaaacgctgatggggaggctggaagacggcagccgccggactgggcagatcctcaagcagacctacagcaagtttgacacaaactcacacaaccatgacgcactgctcaagaactacgggctgctctactgcttcaggaaggacatggacaaggtcgagacattcctgcgcatggtgcagtgccgctctgtagagggtagctgtggcttctaggtgcccgcgtggcatcctgtgaccgacccctccccagtgcctctcctggccctggaaggtgccactccagtgcccatcagccttgtcctaataaaattaagttgtatcatttca

SEQ ID NO: 5845 - DNA, 849 bp, Homo sapiens
  source 1..849: mol_type = unassigned DNA
caggctcccggacgtccctgctcctggcttttgccctgctctgcctgccctggcttcaagaggctggtgccgtccaaaccgttccgttatccaggctttttgaccacgctatgctccaagcccatcgcgcgcaccagctggccattgacacctaccaggagtttgaagaaacctatatcccaaaggaccagaagtattcattcctgcatgactcccagacctccttctgcttctcagactctattccgacaccctccaacatggaggaaacgcaacagaaatccaatctagagctgctccgcatctccctgctgctcatcgagtcgtggctggagcccgtgcggttcctcaggagtatgttcgccaacaacctggtgtatgacacctcggacagcgatgactatcacctcctaaaggacctagaggaaggcatccaaacgctgatgggggtgagggtggcgccaggggtcgccaatcctggaaccccactggcttagagggctgggggagagaaacactgctgccctctttgtagcaaggctggaagacggcagccgccggactgggcagatcctcaagcagacctacagcaagtttgacacaaactcacacaaccatgacgcactgctcaagaactacgggctgctctactgcttcaggaaggacatggacaaggtcgagacattcctgcgcatggtgcagtgccgctctgtagagggtagctgtggcttctaggtgcccgcgtggcatcctgtgaccgacccctccccagtgcctctcctggccctggaaggtgccactccagtgcccatcagccttgtcctaataaaattaagttgtatcatttca

SEQ ID NO: 5846 - DNA, 837 bp, Homo sapiens
  source 1..837: mol_type = unassigned DNA
agcatcccaaggcccgactccccgcaccactcagggtcctgtggacagctcacctagcggcaatggctgcaggctcccggacgtccctgctcctggcttttgccctgctctgcctgccctggcttcaagaggctggtgccgtccaaaccgttcccttatccaggctttttaaagaggctatgctccaagcccatcgcgcacaccagctggccattgacacctaccaggagtttataagctcttggggaatggaagcctatatcacaaaggaacagaagtattcattcctgcatgactcccagacctccttctgcttctcagactctattccgacatcctccaacatggaggaaacgcagcagaaatccaacttagagctgctccacatctccctgctgctcatcgagtcgcggctggagcccgtgcggttcctcaggagtaccttcaccaacaacctggtgtatgacacctcggacagcgatgactatcacctcctaaaggacctagaggaaggcatccaaatgctgatggggaggctggaagacggcagccacctgactgggcagaccctcaagcagacctacagcaagtttgacacaaactcgcacaaccatgacgcactgctcaagaactacgggctgctccactgcttcaggaaggacatggacaaggtcgagacattcctgcgcatggtgcagtgccgctctgtggagggcagctgtggcttctaggggcccgcgtggcatcctgtgacccctccccagtgcctctcctggccctgaaggtgccactccagtgcccaccagccttgtcttaataaaattaagttgtattgtt

SEQ ID NO: 5847 - DNA, 659 bp, Homo sapiens
  source 1..659: mol_type = unassigned DNA
agcatcccaaggcccgactccccgcaccactcagggtcctgtggacagctcacctagcggcaatggctgcaggaagaagcctatatcacaaaggaacagaagtattcattcctgcatgactcccagacctccttctgcttctcagactctattccgacatcctccaacatggaggaaacgcagcagaaatccaacttagagctgctccacatctccctgctgctcatcgagtcgcggctggagcccgtgcggttcctcaggagtaccttcaccaacaacctggtgtatgacacctcggacagcgatgactatcacctcctaaaggacctagaggaaggcatccaaatgctgatggggaggctggaagacggcagccacctgactgggcagaccctcaagcagacctacagcaagtttgacacaaactcgcacaaccatgacgcactgctcaagaactacgggctgctccactgcttcaggaaggacatggacaaggtcgagacattcctgcgcatggtgcagtgccgctctgtggagggcagctgtggcttctaggggcccgcgtggcatcctgtgacccctccccagtgcctctcctggccctgaaggtgccactccagtgcccaccagccttgtcttaataaaattaagttgtattg

SEQ ID NO: 5848 - DNA, 1022 bp, Homo sapiens
  source 1..1022: mol_type = unassigned DNA
aggatcccaaggcccaactccccgaaccactcagggtcctgtggacagctcacctagctgcaatggctacaggctcccggacgtccctgctcctggcttttgccctgctctgcctgccctggcttcaagaggctggtgccgtccaaaccgttcccttatccaggctttttaaagaggctatgctccaagcccatcgcgcacaccagctggccattgacacctaccaggagtttataagctcttggggaatgggtgcgggtcaggggtggcaagaaggggtgactttcccccactggggaagtaatgggaggagactaaggagctcagggttgttttctgaagcgaaaatgcaggcagatgagcataggctgagccaggttcccagaagagtaacagtgggagctggtctccagcatagaaagcagtggtccttcttggtggggggtccttcccctaggaagaagcctatatcacaaaggaacagaagtattcattcctgcatgactcccagacctccttctgcttctcagactctattccgacatcctccaacatggaggaaacgcagcagaaatccaacttagagctgctccacatctccctgctgctcatcgagtcgcggctggagcccgtgcggttcctcaggagtaccttcaccaacaacctggtgtatgacacctcggacagcgatgactatcacctcctaaaggacctagaggaaggcatccaaatgctgatgggggtgagggtggcaccaggggtccccaatcctggaagcccactggcttcgagggctgggggagagaaacactgctgccctcttttcagcagtcaggcgctgacccaagagaactcaccttattcttcatttcccctcgtgaatcctccaggcctttctctacaccctgaaggggaaggaggaaaatggataaatgagagagggagggaacagtgcccaagcgcttggtctctccttctcttgcttcactttgcagaggctggaagacggcagccacctgact

SEQ ID NO: 5849 - DNA, 588 bp, Homo sapiens
  source 1..588: mol_type = unassigned DNA
agcatcccaaggcccgactccccgcaccactcagggtcctgtggacagctcacctagcggcaatggctgcagactctattccgacatcctccaacatggaggaaacgcagcagaaatccaacttagagctgctccacatctccctgctgctcatcgagtcgcggctggagcccgtgcggttcctcaggagtaccttcaccaacaacctggtgtatgacacctcggacagcgatgactatcacctcctaaaggacctagaggaaggcatccaaatgctgatggggaggctggaagacggcagccacctgactgggcagaccctcaagcagacctacagcaagtttgacacaaactcgcacaaccatgacgcactgctcaagaactacgggctgctccactgcttcaggaaggacatggacaaggtcgagacattcctgcgcatggtgcagtgccgctctgtggagggcagctgtggcttctaggggcccgcgtggcatcctgtgacccctccccagtgcctctcctggccctgaaggtgccactccagtgcccaccagccttgtcttaataaaattaagttgtattgtt

SEQ ID NO: 5850 - DNA, 5442 bp, Homo sapiens
  source 1..5442: mol_type = unassigned DNA
taatagtcacatgacacgtttcccgtcaagatggcggatactctcccttcggagtttgatgtgatcgtaatagggacgggtttgcctgaatccatcattgcagctgcatgttcaagaagtggccggagagttctgcatgttgattcaagaagctactatggaggaaactgggccagttttagcttttcaggactattgtcctggctaaaggaataccaggaaaacagtgacattgtaagtgacagtccagtgtggcaagaccagatccttgaaaatgaagaagccattgctcttagcaggaaggacaaaactattcaacatgtggaagtattttgttatgccagtcaggatttgcatgaagatgtcgaagaagctggtgcactgcagaaaaatcatgctcttgtgacatctgcaaactccacagaagctgcagattctgccttcctgcctacggaggatgagtcattaagcactatgagctgtgaaatgctcacagaacaaactccaagcagcgatccagagaatgcgctagaagtaaatggtgctgaagtgacaggggaaaaagaaaaccattgtgatgataaaacttgtgtgccatcaacttcagcagaagacatgagtgaaaatgtgcctatagcagaagataccacagagcaaccaaagaaaaacagaattacttactcacaaattattaaagaaggcaggagatttaatattgatttagtatcaaagctgctgtattctcgaggattactaattgatcttctaatcaaatctaatgttagtcgatatgcagagtttaaaaatattaccaggattcttgcatttcgagaaggacgagtggaacaggttccgtgttccagagcagatgtctttaatagcaaacaacttactatggtagaaaagcgaatgctaatgaaatttcttacattttgtatggaatatgagaaatatcctgatgaatataaaggatatgaagagatcacattttatgaatatttaaagactcaaaaattaacccccaacctccaatatattgtcatgcattcaattgcaatgacatcagagacagccagcagcaccatagatggtctcaaagctaccaaaaactttcttcactgtcttgggcggtatggcaacactccatttttgtttcctttatatggccaaggagaactcccccagtgtttctgcaggatgtgtgctgtgtttggtggaatttattgtcttcgccattcagtacagtgccttgtagtggacaaagaatccagaaaatgtaaagcaattatagatcagtttggtcagagaataatctctgagcatttcctcgtggaggacagttactttcctgagaacatgtgctcacgtgtgcaatacaggcagatctccagggcagtgctgattacagatagatctgtcctaaaaacagattcagatcaacagatttccattttgacagtgccagcagaggaaccaggaacttttgctgttcgggtcattgagttatgttcttcaacgatgacatgcatgaaaggcacctatttggttcatttgacttgcacatcttctaaaacagcaagagaagatttagaatcagttgtgcagaaattgtttgttccatatactgaaatggagatagaaaatgaacaagtagaaaagccaagaattctgtgggctctttacttcaatatgagagattcgtcagacatcagcaggagctgttataatgatttaccatccaacgtttatgtctgctctggcccagattgtggtttaggaaatgataatgcagtcaaacaggctgaaacacttttccaggaaatctgccccaatgaagatttctgtccccctccaccaaatcctgaagacattatccttgatggagacagtttacagccagaggcttcagaatccagtgccataccagaggctaactcggagactttcaaggaaagcacaaaccttggaaacctagaggagtcctctgaataatggatatacaccaaactggatacccaactttggaaattctgactggtctcagagtctacttgatagaaggactgtttgagaaatgttagaaagcagcagcaattataaggcaaaataggtaatagaaatccaaaaggggattttccttatagaggacattccaagaacacacaacacttataaagcacattgacttgctcattttaaataccaaacttgtgtgactagcagatgaaaattataaatcaattgattctcaggaatgtaactgtggatatgaaagtgatcctatgcattgttaataattccatggtcttaggacaattttgcttaccactttggatctttgtttgaaagccacattttcagaaccagctcatgtattttctttggttatttgaattttattttctttatggacaagagcatcataacataatgataaaaacatatagaaaaactaaagtatcatgatctagatagaagcctgtatttggaatacaggtttgttttgctttctatgttgagaagcattgaaaatgctaatataaaggtgtttagacatttttacgaataagtcagtagtgttttttagtatcagtagtgatatttgtttgtaaattatttacatattgggaaaggtcaataatgaagaaatgaaagaatggaaggaaaggtgtggataggctcattggtatttgaatattctgtctgtcaagtaactagagtattaggctaattgtctacagacctaatttaatcctggctgtcctactgatgatatttggtaaattgtttaacttctgagcctacgtttctccatatataaagtggaaatagtattactatgcctactatatgagaatggttatgaagacaatgcaatgccatgtttagaatcggtttgccagaagaaaattgttttagaattttcccattgacttgatgaatctcaaaagtctcacgcaggaaataattgcttgctgtcagtcaacttccaaacaaaatagatcacagtgtttttattgcattaagctttttaaatgaaaatttcttttttaaagtagtattttatagtcttacagaccagtaaaaatagtaacaagtagaattgtggttttgaaatattactaaggaaaacactctataaattgttttattccttttctggtaggtaaacctgcaaccaccaaggactccaaattgtgtatgacagttggtaagccctaatatacactacataaaaacgttagggctgcctgtaatcccagcactttgggaagctgaggtgggtagatcacttgaggtcaggagttcgagaccagcctggccaacatggcgaaaccctgtctctactaaaaatacaaaattttagctgggtgttatggtgggcacctgtaatcccagctactttgaagatgaggtagcagactcacttgaaccagggaggcggaggttgcagtgagccaagattttgccactgcactccagcctgggtgacagagcaagactctgtctcacaaaaaaaaaaaaagggggctgtacataggcagcaaactaagctgcagtgatgttgcctatatttaaattttctcaaatggccaagctctgatggtctactttatttgagcaatagttgagacttataattgcctataaataaacaaacaaatgaactatttgtttttttttctcacaacatctggcctatattgtctgtcaggaagccatggctccaatgtaaagtacatagttcttacatacttcaactgcagctggtccctgacctcaccaggtttcagagatgttcttaaaggaagccagctgtggcaggtcacagattcatgggaaatggaaagaaccaaggaatatagctcttgcctcacctttctacccactgcagatatagttcaagccagagtaatggaagaacttaacttactagcctctcaggctgctcctatccctacctcccagtgtacagcccctccccatctctttagtcccctttccctcacttccccttttataatgtcacacaaatcagggacagtaggatcacattataacctactttgtcatagggattcgatttttcttatatcaaatcatgtttcctgaaacccagctggggcatatgcactcaatgtctaatacatacttattaatgtaccggatattggccttgcccctggatatcagcaatatattataaaaggttccagtagatgagacgattgagtctgaatacaattgcagtaaattgtgccaataaagatattgtactgttacggtcttagagttaaagccgcttgaatgcagcatgcacattcatgtaaacagacaatcagggtaggcctagaataaccacaaaaattctattggccttactgcagccacctatatgtagaacaatggaggagatagtttgtggtccattattgtaccctgtttcatccattagcatcagaatctctctttcaggtcatttattaaatatgattgaaatgtttaaaagttcctgaacatgattcatgatgattaaaatatcatacaactgataaaagactttaagaactttatatatttcctgttgcctcaaaatgtaacagaaattattcttagagctttgattttagctatcctaattactgcaaataaatatttgttcttatagttttaaatcaaaaagaaaagtcttgttataaaaccttaagcttgaaatcatattaataaaatatattgtacatagtggaaaattttcagtagctaatttaaaatttcagaaaatgctattaaagaattttgattcaagtatttaaactgtttagttatgcatgcttcttattaaccgaaaatgataataccatttagtttagtgatcagtatgagaagcaatacctaatcctatgttgctattgtattttttcctagttggtgtgcctgctcagaaaaacatatactgtatgtgtatacatacctgtgtatatataaaaggtcaatttatatatttttctataggaaaatggagtaacaagttccctatctcccatatttatttgtccatagtaaaatggccacattgatgataatttctagaactagtttctgagattgtcagccctttgtctaaaataatggcagtattaatgattgacttctgtcactgccatagttacctggattgtcagccttggtagcctttgtctaaagtcctaaagagttccaaaaaaaatgtgttgaaatttaattgctaaatagtggttggtgattctttacagtaggaattgtaataattttcttgcaaataagttatttactgctattgatattgaataatttgtcttttattcagatatatttcaaaaagcatgaatatatgattattcataaattgtatactttaccagtaagttttcagaggaaataaagacttttaaatccttttca

SEQ ID NO: 5851 - DNA, 2820 bp, Homo sapiens
  source 1..2820: mol_type = unassigned DNA
cgtcaagatggcggatactctcccttcggagtttgatgtgatcgtaatagggacgggtttgcctgaatccatcattgcagctgcatgttcaagaagtggccggagagttctgcatgttgattcaagaagctactatggaggaaactgggccagttttagcttttcaggactattgtcctggctaaaggaataccaggaaaacagtgacattgtaagtgacagtccagtgtggcaagaccagatccttgaaaatgaagaagccattgctcttagcaggaaggacaaaactattcaacatgtggaagtattttgttatgccaggtccacgctgcttttatgagctgtaacactcaccgcgaagatctgcagcttcactcctgcgcccaccgagaccacaagcccaccgggaggaacgaacaactccagacgctctgccttaagagctgtaacattcaccgcgaaggtctgcagcttcactcctgagccagcgagaccacgaacccaccagaaggaagaaactccgaacacatctgaacatcagaaggaacaaactccagacgtgccaccttaagagctgtaacactcaccgcgcgggtccgcggcttcattctttaagtcagtgagaccaagaacccaccaattccggacacaccgatagcattctaatattttacatttgattgcaaggaggactaggcgagaattcaaatggattagtgcaaacccattaccactgcttggaaaatacgtcaaagtatttgggcaatataattctaatatatgtattctaatataaatatatagggtgtatttatatattatgtattctaatataaatatataggatagttattttttgattaccatgacttatttaaaaagtattctgaagtattattcaacttaaaggttttcatgatcatttcaacattaaatttaatacgttgggtattgcaaaacaggctaaagactaaaatgtaaattgtagtaattattctatcataggctaggttcaaacatcatagactgtaaagaactatccagattgttttatcagagctttgttttcctgattcttccttacaataagtgggctacttaatattttggacctaaaatatttttgctacacaaagattgtttttcattgaagtgattttttgtgattacacaatcgagttatggaagggaaatgaaaaaggactagtgtttattggatattatctttgtggcaactgctgtaacctgttgctttacatattaatttcatttattctgtgcagcagtcatgtgcatgagctataggtacatcttactgacaaacagaagctcaaggaatgctagagatagcagagccaaatttgaacttgtgtttttctaactcaaaaacgtgtgctatttccagtgtatcatgttgtatttcagtcatcaggtaaacacatgtatgcacatcaagggaaccaaccgttccaccaagtgaattaagtatttcctttgtgaagactagcacctaagaaagtgcatttacttctttaatttactggaatactatatagtattgtaatgtagttatatctgtaatgagaaattaaagtgcctaactcccagtgttaggaagctatgggaagaatccaatattctttagttgttgagaccagtttatatgccatgggattttttaaattgatacataataattgtatatattcatgggatacaatatgttttggtacatataaacattgtagaatgatcaaattaggctaattagcatatccatcaccttaaacctttattattttttgtgagaacattcagaatcatctcttttagctatttgaaatatgcaatgcattattgttagctatactcaccttactgtgtgatagagtaccagaatgtattcctcctacctaactgtaacattatacccattgaccaacctctcctcatcttcccctccctcctgttctccccagtctctggtaaccactatcaagttttttagatttcacatatgagtgagatcattcagtatttttctttctgttctcagcttatttcacttaatataatgttctccaggctcatccatgttgtcacaaatgacaggatttaattttttttatggctgtgcagtattctattgtgtatatatgccacattttccttgttaattcatttgttgatgggcatttaagttgattccatattttcgcaattgtgaatagtgctccaataaacatgggagtgcagatgtctcttcaacctactgatttcatttcctttggctatatacccagtagtgagggtgaagattgctggatcatatgatagatttatttttaattttttgaggaacttctgtactgttttccataatggctgtactgatttgcattcctaccaacagtgtgtgagagttcttctttcttaccatgtaatagtttcatagtttatgtggggaaataaaagtagctattgtttctagttttagatcttgaacagactataaaaaggtgcaatatattaattcacacttaaatcacacaaactcaagttattcttaggtaaaatatcgttgcttgttaattgcataaagtcatctagtttctttagtgagaagagattttatctttctaaaatattaacaatagctttatacattttctgtcctattttctgcattgtactgaacgttgtttccctttttctggtataatattaaagcaggatgaaaacttatttgttaccttcaaatgaaccaactctaatgtattcataccaaaataaagatttttttgcaataggaatctaaaa

SEQ ID NO: 5852 - DNA, 2000 bp, Homo sapiens
  source 1..2000: mol_type = unassigned DNA
aagatggcggatactctcccttcggagtttgatgtgatcgtaatagggacggtcaggatttgcatgaagatgtcgaagaagctggtgcactgcagaaaaatcatgctcttgtgacatctgcaaactccacagaagctgcagattctgccttcctgcctacggaggatgagtcattaagcactatgagctgtgaaatgctcacagaacaaactccaagcagcgatccagagaatgcgctagaagtaaatggtgctgaagtgacaggggaaaaagaaaaccattgtgatgataaaacttgtgtgccatcaacttcagcagaagacatgagtgaaaatgtgcctatagcagaagataccacagagcaaccaaagaaaaacagaattacttactcacaaattattaaagaaggcaggagatttaatattgatttagtatcaaagctgctgtattctcgaggattactaattgatcttctaatcaaatctaatgttagtcgatatgcagagtttaaaaatattaccaggattcttgcatttcgagaaggacgagtggaacaggttccgtgttccagagcagatgtctttaatagcaaacaacttactatggtagaaaagcgaatgctaatgaaatttcttacattttgtatggaatatgagaaatatcctgatgaatataaaggatatgaagagatcacattttatgaatatttaaagactcaaaaattaacccccaacctccaatatattgtcatgcattcaattgcaatgacatcagagacagccagcagcaccatagatggtctcaaagctaccaaaaactttcttcactgtcttgggcggtatggcaacactccatttttgtttcctttatatggccaaggagaactcccccagtgtttctgcaggatgtgtgctgtgtttggtggaatttattgtcttcgccattcagtacagtgccttgtagtggacaaagaatccagaaaatgtaaagcaattatagatcagtttggtcagagaataatctctgagcatttcctcgtggaggacagttactttcctgagaacatgtgctcacgtgtgcaatacaggcagatctccagggcagtgctgattacagatagatctgtcctaaaaacagattcagatcaacagatttccattttgacagtgccagcagaggaaccaggaacttttgctgttcgggtcattgagttatgttcttcaacgatgacatgcatgaaaggcacctatttggttcatttgacttgcacatcttctaaaacagcaagagaagatttagaatcagttgtgcagaaattgtttgttccatatactgaaatggagatagaaaatgaacaagtagaaaagccaagaattctgtgggctctttacttcaatatgagagattcgtcagacatcagcaggagctgttataatgatttaccatccaacgtttatgtctgctctggcccagattgtggtttaggaaatgataatgcagtcaaacaggctgaaacacttttccaggaaatctgccccaatgaagatttctgtccccctccaccaaatcctgaagacattatccttgatggagacagtttacagccagaggcttcagaatccagtgccataccagaggctaactcggagactttcaaggaaagcacaaaccttggaaacctagaggagtcctctgaataatggatatacaccaaactggatacccaactttggaaattctgactggtctcagagtctacttgatagaaggactgtttgagaaatgttagaaagcagcagcaattataaggcaaaataggtaatagaaatccaaaaggggattttccttatagaggacattccaagaacacacaacacttataaagcacattgacttgctcattttaaataccaaacttgtgtgactagcagatgaaaattataaatcaattgattctcaggaatgtaactgtggatatgaaagtgatcctatgcattgtt

SEQ ID NO: 5853 - DNA, 7078 bp, Homo sapiens
  source 1..7078: mol_type = unassigned DNA
ataagaaaaaaaatattttaaaagggtaaccgttaaacagctaggacctgcaacttcagtgcttctgggataactggaacatcagaaggacagattttattacagcataatcacacctcatttctttcatcagcagttgtcaccagacgctgttacttcctaaaatggcggacaatcttcccacagagtttgatgtggttataatagggacaggtttgcccgaatccatccttgcagctgcatgttcaagaagtggtcagagggttctgcatattgattcaagaagctactatggaggaaactgggctagtttcagcttttcaggattgctatcctggttgaaggagtatcagcaaaacaatgacattggggaagaaagtactgttgtatggcaggacctgatccatgaaacagaagaagccatcactcttcgcaagaaggatgaaactattcaacacacagaagctttttgctacgccagtcaggatatggaggacaacgttgaagagattggtgctctgcagaaaaatccttctttgggggtgtctaataccttcactgaagttctggattctgcattacctgaagaaagccagttatcgtattttaatagcgacgaaatgcctgcaaaacacactcagaaaagtgatacagagatttcactagaagtaactgatgtagaggaatcagtggagaaggaaaagtattgtggagataaaacttgtatgcacacagtttcagataaagatggagataaagatgaaagcaaatctacagtagaagataaggccgatgaaccaattagaaataggattacttactctcaaatagttaaagaaggcaggaggtttaatattgatttggtgtcaaaactgctgtattctcaaggattgctaattgatcttttaatcaaatcagatgttagtcgttatgtagaatttaaaaatgtcactaggattcttgcatttcgggaaggaaaggtagaacaagttccttgttccagagcagatgtctttaatagcaaggaactcaccatggttgaaaagaggatgctaatgaaatttctcacattttgtttagagtatgaacaacatcctgatgaataccaagctttcaggcagtgttcattttcagaatacttaaaaactaaaaaactaactcccaaccttcaacattttgtactgcactcaattgcaatgacatcagaatcatcttgcactacaatagatggtcttaacgcaactaaaaacttccttcagtgtctcggacggtttggcaacaccccctttttatttcccttgtatggccaaggagaaattccccagggtttctgtaggatgtgtgcagtttttggtggaatctattgtcttcgtcataaagtacaatgctttgtagtcgacaaagaatctggacgatgtaaagcaattatagatcactttggtcaaagaataaatgctaaatattttattgtggaagacagttacctttctgaggaaacatgctcaaatgtgcagtataagcagatctctagggcagtactcattacagatcagtctatactaaagacagatttagatcagcagacttccattctgatagttcctccagcagagccaggagcttgtgctgtacgggtcacagaattatgttcttcaaccatgacatgcatgaaggacacctatctggtacatttgacatgttcatcttctaaaacagcaagagaagacttagaatcagtggtgaagaaattattcactccgtatactgaaacagaaataaacgaggaagaacttacaaagccaagactcttgtgggctctttattttaatatgagagattcctcgggaatcagcagaagctcgtataatggcttgccttccaatgtttatgtctgctctgggcctgactgtggcctgggaaatgagcatgctgtcaagcaagctgaaacacttttccaggagatctttccaactgaagaattctgccctccacctccaaatccagaagacattatctttgatggtgatgataagcagccagaggctcctggaaccaataatgtagtaatggccaaactagaatcctctgaggaaagcaaaaacctagaaagcccagagaagcaccttcaaaattagaaaagagcaatctcgaaatgctgttttggacctccttcatggcatcagaattttctcatttaaaggacagtttcccatatgagtaattagaagtggttatatatgatgaatgctatgcagatgttgtctttaactctcagacattcagcattgaatatctttgttaacctatcaatgagtgatttattgattattgaacattttgtttagaatgggctatatgacccagaatcttaaaacagagttagctttattttagtattgggtatatatgtaagggttccatattagcaactcagcttaaaggtaatgtatttgctaatgatcttcagattttatctttgtctacagaacaattagtaatacccaagtaatattttaattacttttgcagctgttacagttgctgcggcctgttcgaatagtgaaacatacacaaatggtaaattatgtggatcttttgcatataatataaatgtatagacatggtggtaggaatagcaactaatacaaatgccaatatgataataaaatacatttgtctataatcgtttaaagattagctttgcatgatcctttatgcactgtgaaggtctgaagtttataatactcacttgacccttgtaactgatgaggcaatgatgccaccacagtattctaatttacaaaaagaattggagttcaattagtggttgtaaagctcattttggggaggttgattgcaaaggaaatttgaaagataagatttattcttatttaatacttcagaaaatttctgcagagccctgccctggcacttaaaatagcttccaataagtaacttagaccaaaaggaaaaatgaagtgccccaggagaagatacttcagaagggctgttctgaaattcctaaggaggaattcttaggaattcctaaggagaaacagagtgaggcctttttaacctgagattacagatacttataaaaccctctataaatagattacccaaggtttttcagtgagaatgaaacataccaccttgttggctctaccactttaattaatatcactataacataactgataggaatgaatcaaaggaggatttaccatgccctttcggttgtgtcccacttaacaaattgtgaagtaacaattttctgtaatctctcttgcctcttagctgttatccagagtatagaaactttttttctcccagagccacccaacgtcataaaactggtagtactctaatggtgaaaacctgtggagctgtcagaagacatgaacttgcttttcctctagtccagtttccattcttcagtcagagtatgatgatccctgtgacagtttttgctctgaaatagtatttatcatgtgtttggtacctagtattatgctttctcatgacagtttctcaacaatcctgtgaggcaaattcgcatgtaccctctgtattagtgtgttctcatgctgttgataaagacacacctgagatggtaatttgtaaagaaaaaggtttaatggactcacagttccatgtggctggggaggcctcacaatcatggtggaaggtgaaaggcacgtcttacatggcggtggacaagagagaatgagaactaagtgaaaagggaaacccttttaaaaccatcagatatcgtgagacttatttactaccatgagaacagtatgggggaaacaactccatgattcagttatctcccaccaggttcctcccacaacacgtgggaattataggagctacaattcaagatgagatttgagtgggaacacagccaaaccatatcaccttcaaagaagaaataagagaattattagtaatttgctcagaatctggtatgtggaagagccaacatggggacccagccttttgtgattctaaaacctttgatctttctactaacattcactgttagagagtgtaggcgctgcaggagaaagagaaagtgcccacgaaaattagtctagcattgccgggggtaaaaagcacacactggtcctgcagcttattgaatcagagaaatgtgaagataagatgaactaaacaaacatattttagagcatggatctcgaagcagaatttggctaaattttaacaaaatgttcttcagtaacacatctcatgatctgaagattgtgttacaaaaaatattatcaggccaaaatttgttcggaatacactaatttttgctcctctatatgtgaggaaaatgagactagacagatttaagtaattgacaacttacttaaagtagcaaagtcatggattgtattgacttttaaaaatatagtaaaagtcatatttaaactttatcctaaagtttaaatctaacagaacaactgaaatacttgaaatagacctataaaatagtaattaaaatgagaaatacataagatgataaataaaatgaaggtgaaggtattccagatctaccgaaaagattttcagtatcacagattattcataagaaattgagaaaaggaacaatcagaagttgcaaaagatggtatagccgaatataatggaaataggaaaaattagtcgaaaataaaggttgatttagaaatgaagaaaatgaatatatttcttaatacaaaataagtgggaaatgagaagttataccaataaaaagcatttaaaaatttaggggatattgtaacccagtataattttctgacaggttggactttgaccctaatggacttactggtgaactttttcaaatgtttaaataatgtctatccatgtatcatgaaggacagtatgcttcaaattgtcttttgaggcagacatgttctcagtactaaaagacatttttagaaggattttattctcaacagatgcaaaatgcaaaataaaatattggcaaacaatacagcaacaaataatttactatcactcaggattataaggctggtgttaagcagaacagccattaaatcagcatcaaaagaacaaatagtaaaatccaaagtattaattacagataacttttcaaaaattcatcattcacccttgatttaattatttctctggcaatgatttaatagacttctcggagtctgttaagtacttaaaccaagaactaccattattcctactgggaaaacataaacatttctcaagtggaaagtaaacagtgttggcactatttttatatatggttaaagagacctgtcattgcaataaaagccagcattcacaaaatgaggaagataaggaaagtagcataaatattttctattaacatggctttacaactgctaaaacttatagtataaaaatgtactaacaaagactaattcaagaagttgcaggatacacaatttttaaaaatctcatttctacatcttagcagtgacaaactgcaatttaaaaagtgtgtttggttattaatatatatgagacttttaaagaaagttatataactacatagagataaattaagaaagatgcctaaatagaagcaagtttaaagagctatatttttaaacatgaacaaactcccatgggagccatgccagtgtagtggaaaagtagtacatggggagatggggagtttttttgaaaaccagaattacagttctcatttcactacttaccagttgtatactcttgggaaagtcactcctagtatctatttcaccatctacagaagagaaatacttcacagaattattgtggggattaagttagataatgtgttttaaaatataaagctacatccaaagaaatgccaatatgtgacattagtatgaaatttactacagttccatttaacattccaactggttgctgtgtggaatatggcataattgtaataaattatttaggaaagcaagcaaagatgtaagtttttttaatttagggggaaaaaatgggagccttgctctccaaatccttaaaacatgctattaagcaacctttctgaatattctgtggtgccaagtagaaagtttaactgaaattaataagccaatggaaagaaagaaatattaataactgctggtggaaagactagctagatgtcagtgtggaaagattagatccactttacatgtgatattccaaatgaattaaaatgttaagtataaaaagaaaaatactacaagtctcacaccaatagtggtataaaggaacttcatggcaattggcaaggtagatcaactaagagaaaaagttttaaatgtgtagtaaataggaaaaagacaaaacaagatggaatttaaaagaagctatttgcattacacatggatgcactcagtttttgtaaaactatatgcatatccataagggtttgtactcttaggcaaatttataaagcgatcgtgtataaatgatataaaaaatcaatttgaatggtattcaaatttcctaatattaaaaatgcaactttgacttagttcatgctattgtattagcaaaactgttttaattgcatgtgtccttatagcagcagcattgtgtattagtagccttttaagagaactgtgtagaagactataaaaagggctttataactgatcttttgacatactcactttgagtggcatatgcccaggaaaatatttaaaagaaagaaaagctatttgtacaaagttttctagcagttccactcagataactttaagggggaaaaaagcccaacgattggaaatggttaagtaaattttggtgtattgctagtgctatcacagaatgttatatagccattcaataatattgatatatgtcaaattgtatgcaaaaaagtgagattcaaaaatgttaataagaacataaattgtgtttactgatacatgtgaaaatttaggtctacattgaaaagaatcagaagataacatgtaattcagtttaacattaggggttctttatttttcttctgttaaatattgatgtatgcaataaaaaataaaagattaattggtaaagtggtttactg

SEQ ID NO: 5854 - DNA, 2674 bp, Homo sapiens
  source 1..2674: mol_type = unassigned DNA
cccgcctcttcctcccttccttctttccttgctttcgccgcgcactccgccgccatggagcagcgccgcgtcaccgacttcttcgcgcgccgccgccccgggcccccccgcatcgcgccgcccaagctggcctgccgcacccccagccccgccaggcccgcactccgcgccccggcctccgctaccagtggcagccgcaagcgcgcccgcccgcccgccgcccccggacgcgaccaggccaggccaccggcccgcaggagactgcggctgtcggtggacgaggtttccagccccagtacccccgaggccccagacatcccagcctgcccttctccgggccagaagataaagaaatccaccccggcagcaggtcagccgccccacctgacatccgcgcaggaccaggacaccatctctgagcttgcgtcatgcctgcaacgggcccgggagctgggggcaagagtccgggcgctgaaggccagtgcccaggatgctggggagtcctgcaccccagaggccgagggccgccctgaggagccatgtggcgagaaggcgcccgcctaccagcgcttccatgccctggcccagcccggcctgccgggactcgtgctgccctacaagtaccaggtgctggcggagatgttccgcagcatggacaccatcgtgggcatgctccacaaccgctccgagacgcccacctttgccaaggtccagcggggcgtccaggacatgatgcgtaggcgttttgaggagtgcaatgttggccagatcaaaaccgtgtacccggcctcctaccgcttccgccaggagcgcagtgtccccaccttcaaggatggcaccaggaggtcagattaccagctcaccatcgagccactgctggagcaggaggctgacggagcagccccccagctcacggcctcgcgcctcctgcagcgacggcagatcttcagccagaagctggtggagcatgtcaaggagcaccacaaggccttcctggcctccctgagccccgccatggtggtgccggaggaccagctgacccgctggcacccgcgcttcaacgtggatgaagtacccgacatcgagccggccgcgctgccccagccacccgccacggagaagctcaccactgctcaggaggtgctggcccgggcccgcaacctgatttcacccaggatggagaaggccttgagtcaattggccctgcgctctgctgcgcccagcagccccgggtctcccaggccagcactgccggctaccccaccagccaccccgcctgcagcctctcccagtgctctgaagggggtgtcccaggatctgctggagcggatccgagccaaggaggcacagaagcagctggcacagatgacgcggtgcccggagcaggagcagcggctgcagcgcttagaacggctgcctgagctggcccgcgtgctgcggagcgtctttgtgtccgaacgcaagcctgcgctcagcatggaggtggcctgtgccaggatggtgggcagctgttgtactatcatgagccctggggaaatggagaagcacctgctgctcctctccgagctgctgccggactggctcagcctccaccgcatccgcaccgacacctacgtcaagctggacaaggccgcggacctcgcccacatcactgcacgcctggcccaccagacacgtgctgaggaggggctgtgagcctgggggccactgtggacagacgtgggcttcagaagctcgctggcctgggcccaccagcattttcttttatgaacatgatacactttggccttcctttccccagcgcccctgagggccagaggcagatgtgggctgcaggctgcacagcccgagggtctctggctgcgggcggtgggccccttcatggggctcacctggtggattcacattaaaccggtttctgtgggcacctctgtccttgctgctggtggggaagggaagccagatccagcaccccctggggggccatcgggagtgtggctgggggtgaagggggctctgtggcaatatggggttgggtagtgtgggtggcaggccatcccctctaatcttggaacctctgaatatgggacctcccacagcaaagggtgacttttgtcattaagaaagactggggtgggtgtggtggctcacgcctgtaaccccagcactttgggaggccaaggtgggcagatcacgaggtcaagagatcgagaccatcctggcgaacatggtgaaaccccatctctactaaaaatacaaaaaattagccgggtgtggtggtgggcacctgtcgtcccagctactagggaggctgaggcaggagaatggtgtgaacccaggaggcacagcttgcagtgagcgaagatcgcaccactgcacgcactccagcctgggtgacagagcgagactccgtctcaaaaaaaaaaatttcaagactggagaggtgatcctgaattgtccagctacgccccatgtcatcacagggccttcatgacagggccagagccagccagctttgaagacgcggccctgccccgacacaggcagcctggagaagctgggcaggacaagtaggacatccctggagcctccagaagggactggcctctgcccacaccttgacttcagtatttctgacctcctaaactctaataaagtcatgcttacagccact

SEQ ID NO: 5855 - DNA, 2250 bp, Homo sapiens
  source 1..2250: mol_type = unassigned DNA
gggcttcgatgcagcaacaacagcagctagccagtgccagaaacagaagactggcccagcagatggagaatagaccctctgtccaggcagcattaaaacttaagcagaagagcttaaagcagcgcctgggtaagagtaacatccaggcacggttaggccgacccataggggccctggccaggggagcaatcggaggacgaggcctacccataatccagagaggcttgcccagaggaggactacgtgggggacgtgccaccagaaccctacttaggggcgggatgtcactccgaggtcagtgctgtgtaccctgataattgtcgggccctactcccttcccttttctcttgggctgcttatggacacgtttgtttaacatctttaagcctgaatttgtattaatataataacttctgaaatcacatatttttaatagtgctgcatgtcttttatcaataccattccttttctgataatgtgcaatggtgagaggctatgacctgcgtaacaacaggtaattcatgtcatctccattccattttaaaacaccctgctgttgcttgaatcaaagcacattcaagttctagaaacaagtcaaacataagaaatttataggtcttttggcctatatctctttgttcctggtgctagtaaaacactgatacagctggaaaaagaggacaagttgacccacagcacttacctatatatgttcatttggggcactattactctgttccctgtatagttcttgttccctagaagaatctgttgagatcaggaaccatagcatttatttttaaatttaccataatgctaggcatctatctgattattcagtagatatttattaaatgtatgtacttactaattgaattaactcccaacttccaaaaatggatttgtggtcagacttgttgaattgattgaataaagagtagcttaatctgttcacagtatgcagcttgccccagccaacctaaaaactaactgaattaccttcatttaaccctcaccgccttcctttggttagaatctactttgtgtctcttggatttacctgcatatacattgtatgcctcctctctaaggtcaaaacctgctccgaggtggacgagccgtagctccccgaatgggcttaagaagaggtggtgttcgaggtcgtggaggtcctgggagagggggcctagggcgtggagctatgggtcgtggcggaatcggtggtagaggttagtcagctaccaacttcagagagtagctcccccttactttcctcccttaaaaactcagagccacctttctgcacagcttcaagtcataggcaggcttctttgtttgtcttgttttgttatttgaaactggcttatttttcaaattaccatgctggtagtgcaaaagtctcatgatttttccaagaatcaatcaagtgcatattatagagccagattatatgccatcttcctccaagctcttgcaaatttaaattgtatagttgaaaataccccccaaaatggtcagtttagggttttgcctttctctgcccctgtcccaccaccatcaccaccacataccaccctgtagctccaaatcctggtttgagtcacatgagaatatagaagagagagagagatacaaagatgaagtagagttaagagggtggtgagacttggagctgggcattggctctgaaaccaaataaattcaatgtcacatttggtgcctgtggagaaccagagatgactttttttgcttaaggtagagagcaagatggaattattatcagttaactaactggctcttattgataatcttgcctttgaaatttattgatgtttgtcttgtgacctcatgacccagattgggaaagagtttaatgatgttgctgctgttaatactaaatctcatgggagccttctggtttagagcttagtggaaaactcccaacacctgtccagaaaaaaaacactattgaagcccctgtgtatatttgctttggttctcttaaaaggtgtcttgggtcttccataacttatgaccttgaagttgccaaggaataataactgttaggaaagaaaagttgataaccaagggcttgttttcttctctcccattatatgatacttactgagtgaagtgcaagctagtttgggtttcaggatgaaataacatgtttccaaattatcttgacttggatcctgagagacatcacgagggtgggagagactaaaatagcttttcaaaaagctgagt

SEQ ID NO: 5856 - DNA, 1094 bp, Homo sapiens
  source 1..1094: mol_type = unassigned DNA
gtgctgcacttagctgcatttctaagtttctgattcttgcaagtttgtggaaacagaggagtctttaacccacatcagccttgatctaagtgtaccactttacttaaaagttcgtgggatctggagctcctggtctagcaagccatgaaaatgccaataaatgtttgtaataaagcttttatttaaacatccattttgttcgaccttgaagctttactaatatgctgaagaacaaacagccgacgccagtgaatattcgggcttcgatgcagcaacaacagcagctagccagtgccagaaacagaagactggcccagcagatggagaatagaccctctgtccaggcagcattaaaacttaagcagagcttaaagcagcgcctgggtaagagtaacatccaggcacggttaggccgacccataggggccctggccaggggagcaatcggaggacgaggcctacccataatccagagaggcttgcccagaggaggactacgtgggggacgtgccaccagaaccctacttaggggcgggatgtcactccgaggtcaaaacctgctccgaggtggacgagccgtagctccccgaatgggcttaagaagaggtggtgttcgaggtcgtggaggtcctgggagagggggcctagggcgtggagctatgggtcgtggcggaatcggtggtagaggtcggggtatgataggtcggggaagagggggctttggaggccgaggccgaggccgtggacgagggagaggtgcccttgctcgccctgtattgaccaaggagcagctggacaaccaattggatgcatatatgtcgaaaacaaaaggacacctggatgctgagttggatgcctacatggcgcagacagatcccgaaaccaatgattgaagcctgcccatcctcccatgagagactcttgttagtcaacacatctgtaaataaccttgagataacagatgagaagaaatctgattgatgctggatggacctatcacaataggctgtggacttacttgccaccagcttgtgcatttagtgtgttccttttactttttgatactgtgttgtatgaaacccttttgtcctttg

SEQ ID NO: 5857 - DNA, 810 bp, Homo sapiens
  source 1..810: mol_type = unassigned DNA
atggctgcacagtcagcgccgaaagttgtgctaaaaagcaccaccaagatgtctctaaatgagcgctttactaatatgctgaagaacaaacagccgacgccagtgaatattcgggcttcgatgcagcaacaacagcagctagccagtgccagaaacagaagactggcccagcagatggagaatagaccctctgtccaggcagcattaaaacttaagcagagcttaaagcagcgcctgggtaagagtaacatccaggcacggttaggccgacccataggggccctggccaggggagcaatcggaggacgaggcctacccataatccagagaggcttgcccagaggaggactacgtgggggacgtgccaccagaaccctacttaggggcgggatgtcactccgaggtcggggtatgataggtcggggaagagggggctttggaggccgaggccgaggccgtggacgagggagaggtgcccttgctcgccctgtattgaccaaggagcagctggacaaccaattggatgcatatatgtcgaaaacaaaaggacacctggatgctgagttggatgcctacatggcgcagacagatcccgaaaccaatgattgaagcctgcccatcctcccatgagagactcttgttagtcaacacatctgtaaataaccttgagataacagatgagaagaaatctgattgatgctggatggacctatcacaataggctgtggacttacttgccaccagcttgtgcatttagtgtgttccttttactttttgatactgtgttgtatgaaacccttttgtcctttg

SEQ ID NO: 5858 - DNA, 2096 bp, Homo sapiens
  source 1..2096: mol_type = unassigned DNA
tcagacaagcactggacgtggcggccattttgttttggacaccgagcaggagctggcggccgctgcagacgaaaggcaggaaagggcaggccgggtgagcagacggatcggccgactagacagccaaccagcaacaacgaactgagctcgcatactaccgcttacgcatctaaccaaccgcccatctagctaacccgagcccctccaccgtcaactcaggttcggccggtccccggcccgcctgccggagccgtggtggcagccccgggaggagcactggcgtctgtttccttcgattctcgggattcgaagatggctgcacagtcagcgccgaaagttgtgctaaaaagcaccaccaagatgtctctaaatgagcgctttactaatatgctgaagaacaaacagccgacgccagtgaatattcgggcttcgatgcagcaacaacagcagctagccagtgccagaaacagaagactggcccagcagatggagaatagaccctctgtccaggcagcattaaaacttaagcagagcttaaagcagcgcctgggtaagagtaacatccaggcacggttaggccgacccataggggccctggccaggggagcaatcggaggacgaggcctacccataatccagagaggcttgcccagaggaggactacgtgggggacgtgccaccagaaccctacttaggggcgggatgtcactccgaggtcaaaacctgctccgaggtggacgagccgtagctccccgaatgggcttaagaagaggtggtgttcgaggtcgtggaggtcctgggagagggggcctagggcgtggagctatgggtcgtggcggaatcggtggtagaggtcggggtatgataggtcggggaagagggggctttggaggccgaggccgaggccgtggacgagggagaggtgcccttgctcgccctgtattgaccaaggagcagctggacaaccaattggatgcatatatgtcgaaaacaaaaggacacctggatgctgagttggatgcctacatggcgcagacagatcccgaaaccaatgattgaagcctgcccatcctcccatgagagactcttgttagtcaacacatctgtaaataaccttgagataacagatgagaagaaatctgattgatgctggatggacctatcacaataggctgtggacttacttgccaccagcttgtgcatttagtgtgttccttttactttttgatactgtgttgtatgaaacccttttgtcctttgatttggttttttgtttttgtttttttaggggggagggggggtttcccctcctttgcccagacttctctttgaacacaaatgcattagccttgtggctagaacaccctcttcctacctctgtctcccctcacttgtcatatgctctgacatgctaacatttcttttgttcatccctgttgcccccacagaaacatcccagaaaaaccggtcagtgttccttcctccctgatccttaggtttctgaaatagggttctgttacatcctcttcgatagcctgtttaaaatgtttagaaggtctggagctcaaaaatgcgttcttccacattgataatttagtaaactgagaacattgacatcactacagggcagcataagaggttgcttacatgtggtagcagctctggtttgattcaagttgctaccatgtacattgacagcacatataccataaccagcgtgttgggttgaattgcactttctacctttgtatgagatttacagactttccttctgggtttgtatcatgaccagaggggtactatagggttggtttatactgcaatatagaggatcagaagccatttgatttggtaggtgtgtcagaagggagaatgatggcagacgaactgctggaagaggtcagaagatagccatgctaaaatgcaattatatcctcatgtttatcccaaactaatcttggacttttccactcattagctttgttttgcccttgtttcccttgaaggtttaagttcaaccatattctgtcaactgttcagtttcagtggaatcttgtatttctggttcattataacaaactgttcgcttaaatcca

SEQ ID NO: 5859 - DNA, 1923 bp, Homo sapiens
  source 1..1923: mol_type = unassigned DNA
gttttggacaccgagcaggagctggcggccgctgcagacgaaaggcaggaaagggcaggccgggtgagcagacggatcggccgactagacagccaaccagcaacaacgaactgagctcgcatactaccgcttacgcatctaaccaaccgcccatctagctaacccgagcccctccaccgtcaactcaggttcggccggtccccggcccgcctgccggagccgtggtggcagccccgggaggagcactggcgtctgtttccttcgattctcgggattcgaagatggctgcacagtcagcgccgaaagttgtgctaaaaagcaccaccaagatgtctctaaatgagcgctttactaatatgctgaagaacaaacagccgacgccagtgaatattcgggcttcgatgcagcaacaacagcagctagccagtgccagaaacagaagactggcccagcagatggagaatagaccctctgtccaggcagcattaaaacttaagcagagcttaaagcagcgcctgggtaagagtaacatccaggcacggttaggccgacccataggggccctggccaggggagcaatcggaggacgaggcctacccataatccagagaggcttgcccagaggaggactacgtgggggacgtgccaccagaaccctacttaggggcgggatgtcactccgaggtcggggtatgataggtcggggaagagggggctttggaggccgaggccgaggccgtggacgagggagaggtgcccttgctcgccctgtattgaccaaggagcagctggacaaccaattggatgcatatatgtcgaaaacaaaaggacacctggatgctgagttggatgcctacatggcgcagacagatcccgaaaccaatgattgaagcctgcccatcctcccatgagagactcttgttagtcaacacatctgtaaataaccttgagataacagatgagaagaaatctgattgatgctggatggacctatcacaataggctgtggacttacttgccaccagcttgtgcatttagtgtgttccttttactttttgatactgtgttgtatgaaacccttttgtcctttgatttggttttttgtttttgtttttttaggggggagggggggtttcccctcctttgcccagacttctctttgaacacaaatgcattagccttgtggctagaacaccctcttcctacctctgtctcccctcacttgtcatatgctctgacatgctaacatttcttttgttcatccctgttgcccccacagaaacatcccagaaaaaccggtcagtgttccttcctccctgatccttaggtttctgaaatagggttctgttacatcctcttcgatagcctgtttaaaatgtttagaaggtctggagctcaaaaatgcgttcttccacattgataatttagtaaactgagaacattgacatcactacagggcagcataagaggttgcttacatgtggtagcagctctggtttgattcaagttgctaccatgtacattgacagcacatataccataaccagcgtgttgggttgaattgcactttctacctttgtatgagatttacagactttccttctgggtttgtatcatgaccagaggggtactatagggttggtttatactgcaatatagaggatcagaagccatttgatttggtaggtgtgtcagaagggagaatgatggcagacgaactgctggaagaggtcagaagatagccatgctaaaatgcaattatatcctcatgtttatcccaaactaatcttggacttttccactcattagctttgttttgcccttgtttcccttgaaggtttaagttcaaccatattctgtcaactgttcagtttcagtggaatcttgtatttctggttcattataacaaactgttcgcttaaa

SEQ ID NO: 5860 - DNA, 1077 bp, Homo sapiens
  source 1..1077: mol_type = unassigned DNA
ggcggtccgggcgggtgactggcggcgggcgccgcggtcgggctggctgccgggcagcatggaggagctgagcagcgtgggcgagcaggtcttcgccgccgagtgcatcctgagcaagcggctccgcaagggcaagctggagtacctggtcaagtggcgcggctggtcctccaaacataacagctgggagccggaggagaacatcctggacccgaggctgctcctggccttccagaagaaggaacatgagaaggaggtgcagaaccggaagagaggcaagaggccgagaggccggccaaggaagctcactgccatgtcctcctgcagccggcgctccaagctcaaggtgggtggctgcgctgggtatgctgaccccacctcccagcacccccttggcgtagggggcaggcagagggagggtttggggccctcaggaagggggtggcacttctgccaacagtctgtccctctactcggaaaacaggagccccctttcttcctgtctctcagcttctgctgccaggggccccagccggctgagagttcctccccgcccctcccaggggcttcctgcttcagcctgtcctgcacgcctctctgctgggtggcagggtcaaactgctgcagacaagcactcttccctcccagggggtccttgggggacggaaaggaacaggaagcatgcgtacagtaggtgctcataggattgccggctggatgtgactcaaaagcctaagatttgggggctactccgggcccacctgcgggtgcaccttaaatcgaggtggccacgaaaggcagggctgactgaatagccagggggtgccaggaggggccttggaggagggcagaggcagtgtgggctgatgatgtgctttggccttctcgggactgtcctgtcacccctcctcgctacagtgatgggctcaccccgccacaggtatgcatgcgcccctggggtccgtggtagggcccctccctcccctgaggacaggtgaggcaggacaggatgggggaggagggcctggcctcagtcccgggtgtggctttgattccctcctccgggcactgtccctg

SEQ ID NO: 5861 - DNA, 4265 bp, Homo sapiens
  source 1..4265: mol_type = unassigned DNA
ggcggtccgggcgggtgactggcggcgggcgccgcggtcgggctggctgccgggcagcatggaggagctgagcagcgtgggcgagcaggtcttcgccgccgagtgcatcctgagcaagcggctccgcaagggcaagctggagtacctggtcaagtggcgcggctggtcctccaaacataacagctgggagccggaggagaacatcctggacccgaggctgctcctggccttccagaagaaggaacatgagaaggaggtgcagaaccggaagagaggcaagaggccgagaggccggccaaggaagctcactgccatgtcctcctgcagccggcgctccaagctcaaggaacccgatgctccctccaaatccaagtccagcagttcctcctcttcctccacgtcatcctcctcttcctcagatgaagaggatgacagtgacttagatgctaagaggggtccccggggccgcgagacccacccagtgccgcagaagaaggcccagatcctggtggccaaacccgagctgaaggatcccatccggaagaagcggggacgaaagcccctgcccccagagcaaaaggcaacccgaagacccgtgagcctggccaaggtgctgaagaccgcccggaaggatctgggggccccggccagcaagctgccccctccactcagcgcccccgttgcaggcctggcagctctgaaggcccacgccaaggaggcctgtggcggccccagtgccatggccaccccagagaacctggccagcctaatgaagggcatggccagtagccccggccggggtggcatcagctggcagagctccatcgtgcactacatgaaccggatgacccagagccaggcccaggctgccagcaggttggcgctgaaggcccaggccaccaacaagtgcggcctcgggctggacctgaaggtgaggacgcagaaaggggagctgggaatgagccctccaggaagcaaaatcccgaaggcccccagcggtggggctgtggagcagaaagtggggaacacagggggccccccgcacacccatggtgccagcagggtgcctgctgggtgcccaggcccccagccagcacccacccaggagctgagcctccaggtcttggacttgcagagtgtcaagaatggcatgcccggggtgggtctccttgcccgccacgccaccgccaccaagggtgtcccggccaccaacccagcccctgggaagggcactgggagtggcctcattggggccagcggggccaccatgcccaccgacacaagcaaaagtgagaagctggcttccagagcagtggcgccacccacccctgccagcaagagggactgtgtcaagggcagtgctacccccagtgggcaggagagccgcacagcccccggagaagcccgcaaggcggccacactgccagagatgagcgcaggtgaggagagtagcagctcggactccgaccccgactccgcctcgccgcccagcactggacagaacccgtcagtgtccgttcagaccagccaggactggaagcccacccgcagcctcatcgagcacgtatttgtcaccgacgtcactgccaacctcatcaccgtcacagtgaaggagtctcccaccagcgtgggcttcttcaacctgaggcattactgaagccccggcgccaccagctgcgcggtcttactccccttccctgcctatggtgtcgcttggctaagtgactcccagcccaagccccctcaagagtctgggtcgggggaggaggagtgggtggcctccttgatgggcaggcttggaagggacttctcccgcaccccactctgtcccaggacatagggcagggggcctcactgccttgttggtctccaccttgttcctacctctgcaggcctctttgctctcccctcttgcctcaggaaacccggtggcacctgtggctccaggtgactgtcttgaacagagcgggcttcttcatggctgcgttgttgctgagtttgaactgctcctccctggcctgcgtgactgaatcacagctttggtccctgtcttgcaggggctgaggtgtcaggaggggacttctggcccaccttgccttcagccctggagtgggcagagagtattgtggggaggcatggccagtgggactagtgttccctccatctggccacagcttttgggagatggggtgggcaggggtggtcctggctggcattgcctgagccggcagtgatgaagtggggagcttgcccttgacaggtgggggctggctggggccttaatgtgaaaagacagtggcaggcagctggagtagagcgagcccagcagccctaaaaggctgccttcatggccatctagccccagttcagggcagcatccatagcccacaagccagcgtgggtggggcgggggtggtcccacagctgggttccacctgaagagcctccgtgcctcggagcaggagaggcaggctatggctgccaccctccctcctgcctgtgtcccagtgagaactgacctgagtccccttccaaacccagacccacctcctgccccaggcccactgaagcatgttccatttctaaaaagcccagagttcagtgtgtcccaaggaaaacccaaagtggaggtgctcaggtccaggggagtccagtgggcaggacccttggcaggcaagcccctcccttcactcccaggacctaccttctgctagtaaaggactggcttcattctaattatggcccacagactgccccggagacctggaggacagcagtgctggcacttgggtgtccatgggcccgtctgccggctctgcctgtgctgcaagtgttggccgtgggtccagccaacaactccctacgtcctgtgtggggccctgcccaagtggatgaggcattccttgaggagtatcattttccctgacaatccccatcacctttaggggttccctgcttggctcctttccagctgaaaaactagacctgtgccattggggaagctggacaaagtctagggggcccgcctggtagagggtcccgggaagctggatctgtcagcctcggccctgaggcccctgttaactcaagactgtgagctgcctctaggtggtcacgtctgggagctagcttgtatggcttctgaccagtatcaggatttctgttctgagagcagcgtgggcagcaaggcagggcagcccagaggtggcagcggcaggcaatctggtcactaggtctttgtgatgccaaaaataaaagagggtggggtgggtgctttctgttcctctgattggatggagtccgccagcaggcatggggctacattccagtgcctgactatagggaggcactcctgattccatggagcagcccggactttgagaatgggctctggtttgcggggggcaggcgtaccagactgcaagaccccccagtacctcaccgtgccaaataggaagaggtggccttggtgtagccaaatggatctttttaacagtgtgcctttggggagggacccatgtccatggcttcgttgagggccatccatatgccagctgggggccagcccacagtggccatattggctgcagcaggaatggtgcccacctcggcgaattgaagggctaagagtcccagatagctaggccagagctggaagcagacagtaaggggaagagctgctcccacaggagagggagagattccagctcactgcgcagcctgggaggaggcgtggatcctggcacgctgagcctcaggcaccagcctccctgtgctcgacagcaaagtcttgactccttcctgctgagcactgtgctaccttcactgctccaaagccagactaacagctctccaagcccttggggtgactcggcttccaggagctgttggagaaatgaggatgtctgtccctgtctgcctgggcaggccagattcctccccagcagccgggtctctccagaccctgattcggtgcctttctgtttaccagctacttcaatcccaaagtttgaatctgcagataccttactcccagccactttgccttcttactgtgttgtgtgtttttcctggtgcttcaagagcgtgtgcagggcaagtgccgtcactgggaactgcaccagatgctcagacttggttgtcttatgtttaccaataaataaaagtagactttttctatttttatttgctgctatttgtgtgtgtgtttgtgtttgtgtagctaggtatctggcacttctgacgatgcattgttgcttttttcc

SEQ ID NO: 5862 - DNA, 4081 bp, Homo sapiens
  source 1..4081: mol_type = unassigned DNA
ccgaggaaaacgttgcgcaggttcaaaaatggaacgtcggcggcgtgagggagcgcgagggggtgtgcgcgcgtgcgcgtgcgcgtgcgcgcccggacgagggtgacggggaccccgccagccccagcatcgcgcgccgcagccgcggccccgcagctccgcccccggcccggcccggccccgggcccgctcgcccgccgccccgcatggagctgtcagccatcggcgagcaggtgttcgccgtggagagcatccggaagaagcgcgtgcggaagggtaaagtcgagtatctggtgaagtggaaaggatggcccccaaagtacagcacgtgggagccagaagagcacatcttggacccccgcctcgtcatggcctacgaggagaaggaggagagagaccgagcatcggggtataggaagagaggtccgaaacccaagcggcttctgctgcagcggctgtacagcatggacctgcggagctcccacaaggccaagggcaaggagaagctctgcttctccctgacgtgcccactcggcagcgggagccctgagggggtggtcaaggcgggggcacctgagctggtggacaagggccccttggtgcccaccctgcccttcccgctccgcaagccccgaaaggcccacaagtacctgcggctctcgcgcaagaagttcccgccccgcgggcccaacctggagagccacagccatcgacgggagctcttcctgcaggagccaccggccccagacgtcctgcaggcggctggcgagtgggagcctgctgcgcagccccctgaagaggaggcagatgccgacctggccgaggggccccctccctggacacctgcgctcccctcaagtgaggtgaccgtgaccgacatcaccgccaactccatcaccgtcaccttccgcgaggcccaggcagctgagggcttcttccgagaccgcagtgggaagttctgaatcaccgtttttactcttcttaaactgttttcttttgggcttggggtgggacttccagagatagggatgggttgggggcggggtaattattttatttaaaaaaataccgagcagcaaaaggggagaagatcccactactctcccaccacctgccctttctctgagggacgtttaccacgaggcctcaggctggggatggagagagttgctctgggagttggggtaccacccccagggcaggatggggacaggatcacctgcccgggacaccaccattatcattctcctctagtgacgcagcagctggttctgggagttaaaggagcattggaaggcccaaaccctctcccttgagtggccaccccagcctggttggctggttttccccttttctcttgtttcaattgggtctttaccttgaactctcctctctggctttgcggtgggctgtggaggctggttttgaccaaaagtgagtggggcgggaggaaggggcaggaggaagggttgaggttacttggggcgagtcccttccccttcagagaggcttctatccttcccagggaggaggcgccgctgagacccttctgctgagagctctgccctcccctcatcacctggcctgtgcagaaacgctcatgcacacctggctgcacaggtgtgcacgcattacccttcgcgtgtacgttcccatgtgccccgtgaaagcatgtgtggctgcagacgtgtccacatgggccttgcgaacctgggttagaaaccctggccaggcgaacgtggggtgattcacagcacaaaagacctcaccaccacacctgcactcaccccaccttgcatgcaccttgctacctgcttgcggctttcagtggagggcaggggtctggcacaggtgcgatggcaccccatgctccaggcatacagatgtggtttctcggctgcaccgggccaggctgcgggtgtgcaggcgtctgctaagttgtgtgatgtatcagcacaggctttgagacgtctggaccctgtccttcctcccgtgaggggttcttgttctttctgactcaggtgacttttcagcccttccaattcccctctttttctgccctcccctccaactcagccaacccaggtgtgggcagtcagggagggagggagtgtcccaccacgttctcagggcagcccttgactcctaagccccttcctccttccattctgcatcccctccccatccaacctaaatgccacagctggggctgagctgtattcctgtggagggacctctgccgtgcctctctgaggtcaggctgtgctgtgtgatgggcaggctttgccccagcccacccctggcaaggtgcacttgttttctggtttgtacaaggtgtcctgggggcccgtggcttccctgccagtgaggagtgacttctccctctcttccagtcctgtaggggagacaaaaccagattggggggcccaaggggagcatggaaaaggccggctcccctgtctttccttggctgtcagagtcagggtaacacacaccaagagtggagtgcggccagcaagtttgagacctgcccgccctcctcgcagctctgctctgtgtcctcaggaagtcacagagtctactgaggcaaggagagggtgattctttccccaaatcccttcttccctggttcccaaaccaaagacagcctgcagccctttctgcatggggtgctctgttgacaggcttcccagatccctgagtctctctttccttcctcctcgatctttagttgtccacggtcaattcagtgcttccattgggggacagtcccctccgggatgacctgattcacctccagcccagggaatggaatctagaggaatacgtggggtgggtctggacaaggagcggcaggaatcaccacccatctccagctgtggagccctgtggaggggaaggggaagcttggggttcagaggggactcttccaggagaggggtgcccagcggaggtaaagatgatagagggttgtggggggtctctagttgaatgttttggcccatgactttggaacatggctggcagcttccagcagaagtcacgctccccatcccccaggggacataggacctttttcctgcttcctggtcactttcaaagaactatttgcgcaatctgtgggtctgtggattcacggggctttctgtgtgggtgctgcagttgcttttgtctgcagcagcaggacacatctttcctcttactcagccctttatggcccatggggaactccgtggctcagggagagctgaactccaggggtgtgacctgggacgggtgggcctgaggtgcccagctcagggcagccaggtggctcatgggctgtagtgagccagctccctgggggaaaaggctgtgggccgttaggaccatcctccaggacaggtgacctctatgaggtcacctacggctgtggccgtgcaggcctccttccagcccagagtggcccagtagagcaaggcagacagtgacctccacccccgcagccctcttaaaaggccagtactcttgggggtggggggagggtttagaaagcatttgcccatctgcctttctttcccccagcccccacccgctttgaatgtagagacccgtgggcacttttccttttgtggtggggggtgcggaggaggtacccccacccctggcacagccgcctggaatgcaggactgtcactgctgttcgggtgatgacctcgttgccaagctcctcctgtccccttgttctgggggcaggcgctgtgcttctgtgaggtggtttagcttttgctttcgaagtggccagctgcggccaccaggtctcagcacaagagcgcttcctttgcacagaatgagcttcgagctttgttcagactaaatgaatgtatctgggaggggtcgggggcacgagttgattccaagcacatgcctttgctgagtgtgtgtgtgctgggagagtcagagtggatgtagagcgcggttttatttttgtactgacattggtaagagactgtatagcatctatttatttagatgatttatctggtaaatgaggcaaaaaaattattaaaaatacattaaagatgatttaaaaaaaagaaaa

SEQ ID NO: 5863 - DNA, 784 bp, Homo sapiens
  source 1..784: mol_type = unassigned DNA
atggagctgtcagccatcggcgagcaggtgttcgccgtggagagcatccggaagaagcgcgtgcggaagggtaaagtcgagtatctggtgaagtggaaaggatggcccccaaagtacagcacgtgggagccagaagagcacatcttggacccccgcctcgtcatggcctacgaggagaaggaggagagagaccgagcatcggggtataggaagagaggtccgaaacccaagcggcttctgctgcaggagccaccggccccagacgtcctgcaggcggctggcgagtgggagcctgctgcgcagccccctgaagaggaggcagatgccgacctggccgaggggccccctccctggacacctgcgctcccctcaagtgaggtgaccgtgaccgacatcaccgccaactccatcaccgtcaccttccgcgaggcccaggcagctgagggcttcttccgagaccgcagtgggaagttctgaatcaccgtttttactcttcttaaactgttttcttttgggcttggggtgggacttccagagatagggatgggttgggggcggggtaattattttatttaaaaaaataccgagcagcaaaaggggagaagatcccactactctcccaccacctgccctttctctgagggacgtttaccacgaggcctcaggctggggatggagagagttgctctgggagttggggtaccacccccagggcaggatggggacaggatcacctgcccgggacaccaccattatcattctcctctagtgacgcagcagctgg

SEQ ID NO: 5864 - DNA, 472 bp, Homo sapiens
  source 1..472: mol_type = unassigned DNA
gagggtgacggggaccccgccagccccagcatcgcgcgccgcagccgcggccccgcagctccgcccccggcccggcccggccccgggcccgctcgcccgccgccccgcatggagctgtcagccatcggcgagcaggtgttcgccgtggagagcatccggaagaagcgcgtgcggaagggtaaagtcgagtatctggtgaagtggaaaggatggcccccaaaggaggagagagaccgagcatcggggtataggaagagaggtccgaaacccaagcggcttctgctgcagcggctgtacagcatggacctgcggagctcccacaaggccaagggcaaggagaagctctgcttctccctgacgtgcccactcggcagcgggagccctgagggggtggtcaaggcgggggcacctgagctggtggacaagggccccttggtgcccaccctgcccttcccgctccgcaagccccgaa

SEQ ID NO: 5865 - DNA, 5918 bp, Homo sapiens
  source 1..5918: mol_type = unassigned DNA
aggtgaatcaaaggagagtcccagaaaacctgtgactgttgaagaaaattcatctgtgaatttttatattcaaggagtcagtatttatattcatcttttaaactgggaagatttatattttactttaaaacttcttgataataatttacaatgaatggacacagtgatgaagaaagtgttagaaacagtagtggagaatcaagccagtcggatgatgattctgggtcagcttcaggctctggatctggttcgagttctggaagcagtagtgatggaagcagtagccagtcaggtagcagtgactctgactccggatctgaatcaggcagtcagtcagagtctgagtcagacacttcccgagaaaacaaagttcaagcaaaaccaccgaaagttgatggagctgagttttggaaatctagtcctagtattctggccgttcagagatctgcaatcctcaagaagcagcaacagcagcagcagcaacaacaacatcaagcctcatctaatagcggatcagaagaggattcctctagcagtgaagattccgatgactcatcaagtgaggtcaaaaggaaaaagcataaagatgaagattggcaaatgtctgggtcaggatctccatctcagtctggttcagattcagaatctgaagaagagagagagaaaagcagttgtgatgaaacagaatctgattatgagccaaaaaacaaagtcaaaagcagaaaacctcaaaatagatctaagtcaaaaaatggaaagaagattcttggacaaaaaaagagacagattgattcatctgaggaggatgatgatgaagaagattatgataatgataaaagaagttctcgtcgccaagcaactgttaatgttagctataaggaggatgaagaaatgaaaacagattctgatgacctactggaagtctgtggagaggatgttcctcaacctgaggaagaggaatttgaaaccatagaaagatttatggattgtcggattgggagaaaaggagctactggtgctactacaaccatctatgcagttgaagcagatggtgacccaaatgcaggctttgaaaaaaacaaagaaccaggagagattcagtatttaattaaatggaaaggatggtcccatatccacaacacttgggagacagaagaaaccctcaagcagcagaatgttagaggaatgaaaaaattggataattataagaaaaaagatcaggaaacaaaaagatggttgaaaaatgcctctccagaagatgtggaatattataattgccagcaagaacttacagatgatctacataaacagtatcaaatagtggaacgtataattgctcattccaatcaaaagtcagcagctggttatcctgattattactgcaaatggcagggccttccatactcagagtgcagctgggaagatggagctctcatttccaaaaagtttcaagcatgcattgatgagtattttagcaggaaccaatcaaaaaccactccttttaaagattgcaaagtattaaaacaaaggccaaggtttgtagccctgaagaagcagccatcctatattggaggacatgagggcttagaattaagagattatcaactgaatggtttaaattggcttgctcattcttggtgcaaaggaaatagttgcatactcgctgatgaaatgggccttggaaaaacaatacagacgatctcatttctgaattatttgtttcatgaacatcaattatatggaccttttttattggtagtaccgctctccactcttacttcctggcaaagggaaattcagacttgggcttctcaaatgaatgctgtggtttatttaggtgacattaacagcagaaacatgataagaactcatgaatggacgcatcatcagaccaaacggttaaaatttaatatattgttaacaacttatgaaattttattaaaagataaggcattccttggaggtctaaattgggcatttataggtgttgatgaagcacaccgattaaagaatgatgactcccttctgtataaaactttaatagattttaaatccaatcatcgtctccttatcactggaactcctctacagaattccctcaaagagctctggtctttgctacatttcattatgccagaaaagttttcttcctgggaagattttgaagaagaacatggcaaagggagagaatatggttatgcaagccttcacaaggagcttgagccatttctgttacgccgagttaagaaagatgtggaaaaatctcttcctgccaaggttgagcagattttaagaatggaaatgagtgctttacagaaacaatattacaaatggattttaactaggaattacaaagccctcagcaaaggttccaagggcagtacctcaggctttttgaacattatgatggagctaaagaaatgttgtaaccattgctacctcattaaaccaccagataataatgaattctataataaacaggaggccttacaacacttaattcgtagtagcggaaaattgattcttcttgacaagctattaattcgcctaagagaacgaggcaatcgagttcttattttttcacaaatggtgcggatgttagatatacttgcagaatatttgaaatatcgtcaattcccctttcaaagattagatggatcaataaaaggagaactgaggaaacaagctctagatcattttaatgctgagggatcagaggatttttgctttttgctgtccacaagagctggaggtctagggattaatttagcctctgctgacactgttgttatatttgattccgattggaatccacagaatgatcttcaggcacaggctagagcccatcgaattgggcaaaagaaacaggtgaatatttatcgtctagttacaaagggatcagttgaagaagatattcttgaaagggcgaaaaagaagatggttttagatcatcttgtaattcaaagaatggacacaactgggaagacagtactacatacaggttctgccccatcaagttctactcctttcaataaagaagagttatcagccattttaaagtttggtgctgaagaactttttaaggaacctgaaggagaagaacaagagccccaggaaatggatatagatgaaatcttgaagagagctgaaactcatgaaaatgaaccaggtcctttaactgtaggagatgaattgctttcccagttcaaggttgccaacttctcaaatatggatgaggatgacattgagttggaacctgaaagaaattcaaagaattgggaggaaattattccagaagatcaaagaagacgattagaagaagaagaaagacaaaaggaacttgaagaaatttatatgctcccaagaatgagaaattgtgcaaaacagattagtttcaatggaagtgaagggaggcgcagtagaagtaggagatactctggatctgatagtgattccatctcagaagggaaaaggccaaagaaacgtggaagaccacggactattcctcgggagaatattaaaggatttagtgatgcagaaattaggcggtttatcaagagctataagaaatttggtggtcctctggaaagattagatgcaattgctcgagatgctgagttagttgataagtcagaaacagaccttagacgactgggagaattggtacataatggttgcattaaagcattaaaggatagttcttcaggaacagaacgaacaggtggtagactcggaaaagtgaagggtccaacattccgaatatcaggagtacaggtgaatgccaaactagtcatctcccatgaagaagaattaatacctttgcacaaatccattccttctgatccagaagaaagaaagcagtatactatcccatgccacacaaaggcagctcattttgatatagactggggcaaagaagatgattccaatttgttaattggcatctatgaatatggatatggaagctgggaaatgattaaaatggatcctgacctcagtctaacacacaagattcttccagatgatcccgataaaaaaccacaagcaaaacagttgcagacccgtgcagactacctcatcaaattacttagtagagatcttgcaaaaaaagaagctctttctggtgcgggaagttcaaagaggagaaaagcaagagctaagaagaataaagcaatgaagtctataaaagtgaaagaggaaataaagagtgattcttctcctctgccttcagagaagtctgatgaagatgatgataaattgagtgaatccaagtctgatggtagggaaagatccaagaaatcttcagtgtcagatgctccagttcatatcacggcaagtggtgaaccagttcccatttctgaagaatctgaagagctggatcagaagacattcagcatttgtaaagaaagaatgaggcctgttaaagcagctttgaaacaacttgataggcctgagaaaggcctttcagaaagagaacaactagagcatactagacaatgtttaataaaaattggagaccatatcacagaatgtctaaaagagtatacaaatcctgaacaaattaagcaatggagaaaaaacctgtggatttttgtatctaagtttactgaatttgatgcaagaaaattacataaattatataagcatgctattaaaaaacggcaggagtctcagcaaaacagtgatcaaaacagcaacttgaatcctcacgtgattagaaatccagatgtggaaagattaaaagagaatacaaatcacgatgatagcagcagggacagttattcctctgatagacacttaactcagtaccatgatcatcataaagaccgacatcagggagattcttacaaaaaaagtgattccaggaaaagaccctattcttcttttagtaatggtaaagaccatcgtgattgggatcactacaagcaagacagcagatattacagtgacagagagaaacacagaaaactggatgatcacaggagtagagatcacaggtcaaatttggaaggaagtttaaaagatagatctcattctgatcatcgttctcactcagatcatcggttacattcagaccaccggtcaagttctgaatatacgcaccataaatcttccagggattataggtatcactcagactggcaaatggaccacagagcttccagcagtggccctaggtcaccactagatcagagatctccttatggctccagatctccatttgaacattcagttgaacacaaaagtacaccggagcatacctggagtagtcggaaaacataacaaaaactgatacttcgtctttctggacttttcttttagccatatatcataaaccaacacagtaattgccttacatgacttgaaagatataaacagatcttctatcagtagcagtattgttacttctttccaggatgcaaggtctattatcccaacagaagagaaaatatttttatatttaaggattatgctgcactgtactacaaaattgtagtacttttttttgttttcttttttaaagaaatggaaaatgtttactattacagggacctcaacactgccctcccatacaggctggataaaactgtttttaagtcagtgattttagactgacctccatttaaattatgtttatatatgaactttactctgacctgtgatcatgtttcaggaaggaatgaaagagagttctttcttaataaagaaaaacactcaaggactttgttcatttccaaagctacttgtttacattgtacactgcgaccaccttgccgcttttcatcacaagcttgaatatttaaattctgtacttatatctgtaaaatagccaggaatttcctgtttgtgatctattatgcctttttacaaaaaaaatggctgtaaattattgtaaatattaaaggaactttccttac

SEQ ID NO: 5866 - DNA, 1985 bp, Homo sapiens
  source 1..1985: mol_type = unassigned DNA
tatttaaggtatacaatttgatgatttgatatacacatgcattgtgaaataattacagtctctgattaattactgatgcctcccttgggatgggaagagatagcaaactgtacctcatttatggtgtttggttgtgttactcttgggaccattacattaccattattaagtgacagttaactttttaatgcattatttaagacaattctttacaagcataattcatattatctgatggtatttccactccagttattaacatacctgtcccttatatgcataatcaggatcacaatatgaatctgagtcacttcctgatttaatttatgtctttggtgcatttcaaattaggattgtactgcttttcaccctaaagactataaaatgaagcgatttggaagagaagtaaaatttaatgtttagtttcactggagtcttagtcatatatgaagttttgaaaaaatgcataggaaaattaatatccttaagagtttgttccatagagggctgtgtatgtgtatatgtgtttgtgcctggagggaaggagttccatgaaaaactaaatattttccaccagactaacttaatttgcctttttttaaattcttctagaaacctgtggatttttgtatctaagtttactgaatttgatgcaagaaaattacataaattatataagcatgctattaaaaaacggcaggagtctcagcaaaacagtgatcaaaacagcaacttgaatcctcacgtgattagaaatccagatgtggaaagattaaaagagaatacaaatcacgatgatagcagcagggacagttattcctctgatagacacttaactcagtaccatgatcatcataaagaccgacatcagggagattcttacaaaaaaagtgattccaggaaaagaccctattcttcttttagtaatggtaaagaccatcgtgattgggatcactacaagcaagacagcagatattacagtgacagagagaaacacagaaaactggatgatcacaggagtagagatcacaggtcaaatttggaaggaagtttaaaagatagatctcattctgatcatcgttctcactcagatcatcggttacattcagaccaccggtcaagttctgaatatacgcaccataaatcttccagggattataggtatcactcagactggcaaatggaccacagagcttccagcagtggccctaggtcaccactagatcagagatctccttatggctccagatctccatttgaacattcagttgaacacaaaagtacaccggagcatacctggagtagtcggaaaacataacaaaaactgatacttcgtctttctggacttttcttttagccatatatcataaaccaacacagtaattgccttacatgacttgaaagatataaacagatcttctatcagtagcagtattgttacttctttccaggatgcaaggtctattatcccaacagaagagaaaatatttttatatttaaggattatgctgcactgtactacaaaattgtagtacttttttttgttttcttttttaaagaaatggaaaatgtttactattacagggacctcaacactgccctcccatacaggctggataaaactgtttttaagtcagtgattttagactgacctccatttaaattatgtttatatatgaactttactctgacctgtgatcatgtttcaggaaggaatgaaagagagttctttcttaataaagaaaaacactcaaggactttgttcatttccaaagctacttgtttacattgtacactgcgaccaccttgccgcttttcatcacaagcttgaatatttaaattctgtacttatatctgtaaaatagccaggaatttcctgtttgtgatctattatgcctttttacaaaaaaaatggctgtaaattattgtaaatattaaaggaactttccttacttcctttccctaccaactcaggccttcttatt

SEQ ID NO: 5867 - DNA, 771 bp, Homo sapiens
  source 1..771: mol_type = unassigned DNA
aggtgaatcaaaggagagtcccagaaaacctgtgactgttgaagaaaattcatctgtgaatttttatattcaaggagtcagtatttatattcatcttttaaactgggaagatttatattttactttaaaacttcttgataataatttacaatgaatggacacagtgatgaagaaagtgttagaaacagtagtggagaatcaagccagtcggatgatgattctgggtcagcttcaggctctggatctggttcgagttctggaagcagtagtgatggaagcagtagccagtcaggtagcagtgactctgactccggatctgaatcaggcagtcagtcagagtctgagtcagacacttcccgagaaaacaaagttcaagcaaaaccaccgaaagttgatggagctgagttttggaaatctagtcctagtattctggccgttcagagatctgcaatcctcaagaagcagcaacagcagcagcagcaacaacaacatcaagcctcatctaatagcggatcagaagaggattcctctagcagtgaagattccgatgactcatcaagtgaggtcaaaaggaaaaagcataaagatgaagattggcaaatgtctgggtcaggatctccatctcagtctggttcagattcagaatctgaagaagagagagagaaaagcagttgtgatgaaacagaatctgattatgagccaaaaaacaaagtcaaaagcagaaaacctcaaaatagatctaagtcaaaaaatgaaaaaaaaaaaaaaaaa

SEQ ID NO: 5868 - DNA, 1144 bp, Homo sapiens
  source 1..1144: mol_type = unassigned DNA
gctactagccgcgggggccaagcgcctggcttcttactgcggcttcatactgagggccgagccgaggcggcgcgggtgcaggagcaggacttacggcagtgggggctgacagggattcacctacgctcttaccagctggagggagtaactggctcgcccagcgcttccattgtcagaatggctgtatcctgggagatgagatgggcctggggaagacctgccagactattgctctcttcatttatttggcaggaagattaaatgatgaagggccatttctgattctttgtcccttgtctgttgagcaactggaaagaagaaatgcagagatttgctccaggtctttcctgtgtaacatatgcggcgacaaggaggaaagagcctgccttcagcaagacctgaaacaggagtcacgttttcatgtgctactgactacctatgagatttgcttgaaagatgcatcatttctaaaatcattcccttggagtgttcttgttgtggatgaagctcacaggttgaaaaaccaaagctccctgctgcataagaccttgtcagagttctcagtagtcttcagtctcctgttgaccggaactcccatccagaacagcctccaagagctctactccctcctcagttttgtggagcctgatctcttttccaaggaagagtgggagattttattcaacgctaccaggatattgagaaagaatctgagtcagcaagtgaactgcacaaactcttgcagccatttctgctgaggcgagtgaaagctgaggtagctacagagcttcccaagaagacagaagtagtgatataccatggcatgtcagcattgcagaagaaatactacaaggccattttgatgaaagacctagatgcatttgaaaatgagacggcaaagaaagttaaactacagaacattttgtcccagcttcgaaagtgtgtggatcacccatatttgtttgatggtgtggagccggagccttttgaagttggagaccacctgactgaggctagtgggaagcttcacctgctggataagctactagcattcctgtattctgggggccatcgggttttacttttctcccaaatgacccagatgttggatattctccaagactatatggattacagaggtgac

SEQ ID NO: 5869 - DNA, 2413 bp, Homo sapiens
  source 1..2413: mol_type = unassigned DNA
ggagcgcgcgggcgctactagccgcgggggccaagcgcctggcttcttactgcggcttcatactgagggccgagccgaggcggcgcgggtgcaggagcaggacttacggcagtgggggctgacagattcccttggagtgttcttgttgtggatgaagctcacaggttgaaaaaccaaagctccctgctgcataagaccttgtcagagcaagtgaactgcacaaactcttgcagccatttctgctgaggcgagtgaaagctgaggtagctacagagcttcccaagaagacagaagtagtgatataccatggcatgtcagcattgcagaagaaatactacaaggccattttgatgaaagacctagatgcatttgaaaatgagacggcaaagaaagttaaactacagaacattttgtcccagcttcgaaagtgtgtggatcacccatatttgtttgatggtgtggagccggagccttttgaagttggagaccacctgactgaggctagtgggaagcttcacctgctggataagctactagcattcctgtattctgggggccatcgggttttacttttctcccaaatgacccagatgttggatattctccaagactatatggattacagaggctacagctatgagcgtgtggatggttctgtgagaggagaagagagacacttggccattaagaactttggacagcagcccattttcgtttttctcctgagtactagggcaggtggagttggcatgaacttaacagcagcagatactgtgatttttgttgacagtgactttaatcctcagaatgacttgcaagcagctgccagggctcatcgcattggccaaaacaagtctgttaaagttattcggctgattggtcgagacactgtggaagaaatagtctataggaaagcagcctccaaactgcagctcaccaacatgatcatagaaggaggccattttactctgggagcccagaaacccgctgccgatgctgacctccagttgagtgagatactcaaatttggtttggataaactgctggcctctgaggggagcaccatggatgaaatagacctggagtccatactgggagaaacaaaagatggccagtgggtctctgatgccttgcctgcagcagaaggagggagcagagatcaagaggaaggaaaaaatcatatgtacttatttgaaggtaaagattattctaaagagcccagtaaggaagacagaaaatcatttgaacaactggtaaaccttcagaaaacccttttggagaaagctagtcaagagggccgatcactccgaaataaaggcagtgttctcatcccaggccttgtggagggatctaccaaaaggaagcgggttctgagtccagaagagctggaggacagacagaagaaaagacaagaagcagctgccaagagaaggagactcatagaggagaagaagaggcaaaaggaagaggctgaacataagaaaaagatggcctggtgggaatccaacaattaccagtccttctgcctgccctctgaggagagcgagccagaggaccttgagaatggggaagagagctctgctgagctggattaccaagacccagatgctacttccctcaagtacgttagtggtgatgtcacccaccctcaggctggggccgaggatgctctcattgtgcactgcgtagatgactctggccactggggcagaggtggtttatttacagctctggaaaagcgatccgctgagccaagaaaaatatatgagctggctgggaaaatgaaagacctgagtttgggaggtgtccttttatttcctgttgatgataaagaatcaagaaacaaagggcaagatttgttggccttgattgtggctcagcatcgtgatcgttccaatgtcctgtctggcattaagatggcagccctagaagagggcctgaagaagatatttttagcagcaaaaaagaagaaagcaagtgttcatcttccacgtattggacatgccacgaaaggttttaactggtatggtactgagcgacttattcggaaacatctggctgcaagaggcatcccaacttacatatattattttcctagaagcaagtctgctgtccttcatgcacagtcttcatcttcctcctcaagacagctggtgccttaagaattggcccagcctcagatcctgtctttagcaaccagctaatatttacccagaggtactgcaatagagtatttcaaaatggaatcaggatctggtgggcctcagaaattgtctcttttctgagtttcaatttggttctcctggatgttttgctctgttttggtacctgtaatatagggaaacacaactttttttgggaaagccctttgaccccagcttgctagttgcataataataaattttctgttcct

SEQ ID NO: 5870 - DNA, 2967 bp, Homo sapiens
  source 1..2967: mol_type = unassigned DNA
gcggggcctctaccggcccgatggagcgcgcgggcgctactagccgcgggggccaagcgcctggcttcttactgcggcttcatactgagggccgagccgaggcggcgcgggtgcaggagcaggacttacggcagtgggggctgacagggattcacctacgctcttaccagctggagggagtaaactggctcgcccagcgcttccattgtcagaatggctgtatcctgggagatgagatgggcctggggaagacctgccagactattgctctcttcatttatttggcaggaagattaaatgatgaagggccatttctgattctttgtcccttgtctgttttgagcaactggaaagaagaaatgcagagatttgctccaggtctttcctgtgtaacatatgcaggcgacaaggaggaaagagcctgccttcagcaagacctgaaacaggagtcacgttttcatgtgctactgactacctatgagatttgcttgaaagatgcatcatttctaaaatcattcccttggagtgttcttgttgtggatgaagctcacaggttgaaaaaccaaagctccctgctgcataagaccttgtcagagttctcagtagtcttcagtctcctgttgaccggaactcccatccagaacagcctccaagagctctactccctcctcagttttgtggagcctgatctcttttccaaggaagaggtgggagattttattcaacgctaccaggatattgagaaagaatctgagtcagcaagtgaactgcacaaactcttgcagccatttctgctgaggcgagtgaaagctgaggtagctacagagcttcccaagaagacagaagtagtgatataccatggcatgtcagcattgcagaagaaatactacaaggccattttgatgaaagacctagatgcatttgaaaatgagacggcaaagaaagttaaactacagaacattttgtcccagcttcgaaagtgtgtggatcacccatatttgtttgatggtgtggagccggagccttttgaagttggagaccacctgactgaggctagtgggaagcttcacctgctggataagctactagcattcctgtattctgggggccatcgggttttacttttctcccaaatgacccagatgttggatattctccaagactatatggattacagaggctacagctatgagcgtgtggatggttctgtgagaggagaagagagacacttggccattaagaactttggacagcagcccattttcgtttttctcctgagtactagggcaggtggagttggcatgaacttaacagcagcagatactgtgatttttgttgacagtgactttaatcctcagaatgacttgcaagcagctgccagggctcatcgcattggccaaaacaagtctgttaaagttattcggctgattggtcgagacactgtggaagaaatagtctataggaaagcagcctccaaactgcagctcaccaacatgatcatagaaggaggccattttactctgggagcccagaaacccgctgccgatgctgacctccagttgagtgagatactcaaatttggtttggataaactgctggcctctgaggggagcaccatggatgaaatagacctggagtccatactgggagaaacaaaagatggccagtgggtctctgatgccttgcctgcagcagaaggagggagcagagatcaagaggaaggaaaaaatcatatgtacttatttgaaggtaaagattattctaaagagcccagtaaggaagacagaaaatcatttgaacaactggtaaaccttcagaaaacccttttggagaaagctagtcaagagggccgatcactccgaaataaaggcagtgttctcatcccaggccttgtggagggatctaccaaaaggaagcgggttctgagtccagaagagctggaggacagacagaagaaaagacaagaagcagctgccaagagaaggagactcatagaggagaagaagaggcaaaaggaagaggctgaacataagaaaaagatggcctggtgggaatccaacaattaccagtccttctgcctgccctctgaggagagcgagccagaggaccttgagaatggggaagagagctctgctgagctggattaccaagacccagatgctacttccctcaagtacgttagtggtgatgtcacccaccctcaggctggggccgaggatgctctcattgtgcactgcgtagatgactctggccactggggcagaggtggtttatttacagctctggaaaagcgatccgctgagccaagaaaaatatatgagctggctgggaaaatgaaagacctgagtttgggaggtgtccttttatttcctgttgatgataaagaatcaagaaacaaagggcaagatttgttggccttgattgtggctcagcatcgtgatcgttccaatgtcctgtctggcattaagatggcagccctagaagagggcctgaagaagatatttttagcagcaaaaaagaagaaagcaagtgttcatcttccacgtattggacatgccacgaaaggttttaactggtatggtactgagcgacttattcggaaacatctggctgcaagaggcatcccaacttacatatattattttcctagaagcaagtctgctgtccttcatgcacagtcttcatcttcctcctcaagacagctggtgccttaagaattggcccagcctcagatcctgtctttagcaaccagctaatatttacccagaggtactgcaatagagtatttcaaaatggaatcaggatctggtgggcctcagaaattgtctcttttctgagtttcaatttggttctcctggatgttttgctctgttttggtacctgtaatatagggaaacacaactttttttgggaaagccctttgaccccagcttgctagttgcataataataaattttctgttcctaa

SEQ ID NO: 5871 - DNA, 2396 bp, Homo sapiens
  source 1..2396: mol_type = unassigned DNA
gcgttgggaagttgggagggaggtgcgcgcttggccgcgcggggcggggcctctaccggcccgatggagcgcgcgggcgctactagccgcgggggccaagcgcctggcttcttactgcggcttcatactgagggccgagccgaggcggcgcgggtgcaggagcaggacttacggcagtgggggctgacagcaagtgaactgcacaaactcttgcagccatttctgctgaggcgagtgaaagctgaggtagctacagagcttcccaagaagacagaagtagtgatataccatggcatgtcagcattgcagaagaaatactacaaggccattttgatgaaagacctagatgcatttgaaaatgagacggcaaagaaagttaaactacagaacattttgtcccagcttcgaaagtgtgtggatcacccatatttgtttgatggtgtggagccggagccttttgaagttggagaccacctgactgaggctagtgggaagcttcacctgctggataagctactagcattcctgtattctgggggccatcgggttttacttttctcccaaatgacccagatgttggatattctccaagactatatggattacagaggctacagctatgagcgtgtggatggttctgtgagaggagaagagagacacttggccattaagaactttggacagcagcccattttcgtttttctcctgagtactagggcaggtggagttggcatgaacttaacagcagcagatactgtgatttttgttgacagtgactttaatcctcagaatgacttgcaagcagctgccagggctcatcgcattggccaaaacaagtctgttaaagttattcggctgattggtcgagacactgtggaagaaatagtctataggaaagcagcctccaaactgcagctcaccaacatgatcatagaaggaggccattttactctgggagcccagaaacccgctgccgatgctgacctccagttgagtgagatactcaaatttggtttggataaactgctggcctctgaggggagcaccatggatgaaatagacctggagtccatactgggagaaacaaaagatggccagtgggtctctgatgccttgcctgcagcagaaggagggagcagagatcaagaggaaggaaaaaatcatatgtacttatttgaaggtaaagattattctaaagagcccagtaaggaagacagaaaatcatttgaacaactggtaaaccttcagaaaacccttttggagaaagctagtcaagagggccgatcactccgaaataaaggcagtgttctcatcccaggccttgtggagggatctaccaaaaggaagcgggttctgagtccagaagagctggaggacagacagaagaaaagacaagaagcagctgccaagagaaggagactcatagaggagaagaagaggcaaaaggaagaggctgaacataagaaaaagatggcctggtgggaatccaacaattaccagtccttctgcctgccctctgaggagagcgagccagaggaccttgagaatggggaagagagctctgctgagctggattaccaagacccagatgctacttccctcaagtacgttagtggtgatgtcacccaccctcaggctggggccgaggatgctctcattgtgcactgcgtagatgactctggccactggggcagaggtggtttatttacagctctggaaaagcgatccgctgagccaagaaaaatatatgagctggctgggaaaatgaaagacctgagtttgggaggtgtccttttatttcctgttgatgataaagaatcaagaaacaaagggcaagatttgttggccttgattgtggctcagcatcgtgatcgttccaatgtcctgtctggcattaagatggcagccctagaagagggcctgaagaagatatttttagcagcaaaaaagaagaaagcaagtgttcatcttccacgtattggacatgccacgaaaggttttaactggtatggtactgagcgacttattcggaaacatctggctgcaagaggcatcccaacttacatatattattttcctagaagcaagtctgctgtccttcatgcacagtcttcatcttcctcctcaagacagctggtgccttaagaattggcccagcctcagatcctgtctttagcaaccagctaatatttacccagaggtactgcaatagagtatttcaaaatggaatcaggatctggtgggcctcagaaattgtctcttttctgagtttcaatttggttctcctggatgttttgctctgttttggtacctgtaatatagggaaacacaactttttttgggaaagccctttgaccccagcttgctagttgcataataataaattttctgttcct

SEQ ID NO: 5872 - DNA, 2726 bp, Homo sapiens
  source 1..2726: mol_type = unassigned DNA
gcgttgggaagttgggagggaggtgcgcgcttggccgcgcggggcggggcctctaccggcccgatggagcgcgcgggcgctactagccgcgggggccaagcgcctggcttcttactgcggcttcatactgagggccgagccgaggcggcgcgggtgcaggagcaggacttacggcagtgggggctgacagggattcacctacgctcttaccagctggagggagtaaactggctcgcccagcgcttccattgtcagaatggctgtatcctgggagatgagatgggcctggggaagacctgccagactattgctctcttcatttatttggcaggaagattaaatgatgaagggccatttctgattctttgtcccttgtctgttttgagcaactggaaagaagaaatgcagagatttgctccaggtctttcctgtgtaacatatgcaggcgacaaggaggaaagagcctgccttcagcaagacctgaaacaggagtcacgttttcatgtgctactgactacctatgagatttgcttgaaagatgcatcatttctaaaatcattcccttggagtgttcttgttgtggatgaagctcacaggttgaaaaaccaaagctccctgctgcataagaccttgtcagagttctcagtagtcttcagtctcctgttgaccggaactcccatccagaacagcctccaagagctctactccctcctcagttttgtggagcctgatctcttttccaaggaagaggtgggagattttattcaacgctaccaggatattgagaaagaatctgagtcagcaagtgaactgcacaaactcttgcagccatttctgctgaggcgagtgaaagctgaggtagctacagagcttcccaagaagacagaagtagtgatataccatggcatgtcagcattgcagaagaaatactacaaggccattttgatgaaagacctagatgcatttgaaaatgagacggcaaagaaagttaaactacagaacattttgtcccagcttcgaaagtgtgtggatcacccatatttgtttgatggtggagttggcatgaacttaacagcagcagatactgtgatttttgttgacagtgactttaatcctcagaatgacttgcaagcagctgccagggctcatcgcattggccaaaacaagtctgttaaagttattcggctgattggtcgagacactgtggaagaaatagtctataggaaagcagcctccaaactgcagctcaccaacatgatcatagaaggaggccattttactctgggagcccagaaacccgctgccgatgctgacctccagttgagtgagatactcaaatttggtttggataaactgctggcctctgaggggagcaccatggatgaaatagacctggagtccatactgggagaaacaaaagatggccagtgggtctctgatgccttgcctgcagcagaaggagggagcagagatcaagaggaaggaaaaaatcatatgtacttatttgaaggtaaagattattctaaagagcccagtaaggaagacagaaaatcatttgaacaactggtaaaccttcagaaaacccttttggagaaagctagtcaagagggccgatcactccgaaataaaggcagtgttctcatcccaggccttgtggagggatctaccaaaaggaagcgggttctgagtccagaagagctggaggacagacagaagaaaagacaagaagcagctgccaagagaaggagactcatagaggagaagaagaggcaaaaggaagaggctgaacataagaaaaagatggcctggtgggaatccaacaattaccagtccttctgcctgccctctgaggagagcgagccagaggaccttgagaatggggaagagagctctgctgagctggattaccaagacccagatgctacttccctcaagtacgttagtggtgatgtcacccaccctcaggctggggccgaggatgctctcattgtgcactgcgtagatgactctggccactggggcagaggtggtttatttacagctctggaaaagcgatccgctgagccaagaaaaatatatgagctggctgggaaaatgaaagacctgagtttgggaggtgtccttttatttcctgttgatgataaagaatcaagaaacaaagggcaagatttgttggccttgattgtggctcagcatcgtgatcgttccaatgtcctgtctggcattaagatggcagccctagaagagggcctgaagaagatatttttagcagcaaaaaagaagaaagcaagtgttcatcttccacgtattggacatgccacgaaaggttttaactggtatggtactgagcgacttattcggaaacatctggctgcaagaggcatcccaacttacatatattattttcctagaagcaagtctgctgtccttcatgcacagtcttcatcttcctcctcaagacagctggtgccttaagaattggcccagcctcagatcctgtctttagcaaccagctaatatttacccagaggtactgcaatagagtatttcaaaatggaatcaggatctggtgggcctcagaaattgtctcttttctgagtttcaatttggttctcctggatgttttgctctgttttggtacctgtaatatagggaaacacaactttttttgggaaagccctttgaccccagcttgctagttgcataataataaattttctgttcct

SEQ ID NO: 5873 - DNA, 2837 bp, Homo sapiens
  source 1..2837: mol_type = unassigned DNA
ccgatggagcgcgcgggcgctactagccgcgggggccaagcgcctggcttcttactgcggcttcatactgagggccgagccgaggcggcgcgggtgcaggagcaggacttacggcagtgggggctgacagggattcacctacgctcttaccagctggagggagtaaactggctcgcccagcgcttccattgtcagaatggctgtatcctgggagatgagatgggcctggggaagacctgccagatttgctccaggtctttcctgtgtaacatatgcaggcgacaaggaggaaagagcctgccttcagcaagacctgaaacaggagtcacgttttcatgtgctactgactacctatgagatttgcttgaaagatgcatcatttctaaaatcattcccttggagtgttcttgttgtggatgaagctcacaggttgaaaaaccaaagctccctgctgcataagaccttgtcagagttctcagtagtcttcagtctcctgttgaccggaactcccatccagaacagcctccaagagctctactccctcctcagttttgtggagcctgatctcttttccaaggaagaggtgggagattttattcaacgctaccaggatattgagaaagaatctgagtcagcaagtgaactgcacaaactcttgcagccatttctgctgaggcgagtgaaagctgaggtagctacagagcttcccaagaagacagaagtagtgatataccatggcatgtcagcattgcagaagaaatactacaaggccattttgatgaaagacctagatgcatttgaaaatgagacggcaaagaaagttaaactacagaacattttgtcccagcttcgaaagtgtgtggatcacccatatttgtttgatggtgtggagccggagccttttgaagttggagaccacctgactgaggctagtgggaagcttcacctgctggataagctactagcattcctgtattctgggggccatcgggttttacttttctcccaaatgacccagatgttggatattctccaagactatatggattacagaggctacagctatgagcgtgtggatggttctgtgagaggagaagagagacacttggccattaagaactttggacagcagcccattttcgtttttctcctgagtactagggcaggtggagttggcatgaacttaacagcagcagatactgtgatttttgttgacagtgactttaatcctcagaatgacttgcaagcagctgccagggctcatcgcattggccaaaacaagtctgttaaagttattcggctgattggtcgagacactgtggaagaaatagtctataggaaagcagcctccaaactgcagctcaccaacatgatcatagaaggaggccattttactctgggagcccagaaacccgctgccgatgctgacctccaggtgagatactcaaatttggtttggataaactgctggcctctgaggggagcaccatggatgaaatagacctggagtccatactgggagaaacaaaagatggccagtgggtctctgatgccttgcctgcagcagaaggagggagcagagatcaagaggaaggaaaaaatcatatgtacttatttgaaggtaaagattattctaaagagcccagtaaggaagacagaaaatcatttgaacaactggtaaaccttcagaaaacccttttggagaaagctagtcaagagggccgatcactccgaaataaaggcagtgttctcatcccaggccttgtggagggatctaccaaaaggaagcgggttctgagtccagaagagctggaggacagacagaagaaaagacaagaagcagctgccaagagaaggagactcatagaggagaagaagaggcaaaaggaagaggctgaacataagaaaaagatggcctggtgggaatccaacaattaccagtccttctgcctgccctctgaggagagcgagccagaggaccttgagaatggggaagagagctctgctgagctggattaccaagacccagatgctacttccctcaagtacgttagtggtgatgtcacccaccctcaggctggggccgaggatgctctcattgtgcactgcgtagatgactctggccactggggcagaggtggtttatttacagctctggaaaagcgatccgctgagccaagaaaaatatatgagctggctgggaaaatgaaagacctgagtttgggaggtgtccttttatttcctgttgatgataaagaatcaagaaacaaagggcaagatttgttggccttgattgtggctcagcatcgtgatcgttccaatgtcctgtctggcattaagatggcagccctagaagagggcctgaagaagatatttttagcagcaaaaaagaagaaagcaagtgttcatcttccacgtattggacatgccacgaaaggttttaactggtatggtactgagcgacttattcggaaacatctggctgcaagaggcatcccaacttacatatattattttcctagaagcaagtctgctgtccttcatgcacagtcttcatcttcctcctcaagacagctggtgccttaagaattggcccagcctcagatcctgtctttagcaaccagctaatatttacccagaggtactgcaatagagtatttcaaaatggaatcaggatctggtgggcctcagaaattgtctcttttctgagtttcaatttggttctcctggatgttttgctctgttttggtacctgtaatatagggaaacacaactttttttgggaaagccctttgaccccagcttgctagttgcataataataaattttctgttcct

SEQ ID NO: 5874 - DNA, 9857 bp, Homo sapiens
  source 1..9857: mol_type = unassigned DNA
taaagaaggaaaaacttgaatttatattatgaaattaaggttttacttttatttagcaatcatttcacccattgggggattaatttttaaaaagattagtacttagctgagctttagattctctaagaattatccctttttcaaaatggcttgataaaacaccacttcctgtccagggaggaagttattttagctcaaggactgaaatatttagcagatctttagacaaaaggaacaaattacatttctctctggcttaaaaagggtgcttgagccagagggggttaagaagccctcccccctccccctgttggggtggtctggaggggcagggaggtgtgggggtgggggtccttaggctccctgggatggaggatctgtctctctctctctctctcctttttttttttttggtggagatgaaggggtgggtctatggtacatcacctgagttgtggggtaaatgtagagagtgtcaatcaaaggcagagctctcagagctgggaaggaggctctagatggcggctgtgccttagagagagcgcgctctgctccctgcctttgcctcactttacgcaactttccctaactttcgggcagcctcagggggcccccgtagccccctgcctttcctagggacttactggggtcgattcgaacctttttttgggagaaaagcagcttttaggagctttcttttcgtgccttgttggaaagaagcagccgtactgagagcccaggtcgttgttttttccagcttagaagccatggcgcacctccatttttgtgcgctctcctaatgaggttttttttctttcggacctgttttagtattaattattgctttatttttttgaccagttaacatatttgagggttattttatttatttttcgttttttaacggaggattttgcctttatttttaattatttgggatctgatatttttctactagtagataggactcttggtttggacatactacatggatcagtaaatacctgggcacaggacttcaaagcaaacacagattccccctcccccttaatatttaagaattaaaagatgatgagaaataaggacaaaagccaagaggaggacagttcgctacacagcaatgcatcgagtcactcagcctctgaagaagcttcgggttcagactcaggcagtcagtcggaaagtgagcagggaagtgatccaggaagtggacatggcagcgagtcgaacagcagctctgaatcttctgagagtcagtcggaatctgagagcgaatcagcaggttccaaatcccagccagtcctcccagaagccaaagagaagccagcctctaagaaggaacggatagctgatgtgaagaagatgtgggaagaatatcctgatgtttatggggtcaggcggtcaaaccgaagcagacaagaaccatcgcgatttaatattaaggaagaggcaagtagcgggtctgagagtgggagcccaaaaagaagaggccagaggcagctgaaaaaacaagaaaaatggaaacaggaaccctcagaagatgaacaggaacaaggcaccagtgcagagagtgagccagaacaaaaaaaagtaaaagccagaagacctgtccccagaagaacagtgcccaaacctcgtgttaaaaagcagccgaagactcagcgtggaaagagaaaaaagcaagattcttctgatgaggatgatgatgatgacgaagctcccaaaaggcagactcgtcgaagagcggctaaaaacgttagttacaaagaagatgatgactttgagactgactcagatgatctcattgaaatgactggagaaggagttgatgaacagcaagataatagtgaaactattgaaaaggtcttagattcaagactgggaaagaaaggagccactggagcatctactactgtatatgcgattgaagctaatggcgaccctagtggtgactttgacactgaaaaggatgaaggtgaaatccagtacctcatcaagtggaagggttggtcttacatccacagcacatgggagagtgaagaatccttacagcaacagaaagtgaagggcctaaaaaaactagagaacttcaagaaaaaagaggacgaaatcaaacaatggttagggaaagtttctcctgaagatgtagaatatttcaattgccaacaggagctggcttcagagttgaataaacagtatcagatagtagaaagagtaatagctgtgaagacaagtaaatctacattgggtcaaacagattttccagctcatagtcggaagccggcaccctcaaatgagcccgaatatctatgtaaatggatgggactcccctattcagagtgtagctgggaagatgaagccctcattggaaagaaattccagaattgcattgacagcttccacagtaggaacaactcaaaaaccatcccaacaagagaatgcaaggccctgaagcagagaccacgatttgtagctttaaagaaacaacctgcatatttaggaggggagaatctggaacttcgagattatcagctagaaggtctaaactggctagctcattcctggtgcaaaaataatagtgtaatccttgctgatgaaatgggcctaggaaagaccatccagaccatatcattcctctcctacctgttccaccaacaccagctgtatggcccctttcttatagtcgtccctttatccaccctcacctcatggcagagagagtttgaaatctgggcaccagagattaacgtagtggtttacataggtgacctgatgagcagaaatacgatacgggaatatgaatggattcattcccaaaccaaaagattgaagttcaacgcacttataacaacatatgagatcctcttgaaagataagactgtgctgggcagtattaactgggcctttctgggagtggatgaagcccatcggttgaagaatgatgactctttattgtataaaactctgattgatttcaagtccaaccataggctcctgattacggggacccctcttcagaattccctcaaagagctctggtccttgctgcactttattatgccggagaagtttgaattttgggaagattttgaagaagaccatgggaaggggagagaaaatggctaccagagtcttcataaggtgctagagcctttccttctccggagagtcaaaaaagatgtggagaaatcccttcctgctaaagtggaacagattctcagggtggagatgtcagcccttcagaaacagtattacaagtggattctgaccaggaattacaaggctcttgccaaaggaacaagaggcagcacatctggttttcttaatattgtgatggaactgaaaaaatgttgcaaccactgctatctgattaaaccccctgaagaaaatgaaagggaaaatggacaggagattcttctgtccctcataaggagcagtgggaagttgattttattagacaaactgttgacaagacttcgagaaagggggaatcgagtgcttatcttctctcagatggtgagaatgttggatatcctggctgaatacctaactattaaacactatcctttccagcgtctggatggttccatcaagggagaaatccgaaaacaggcactggaccacttcaatgcagatgggtctgaggacttctgtttcctgctctcgacaagggctggtggcctgggaatcaatttggcttcagcggacacagtcgtcatctttgactctgactggaacccccagaatgacttgcaggcacaagcccgagcgcatagaattggtcaaaagaagcaggtaaatatttaccgcttagttacaaaggggactgtggaggaggagatcatagaacgggccaaaaagaagatggtattagatcatctggtgattcagcgcatggacaccactggccggacgatcctggaaaacaactcaggaaggtccaactcaaatccttttaataaagaagagctgacagctattttgaaatttggagcagaggatctcttcaaagaactggaaggggaggaatcagaacctcaggaaatggatatagatgaaattttgcggttggctgaaacgagagagaatgaagtgtcaacaagtgcaacagatgaacttctatcacagtttaaggttgccaactttgcaacaatggaagatgaagaagagctagaagagcgtcctcacaaggactgggatgagatcattccagaggaacaaaggaaaaaagtagaggaggaagagcggcagaaggagctagaagaaatttatatgctgcctcgaattcggagttccactaaaaaggctcagacaaatgacagtgactctgacactgagtctaagaggcaggcccagagatcctctgcttctgagagtgaaacggaagactctgatgatgacaagaagccaaagcgcagagggcgtccgaggagtgtgcggaaggacctcgtggagggatttactgatgcagagatccgaaggttcatcaaggcttataagaagtttggtctccctcttgaacggctggagtgcatagcacgtgatgctgagctggtagataagtcggtggcagatctgaagcgcctgggtgaactgatccacaacagctgtgtgtcagcaatgcaggaatacgaagagcagctgaaagaaaatgccagcgagggaaaaggaccagggaaaaggagaggtccaacaatcaagatatccggagttcaggttaatgtgaaatccattatccaacatgaagaggagtttgagatgctgcataaatctatccctgtggaccctgaagaaaaaaaaaaatactgcttaacctgtcgtgtcaaagctgcacattttgatgtagagtggggggtggaagatgattctcgcctgttgctggggatttatgaacatggctatggaaactgggagttaattaaaacagacccagagcttaaattaactgacaaaattctgccggtggagacagataaaaagcctcaggggaagcagctacagacccgagcggattacttgttgaagctgctcagaaagggtctggagaagaagggggctgtgacaggtggggaagaggccaaattaaagaagcggaagcctcgggtaaagaaggaaaacaaagtgcccaggctgaaagaggagcatggaattgagctttcatctcctaggcattcagataatccatcagaagagggagaagtgaaagatgatggcttggaaaaaagtccaatgaaaaaaaaacagaagaagaaagagaacaaggagaacaaggagaaacaaatgagttctaggaaagacaaagaaggggacaaggaaagaaagaagtcaaaagataagaaagagaagcctaaaagtggtgatgccaaatcttcgagtaaatcaaagcgatctcagggtcctgtccatattacagcaggaagtgaacctgtccccattggagaggatgaggatgatgatctggaccaggagacattcagcatatgtaaggagaggatgaggcccgtgaaaaaggcactgaaacagctcgacaaacctgacaaggggctcaacgtgcaagaacagctggaacacacccggaactgcctgctgaaaatcggagaccggatagccgagtgccttaaagcctactcagatcaggagcacatcaaactctggaggaggaacctatggatttttgtttccaagtttacagaatttgatgctcgaaaactgcataagttatacaagatggctcataagaaaaggtctcaagaagaagaggagcaaaagaagaaagacgacgtgactgggggtaagaaaccatttcgtccagaggcctcaggctccagccgggactctctgatatctcagtcccatacctcacacaaccttcaccctcagaagcctcatttgcctgcctcccatggcccacagatgcatggacacccaagagataactacaatcaccccaacaagagacacttcagtaatgcagatcgaggagactggcagagggaaagaaagttcaactatggtggtggcaacaacaatccaccatggggaagcgacaggcaccatcagtatgagcagcactggtacaaggaccaccattatggggaccggcgacatatggatgcccaccgttccggaagctatcgacccaacaacatgtccagaaagaggccttatgaccagtacagcagtgaccgagaccaccggggacacagagattattatgacaggcaccatcatgactccaagcggaggagatccgatgaatttaggcctcaaaattaccaccagcaggatttccgacgaatgtctgatcaccgccccgctatgggctaccatggccagggaccctcagaccattaccgctctttccacacagataaactgggggaatataaacagcctctacccccattgcaccctgcagtctcagatcctcgctcacccccttctcagaaatctcctcacgattccaagtcacccctggatcataggtctcctttggagagatcactagaacagaaaaacaacccagattataactggaatgttcggaaaacataaaggacagctcgtaaaggagagagtaagagtcaccaaacacgtggatatttttggtctgatcctacagtagccggttatctagaccagtaagtggagttttggacatgctgctgctgtcaactcactggctgaaggagcacttcaaggaatgggaggcctttcactgggtccagctctgattcgggtcaccactcctgcactttggcaccccatcccattccagcctagttctggcctcccactttgacgggcacttggaggaggagctgactgtgtgtgtaccagcttcactgggatgtgtttccccagtcaaggaacaggggatcttcagagtcatgaatgttttcttgccagggtcagtgttcccaggaccttagtgcatggtcggggcaggaactggtgcatggaggctgctgggacctggtgaacagtgtgtgatttggttgatttggttcactctgacatgatggatgctgctgatggggagtggcgagttggggcaagcgggtggggacaagcataggacttgaaggggagcaggtacacccctcaaatgtgttcttgggagaagtgatacactcggcctcattatgtgaaacctgtgggtggggttggggtggagaagtagagagagggcaacagcttccacaactgcttcatctctgccaacactaatttttcccacactgtctttgtacatttcagagctttggtctcctgagtgggcctccttttcccactgtgccagggaaggtaggtttctctggctgactgagtactgtgagtgaggcaacactgatgccagcatgggtcttacttgactggggagtaggctgagtgaggggtagggtggggtaggtggggagtagtgtggccagggaactggaatccctggtggatttctgattcctgtggtgagaaggaaagctacaggacctggagaaggggatgcagaggcaggcctgctgaccaacttgttgcaatcacaaaggtgggggtcctggtgcaggcagtgaacaggcttctaatgtggggttcagtagtgccagcaagtgggggaaactttcagtattgcgctaggtcaacacttcctgctgcatttccttccctttgcacagcttgaagaaatagagtagacagaatcacacatcatgtggtgggcagatggaaataagtacctgtggtgaacaagtttctactgtagttggagatcattagaattgaattcagtttctcttagaatataatcaggtataaacctaagttaaactttttcccaaacaaggagcatccaaagacacagtgacttgagctatagatagtaaaaatcatacgagagttgaactgagtcaggtttaggaagcaagtttggttgcatcaattaagcaggctcttttcaattgactgatgctggggccttcagttttattctcagtatagattgccagtattgttaagagtatccaaaggcctttctagatggagacagaataactgacttgaacatacagtgtgcctgtaagtgtccaggctcagagctggtgaaaacccttctgttgggcgtgtgcagggttaaactcctgaagtaacttgtgaggacttcagtgcttgctggtgtcctgggcagcaccatgaatgcctttaccaagacatgccaagttggatcccccgaatgaagcagatgtggctgtggtgtgacccttgctccctgctacacagagcatcgcagggctggcctgtgtggtttccagatgagggtctgggtcccggaagcttgtgttgagagctcagtggacccaccccgcttgctgaaccctcacagttcttggggttgtccagcctggacttgtagcacacatgtcctgaagcaaagctccggtgactgcatgagccacctggccacagtcctcccatggagggcctgccgtgacgctcagtggagagggcagggcctgtgtctccacttaggccacacagtgatgaggaaaccacagatggagcttcttgccgataatactgactctagcccatgattgccttgcccaagccaaagaggaaggttaggttggcttgtcgagcccttgagcgttgggagatggggtgggaaggaggtgagcccctgcagagagttgggtagtgtccttcaggaatgaaaggaggggcaaaggagtcaccagaggtcctgcatttccatcagggtttccacagtcatcagggcttctctcttgagttgctgataggagatgtgagttatgcccagagatgtcttatcgtgaggaaaaagaaacttccttttgttcacatttaggactctcagtgccatatgaagtagcaaaaggcagtatcggccagatcagtgttacattgattctaaaattacagtgtccccattagacaactattttaggtgctggagtatgtttgaagagtgtgctgggaaaaaggaagcatttcttcattgatttaaatcagtatgaatattatatgcctaaataaaaaatttgcacaggtaaattctctcacttgtgaatgggagaagctgccccaggaatctgtgaggatggtattccctggagtctggctttgaaagatttcattgttggtagaaataacaggttgagaaagagggagttagcatcacctaaaacctgcacgtgaacaagggttgacatgatacactatggccttagaaaagggccaggtgaaaccccaagctaatcactgcggtctttcagagccggacagacaggtgccagcagagcccggggctcactctcctttcagtcattcctcagcccttcgaagggaagcccaaacactttgcacgctgtgctgcagacattctggcctggtgtgtctgaaagttgcatcagtcctcacggtgcaaacacagttgatttaggaagtcacacaatgacactgaaatcctacagaccaaaatccacttgtcagcaggagcagcagcccaggcccagcaccagcggtcttccggctcctctgagggctgccacgttgggcgaggggagccatgccaagggtccaggctgctttaggccatctgtgccccactcatctggggacagatggtttttctttattgtaaaattgtggacttttaaaacctgttgactaaacagtaattaatttatatttgtgaaaaatgccactgtcctagtgatttctgatgtaaataatgttgtttatatagtatgtattaaattttcctacattgtaaaactgctgtacttttgattcttgtatattaaaaagtgttactgagcatttttagaattgggctaaca

SEQ ID NO: 5875 - DNA, 2221 bp, Homo sapiens
  source 1..2221: mol_type = unassigned DNA
ggaggctctagatggcggctgtgccttagagagagcgcgctctgctccctgcctttgcctcactttacgcaactttccctaactttcgggcagcctcagggggcccccgtagccccctgcctttcctagggacttactggggtcgattcgaacctttttttgggagaaaagcagcttttaggagctttcttttcgtgccttgttggaaagaagcagccgtactgagagcccaggtcgttgttttttccagcttagaagccatggcgcacctccatttttgtgcgctctcctaatgaggttttttttctttcggacctgttttagtattaattattgctttatttttttgaccagttaacatatttgagggttattttatttatttttcgttttttaacggaggattttgcctttatttttaattatttgggatctgatatttttctactagtagataggactcttggtttggacatactacatggatcagtaaatacctgggcacaggacttcaaagcaaacacagattccccctcccccttaatatttaagaattaaaagatgatgagaaataaggacaaaagccaagaggaggacagttcgctacacagcaatgcatcgagtcactcagcctctgaagaagcttcgggttcagactcaggcagtcagtcggaaagtgagcagggaagtgatccaggaagtggacatggcagcgagtcgaacagcagctctgaatcttctgagagtcagtcggaatctgagagcgaatcagcaggttccaaatcccagccagtcctcccagaagccaaagagaagccagcctctaagaaggaacggatagctgatgtgaagaagatgtgggaagaatatcctgatgtttatggggtcaggcggtcaaaccgaagcagacaagaaccatcgcgatttaatattaaggaagaggcaagtagcgggtctgagagtgggagcccaaaaagaagaggccagaggcagctgaaaaaacaagaaaaatggaaacaggaaccctcagaagatgaacaggaacaaggcaccagtgcagagagtgagccagaacaaaaaaaagtaaaagccagaagacctgtccccagaagaacagtgcccaaacctcgtgttaaaaagcagccgaagactcagcgtggaaagagaaaaaagcaagattcttctgatgaggatgatgatgatgacgaagctcccaaaaggcagactcgtcgaagagcggctaaaaacgttagttacaaagaagatgatgactttgagactgactcagatgatctcattgaaatgactggagaaggagttgatgaacagcaagataatagtgaaactattgaaaaggtcttagattcaagactgggaaagaaaggagccactggagcatctactactgtatatgcgattgaagctaatggcgaccctagtggtgactttgacactgaaaaggatgaaggtgaaatccagtacctcatcaagtggaagggttggtcttacatccacagcacatgggagagtgaagaatccttacagcaacagaaagtgaagggcctaaaaaaactagagaacttcaagaaaaaagaggacgaaatcaaacaatggttagggaaagtttctcctgaagatgtagaatatttcaattgccaacaggagctggcttcagagttgaataaacagtatcagatagtagaaagagtaatagctgtgaagacaagtaaatctacattgggtcaaacagattttccagctcatagtcggaagccggcaccctcaaatgagcccgaatatctatgtaaatggatgggactcccctattcagagtgtagctgggaagatgaagccctcattggaaagaaattccagaattgcattgacagcttccacagtaggaacaactcaaaaaccatcccaacaagagaatgcaaggccctgaagcagagaccacgatttgtagctttaaagaaacaacctgcatatttaggaggggagaatctggaacttcgagattatcagctagaaggtctaaactggctagctcattcctggtgcaagtaggtagaaaaatatgagtgcaattttccttactgtttctggcttctttattgttagatgtcaagaattttttttttcttttttcacacccttattgtatctcaaccaagaaatctttatgctgcatattacagaaataaaagatgattgagagaaa

SEQ ID NO: 5876 - DNA, 2131 bp, Homo sapiens
  source 1..2131: mol_type = unassigned DNA
agggagccgcacgccgaggggaaaaggaagggaactctagttgggactttccggtgggcggcttctttcctggacgcgtttgctcctggcagtcttgtccgcccttgcctgtagcggtccgcaccctgtagtgtgttcttttgcccatttccgggaatggtttatcctctttgagaagcggctgcttttggagaaaaagtgcaggcactatttataaattttaaaggcactatttggaaatcttaaaatagaaaatttgcccagttttacattttcccttttcataccttagcgtcccttctccccgcccccgttcagtgtgaagagatgagtgggtttaattttgttacaattgaccaaaacgtttgagtgtcagaggcggatacttttattttagtgaaaacctcttgacgggtgttaacagctgtttaatacatggctcataaacaaagggaagattatttgaacttgtccccatgcgtttttacttggtaccgtacattttctcagttggcatttgatggagaaaaactcagtcactcagcctctgaagaagcttcgggttcagactcaggcagtcagtcggaaagtgagcagggaagtgatccaggaagtggacatggcagcgagtcgaacagcagctctgaatcttctgagagtcagtcggaatctgagagcgaatcagcaggttccaaatcccagccagtcctcccagaagccaaagagaagccagcctctaagaaggaacggatagctgatgtgaagaagatgtgggaagaatatcctgatgtttatggggtcaggcggtcaaaccgaagcagacaagaaccatcgcgatttaatattaaggaagaggcaagtagcgggtctgagagtgggagcccaaaaagaagaggccagaggcagctgaaaaaacaagaaaaatggaaacaggaaccctcagaagatgaacaggaacaaggcaccagtgcagagagtgagccagaacaaaaaaaagtaaaagccagaagacctgtccccagaagaacagtgcccaaacctcgtgttaaaaagcagccgaagactcagcgtggaaagagaaaaaagcaagattcttctgatgaggatgatgatgatgacgaagctcccaaaaggcagactcgtcgaagagcggctaaaaacgttagttacaaagaagatgatgactttgagactgactcagatgatctcattgaaatgactggagaaggagttgatgaacagcaagataatagtgaaactattgaaaaggtcttagattcaagactgggaaagaaaggagccactggagcatctactactgtatatgcgattgaagctaatggcgaccctagtggtgactttgacactgaaaaggatgaaggtgaaatccagtacctcatcaagtggaagggttggtcttacatccacagcacatgggagagtgaagaatccttacagcaacagaaagtgaagggcctaaaaaaactagagaacttcaagaaaaaagaggacgaaatcaaacaatggttagggaaagtttctcctgaagatgtagaatatttcaattgccaacaggagctggcttcagagttgaataaacagtatcagatagtagaaagagtaatagctgtgaagacaagtaaatctacattgggtcaaacagattttccagctcatagtcggaagccggcaccctcaaatgagcccgaatatctatgtaaatggatgggactcccctattcagagtgtagctgggaagatgaagccctcattggaaagaaattccagaattgcattgacagcttccacagtaggaacaactcaaaaaccatcccaacaagagaatgcaaggccctgaagcagagaccacgatttgtagctttaaagaaacaacctgcatatttaggaggggagaatctggaacttcgagattatcagctagaaggtctaaactggctagctcattcctggtgcaagtaggtagaaaaatatgagtgcaattttccttactgtttctggcttctttattgttagatgtcaagaattttttttttcttttttcacacccttattgtatctcaaccaagaaatctttatgctgcatattacagaaataaaagatgattgagag

SEQ ID NO: 5877 - DNA, 1095 bp, Homo sapiens
  source 1..1095: mol_type = unassigned DNA
ctcttctcgcactgcccctccgtggtcgggggccggctctcgccggcgggatgcgcctcggtgccctgggcccgagtcgtagggtcctggggtagggggcacgcggggccccgctgcagagcccgcgggcggcaggtgggcggggggcagcctcgtcgccgggactggatccgccgggaaaggggcggcgggtgaatgccggcgagagcccgaaggggatcgggcgtggagagcccctttctgtcctggtgacttaagagattaaaattaatttggttgctgttggttctgaacaaataatgagttcttttatttgaggtatgccattttgaagactgagacgttggagttttatcctagaggataaaggaaatctttgggaaagtcagtattttatatagcaaaaatatgaacctcaaactgaatcctctaaaggccccatacaatgaagtagacattggtggaaacatttataaatacctgggcacaggacttcaaagcaaacacagattccccctcccccttaatatttaagaattaaaagatgatgagaaataaggacaaaagccaagaggaggacagttcgctacacagcaatgcatcgagtcactcagcctctgaagaagcttcgggttcagactcaggcagtcagtcggaaagtgagcagggaagtgatccaggaagtggacatggcagcgagtcgaacagcagctctgaatcttctgagagtcagtcggaatctgagagcgaatcagcaggttccaaatcccagccagtcctcccagaagccaaagagaagccagcctctaagaaggaacggatagctgatgtgaagaagatgtgggaagaatatcctgatgtttatggggtcaggcggtcaaaccgaagcagacaagaaccatcgcgatttaatattaaggaagaggcaagtagcgggtctgagagtgggagcccaaaaagaagaggccagaggcagctgaaaaaacaagaaaaatggaaacaggaaccctcagaagatgaacaggaacaaggcaccagtgcagagagtgagccagaacaaaaaaaagtaaaagccagaagacctgtccccagaag

SEQ ID NO: 5878 - DNA, 7764 bp, Homo sapiens
  source 1..7764: mol_type = unassigned DNA
ccctgggatggaggatctgtctctctctctctctctcctttttttttttttggtggagatgaaggggtgggtctatggtacatcacctgagttgtggggtaaatgtagagagtgtcaatcaaaggcagagctctcagagctgggaaggaggctctagatggcggctgtgccttagagagagcgcgctctgctccctgcctttgcctcactttacgcaactttccctaactttcgggcagcctcagggggcccccgtagccccctgcctttcctagggacttactggggtcgattcgaacctttttttgggagaaaagcagcttttaggagctttcttttcgtgccttgttggaaagaagcagccgtactgagagcccaggtcgttgttttttccagcttagaagccatggcgcacctccatttttgtgcgctctcctaatgaggttttttttctttcggacctgttttagtattaattattgctttatttttttgaccagttaacatatttgagggttattttatttatttttcgttttttaacggaggattttgcctttatttttaattatttgggatctgatatttttctactagtagataggactcttggtttggacatactacatggatcagtaaatacctgggcacaggacttcaaagcaaacacagattccccctcccccttaatatttaagaattaaaagatgatgagaaataaggacaaaagccaagaggaggacagttcgctacacagcaatgcatcgagtcactcagcctctgaagaagcttcgggttcagactcaggcagtcagtcggaaagtgagcagggaagtgatccaggaagtggacatggcagcgagtcgaacagcagctctgaatcttctgagagtcagtcggaatctgagagcgaatcagcaggttccaaatcccagccagtcctcccagaagccaaagagaagccagcctctaagaaggaacggatagctgatgtgaagaagatgtgggaagaatatcctgatgtttatggggtcaggcggtcaaaccgaagcagacaagaaccatcgcgatttaatattaaggaagaggcaagtagcgggtctgagagtgggagcccaaaaagaagaggccagaggcagctgaaaaaacaagaaaaatggaaacaggaaccctcagaagatgaacaggaacaaggcaccagtgcagagagtgagccagaacaaaaaaaagtaaaagccagaagacctgtccccagaagaacagtgcccaaacctcgtgttaaaaagcagccgaagactcagcgtggaaagagaaaaaagcaagattcttctgatgaggatgatgatgatgacgaagctcccaaaaggcagactcgtcgaagagcggctaaaaacgttagttacaaagaagatgatgactttgagactgactcagatgatctcattgaaatgactggagaaggagttgatgaacagcaagataatagtgaaactattgaaaaggtcttagattcaagactgggaaagaaaggagccactggagcatctactactgtatatgcgattgaagctaatggcgaccctagtggtgactttgacactgaaaaggatgaaggtgaaatccagtacctcatcaagtggaagggttggtcttacatccacagcacatgggagagtgaagaatccttacagcaacagaaagtgaagggcctaaaaaaactagagaacttcaagaaaaaagaggacgaaatcaaacaatggttagggaaagtttctcctgaagatgtagaatatttcaattgccaacaggagctggcttcagagttgaataaacagtatcagatagtagaaagagtaatagctgtgaagacaagtaaatctacattgggtcaaacagattttccagctcatagtcggaagccggcaccctcaaatgagcccgaatatctatgtaaatggatgggactcccctattcagagtgtagctgggaagatgaagccctcattggaaagaaattccagaattgcattgacagcttccacagtaggaacaactcaaaaaccatcccaacaagagaatgcaaggccctgaagcagagaccacgatttgtagctttaaagaaacaacctgcatatttaggaggggagaatctggaacttcgagattatcagctagaaggtctaaactggctagctcattcctggtgcaaaaataatagtgtaatccttgctgatgaaatgggcctaggaaagaccatccagaccatatcattcctctcctacctgttccaccaacaccagctgtatggcccctttcttatagtcgtccctttatccaccctcacctcatggcagagagagtttgaaatctgggcaccagagattaacgtagtggtttacataggtgacctgatgagcagaaatacgatacgggaatatgaatggattcattcccaaaccaaaagattgaagttcaacgcacttataacaacatatgagatcctcttgaaagataagactgtgctgggcagtattaactgggcctttctgggagtggatgaagcccatcggttgaagaatgatgactctttattgtataaaactctgattgatttcaagtccaaccataggctcctgattacggggacccctcttcagaattccctcaaagagctctggtccttgctgcactttattatgccggagaagtttgaattttgggaagattttgaagaagaccatgggaaggggagagaaaatggctaccagagtcttcataaggtgctagagcctttccttctccggagagtcaaaaaagatgtggagaaatcccttcctgctaaagtggaacagattctcagggtggagatgtcagcccttcagaaacagtattacaagtggattctgaccaggaattacaaggctcttgccaaaggaacaagaggcagcacatctggttttcttaatattgtgatggaactgaaaaaatgttgcaaccactgctatctgattaaaccccctgaagaaaatgaaagggaaaatggacaggagattcttctgtccctcataaggagcagtgggaagttgattttattagacaaactgttgacaagacttcgagaaagggggaatcgagtgcttatcttctctcagatggtgagaatgttggatatcctggctgaatacctaactattaaacactatcctttccagcgtctggatggttccatcaagggagaaatccgaaaacaggcactggaccacttcaatgcagatgggtctgaggacttctgtttcctgctctcgacaagggctggtggcctgggaatcaatttggcttcagcggacacagtcgtcatctttgactctgactggaacccccagaatgacttgcaggcacaagcccgagcgcatagaattggtcaaaagaagcaggtaaatatttaccgcttagttacaaaggggactgtggaggaggagatcatagaacgggccaaaaagaagatggtattagatcatctggtgattcagcgcatggacaccactggccggacgatcctggaaaacaactcaggaaggtccaactcaaatccttttaataaagaagagctgacagctattttgaaatttggagcagaggatctcttcaaagaactggaaggggaggaatcagaacctcaggaaatggatatagatgaaattttgcggttggctgaaacgagagagaatgaagtgtcaacaagtgcaacagatgaacttctatcacagtttaaggttgccaactttgcaacaatggaagatgaagaagagctagaagagcgtcctcacaaggactgggatgagatcattccagaggaacaaaggaaaaaagtagaggaggaagagcggcagaaggagctagaagaaatttatatgctgcctcgaattcggagttccactaaaaaggctcagacaaatgacagtgactctgacactgagtctaagaggcaggcccagagatcctctgcttctgagagtgaaacggaagactctgatgatgacaagaagccaaagcgcagagggcgtccgaggagtgtgcggaaggacctcgtggagggatttactgatgcagagatccgaaggttcatcaaggcttataagaagtttggtctccctcttgaacggctggagtgcatagcacgtgatgctgagctggtagataagtcggtggcagatctgaagcgcctgggtgaactgatccacaacagctgtgtgtcagcaatgcaggaatacgaagagcagctgaaagaaaatgccagcgagggaaaaggaccagggaaaaggagaggtccaacaatcaagatatccggagttcaggttaatgtgaaatccattatccaacatgaagaggagtttgagatgctgcataaatctatccctgtggaccctgaagaaaaaaaaaaatactgcttaacctgtcgtgtcaaagctgcacattttgatgtagagtggggggtggaagatgattctcgcctgttgctggggatttatgaacatggctatggaaactgggagttaattaaaacagacccagagcttaaattaactgacaaaattctgccggtggagacagataaaaagcctcaggggaagcagctacagacccgagcggattacttgttgaagctgctcagaaagggtctggagaagaagggggctgtgacaggtggggaagaggccaaattaaagaagcggaagcctcgggtaaagaaggaaaacaaagtgcccaggctgaaagaggagcatggaattgagctttcatctcctaggcattcagataatccatcagaagagggagaagtgaaagatgatggcttggaaaaaagtccaatgaaaaaaaaacagaagaagaaagagaacaaggagaacaaggagaaacaaatgagttctaggaaagacaaagaaggggacaaggaaagaaagaagtcaaaagataagaaagagaagcctaaaagtggtgatgccaaatcttcgagtaaatcaaagcgatctcagggtcctgtccatattacagcaggaagtgaacctgtccccattggagaggatgaggatgatgatctggaccaggagacattcagcatatgtaaggagaggatgaggcccgtgaaaaaggcactgaaacagctcgacaaacctgacaaggggctcaacgtgcaagaacagctggaacacacccggaactgcctgctgaaaatcggagaccggatagccgagtgccttaaagcctactcagatcaggagcacatcaaactctggaggaggaacctatggatttttgtttccaagtttacagaatttgatgctcgaaaactgcataagttatacaagatggctcataagaaaaggtctcaagaagaagaggagcaaaagaagaaagacgacgtgactgggggtaagaaaccatttcgtccagaggcctcaggctccagccgggactctctgatatctcagtcccatacctcacacaaccttcaccctcagaagcctcatttgcctgcctcccatggcccacagatgcatggacacccaagagataactacaatcaccccaacaagagacacttcagtaatgcagatcgaggagactggcagagggaaagaaagttcaactatggtggtggcaacaacaatccaccatggggaagcgacaggcaccatcagtatgagcagcactggtacaaggaccaccattatggggaccggcgacatatggatgcccaccgttccggaagctatcgacccaacaacatgtccagaaagaggccttatgaccagtacagcagtgaccgagaccaccggggacacagagattattatgacaggtatgcaaaaggctgtgagacaccaggtgccaacctttgccaggagctgtttctagggagaaagtgacgtatacatgaatgtatttatctatcaaattactgaagatctcatcatgcatgtgtcagccacagcgaatcccatgtcttggttataggttttatgttttgttttgtgggtcatagggagcacatttcacctgtgcaggaaaagagttttctgccgtcttttgaggaaatctagtgaagaggtcgccataaaatattagagtcaacaaccaaaattattaagctctgtgcgaggctgtcagccacactaggtatcagggatcccgagatgggtaccagcccacagtccttacctgccacgagcccataattgaagagtcaaagtcttctgaagctgcaccctctttacttcagtacaatgccaccagtagtacgatgagccgaagctttacattgtgagagtagcaagtccagggagagctaaagaggttttatctgtatttcctaatttcaaatcttggataatttaacctcatagcagctttggttttccctgggctgatgatgtgcgtcatttgcactgtaccttgaatttacagtgggaaaatttcatataaacgtgtcaaagtcgtgctttgtttttggaagatctggtaacagcagcccgcattagcagagagctgtagctgagtagctgccacctcgttgggagactgcccctcgctcccacccttctctattgtctggacccagtgggcatcttgccctgcgttcttctagtaggtctgtatttctatttgatgtcactttccttttgcctgaaggactttttctgctggtgataaactctttcagtgtttgtatatatgcctgaaaaagtattttgccttcatttttgaaagtagtttttgctgagtgtatacatttttggctttacagtttctttcagtgctttaaagatgtacctctgctatttacttgcattgttttgtgatgaaaaatctgtcatccttatctttgttcctctttacataatgttccttttaaaaaaaatcactgattatgatgtgccttggtgtatttttccttggtttcttgtgcttggaaatttttgaacttcttggatctgtgggtttattgtttccataaaatttggaaatttttacaatcttcttcaaatattttttctgatcccccactctctcttcttctttggagattctcattacacctatattagcttgcttgaagttgtctcacagctcacttgtattctgttgacttttaaaaaattatgctttctgtttcactgtggatagtttctattgctacctcttcaagttcactaatactttccttttcaatgtcaagactgctgtgaggcccatccagtgtactttgcattttatacattgtagttctaaaagttcggaaagttgtttttgggtctttttatatatgttctgtgtctaaccttttaaaacctggaacacagatataacaatggttttgatgtccttgtctgcgaatcttatcacttgggtcagtttcagttgatacctcctcactgtgggtcttgctcccctggtgctttctgtgcctagtaatttttgtcagatgccagatgtaacatttaccttgttgggtgctggatatttctgtattcctgtaagtattctggagctttgttatgagttgcaggttatttggaagcagtttcctttttcaggtcttgctgttaagattcgttaggtagaaccagagcagtgctcagtcaagggctaatgattgcccacccccaaggtaaagagcctcattgcactctacccaattgcgttagtctgttttgcaggaatacctgaggctgggtaatttatagagaaaagagttttatttgg

SEQ ID NO: 5879 - DNA, 7328 bp, Homo sapiens
  source 1..7328: mol_type = unassigned DNA
atatggaggtgaagggtgagatcgggaaacaaagggtatggccccctagttcccaaagggagcagggagatgggaatagaattgaaggtaggttttaggctacttgggaggaggaatatttaggtaattgtggagactttctcctgtgtgatgaaggcggcagacactgtgatcctgtgggcaagaagtaaaaatgaccagctgaggatttcttttcctccaggactgtgttggggtgacaggatgcctgataaggatgacattcggctgctgccgtcagcattgggtgtgaagaagagaaaacgaggacccaagaagcagaaggagaacaagccaggaaaaccccgaaaacgcaagaagcgtgacagtgaggaggaatttggttctgagcgagatgagtaccgggagaagtcagagagtgggggcagtgaatatggaaccggaccgggtcggaaacgaagaaggaagcaccgagaaaaaaaggagaagaagacaaagcggcggaaaaagggggagggagatggggggcaaaagcaagtggaacagaagtcatcagcaactctgcttctgacctggggcctggaggatgtggagcatgtgttctctgaggaggattaccacacgctcaccaactacaaagccttcagccagttcatgaggcccctaattgctaagaagaatcctaagatcccaatgtctaagatgatgaccatccttggggccaaatggagagagttcagtgccaacaaccccttcaaggggtcagcagctgctgtggcggcggcagcggcagcagcagcagcagctgtagctgagcaggtgtcagctgctgtctcgtcggccacccccatagcaccctccggaccccccgcccttccaccaccccctgctgctgatatccagcccccacccatccgaagagccaaaaccaaagagggcaaaggtccaggccataagaggcggagtaagagcccccgagtgcctgatggacgcaagaagcttcggggaaagaaaatggcaccactcaaaataaaactagggcttctgggtggcaagaggaagaaaggaggctcgtatgtttttcagagcgacgaaggtcctgaaccagaggctgaggaatcagacctggacagtggcagtgtccacagtgcctcaggccggcctgatggccctgtccgcaccaagaaactaaagagaggccggccaggaaggaagaagaagaaggtcctgggctgtcctgcagtggccggggaggaggaggttgatggctacgagacggatcaccaggattactgtgaggtgtgccagcagggtggggaaattattctgtgtgacacctgccctcgtgcctaccacctcgtctgccttgatcctgagcttgaccgggctccagagggcaaatggagctgccctcactgtgagaaggagggggtccagtgggaggccaaggaggaagaagaagaatacgaagaggagggagaggaagaaggggagaaggaggaggaggatgatcacatggagtactgccgcgtatgcaaggacggcggggagctcctgtgctgtgacgcgtgcatctcctcctaccacattcattgtctaaaccctcccctgcctgacattcccaatggtgaatggctgtgtccccgatgcacatgccccgtgctgaagggtcgagtgcagaagatcctacattggcggtggggggagccacctgtagcagtgccagcccctcaacaggcagatggaaatccagatgtcccacccccccgtcctcttcaaggcagatcagagcgagagttctttgtcaagtgggtaggactatcctactggcactgctcctgggccaaggagcttcagctggaaatcttccatttggttatgtatcgaaactaccagcggaagaatgacatggatgagcccccacccctggactatggctccggcgaggatgatgggaagagcgacaagcgtaaagtgaaagacccgcactatgctgagatggaggagaagtactatcgttttggcatcaagccagagtggatgaccgtccaccgcatcatcaaccacagtgtggataaaaaggggaattaccactatctagtaaaatggagggacttaccatatgaccagtccacgtgggaggaagatgaaatgaatatccctgaatacgaagaacataagcaaagctactggagacaccgagaactaattatgggggaagaccctgcccagccccgcaagtataagaagaagaagaaggagctacagggtgatgggcctcccagttctcccactaatgatcctaccgtgaaatatgagactcagccacggtttatcacagccactggaggcaccctgcacatgtatcagttggaagggctgaactggctacgcttctcctgggcccagggcactgacaccattctagctgatgagatggggctaggcaagaccatacaaaccatcgtcttcctctactcactctacaaggagggccacacaaaaggtcccttcctggtgagtgccccactctctaccatcattaactgggagcgggagttccagatgtgggcacccaaattctatgtggtgacatacacgggtgacaaggacagccgggccatcattcgtgagaatgaattctcctttgaggacaatgccatcaaagggggcaagaaagcttttaagatgaagagggaggcacaggtgaagttccatgttctcctgacatcgtatgagctgatcaccattgatcaggcagcacttggttccatccgctgggcctgtcttgtggtagatgaggcccatcgactcaagaacaaccagtccaagtttttcagggttctcaatggttacaagatagatcataagttgctgctgacaggaaccccattgcagaataatctggaggagctcttccatctcctgaacttcctcaccccagagagatttaacaacttggagggcttcctggaggagtttgctgacatatccaaagaggaccagatcaagaaactgcatgatttgctggggccacacatgctgcggagactcaaggcagatgtctttaagaacatgccagccaagacagagctcatcgttcgggtggagctaagccccatgcagaagaaatactacaaatacatcctgactcgaaattttgaggccttgaattcacgaggtggtgggaaccaggtgtcgctgcttaatatcatgatggatcttaagaagtgctgcaaccatccatacctttttcccgtggctgctatggagtcccccaaactccccagtggggcttatgagggtggggcacttattaagtcgtctgggaagctcatgctgctccagaagatgctgcgaaagctgaaggagcaaggacaccgagtgctcatcttctcgcagatgaccaaaatgttagacttgcttgaggacttcttagactatgaaggctacaagtatgagcgcatcgatggtggtatcacgggtgccctgaggcaggaggccatcgatcggtttaatgctcctggggcccaacaattctgcttcctcctgtccacccgagctgggggcctgggcatcaatctggccactgctgacactgtcatcatctttgattctgactggaacccccataatgacatccaggcctttagccgggctcatcggattggccaggccaacaaagtgatgatttaccggtttgtgactcgcgcgtcagtggaagagcgaatcacacaagtggccaagagaaagatgatgctgacacacctggttgtgcggcctgggctgggctccaaggcaggctccatgtccaagcaggagcttgacgacattctcaaatttggcactgaagagctattcaaggatgaaaacgagggggagaacaaggaggaggacagcagtgtgattcattatgacaatgaggccatcgctcggctgttggaccggaaccaggatgcaactgaggacactgacgtgcagaacatgaatgagtatctcagctccttcaaggtggcacagtacgtcgtgcgggaagaagacaagattgaggaaattgagcgagagatcatcaagcaggaggagaatgtggaccctgactactgggagaagctgctgaggcatcactatgagcaacagcaggaagacctagcccggaatctaggcaagggcaagcgggttcgcaagcaagttaactacaatgatgctgctcaggaagaccaagacaaccagtcagagtactcggtgggttcagaggaggaggatgaagacttcgatgaacgtcctgaagggcgtagacagtcaaagaggcagctccggaatgagaaagataagccactgcctccactgctggcccgagtcgggggcaacattgaggtgctgggcttcaacacccgtcagcggaaggctttcctcaatgctgtgatgcgctgggggatgccaccacaggatgccttcaccacacagtggctggtgcgggacctgaggggcaagactgagaaggagtttaaggcctatgtgtctttgttcatgcgccatctgtgtgagcctggggcagacggctctgaaacctttgccgatggggtccctcgggagggactgagtcgccagcaggtgttgacccgcattggagtcatgtctctcgtcaaaaagaaggtgcaggagtttgagcacatcaatgggcgttggtcaatgccggaactgatgcctgaccccagcgccgattctaagcgctcctccagagcctcctctcctaccaaaacgtctcccaccactcctgaggcttctgctaccaacagtccctgcacctctaaacctgctactccagctccaagtgagaaaggagaaggcataaggacacctcttgagaaggaggaagctgaaaaccaggaggaaaagccagagaagaacagcagaattggggagaagatggagacagaggctgatgcccccagcccagccccatcacttggggagcggctggagccaaggaagattcctctagaggatgaggtgccaggggtgcctggagagatggagcctgaacctgggtaccgtggggacagagagaagtcagccacagagtcgacgccaggagaaaggggggaggagaagccgttggatggacaggaacacagggagaggccggagggggaaacaggggatttgggcaagagagaagatgtaaaaggtgaccgggagcttcgaccagggcctcgagatgagccacggtccaatgggcgacgagaggaaaagacagagaagccccggttcatgttcaatatcgccgatggtggcttcacagagcttcacacactgtggcagaatgaggaacgggcagctatttcctcggggaaactcaatgagatctggcacagaagacatgactattggcttctggctgggattgtcctccatggctatgcacggtggcaggacatccagaatgatgctcaatttgccattatcaacgagccatttaaaactgaagccaataaggggaactttctggagatgaaaaataagttcctggcccggaggttcaagctcctggagcaggcgctggtgattgaggagcagctgcggcgggcggcctacctgaacctgtcgcaggagccggcgcaccccgccatggccctccacgcccgcttcgccgaggccgagtgcctggccgagagccaccagcacctctccaaggagtcgctggcggggaacaagccggccaacgccgtcctgcacaaggttctgaaccagctggaggagttgctgagcgacatgaaggcggacgtgacccgcctgccagccacgctgtcccgaataccccccatcgcagcccgccttcagatgtccgagcgcagcatcctcagccggctggccagcaagggcacggagcctcaccccacaccggcctacccgccgggtccctacgctacacctccggggtacggggcggccttcagcgccgcacccgtaggggccctggccgccgcaggcgccaattacagccagatgcctgcagggtccttcatcacagccgccaccaacggccctccagtgcttgtgaagaaggagaaggaaatggtgggggcattggtgtcagacgggctggatcggaaggagccccgagccggggaggtgatctgtatagacgactgactggatcccaggcctgcccttcacccaggccccgtccccgaggccgacccccagctcaagcgctggggcctgctgccagccctccaccttccccaccccttgggccatcactgggctaggaacccctttgcccctctctgcagctcctctcttcaagaagggccctttgtctttctccactcccacacacctttcccaccaagccttgaagactgtgctggtgagaagaagtctgggtgggagatggctggcagggtcttccaagtaccttcctcccacactgccaagtatacacaacttcccagtaaatggttgtggggaggaaagaggtggagcctccccagccgtttccctgcagaatcagctctgtctcatgtggaagtggagaatcagccttgcctggcctttaggaacttttgtggggaagagagctttgaagagaggagggggactttagagagggatgaaaatgagccctgggagggaggaagggacgaggaggggtggctgcatgttaccgtcccctacctctccccacgtggagggtggagcagttatgagggaggaagtcaactgctgttcagcctcagaataaaggtgccgttcactggctcagttacctcctgtgtaccggcatcttgtgttgggaatgttcccccctccctagggaccaaggaccacccctacaaaaagagtaatggttgggtgatactccctcaagccaaagaggagctccccaacctgttctagggacccaggtaacctagaagggtgggagagaatacaatgggccagatgtggtggaagcccagctctggggctcaggttcctggaagacttctactaccctccctcctcaaggcctggatacagactaaatttgtataagtcaggcaggggacctagtcagggtcttgggagctaccttgtcgttgggaccagagcaaaatagtggagggcaggctagggaaatgtgggcacatcccccctcccaggaggggccggggagagtggcagtttgcatggcgaaccccccacttcctctttgctgccccttcactttcttgctgcccctttcccagtctctcttcacacccactcctggtctgtcctgatcccctcttctgtatcaggtttattggttgtacatataaattatactttcctttctgtgt

SEQ ID NO: 5880 - DNA, 7286 bp, Homo sapiens
  source 1..7286: mol_type = unassigned DNA
atctttgtttgggtctcccatactgcgtatagatgaatgggtcaggatatctggaacaaaatatggaggtgaagggtgagatcgggaaacaaagggtatggccccctagttcccaaagggagcagggagatgggaatagaattgaaggtaggttttaggctacttgggaggaggaatatttaggtaattgtggagactttctcctgtgtgatgaaggcggcagacactgtgatcctgtgggcaagaagtaaaaatgaccagctgaggatttcttttcctccaggactgtgttggggtgacaggatgcctgataaggatgacattcggctgctgccgtcagcattgggtgtgaagaagagaaaacgaggacccaagaagcagaaggagaacaagccaggaaaaccccgaaaacgcaagaagcgtgacagtgaggaggaatttggttctgagcgagatgagtaccgggagaagtcagagagtgggggcagtgaatatggaaccggaccgggtcggaaacgaagaaggaagcaccgagaaaaaaaggagaagaagacaaagcggcggaaaaagggggagggagatggggggcaaaagcaagtggaacagaagtcatcagcaactctgcttctgacctggggcctggaggatgtggagcatgtgttctctgaggaggattaccacacgctcaccaactacaaagccttcagccagttcatgaggcccctaattgctaagaagaatcctaagatcccaatgtctaagatgatgaccatccttggggccaaatggagagagttcagtgccaacaaccccttcaaggggtcagcagctgctgtggcggcggcagcggcagcagcagcagcagctgtagctgagcaggtgtcagctgctgtctcgtcggccacccccatagcaccctccggaccccccgcccttccaccaccccctgctgctgatatccagcccccacccatccgaagagccaaaaccaaagagggcaaaggtccaggccataagaggcggagtaagagcccccgagtgcctgatggacgcaagaagcttcggggaaagaaaatggcaccactcaaaataaaactagggcttctgggtggcaagaggaagaaaggaggctcgtatgtttttcagagcgacgaaggtcctgaaccagaggctgaggaatcagacctggacagtggcagtgtccacagtgcctcaggccggcctgatggccctgtccgcaccaagaaactaaagagaggccggccaggaaggaagaagaagaaggtcctgggctgtcctgcagtggccggggaggaggaggttgatggctacgagacggatcaccaggattactgtgaggtgtgccagcagggtggggaaattattctgtgtgacacctgccctcgtgcctaccacctcgtctgccttgatcctgagcttgaccgggctccagagggcaaatggagctgccctcactgtgagaaggagggggtccagtgggaggccaaggaggaagaagaagaatacgaagaggagggagaggaagaaggggagaaggaggaggaggatgatcacatggagtactgccgcgtatgcaaggacggcggggagctcctgtgctgtgacgcgtgcatctcctcctaccacattcattgtctaaaccctcccctgcctgacattcccaatggtgaatggctgtgtccccgatgcacatgccccgtgctgaagggtcgagtgcagaagatcctacattggcggtggggggagccacctgtagcagtgccagcccctcaacaggcagatggaaatccagatgtcccacccccccgtcctcttcaaggcagatcagagcgagagttctttgtcaagtgggtaggactatcctactggcactgctcctgggccaaggagcttcagctggaaatcttccatttggttatgtatcgaaactaccagcggaagaatgacatggatgagcccccacccctggactatggctccggcgaggatgatgggaagagcgacaagcgtaaagtgaaagacccgcactatgctgagatggaggagaagtactatcgttttggcatcaagccagagtggatgaccgtccaccgcatcatcaaccacagtgtggataaaaaggggaattaccactatctagtaaaatggagggacttaccatatgaccagtccacgtgggaggaagatgaaatgaatatccctgaatacgaagaacataagcaaagctactggagacaccgagaactaattatgggggaagaccctgcccagccccgcaagtataagaagaagaagaaggagctacagggtgatgggcctcccagttctcccactaatgatcctaccgtgaaatatgagactcagccacggtttatcacagccactggaggcaccctgcacatgtatcagttggaagggctgaactggctacgcttctcctgggcccagggcactgacaccattctagctgatgagatggggctaggcaagaccatacaaaccatcgtcttcctctactcactctacaaggagggccacacaaaaggtcccttcctggtgagtgccccactctctaccatcattaactgggagcgggagttccagatgtgggcacccaaattctatgtggtgacatacacgggtgacaaggacagccgggccatcattcgtgagaatgaattctcctttgaggacaatgccatcaaagggggcaagaaagcttttaagatgaagagggaggcacaggtgaagttccatgttctcctgacatcgtatgagctgatcaccattgatcaggcagcacttggttccatccgctgggcctgtcttgtggtagatgaggcccatcgactcaagaacaaccagtccaagtttttcagggttctcaatggttacaagatagatcataagttgctgctgacaggaaccccattgcagaataatctggaggagctcttccatctcctgaacttcctcaccccagagagatttaacaacttggagggcttcctggaggagtttgctgacatatccaaagaggaccagatcaagaaactgcatgatttgctggggccacacatgctgcggagactcaaggcagatgtctttaagaacatgccagccaagacagagctcatcgttcgggtggagctaagccccatgcagaagaaatactacaaatacatcctgactcgaaattttgaggccttgaattcacgaggtggtgggaaccaggtgtcgctgcttaatatcatgatggatcttaagaagtgctgcaaccatccatacctttttcccgtggctgctatggagtcccccaaactccccagtggggcttatgagggtggggcacttattaagtcgtctgggaagctcatgctgctccagaagatgctgcgaaagctgaaggagcaaggacaccgagtgctcatcttctcgcagatgaccaaaatgttagacttgcttgaggacttcttagactatgaaggctacaagtatgagcgcatcgatggtggtatcacgggtgccctgaggcaggaggccatcgatcggtttaatgctcctggggcccaacaattctgcttcctcctgtccacccgagctgggggcctgggcatcaatctggccactgctgacactgtcatcatctttgattctgactggaacccccataatgacatccaggcctttagccgggctcatcggattggccaggccaacaaagtgatgatttaccggtttgtgactcgcgcgtcagtggaagagcgaatcacacaagtggccaagagaaagatgatgctgacacacctggttgtgcggcctgggctgggctccaaggcaggctccatgtccaagcaggagcttgacgacattctcaaatttggcactgaagagctattcaaggatgaaaacgagggggagaacaaggaggaggacagcagtgtgattcattatgacaatgaggccatcgctcggctgttggaccggaaccaggatgcaactgaggacactgacgtgcagaacatgaatgagtatctcagctccttcaaggtggcacagtacgtcgtgcgggaagaagacaagattgaggaaattgagcgagagatcatcaagcaggaggagaatgtggaccctgactactgggagaagctgctgaggcatcactatgagcaacagcaggaagacctagcccggaatctaggcaagggcaagcgggttcgcaagcaagttaactacaatgatgctgctcaggaagaccaagacaaccagtcagagtactcggtgggttcagaggaggaggatgaagacttcgatgaacgtcctgaagggcgtagacagtcaaagaggcagctccggaatgagaaagataagccactgcctccactgctggcccgagtcgggggcaacattgaggtgctgggcttcaacacccgtcagcggaaggctttcctcaatgctgtgatgcgctgggggatgccaccacaggatgccttcaccacacagtggctggtgcgggacctgaggggcaagactgagaaggagtttaaggcctatgtgtctttgttcatgcgccatctgtgtgagcctggggcagacggctctgaaacctttgccgatggggtccctcgggagggactgagtcgccagcaggtgttgacccgcattggagtcatgtctctcgtcaaaaagaaggtgcaggagtttgagcacatcaatgggcgttggtcaatgccggaactgatgcctgaccccagcgccgattctaagcgctcctccagagcctcctctcctaccaaaacgtctcccaccactcctgaggcttctgctaccaacagtccctgcacctctaaacctgctactccagctccaagtgagaaaggagaaggcataaggacacctcttgagaaggaggaagctgaaaaccaggaggaaaagccagagaagaacagcagaattggggagaagatggagacagaggctgatgcccccagcccagccccatcacttggggagcggctggagccaaggaagattcctctagaggatgaggtgccaggggtgcctggagagatggagcctgaacctgggtaccgtggggacagagagaagtcagaagatgtaaaaggtgaccgggagcttcgaccagggcctcgagatgagccacggtccaatgggcgacgagaggaaaagacagagaagccccggttcatgttcaatatcgccgatggtggcttcacagagcttcacacactgtggcagaatgaggaacgggcagctatttcctcggggaaactcaatgagatctggcacagaagacatgactattggcttctggctgggattgtcctccatggctatgcacggtggcaggacatccagaatgatgctcaatttgccattatcaacgagccatttaaaactgaagccaataaggggaactttctggagatgaaaaataagttcctggcccggaggttcaagctcctggagcaggcgctggtgattgaggagcagctgcggcgggcggcctacctgaacctgtcgcaggagccggcgcaccccgccatggccctccacgcccgcttcgccgaggccgagtgcctggccgagagccaccagcacctctccaaggagtcgctggcggggaacaagccggccaacgccgtcctgcacaaggttctgaaccagctggaggagttgctgagcgacatgaaggcggacgtgacccgcctgccagccacgctgtcccgaataccccccatcgcagcccgccttcagatgtccgagcgcagcatcctcagccggctggccagcaagggcacggagcctcaccccacaccggcctacccgccgggtccctacgctacacctccggggtacggggcggccttcagcgccgcacccgtaggggccctggccgccgcaggcgccaattacagccagatgcctgcagggtccttcatcacagccgccaccaacggccctccagtgcttgtgaagaaggagaaggaaatggtgggggcattggtgtcagacgggctggatcggaaggagccccgagccggggaggtgatctgtatagacgactgactggatcccaggcctgcccttcacccaggccccgtccccgaggccgacccccagctcaagcgctggggcctgctgccagccctccaccttccccaccccttgggccatcactgggctaggaacccctttgcccctctctgcagctcctctcttcaagaagggccctttgtctttctccactcccacacacctttcccaccaagccttgaagactgtgctggtgagaagaagtctgggtgggagatggctggcagggtcttccaagtaccttcctcccacactgccaagtatacacaacttcccagtaaatggttgtggggaggaaagaggtggagcctccccagccgtttccctgcagaatcagctctgtctcatgtggaagtggagaatcagccttgcctggcctttaggaacttttgtggggaagagagctttgaagagaggagggggactttagagagggatgaaaatgagccctgggagggaggaagggacgaggaggggtggctgcatgttaccgtcccctacctctccccacgtggagggtggagcagttatgagggaggaagtcaactgctgttcagcctcagaataaaggtgccgttcactggctcagttacctcctgtgtaccggcatcttgtgttgggaatgttcccccctccctagggaccaaggaccacccctacaaaaagagtaatggttgggtgatactccctcaagccaaagaggagctccccaacctgttctagggacccaggtaacctagaagggtgggagagaatacaatgggccagatgtggtggaagcccagctctggggctcaggttcctggaagacttctactaccctccctcctcaaggcctggatacagactaaatttgtataagtcaggcaggggacctagtcagggtcttgggagctaccttgtcgttgggaccagagcaaaatagtggagggcaggctagggaaatgtgggcacatcccccctcccaggaggggccggggagagtggcagtttgcatggcgaaccccccacttcctctttgctgccccttcactttcttgctgcccctttcccagtctctcttcacacccactcctggtctgtcctgatcccctcttctgtatcaggtttattggttgtacatataaattatactttcctttctgtgt

SEQ ID NO: 5881 - DNA, 7356 bp, Homo sapiens
  source 1..7356: mol_type = unassigned DNA
gatggcttcccctctgagggacgaggaggaggaggaggaggagatggtggtgtcggaggaggaagaagaggaggaagaagagggcgacgaggaggaggaggaggaggtggaggcggccgacgaggacgatgaggaggacgacgacgagggagtactcgggcgcgggccgggccacgaccggggccgcgaccgccacagcccccccggctgccacctcttcccgccgccgccgccgccgccgccaccgctgcccccgccgccgccgcccccgccgccagataaggatgacattcggctgctgccgtcagcattgggtgtgaagaagagaaaacgaggacccaagaagcagaaggagaacaagccaggaaaaccccgaaaacgcaagaagcgtgacagtgaggaggaatttggttctgagcgagatgagtaccgggagaagtcagagagtgggggcagtgaatatggaaccggaccgggtcggaaacgaagaaggaagcaccgagaaaaaaaggagaagaagacaaagcggcggaaaaagggggagggagatggggggcaaaagcaagtggaacagaagtcatcagcaactctgcttctgacctggggcctggaggatgtggagcatgtgttctctgaggaggattaccacacgctcaccaactacaaagccttcagccagttcatgaggcccctaattgctaagaagaatcctaagatcccaatgtctaagatgatgaccatccttggggccaaatggagagagttcagtgccaacaaccccttcaaggggtcagcagctgctgtggcggcggcagcggcagcagcagcagcagctgtagctgagcaggtgtcagctgctgtctcgtcggccacccccatagcaccctccggaccccccgcccttccaccaccccctgctgctgatatccagcccccacccatccgaagagccaaaaccaaagagggcaaaggtccaggccataagaggcggagtaagagcccccgagtgcctgatggacgcaagaagcttcggggaaagaaaatggcaccactcaaaataaaactagggcttctgggtggcaagaggaagaaaggaggctcgtatgtttttcagagcgacgaaggtcctgaaccagaggctgaggaatcagacctggacagtggcagtgtccacagtgcctcaggccggcctgatggccctgtccgcaccaagaaactaaagagaggccggccaggaaggaagaagaagaaggtcctgggctgtcctgcagtggccggggaggaggaggttgatggctacgagacggatcaccaggattactgtgaggtgtgccagcagggtggggaaattattctgtgtgacacctgccctcgtgcctaccacctcgtctgccttgatcctgagcttgaccgggctccagagggcaaatggagctgccctcactgtgagaaggagggggtccagtgggaggccaaggaggaagaagaagaatacgaagaggagggagaggaagaaggggagaaggaggaggaggatgatcacatggagtactgccgcgtatgcaaggacggcggggagctcctgtgctgtgacgcgtgcatctcctcctaccacattcattgtctaaaccctcccctgcctgacattcccaatggtgaatggctgtgtccccgatgcacatgccccgtgctgaagggtcgagtgcagaagatcctacattggcggtggggggagccacctgtagcagtgccagcccctcaacaggcagatggaaatccagatgtcccacccccccgtcctcttcaaggcagatcagagcgagagttctttgtcaagtgggtaggactatcctactggcactgctcctgggccaaggagcttcagctggaaatcttccatttggttatgtatcgaaactaccagcggaagaatgacatggatgagcccccacccctggactatggctccggcgaggatgatgggaagagcgacaagcgtaaagtgaaagacccgcactatgctgagatggaggagaagtactatcgttttggcatcaagccagagtggatgaccgtccaccgcatcatcaaccacagtgtggataaaaaggggaattaccactatctagtaaaatggagggacttaccatatgaccagtccacgtgggaggaagatgaaatgaatatccctgaatacgaagaacataagcaaagctactggagacaccgagaactaattatgggggaagaccctgcccagccccgcaagtataagaagaagaagaaggagctacagggtgatgggcctcccagttctcccactaatgatcctaccgtgaaatatgagactcagccacggtttatcacagccactggaggcaccctgcacatgtatcagttggaagggctgaactggctacgcttctcctgggcccagggcactgacaccattctagctgatgagatggggctaggcaagaccatacaaaccatcgtcttcctctactcactctacaaggagggccacacaaaaggtcccttcctggtgagtgccccactctctaccatcattaactgggagcgggagttccagatgtgggcacccaaattctatgtggtgacatacacgggtgacaaggacagccgggccatcattcgtgagaatgaattctcctttgaggacaatgccatcaaagggggcaagaaagcttttaagatgaagagggaggcacaggtgaagttccatgttctcctgacatcgtatgagctgatcaccattgatcaggcagcacttggttccatccgctgggcctgtcttgtggtagatgaggcccatcgactcaagaacaaccagtccaagtttttcagggttctcaatggttacaagatagatcataagttgctgctgacaggaaccccattgcagaataatctggaggagctcttccatctcctgaacttcctcaccccagagagatttaacaacttggagggcttcctggaggagtttgctgacatatccaaagaggaccagatcaagaaactgcatgatttgctggggccacacatgctgcggagactcaaggcagatgtctttaagaacatgccagccaagacagagctcatcgttcgggtggagctaagccccatgcagaagaaatactacaaatacatcctgactcgaaattttgaggccttgaattcacgaggtggtgggaaccaggtgtcgctgcttaatatcatgatggatcttaagaagtgctgcaaccatccatacctttttcccgtggctgctatggagtcccccaaactccccagtggggcttatgagggtggggcacttattaagtcgtctgggaagctcatgctgctccagaagatgctgcgaaagctgaaggagcaaggacaccgagtgctcatcttctcgcagatgaccaaaatgttagacttgcttgaggacttcttagactatgaaggctacaagtatgagcgcatcgatggtggtatcacgggtgccctgaggcaggaggccatcgatcggtttaatgctcctggggcccaacaattctgcttcctcctgtccacccgagctgggggcctgggcatcaatctggccactgctgacactgtcatcatctttgattctgactggaacccccataatgacatccaggcctttagccgggctcatcggattggccaggccaacaaagtgatgatttaccggtttgtgactcgcgcgtcagtggaagagcgaatcacacaagtggccaagagaaagatgatgctgacacacctggttgtgcggcctgggctgggctccaaggcaggctccatgtccaagcaggagcttgacgacattctcaaatttggcactgaagagctattcaaggatgaaaacgagggggagaacaaggaggaggacagcagtgtgattcattatgacaatgaggccatcgctcggctgttggaccggaaccaggatgcaactgaggacactgacgtgcagaacatgaatgagtatctcagctccttcaaggtggcacagtacgtcgtgcgggaagaagacaagattgaggaaattgagcgagagatcatcaagcaggaggagaatgtggaccctgactactgggagaagctgctgaggcatcactatgagcaacagcaggaagacctagcccggaatctaggcaagggcaagcgggttcgcaagcaagttaactacaatgatgctgctcaggaagaccaagacaaccagtcagagtactcggtgggttcagaggaggaggatgaagacttcgatgaacgtcctgaagggcgtagacagtcaaagaggcagctccggaatgagaaagataagccactgcctccactgctggcccgagtcgggggcaacattgaggtgctgggcttcaacacccgtcagcggaaggctttcctcaatgctgtgatgcgctgggggatgccaccacaggatgccttcaccacacagtggctggtgcgggacctgaggggcaagactgagaaggagtttaaggcctatgtgtctttgttcatgcgccatctgtgtgagcctggggcagacggctctgaaacctttgccgatggggtccctcgggagggactgagtcgccagcaggtgttgacccgcattggagtcatgtctctcgtcaaaaagaaggtgcaggagtttgagcacatcaatgggcgttggtcaatgccggaactgatgcctgaccccagcgccgattctaagcgctcctccagagcctcctctcctaccaaaacgtctcccaccactcctgaggcttctgctaccaacagtccctgcacctctaaacctgctactccagctccaagtgagaaaggagaaggcataaggacacctcttgagaaggaggaagctgaaaaccaggaggaaaagccagagaagaacagcagaattggggagaagatggagacagaggctgatgcccccagcccagccccatcacttggggagcggctggagccaaggaagattcctctagaggatgaggtgccaggggtgcctggagagatggagcctgaacctgggtaccgtggggacagagagaagtcagccacagagtcgacgccaggagaaaggggggaggagaagccgttggatggacaggaacacagggagaggccggagggggaaacaggggatttgggcaagagagaagatgtaaaaggtgaccgggagcttcgaccagggcctcgagatgagccacggtccaatgggcgacgagaggaaaagacagagaagccccggttcatgttcaatatcgccgatggtggcttcacagagcttcacacactgtggcagaatgaggaacgggcagctatttcctcggggaaactcaatgagatctggcacagaagacatgactattggcttctggctgggattgtcctccatggctatgcacggtggcaggacatccagaatgatgctcaatttgccattatcaacgagccatttaaaactgaagccaataaggggaactttctggagatgaaaaataagttcctggcccggaggttcaagctcctggagcaggcgctggtgattgaggagcagctgcggcgggcggcctacctgaacctgtcgcaggagccggcgcaccccgccatggccctccacgcccgcttcgccgaggccgagtgcctggccgagagccaccagcacctctccaaggagtcgctggcggggaacaagccggccaacgccgtcctgcacaaggttctgaaccagctggaggagttgctgagcgacatgaaggcggacgtgacccgcctgccagccacgctgtcccgaataccccccatcgcagcccgccttcagatgtccgagcgcagcatcctcagccggctggccagcaagggcacggagcctcaccccacaccggcctacccgccgggtccctacgctacacctccggggtacggggcggccttcagcgccgcacccgtaggggccctggccgccgcaggcgccaattacagccagatgcctgcagggtccttcatcacagccgccaccaacggccctccagtgcttgtgaagaaggagaaggaaatggtgggggcattggtgtcagacgggctggatcggaaggagccccgagccggggaggtgatctgtatagacgactgactggatcccaggcctgcccttcacccaggccccgtccccgaggccgacccccagctcaagcgctggggcctgctgccagccctccaccttccccaccccttgggccatcactgggctaggaacccctttgcccctctctgcagctcctctcttcaagaagggccctttgtctttctccactcccacacacctttcccaccaagccttgaagactgtgctggtgagaagaagtctgggtgggagatggctggcagggtcttccaagtaccttcctcccacactgccaagtatacacaacttcccagtaaatggttgtggggaggaaagaggtggagcctccccagccgtttccctgcagaatcagctctgtctcatgtggaagtggagaatcagccttgcctggcctttaggaacttttgtggggaagagagctttgaagagaggagggggactttagagagggatgaaaatgagccctgggagggaggaagggacgaggaggggtggctgcatgttaccgtcccctacctctccccacgtggagggtggagcagttatgagggaggaagtcaactgctgttcagcctcagaataaaggtgccgttcactggctcagttacctcctgtgtaccggcatcttgtgttgggaatgttcccccctccctagggaccaaggaccacccctacaaaaagagtaatggttgggtgatactccctcaagccaaagaggagctccccaacctgttctagggacccaggtaacctagaagggtgggagagaatacaatgggccagatgtggtggaagcccagctctggggctcaggttcctggaagacttctactaccctccctcctcaaggcctggatacagactaaatttgtataagtcaggcaggggacctagtcagggtcttgggagctaccttgtcgttgggaccagagcaaaatagtggagggcaggctagggaaatgtgggcacatcccccctcccaggaggggccggggagagtggcagtttgcatggcgaaccccccacttcctctttgctgccccttcactttcttgctgcccctttcccagtctctcttcacacccactcctggtctgtcctgatcccctcttctgtatcaggtttattggttgtacatataaattatactttcctttctgtgt

SEQ ID NO: 5882 - DNA, 9646 bp, Homo sapiens
  source 1..9646: mol_type = unassigned DNA
tcgcccgccgcgcgcgccggtccggcagcgcacgggttaaggctggcaccgcgcccggcgggagggggggcgcccacctcccctcctccccgcgccgggcatgcggggcccagtgggcaccgaggaggagctgccgcggctgttcgccgaggagatggagaatgaggacgagatgtcagaagaagaagatggtggtcttgaagccttcgatgactttttccctgtggagcccgtgagccttcctaagaagaagaaacccaagaagctcaaggaaaacaagtgtaaagggaagcggaagaagaaagaggggagcaatgatgagctatcagagaatgaagaggatctggaagagaagtcggagagtgaaggcagtgactactccccgaataaaaagaagaagaagaaactcaaggacaagaaggagaaaaaagccaagcgaaaaaagaaggatgaggatgaggatgataatgatgatggatgcttaaaggagcccaagtcctcggggcagctcatggccgagtggggcctggacgacgtggactacctgttctcggaggaggattaccacacgctgaccaactacaaggccttcagccagttcctcaggccactcattgccaagaagaacccgaagatccccatgtccaaaatgatgaccgtcctgggtgccaagtggcgggagttcagcgccaacaaccccttcaagggcagctccgcggcagcagcggcggcggcggtggctgcggctgtagagacggtcaccatctcccctccgctagccgtcagccccccgcaggtgccccagcctgtgcctatccgcaaggccaagaccaaggagggcaaagggcctggagtgaggaagaagatcaaaggctccaaagatgggaagaaaaagggcaaagggaaaaagacggccgggctcaagttccgcttcggggggatcagcaacaagaggaagaaaggctcctcgagtgaagaagatgagagggaggagtcggacttcgacagcgccagcatccacagtgcctccgtgcgctccgaatgctctgcagccctgggcaagaagagcaagaggaggcgcaagaagaagaggattgatgatggtgacggctatgagacagaccaccaggattactgtgaggtgtgccagcagggtggggagatcatcctgtgcgacacctgcccgagggcctaccatctcgtatgcctggacccagagctggagaaggctcccgagggcaagtggagctgcccccactgtgagaaggaggggatccagtgggagccgaaggacgacgacgatgaagaggaggagggcggctgcgaggaggaggaggacgaccacatggagttctgccgcgtgtgcaaggacgggggcgagctgctctgctgcgacgcctgcccctcctcctaccacctgcattgcctcaacccgccgctgcccgagatcccaaacggtgaatggctctgcccgcgctgtacttgccccccactgaagggcaaagtccagcggattctacactggaggtggacggagccccctgcccccttcatggtggggctgccggggcctgacgtggagcccagcctccctccacctaagcccctggagggcatccctgagagagagttctttgtcaagtgggcagggctgtcctactggcattgctcctgggtgaaggagctacagctggagctgtaccacacggtgatgtatcgcaactaccaaagaaagaacgacatggatgagccgcccccctttgactacggctctggggatgaagacggcaagagcgagaagaggaagaacaaggaccccctctatgccaagatggaggagcgcttctaccgctatggcatcaagccagagtggatgatgattcaccgaatcctgaaccatagctttgacaagaagggggatgtgcactacctgatcaagtggaaagacctgccctacgaccagtgcacctgggagatcgatgacatcgacatcccctactacgacaacctcaagcaggcctactggggccacagggagctgatgctgggagaagacaccaggctgcccaagaggctgctcaagaagggcaagaagctgagggacgacaagcaggagaagccgccggacacgcccattgtggaccccacggtcaagttcgacaagcagccatggtacatcgactccacaggcggcacactgcacccgtaccagctggagggcctcaactggctgcgcttctcttgggcccagggcactgacaccatcctggccgatgagatgggtctgggcaagacggtgcagaccatcgtgttcctttactccctctacaaggagggccactccaaagggccctacctggttagcgcgcccctctccaccatcatcaactgggaacgcgagtttgagatgtgggcgcccgacttctacgtggtcacctacacgggggacaaggagagccgctcggtgattcgggagaacgagttttcctttgaggacaacgccattcggagtgggaagaaggtattccgtatgaagaaagaagtgcagatcaaattccacgtgctgctcacctcctatgagctcatcaccattgaccaggccatcctgggctccatcgagtgggcctgcctggtggtagatgaggcccaccgcctcaagaacaaccagtccaagttttttagggtcttaaacagctacaagattgattacaagctgctgctgacagggaccccccttcagaacaacctggaggagctgttccatctcctcaacttcctgactccagagaggttcaacaacctggagggcttcctggaggagtttgctgacatctccaaggaagaccagatcaagaagctgcatgacctgctggggccgcacatgctcaggcggctcaaggctgacgtgttcaagaacatgccggccaagaccgagctcattgtccgggtggagctgagccagatgcagaagaagtactacaagttcatcctcacacggaactttgaggcactgaactccaaggggggcgggaaccaagtatcgctgctcaacatcatgatggacctgaaaaagtgctgcaaccacccctacctcttccctgtggctgccgtggaggcccctgtcttgcccaatggctcctacgatggaagctccctggtcaagtcttcagggaagctcatgctgctacagaagatgctgaagaaactgcgggatgaggggcaccgtgtgctcatcttctcccagatgaccaagatgctggacctcctggaggacttcctggagtacgaaggctacaagtatgagcggattgatggtggcatcaccgggggcctccggcaggaggcaatcgacagattcaatgcccccggggcccagcagttctgcttcctcctctcaacccgggcaggtggtctgggcatcaacctggccacggcggacactgtcatcatctacgactcggactggaacccgcacaatgacatccaggccttcagccgcgcccaccgcatcggccagaacaagaaggtgatgatctaccgcttcgtgactcgggcctcggtggaggagcgcatcacgcaggtggccaagcgcaagatgatgctcacccacctggtggtgcggcccggcctcggctccaagtcggggtccatgaccaagcaggagctggacgacatcctcaagttcggcacggaggaactcttcaaggacgacgtggagggcatgatgtctcagggccagaggccggtcacacccatccctgatgtccagtcctccaaaggggggaacttggccgccagtgcaaagaagaagcacggtagcaccccgccaggtgacaacaaggacgtggaggacagcagtgtgatccactatgacgatgcggccatctccaagctgctggaccggaaccaggacgctacagatgacacggagctacagaacatgaacgagtacctgagctccttcaaggtggcgcagtacgtggtgcgcgaggaggacggcgtggaggaggtggagcgggaaatcatcaagcaggaggagaacgtggaccccgactactgggagaagctgctgcggcaccactatgagcagcagcaggaggacctggcccgcaacctgggcaagggcaagcgcatccgcaagcaggtcaactacaacgatgcctcccaggaggaccaggagtggcaggatgagctctctgataaccagtcagaatattccattggctctgaggatgaggatgaggactttgaagagaggccggaagggcagagtggacgacgacaatcccggaggcagctgaagagtgacagggacaagcccctgcccccgcttctcgcccgagttggtggcaacatcgaggtgctgggcttcaatgcccgacagcggaaggcctttctgaacgccatcatgcgctggggcatgcccccgcaggacgccttcaactcccactggctggtgcgggaccttcgagggaagagcgagaaggagtttagagcctatgtgtccctcttcatgcggcacctgtgtgagccgggggcggatggtgcagagaccttcgcagacggcgtgccccgggagggcctctccaggcagcacgtgctgacccgcatcggggtcatgtcactagttaggaagaaggttcaggagtttgagcatgtcaacgggaagtacagcaccccagacttgatccctgaggggcccgaggggaagaagtcgggcgaggtgatctcctcggaccccaacacaccagtgcccgccagccctgcccacctcctgccagccccgctgggcctgccagacaaaatggaagcccagctgggctacatggatgagaaagaccccggggcacagaagccaaggcagcccctggaagtccaggcccttccagccgccttggatagagtggagagtgaggacaagcacgagagcccagccagcaaggagagagcccgagaggagcggccagaggagacggagaaggccccgccctccccggagcagctgccgagagaggaggtgcttcctgagaaggagaagatcctggacaagctggagctgagcttgatccacagcagaggggacagttccgaactcaggccagatgacaccaaggctgaggagaaggagcccattgaaacacagcaaaatggtgacaaagaggaagatgacgaggggaagaaggaggacaagaaggggaaattcaagttcatgttcaacatcgcggacgggggcttcacggagttgcacacgctgtggcagaacgaggagcgggctgctgtatcctctgggaaaatctacgacatctggcaccggcgccatgactactggctgctggcgggcatcgtgacgcacggctacgcccgctggcaggacatccagaatgacccacggtacatgatcctcaacgagcccttcaagtctgaggtccacaagggcaactacctggagatgaagaacaagttcctggcccgcaggtttaagctgctggagcaggcgttggtcattgaggagcagctccggagggccgcgtacctgaacatgacgcaggaccccaaccaccccgccatggccctcaacgcccgcctggctgaagtggagtgcctcgccgagagccaccagcacctgtccaaggagtcccttgctgggaacaagcctgccaatgccgtcctgcacaaggtcctgaaccagctggaggagctgctgagcgacatgaaggccgacgtgacccggctgccatccatgctgtcccgcatccccccggtggccgcccggctgcagatgtcggagcgcagcatcctgagccgcctgaccaaccgcgccggggaccccaccatccagcagggcgctttcggctcctcccagatgtacagcaacaactttgggcccaacttccggggccctggaccgggagggattgtcaactacaaccagatgcccctggggccctatgtgaccgatatctagccgtcctcgagacttccctgtgttgcagcgctcatttccagctgagccacgcctgccgggccacctgcccgacccacatgggagagaaaagctgccacctttttaggagccagcgccaccttgggacaaaaagggaaacctagtaatgccatcacatggaggacgaggcccagctcagctgggccagagcccagaagtgccacctcatcataattcaagtgttcttccacacagcgttgcccccacaaccacgccggacgtgccccctcgccaccttttccagacgacttcttagaagagatttcatttatttgtacatcttttgcactttcctattgaagacttgaacacgtttgtcttgataaaagttggatgacgtatggaagattcgaacctgcagcactgatgtctctttaccgatgggttccagacccaaggtagtcctggcactgccctgtggactcagcccagctggggaggacatggcgcccggtgccctaggagccctcagtgtcccctacctgacctgtctgcacctgtgtgacagccccttctgatttggccccctgcccgcttggagcctcccagcaccagacagggcaggtttggggagccgctgtccagccctatggtgagaccctggctgacatttcccctccttcctgccaaggctggaggccgccaggtgtttgctctctccttgtggggaggtggatcctctgccagcaggtgtctgtccccggcccagcgcatcttgaaggccctggactctgttaccagtggggggcctgtggccccggctcttcacagcaggcagaagcgtatgatcccagggagggtgggctggggggggggcagcacttgcctcggagccactgctgcgttgggtttgccttctgccagaggtgtggttaagggcagtgatagctgcgccccagcaaggagggtcatgggccctgagctggcccaggagaccctggccctgccctgtgccctgggatgcctaccctgcccacctccggaggtggaaccgggctgcccctgggggcctggacttgtcccattcccctgtccctggaaaggccttcccgggggctttttgcctgaggctgcactcttggaaggcgtggggagagttctgcctggagggggactggacccagtgccctctgcagacccctcccagccgcagcaccaagggcttgctgccttgtttcctgccaggagcgccctgacatcccaaaaccatcttcccacatgtgggttgttggaatcccacccactcccccggaccctgcccctccaagttggggacggagatggggagcaggtcaggccctccctaggcctgtttgtgtgtgatccttctcctggccccaggtcgacctggaaggcgtttctgagtcttgtactgggaccttcccagggaaggtgccttggggtgcagaatcctgggaatgttaggaaagggctgcgtgaaaaacccagctgggcctggggtggaggtgcacacgggctggggctcagctccttggagagggcctgcctgggactgagggggccagggctgggtcaggattcaccagcttgtgttgcagacactggagcgattgcctggccctccctaagccctatatgcctcactcataatgaggctgtctctgaaccccggagggcgggacctacaagtccttcctcttggcgcattcccacactccagtctggatccaggtctgcaaggccagcccgaccctgacactgcacgtgggcgtagtggggagcaccctggagtggagatgattgtcagcgggctcacatgttatggttcatccacatgcgtgttgtgtgctctgcggtgcctcctggcaaagggtcctggctcgggtcagaagctcactcccgtgccctcgtccccaaacaagcagtggcaagcactggggttggccctcgttgggagcagtgcccaccttccttggcccacagcagataggtcccgagcagcaggactggaggcctgtggcggtcagggcaggggtctgtgtctccaccccaagggctgatggtccctcccctgtgcgccttcctctcaggcaggcttgctctgtcccttcctctctgcttccctcccaggcctcgccagggctcccttctcctctgcctggttagactcgggcacccaggaaagcctggccagggctcctttgggcctgggccccctgcactgcctggtccagaaggggtggtgctgtccgtggccagcaccccggggcccgggaggggtgggctactagagtcagagcgggtttggggctgaccagtttgggagaggagaaaagatctgagaatgtccttcttggtttgtcagtcatctctgccaaaagtggtgatggtggtgtccgtatgtttggcgtctttgggctgggtttggtttttgctgctggtagaatcagggtcctcgggcatgaacgcgagcccaaagtgccagtctgcgattggaaatttccagccactttaagccagtgctgagtagggcttctgcagagccatgtttgagccaaggtcttggaaggcattgccccatgggctcaggtgactcggggtggagtgagcacgtctgcagggccctctcatacacgcctgaggcagaagcagcgtcccccgtgaaagccaccttccgaagctcctgcgttttttgcaaacttggcttcccccaggggcaggctggactttccctgccccctatgattgaagtcctcctgcttttgggggctgccttcccagagtcccccgggtgctcccctgccgaggtcaggagctgaccaagccttggcccggtgacacctgcagccctcactcctgtcatcccaggacacttgaggcccaaggaggtggagtggagagtgggctcgggtacatgggagccagaagccagatggacttggtcaagtgtcggtcacttggagcctccagtgtgcgtcagggtctgtgggcaggggacagggcgtgggtgggggccgaggctggcacgcccctctgccctcaccgtcttggtgacctggcctcggcccctcccccaagtctcttctgtgcaaggcccgcctcggcctcggcagctggttcctgtcctgttttctgtgtctgaaagtttacaggttgtggtgcatcagcccaaactcactggcgttgtgttttttttttctttaattttcagattttttttttaaacaaagtatttttttaggtgcgataacccagaaagggcccgttgggtgtgtgtgtgtgtcctgaactcctcaagcagcgattggagcccaagcacccctggagaggaagggagggtccccactggcccgtggggtctgagttcaggggtgtggagggagcagactccaccggcccaggcccagctaagagggggccgacccctttccccaggcacagccccaggctggcaaagggagggccctgggctgggtgcaaggcgcgccaggagtcccagccagggtggccccggcgggggcgggtccagctttggaagccaggctcccctgtgagccgtggcttgtctggtcttcgcccacgggaggctggacagaggctgtagccaacacaatcacctttactttgtactctgtgtgtatgttttggttttctgtgttttaataaatcctttgggaaagg

SEQ ID NO: 5883 - DNA, 3044 bp, Homo sapiens
  source 1..3044: mol_type = unassigned DNA
atgctggacctcctggaggacttcctggagtacgaaggctacaagtatgagcggattgatggtggcatcaccgggggcctccggcaggaggcaatcgacagattcaatgcccccggggcccagcagttctgcttcctcctctcaacccgggcaggtggtctgggcatcaacctggccacggcggacactgtcatcatctacgactcggactggaacccgcacaatgacatccaggtctgtgctgctgccgcccaccaccctcccagggggcctctcatcccgggcctcaggccttcagccgcgcccaccgcatcggccagaacaagaaggtgatgatctaccgcttcgtgactcgggcctcggtggaggagcgcatcacgcaggtggccaagcgcaagatgatgctcacccacctggtggtgcggcccggcctcggctccaagtcggggtccatgaccaagcaggagctggacgacatcctcaagttcggcacggaggaactcttcaaggacgacgtggagggcatgatgtctcagggccagaggccggtcacacccatccctgatgtccagtcctccaaaggggggaacttggccgccagtgcaaagaagaagcacggtagcaccccgccaggtgacaacaaggacgtggaggacagcagtgtgatccactatgacgatgcggccatctccaagctgctggaccggaaccaggacgctacagatgacacggagctacagaacatgaacgagtacctgagctccttcaaggtggcgcagtacgtggtgcgcgaggaggacggcgtggaggaggtggagcgggaaatcatcaagcaggaggagaacgtggaccccgactactgggagaagctgctgcggcaccactatgagcagcagcaggaggacctggcccgcaacctgggcaagggcaagcgcatccgcaagcaggtcaactacaacgatgcctcccaggaggaccaggagtggcaggatgagctctctgataaccagtcagaatattccattggctctgaggatgaggatgaggactttgaagagaggccggaagggcagagtggacgacgacaatcccggaggcagctgaagagtgacagggacaagcccctgcccccgcttctcgcccgagttggtggcaacatcgaggtgctgggcttcaatgcccgacagcggaaggcctttctgaacgccatcatgcgctggggcatgcccccgcaggacgccttcaactcccactggctggtgcgggaccttcgagggaagagcgagaaggagtttagagcctatgtgtccctcttcatgcggcacctgtgtgagccgggggcggatggtgcagagaccttcgcagacggcgtgccccgggagggcctctccaggcagcacgtgctgacccgcatcggggtcatgtcactagttaggaagaaggttcaggagtttgagcatgtcaacgggaagtacagcaccccagacttgatccctgaggggcccgaggggaagaagtcgggcgaggtgatctcctcggaccccaacacaccagtgcccgccagccctgcccacctcctgccagccccgctgggcctgccagacaaaatggaagcccagctgggctacatggatgagaaagaccccggggcacagaagccaaggcagcccctggaagtccaggcccttccagccgccttggatagagtggagagtgaggacaagcacgagagcccagccagcaaggagagagcccgagaggagcggccagaggagacggagaaggccccgccctccccggagcagctgccgagagaggaggtgcttcctgagaaggagaagatcctggacaagctggagctgagcttgatccacagcagaggggacagttccgaactcaggccagatgacaccaaggctgaggagaaggagcccattgaaacacagcaaaatggtgacaaagaggaagatgacgaggggaagaaggaggacaagaaggggaaattcaagttcatgttcaacatcgcggacgggggcttcacggagttgcacacgctgtggcagaacgaggagcgggctgctgtatcctctgggaaaatctacgacatctggcaccggcgccatgactactggctgctggcgggcatcgtgacgcacggctacgcccgctggcaggacatccagaatgacccacggtacatgatcctcaacgagcccttcaagtctgaggtccacaagggcaactacctggagatgaagaacaagttcctggcccgcaggtttaagctgctggagcaggcgttggtcattgaggagcagctccggagggccgcgtacctgaacatgacgcaggaccccaaccaccccgccatggccctcaacgcccgcctggctgaagtggagtgcctcgccgagagccaccagcacctgtccaaggagtcccttgctgggaacaagcctgccaatgccgtcctgcacaaggtcctgaaccagctggaggagctgctgagcgacatgaaggccgacgtgacccggctgccatccatgctgtcccgcatccccccggtggccgcccggctgcagatgtcggagcgcagcatcctgagccgcctgaccaaccgcgccggggaccccaccatccagcagatatctagccgtcctcgagacttccctgtgttgcagcgctcatttccagctgagccacgcctgccgggccacctgcccgacccacatgggagagaaaagctgccacctttttaggagccagcgccaccttgggacaaaaagggaaacctagtaatgccatcacatggaggacgaggcccagctcagctgggccagagcccagaagtgccacctcatcataattcaagtgttcttccacacagcgttgcccccacaaccacgccggacgtgccccctcgccaccttttccagacgacttcttagaagagatttcatttatttgtacatcttttgcactttcctattgaagacttgaacacgtttgtcttgataaaagttggatgacgtatggaagattcg

SEQ ID NO: 5884 - DNA, 3754 bp, Homo sapiens
  source 1..3754: mol_type = unassigned DNA
attctacactggaggtggacggagccccctgcccccttcatggtggggctgccggggcctgacgtggagcccagcctccctccacctaagcccctggagggcatccctgagagagagttctttgtcaagtgggcagggctgtcctactggcattgctcctgggtgaaggagctacagctggagctgtaccacacggtgatgtatcgcaactaccaaagaaagaacgacatggatgagccgcccccctttgactacggctctggggatgaagacggcaagagcgagaagaggaagaacaaggaccccctctatgccaagatggaggagcgcttctaccgctatggcatcaagccagagtggatgatgattcaccgaatcctgaaccatagctttgacaagaagggggatgtgcactacctgatcaagtggaaagacctgccctacgaccagtgcacctgggagatcgatgacatcgacatcccctactacgacaacctcaagcaggcctactggggccacagggagctgatgctgggagaagacaccaggctgcccaagaggctgctcaagaagggcaagaagctgagggacgacaagcaggagaagccgccggacacgcccattgtggaccccacggtcaagttcgacaagcagccatggtacatcgactccacaggcggcacactgcacccgtaccagctggagggcctcaactggctgcgcttctcttgggcccagggcactgacaccatcctggccgatgagatgggtctgggcaagacggtgcagaccatcgtgttcctttactccctctacaaggagggccactccaaagggccctacctggttagcgcgcccctctccaccatcatcaactgggaacgcgagtttgagatgtgggcgcccgacttctacgtggtcacctacacgggggacaaggagagccgctcggtgattcgggagaacgagttttcctttgaggacaacgccattcggagtgggaagaaggtattccgtatgaagaaagaagtgcagatcaaattccacgtgctgctcacctcctatgagctcatcaccattgaccaggccatcctgggctccatcgagtgggcctgcctggtggtagatgaggcccaccgcctcaagaacaaccagtccaagttttttagggtcttaaacagctacaagattgattacaagctgctgctgacagggaccccccttcagaacaacctggaggagctgttccatctcctcaacttcctgactccagagaggttcaacaacctggagggcttcctggaggagtttgctgacatctccaaggaagaccagatcaagaagctgcatgacctgctggggccgcacatgctcaggcggctcaaggctgacgtgttcaagaacatgccggccaagaccgagctcattgtccgggtggagctgagccagatgcagaagaagtactacaagttcatcctcacacggaactttgaggcactgaactccaaggggggcgggaaccaagtatcgctgctcaacatcatgatggacctgaaaaagtgctgcaaccacccctacctcttccctgtggctgccgtggaggcccctgtcttgcccaatggctcctacgatggaagctccctggtcaagtcttcagggaagctcatgctgctacagaagatgctgaagaaactgcgggatgaggggcaccgtgtgctcatcttctcccagatgaccaagatgctggacctcctggaggacttcctggagtacgaaggctacaagtatgagcggattgatggtggcatcaccgggggcctccggcaggaggcaatcgacagattcaatgcccccggggcccagcagttctgcttcctcctctcaacccgggcaggtggtctgggcatcaacctggccacggcggacactgtcatcatctacgactcggactggaacccgcacaatgacatccaggccttcagccgcgcccaccgcatcggccagaacaagaaggtgatgatctaccgcttcgtgactcgggcctcggtggaggagcgcatcacgcaggtggccaagcgcaagatgatgctcacccacctggtggtgcggcccggcctcggctccaagtcggggtccatgaccaagcaggagctggacgacatcctcaagttcggcacggaggaactcttcaaggacgacgtggagggcatgatgtctcagggccagaggccggtcacacccatccctgatgtccagtcctccaaaggggggaacttggccgccagtgcaaagaagaagcacggtagcaccccgccaggtgacaacaaggacgtggaggacagcagtgtgatccactatgacgatgcggccatctccaagctgctggaccggaaccaggacgctacagatgacacggagctacagaacatgaacgagtacctgagctccttcaaggtggcgcagtacgtggtgcgcgaggaggacggcgtggaggaggtggagcgggaaatcatcaagcaggaggagaacgtggaccccgactactgggagaagctgctgcggcaccactatgagcagcagcaggaggacctggcccgcaacctgggcaagggcaagcgcatccgcaagcaggtcaactacaacgatgcctcccaggaggaccaggagtggcaggatgagctctctgataaccagtcagaatattccattggctctgaggatgaggatgaggactttgaagagaggccggaagggcagagtggacgacgacaatcccggaggcagctgaagagtgacagggacaagcccctgcccccgcttctcgcccgagttggtggcaacatcgaggtgctgggcttcaatgcccgacagcggaaggcctttctgaacgccatcatgcgctggggcatgcccccgcaggacgccttcaactcccactggctggtgcgggaccttcgagggaagagcgagaaggagtttagagcctatgtgtccctcttcatgcggcacctgtgtgagccgggggcggatggtgcagagaccttcgcagacggcgtgccccgggagggcctctccaggcagcacgtgctgacccgcatcggggtcatgtcactagttaggaagaaggttcaggagtttgagcatgtcaacgggaagtacagcaccccagacttgatccctgaggggcccgaggggaagaagtcgggcgaggtgatctcctcggaccccaacacaccagtgcccgccagccctgcccacctcctgccagccccgctgggcctgccagacaaaatggaagcccagctgggctacatggatgagaaagaccccggggcacagaagccaaggcagcccctggaagtccaggcccttccagccgccttggatagagtggagagtgaggacaagcacgagagcccagccagcaaggagagagcccgagaggagcggccagagcagactccaccggcccaggcccagctaagagggggccgacccctttccccaggcacagccccaggctggcaaagggagggccctgggctgggtgcaaggcgcgccaggagtcccagccagggtggccccggcgggggcgggtccagctttggaagccaggctcccctgtgagccgtggcttgtctggtcttcgcccacgggaggctggacagaggctgtagccaacacaatcacctttactttgtactctgtgtgtatgttttggttttctgtgttttaataaatcctttgggaaagg

SEQ ID NO: 5885 - DNA, 9531 bp, Homo sapiens
  source 1..9531: mol_type = unassigned DNA
tcgcccgccgcgcgcgccggtccggcagcgcacgggttaaggctggcaccgcgcccggcgggagggggggcgcccacctcccctcctccccgcgccgggcatgcggggcccagtgggcaccgaggaggagctgccgcggctgttcgccgaggagatggagaatgaggacgagatgtcagaagaagaagatggtggtcttgaagccttcgatgactttttccctgtggagcccgtgagccttcctaagaagaagaaacccaagaagctcaaggaaaacaagtgtaaagggaagcggaagaagaaagaggggagcaatgatgagctatcagagaatgaagaggatctggaagagaagtcggagagtgaaggcagtgactactccccgaataaaaagaagaagaagaaactcaaggacaagaaggagaaaaaagccaagcgaaaaaagaaggatgaggatgaggatgataatgatgatggatgcttaaaggagcccaagtcctcggggcagctcatggccgagtggggcctggacgacgtggactacctgttctcggaggaggattaccacacgctgaccaactacaaggccttcagccagttcctcaggccactcattgccaagaagaacccgaagatccccatgtccaaaatgatgaccgtcctgggtgccaagtggcgggagttcagcgccaacaaccccttcaagggcagctccgcggcagcagcggcggcggcggtggctgcggctgtagagacggtcaccatctcccctccgctagccgtcagccccccgcaggtgccccagcctgtgcctatccgcaaggccaagaccaaggagggcaaagggcctggagtgaggaagaagatcaaaggctccaaagatgggaagaaaaagggcaaagggaaaaagacggccgggctcaagttccgcttcggggggatcagcaacaagaggaagaaaggctcctcgagtgaagaagatgagagggaggagtcggacttcgacagcgccagcatccacagtgcctccgtgcgctccgaatgctctgcagccctgggcaagaagagcaagaggaggcgcaagaagaagaggattgatgatggtgacggctatgagacagaccaccaggattactgtgaggtgtgccagcagggtggggagatcatcctgtgcgacacctgcccgagggcctaccatctcgtatgcctggacccagagctggagaaggctcccgagggcaagtggagctgcccccactgtgagaaggaggggatccagtgggagccgaaggacgacgacgatgaagaggaggagggcggctgcgaggaggaggaggacgaccacatggagttctgccgcgtgtgcaaggacgggggcgagctgctctgctgcgacgcctgcccctcctcctaccacctgcattgcctcaacccgccgctgcccgagatcccaaacggtgaatggctctgcccgcgctgtacttgccccccactgaagggcaaagtccagcggattctacactggaggtggacggagccccctgcccccttcatggtggggctgccggggcctgacgtggagcccagcctccctccacctaagcccctggagggcatccctgagagagagttctttgtcaagtgggcagggctgtcctactggcattgctcctgggtgaaggagctacagctggagctgtaccacacggtgatgtatcgcaactaccaaagaaagaacgacatggatgagccgcccccctttgactacggctctggggatgaagacggcaagagcgagaagaggaagaacaaggaccccctctatgccaagatggaggagcgcttctaccgctatggcatcaagccagagtggatgatgattcaccgaatcctgaaccatagctttgacaagaagggggatgtgcactacctgatcaagtggaaagacctgccctacgaccagtgcacctgggagatcgatgacatcgacatcccctactacgacaacctcaagcaggcctactggggccacagggagctgatgctgggagaagacaccaggctgcccaagaggctgctcaagaagggcaagaagctgagggacgacaagcaggagaagccgccggacacgcccattgtggaccccacggtcaagttcgacaagcagccatggtacatcgactccacaggcggcacactgcacccgtaccagctggagggcctcaactggctgcgcttctcttgggcccagggcactgacaccatcctggccgatgagatgggtctgggcaagacggtgcagaccatcgtgttcctttactccctctacaaggagggccactccaaagggccctacctggttagcgcgcccctctccaccatcatcaactgggaacgcgagtttgagatgtgggcgcccgacttctacgtggtcacctacacgggggacaaggagagccgctcggtgattcgggagaacgagttttcctttgaggacaacgccattcggagtgggaagaaggtattccgtatgaagaaagaagtgcagatcaaattccacgtgctgctcacctcctatgagctcatcaccattgaccaggccatcctgggctccatcgagtgggcctgcctggtggtagatgaggcccaccgcctcaagaacaaccagtccaagttttttagggtcttaaacagctacaagattgattacaagctgctgctgacagggaccccccttcagaacaacctggaggagctgttccatctcctcaacttcctgactccagagaggttcaacaacctggagggcttcctggaggagtttgctgacatctccaaggaagaccagatcaagaagctgcatgacctgctggggccgcacatgctcaggcggctcaaggctgacgtgttcaagaacatgccggccaagaccgagctcattgtccgggtggagctgagccagatgcagaagaagtactacaagttcatcctcacacggaactttgaggcactgaactccaaggggggcgggaaccaagtatcgctgctcaacatcatgatggacctgaaaaagtgctgcaaccacccctacctcttccctgtggctgccgtggaggcccctgtcttgcccaatggctcctacgatggaagctccctggtcaagtcttcagggaagctcatgctgctacagaagatgctgaagaaactgcgggatgaggggcaccgtgtgctcatcttctcccagatgaccaagatgctggacctcctggaggacttcctggagtacgaaggctacaagtatgagcggattgatggtggcatcaccgggggcctccggcaggaggcaatcgacagattcaatgcccccggggcccagcagttctgcttcctcctctcaacccgggcaggtggtctgggcatcaacctggccacggcggacactgtcatcatctacgactcggactggaacccgcacaatgacatccaggccttcagccgcgcccaccgcatcggccagaacaagaaggtgatgatctaccgcttcgtgactcgggcctcggtggaggagcgcatcacgcaggtggccaagcgcaagatgatgctcacccacctggtggtgcggcccggcctcggctccaagtcggggtccatgaccaagcaggagctggacgacatcctcaagttcggcacggaggaactcttcaaggacgacgtggagggcatgatgtctcagggccagaggccggtcacacccatccctgatgtccagtcctccaaaggggggaacttggccgccagtgcaaagaagaagcacggtagcaccccgccaggtgacaacaaggacgtggaggacagcagtgtgatccactatgacgatgcggccatctccaagctgctggaccggaaccaggacgctacagatgacacggagctacagaacatgaacgagtacctgagctccttcaaggtggcgcagtacgtggtgcgcgaggaggacggcgtggaggaggtggagcgggaaatcatcaagcaggaggagaacgtggaccccgactactgggagaagctgctgcggcaccactatgagcagcagcaggaggacctggcccgcaacctgggcaagggcaagcgcatccgcaagcaggtcaactacaacgatgcctcccaggaggaccaggagtggcaggatgagctctctgataaccagtcagaatattccattggctctgaggatgaggatgaggactttgaagagaggccggaagggcagagtggacgacgacaatcccggaggcagctgaagagtgacagggacaagcccctgcccccgcttctcgcccgagttggtggcaacatcgaggtgctgggcttcaatgcccgacagcggaaggcctttctgaacgccatcatgcgctggggcatgcccccgcaggacgccttcaactcccactggctggtgcgggaccttcgagggaagagcgagaaggagtttagagcctatgtgtccctcttcatgcggcacctgtgtgagccgggggcggatggtgcagagaccttcgcagacggcgtgccccgggagggcctctccaggcagcacgtgctgacccgcatcggggtcatgtcactagttaggaagaaggttcaggagtttgagcatgtcaacgggaagtacagcaccccagacttgatccctgaggggcccgaggggaagaagtcgggcgaggtgatctcctcggaccccaacacaccagtgcccgccagccctgcccacctcctgccagccccgctgggcctgccagacaaaatggaagcccagctgggctacatggatgagaaagaccccggggcacagaagccaaggcagcccctggaagtccaggcccttccagccgccttggatagagtggagagtgaggacaagcacgagagcccagccagcaaggagagagcccgagaggagcggccagaggagacggagaaggccccgccctccccggagcagctgccgagagaggaggtgcttcctgagaaggagaagatcctggacaagctggagctgagcttgatccacagcagaggggacagttccgaactcaggccagatgacaccaaggctgaggagaaggagcccattgaaacacagcaaaatggtgacaaagaggaagatgacgaggggaagaaggaggacaagaaggggaaattcaagttcatgttcaacatcgcggacgggggcttcacggagttgcacacgctgtggcagaacgaggagcgggctgctgtatcctctgggaaaatctacgacatctggcaccggcgccatgactactggctgctggcgggcatcgtgacgcacggctacgcccgctggcaggacatccagaatgacccacggtacatgatcctcaacgagcccttcaagtctgaggtccacaagggcaactacctggagatgaagaacaagttcctggcccgcaggtttaagctgctggagcaggcgttggtcattgaggagcagctccggagggccgcgtacctgaacatgacgcaggaccccaaccaccccgccatggccctcaacgcccgcctggctgaagtggagtgcctcgccgagagccaccagcacctgtccaaggagtcccttgctgggaacaagcctgccaatgccgtcctgcacaaggtcctgaaccagctggaggagctgctgagcgacatgaaggccgacgtgacccggctgccatccatgctgtcccgcatccccccggtggccgcccggctgcagatgtcggagcgcagcatcctgagccgcctgaccaaccgcgccggggaccccaccatccagcagatatctagccgtcctcgagacttccctgtgttgcagcgctcatttccagctgagccacgcctgccgggccacctgcccgacccacatgggagagaaaagctgccacctttttaggagccagcgccaccttgggacaaaaagggaaacctagtaatgccatcacatggaggacgaggcccagctcagctgggccagagcccagaagtgccacctcatcataattcaagtgttcttccacacagcgttgcccccacaaccacgccggacgtgccccctcgccaccttttccagacgacttcttagaagagatttcatttatttgtacatcttttgcactttcctattgaagacttgaacacgtttgtcttgataaaagttggatgacgtatggaagattcgaacctgcagcactgatgtctctttaccgatgggttccagacccaaggtagtcctggcactgccctgtggactcagcccagctggggaggacatggcgcccggtgccctaggagccctcagtgtcccctacctgacctgtctgcacctgtgtgacagccccttctgatttggccccctgcccgcttggagcctcccagcaccagacagggcaggtttggggagccgctgtccagccctatggtgagaccctggctgacatttcccctccttcctgccaaggctggaggccgccaggtgtttgctctctccttgtggggaggtggatcctctgccagcaggtgtctgtccccggcccagcgcatcttgaaggccctggactctgttaccagtggggggcctgtggccccggctcttcacagcaggcagaagcgtatgatcccagggagggtgggctggggggggggcagcacttgcctcggagccactgctgcgttgggtttgccttctgccagaggtgtggttaagggcagtgatagctgcgccccagcaaggagggtcatgggccctgagctggcccaggagaccctggccctgccctgtgccctgggatgcctaccctgcccacctccggaggtggaaccgggctgcccctgggggcctggacttgtcccattcccctgtccctggaaaggccttcccgggggctttttgcctgaggctgcactcttggaaggcgtggggagagttctgcctggagggggactggacccagtgccctctgcagacccctcccagccgcagcaccaagggcttgctgccttgtttcctgccaggagcgccctgacatcccaaaaccatcttcccacatgtgggttgttggaatcccacccactcccccggaccctgcccctccaagttggggacggagatggggagcaggtcaggccctccctaggcctgtttgtgtgtgatccttctcctggccccaggtcgacctggaaggcgtttctgagtcttgtactgggaccttcccagggaaggtgccttggggtgcagaatcctgggaatgttaggaaagggctgcgtgaaaaacccagctgggcctggggtggaggtgcacacgggctggggctcagctccttggagagggcctgcctgggactgagggggccagggctgggtcaggattcaccagcttgtgttgcagacactggagcgattgcctggccctccctaagccctatatgcctcactcataatgaggctgtctctgaaccccggagggcgggacctacaagtccttcctcttggcgcattcccacactccagtctggatccaggtctgcaaggccagcccgaccctgacactgcacgtgggcgtagtggggagcaccctggagtggagatgattgtcagcgggctcacatgttatggttcatccacatgcgtgttgtgtgctctgcggtgcctcctggcaaagggtcctggctcgggtcagaagctcactcccgtgccctcgtccccaaacaagcagtggcaagcactggggttggccctcgttgggagcagtgcccaccttccttggcccacagcagataggtcccgagcagcaggactggaggcctgtggcggtcagggcaggggtctgtgtctccaccccaagggctgatggtccctcccctgtgcgccttcctctcaggcaggcttgctctgtcccttcctctctgcttccctcccaggcctcgccagggctcccttctcctctgcctggttagactcgggcacccaggaaagcctggccagggctcctttgggcctgggccccctgcactgcctggtccagaaggggtggtgctgtccgtggccagcaccccggggcccgggaggggtgggctactagagtcagagcgggtttggggctgaccagtttgggagaggagaaaagatctgagaatgtccttcttggtttgtcagtcatctctgccaaaagtggtgatggtggtgtccgtatgtttggcgtctttgggctgggtttggtttttgctgctggtagaatcagggtcctcgggcatgaacgcgagcccaaagtgccagtctgcgattggaaatttccagccactttaagccagtgctgagtagggcttctgcagagccatgtttgagccaaggtcttggaaggcattgccccatgggctcaggtgactcggggtggagtgagcacgtctgcagggccctctcatacacgcctgaggcagaagcagcgtcccccgtgaaagccaccttccgaagctcctgcgttttttgcaaacttggcttcccccaggggcaggctggactttccctgccccctatgattgaagtcctcctgcttttgggggctgccttcccagagtcccccgggtgctcccctgccgaggtcaggagctgaccaagccttggcccggtgacacctgcagccctcactcctgtcatcccaggacacttgaggcccaaggaggtggagtggagagtgggctcgggtacatgggagccagaagccagatggacttggtcaagtgtcggtcacttggagcctccagtgtgcgtcagggtctgtgggcaggggacagggcgtgggtgggggccgaggctggcacgcccctctgccctcaccgtcttggtgacctggcctcggcccctcccccaagtctcttctgtgcaaggcccgcctcggcctcggcagctggttcctgtcctgttttctgtgtctgaaagtttacaggttgtggtgcatcagcccaaactcactggcgttgtgttttttttttctttaattttcagattttttttttaaacaaagtatttttttaggtgcgataacccagaaagggcccgttgggtgtgtgtgtgtgtcctgaactcctcaagcagcgattggagcccaagcacccctggagaggaagggagggtccccactggcccgtggggtctgagttcaggggtgtggagggagcagactccaccggcccaggcccagctaagagggggccgacccctttccccaggcacagccccaggctggcaaagggagggccctgggctgggtgcaaggcgcgccaggagtcccagccagggtggccccggcgggggcgggtccagctttggaagccaggctcccctgtgagccgtggcttgtctggtcttcgcccacgggaggctggacagaggctgtagccaacacaatcacctttactttgtactctgtgtgtatgttttggttttctgtgttttaataaatcctttgggaaagg

SEQ ID NO: 5886 - DNA, 9750 bp, Homo sapiens
  source 1..9750: mol_type = unassigned DNA
tcgcccgccgcgcgcgccggtccggcagcgcacgggttaaggctggcaccgcgcccggcgggagggggggcgcccacctcccctcctccccgcgccgggcatgcggggcccagtgggcaccgaggaggagctgccgcggctgttcgccgaggagatggagaatgaggacgagatgtcagaagaagaagatggtggtcttgaagccttcgatgactttttccctgtggagcccgtgagccttcctaagaagaagaaacccaagaagctcaaggaaaacaagtgtaaagggaagcggaagaagaaagaggggagcaatgatgagctatcagagaatgaagaggatctggaagagaagtcggagagtgaaggcagtgactactccccgaataaaaagaagaagaagaaactcaaggacaagaaggagaaaaaagccaagcgaaaaaagaaggatgaggatgaggatgataatgatgatggatgcttaaaggagcccaagtcctcggggcagctcatggccgagtggggcctggacgacgtggactacctgttctcggaggaggattaccacacgctgaccaactacaaggccttcagccagttcctcaggccactcattgccaagaagaacccgaagatccccatgtccaaaatgatgaccgtcctgggtgccaagtggcgggagttcagcgccaacaaccccttcaagggcagctccgcggcagcagcggcggcggcggtggctgcggctgtagagacggtcaccatctcccctccgctagccgtcagccccccgcaggtgccccagcctgtgcctatccgcaaggccaagaccaaggagggcaaagggcctggagtgaggaagaagatcaaaggctccaaagatgggaagaaaaagggcaaagggaaaaagacggccgggctcaagttccgcttcggggggatcagcaacaagaggaagaaaggctcctcgagtgaagaagatgagagggaggagtcggacttcgacagcgccagcatccacagtgcctccgtgcgctccgaatgctctgcagccctgggcaagaagagcaagaggaggcgcaagaagaagaggattgatgatggtgacggctatgagacagaccaccaggattactgtgaggtgtgccagcagggtggggagatcatcctgtgcgacacctgcccgagggcctaccatctcgtatgcctggacccagagctggagaaggctcccgagggcaagtggagctgcccccactgtgagaaggaggggatccagtgggagccgaaggacgacgacgatgaagaggaggagggcggctgcgaggaggaggaggacgaccacatggagttctgccgcgtgtgcaaggacgggggcgagctgctctgctgcgacgcctgcccctcctcctaccacctgcattgcctcaacccgccgctgcccgagatcccaaacggtgaatggctctgcccgcgctgtacttgccccccactgaagggcaaagtccagcggattctacactggaggtggacggagccccctgcccccttcatggtggggctgccggggcctgacgtggagcccagcctccctccacctaagcccctggagggcatccctgagagagagttctttgtcaagtgggcagggctgtcctactggcattgctcctgggtgaaggagctacagctggagctgtaccacacggtgatgtatcgcaactaccaaagaaagaacgacatggatgagccgcccccctttgactacggctctggggatgaagacggcaagagcgagaagaggaagaacaaggaccccctctatgccaagatggaggagcgcttctaccgctatggcatcaagccagagtggatgatgattcaccgaatcctgaaccatagctttgacaagaagggggatgtgcactacctgatcaagtggaaagacctgccctacgaccagtgcacctgggagatcgatgacatcgacatcccctactacgacaacctcaagcaggcctactggggccacagggagctgatgctgggagaagacaccaggctgcccaagaggctgctcaagaagggcaagaagctgagggacgacaagcaggagaagccgccggacacgcccattgtggaccccacggtcaagttcgacaagcagccatggtacatcgactccacaggcggcacactgcacccgtaccagctggagggcctcaactggctgcgcttctcttgggcccagggcactgacaccatcctggccgatgagatgggtctgggcaagacggtgcagaccatcgtgttcctttactccctctacaaggagggccactccaaagggccctacctggttagcgcgcccctctccaccatcatcaactgggaacgcgagtttgagatgtgggcgcccgacttctacgtggtcacctacacgggggacaaggagagccgctcggtgattcgggagaacgagttttcctttgaggacaacgccattcggagtgggaagaaggtattccgtatgaagaaagaagtgcagatcaaattccacgtgctgctcacctcctatgagctcatcaccattgaccaggccatcctgggctccatcgagtgggcctgcctggtggtagatgaggcccaccgcctcaagaacaaccagtccaagttttttagggtcttaaacagctacaagattgattacaagctgctgctgacagggaccccccttcagaacaacctggaggagctgttccatctcctcaacttcctgactccagagaggttcaacaacctggagggcttcctggaggagtttgctgacatctccaaggaagaccagatcaagaagctgcatgacctgctggggccgcacatgctcaggcggctcaaggctgacgtgttcaagaacatgccggccaagaccgagctcattgtccgggtggagctgagccagatgcagaagaagtactacaagttcatcctcacacggaactttgaggcactgaactccaaggggggcgggaaccaagtatcgctgctcaacatcatgatggacctgaaaaagtgctgcaaccacccctacctcttccctgtggctgccgtggaggcccctgtcttgcccaatggctcctacgatggaagctccctggtcaagtcttcagggaagctcatgctgctacagaagatgctgaagaaactgcgggatgaggggcaccgtgtgctcatcttctcccagatgaccaagatgctggacctcctggaggacttcctggagtacgaaggctacaagtatgagcggattgatggtggcatcaccgggggcctccggcaggaggcaatcgacagattcaatgcccccggggcccagcagttctgcttcctcctctcaacccgggcaggtggtctgggcatcaacctggccacggcggacactgtcatcatctacgactcggactggaacccgcacaatgacatccaggccttcagccgcgcccaccgcatcggccagaacaagaaggtgatgatctaccgcttcgtgactcgggcctcggtggaggagcgcatcacgcaggtggccaagcgcaagatgatgctcacccacctggtggtgcggcccggcctcggctccaagtcggggtccatgaccaagcaggagctggacgacatcctcaagttcggcacggaggaactcttcaaggacgacgtggagggcatgatgtctcagggccagaggccggtcacacccatccctgatgtccagtcctccaaaggggggaacttggccgccagtgcaaagaagaagcacggtagcaccccgccaggtgacaacaaggacgtggaggacagcagtgtgatccactatgacgatgcggccatctccaagctgctggaccggaaccaggacgctacagatgacacggagctacagaacatgaacgagtacctgagctccttcaaggtggcgcagtacgtggtgcgcgaggaggacggcgtggaggaggtggagcgggaaatcatcaagcaggaggagaacgtggaccccgactactgggagaagctgctgcggcaccactatgagcagcagcaggaggacctggcccgcaacctgggcaagggcaagcgcatccgcaagcaggtcaactacaacgatgcctcccaggaggaccaggagtggcaggatgagctctctgataaccagtcagaatattccattggctctgaggatgaggatgaggactttgaagagaggccggaagggcagagtggacgacgacaatcccggaggcagctgaagagtgacagggacaagcccctgcccccgcttctcgcccgagttggtggcaacatcgaggtgctgggcttcaatgcccgacagcggaaggcctttctgaacgccatcatgcgctggggcatgcccccgcaggacgccttcaactcccactggctggtgcgggaccttcgagggaagagcgagaaggagtttagagcctatgtgtccctcttcatgcggcacctgtgtgagccgggggcggatggtgcagagaccttcgcagacggcgtgccccgggagggcctctccaggcagcacgtgctgacccgcatcggggtcatgtcactagttaggaagaaggttcaggagtttgagcatgtcaacgggaagtacagcaccccagacttgatccctgaggggcccgaggggaagaagtcgggcgaggtgatctcctcggaccccaacacaccagtgcccgccagccctgcccacctcctgccagccccgctgggcctgccagacaaaatggaagcccagctgggctacatggatgagaaagaccccggggcacagaagccaaggcagcccctggaagtccaggcccttccagccgccttggatagagtggagagtgaggacaagcacgagagcccagccagcaaggagagagcccgagaggagcggccagaggagacggagaaggccccgccctccccggagcagctgccgagagcgtcttgctctgtcactcaggctggagtgcagtggcgccatcggctcatgggagcctttatctcctcggctcaagcgaccctcccacctcagcttcctgaacagaggaggtgcttcctgagaaggagaagatcctggacaagctggagctgagcttgatccacagcagaggggacagttccgaactcaggccagatgacaccaaggctgaggagaaggagcccattgaaacacagcaaaatggtgacaaagaggaagatgacgaggggaagaaggaggacaagaaggggaaattcaagttcatgttcaacatcgcggacgggggcttcacggagttgcacacgctgtggcagaacgaggagcgggctgctgtatcctctgggaaaatctacgacatctggcaccggcgccatgactactggctgctggcgggcatcgtgacgcacggctacgcccgctggcaggacatccagaatgacccacggtacatgatcctcaacgagcccttcaagtctgaggtccacaagggcaactacctggagatgaagaacaagttcctggcccgcaggtttaagctgctggagcaggcgttggtcattgaggagcagctccggagggccgcgtacctgaacatgacgcaggaccccaaccaccccgccatggccctcaacgcccgcctggctgaagtggagtgcctcgccgagagccaccagcacctgtccaaggagtcccttgctgggaacaagcctgccaatgccgtcctgcacaaggtcctgaaccagctggaggagctgctgagcgacatgaaggccgacgtgacccggctgccatccatgctgtcccgcatccccccggtggccgcccggctgcagatgtcggagcgcagcatcctgagccgcctgaccaaccgcgccggggaccccaccatccagcagggcgctttcggctcctcccagatgtacagcaacaactttgggcccaacttccggggccctggaccgggagggattgtcaactacaaccagatgcccctggggccctatgtgaccgatatctagccgtcctcgagacttccctgtgttgcagcgctcatttccagctgagccacgcctgccgggccacctgcccgacccacatgggagagaaaagctgccacctttttaggagccagcgccaccttgggacaaaaagggaaacctagtaatgccatcacatggaggacgaggcccagctcagctgggccagagcccagaagtgccacctcatcataattcaagtgttcttccacacagcgttgcccccacaaccacgccggacgtgccccctcgccaccttttccagacgacttcttagaagagatttcatttatttgtacatcttttgcactttcctattgaagacttgaacacgtttgtcttgataaaagttggatgacgtatggaagattcgaacctgcagcactgatgtctctttaccgatgggttccagacccaaggtagtcctggcactgccctgtggactcagcccagctggggaggacatggcgcccggtgccctaggagccctcagtgtcccctacctgacctgtctgcacctgtgtgacagccccttctgatttggccccctgcccgcttggagcctcccagcaccagacagggcaggtttggggagccgctgtccagccctatggtgagaccctggctgacatttcccctccttcctgccaaggctggaggccgccaggtgtttgctctctccttgtggggaggtggatcctctgccagcaggtgtctgtccccggcccagcgcatcttgaaggccctggactctgttaccagtggggggcctgtggccccggctcttcacagcaggcagaagcgtatgatcccagggagggtgggctggggggggggcagcacttgcctcggagccactgctgcgttgggtttgccttctgccagaggtgtggttaagggcagtgatagctgcgccccagcaaggagggtcatgggccctgagctggcccaggagaccctggccctgccctgtgccctgggatgcctaccctgcccacctccggaggtggaaccgggctgcccctgggggcctggacttgtcccattcccctgtccctggaaaggccttcccgggggctttttgcctgaggctgcactcttggaaggcgtggggagagttctgcctggagggggactggacccagtgccctctgcagacccctcccagccgcagcaccaagggcttgctgccttgtttcctgccaggagcgccctgacatcccaaaaccatcttcccacatgtgggttgttggaatcccacccactcccccggaccctgcccctccaagttggggacggagatggggagcaggtcaggccctccctaggcctgtttgtgtgtgatccttctcctggccccaggtcgacctggaaggcgtttctgagtcttgtactgggaccttcccagggaaggtgccttggggtgcagaatcctgggaatgttaggaaagggctgcgtgaaaaacccagctgggcctggggtggaggtgcacacgggctggggctcagctccttggagagggcctgcctgggactgagggggccagggctgggtcaggattcaccagcttgtgttgcagacactggagcgattgcctggccctccctaagccctatatgcctcactcataatgaggctgtctctgaaccccggagggcgggacctacaagtccttcctcttggcgcattcccacactccagtctggatccaggtctgcaaggccagcccgaccctgacactgcacgtgggcgtagtggggagcaccctggagtggagatgattgtcagcgggctcacatgttatggttcatccacatgcgtgttgtgtgctctgcggtgcctcctggcaaagggtcctggctcgggtcagaagctcactcccgtgccctcgtccccaaacaagcagtggcaagcactggggttggccctcgttgggagcagtgcccaccttccttggcccacagcagataggtcccgagcagcaggactggaggcctgtggcggtcagggcaggggtctgtgtctccaccccaagggctgatggtccctcccctgtgcgccttcctctcaggcaggcttgctctgtcccttcctctctgcttccctcccaggcctcgccagggctcccttctcctctgcctggttagactcgggcacccaggaaagcctggccagggctcctttgggcctgggccccctgcactgcctggtccagaaggggtggtgctgtccgtggccagcaccccggggcccgggaggggtgggctactagagtcagagcgggtttggggctgaccagtttgggagaggagaaaagatctgagaatgtccttcttggtttgtcagtcatctctgccaaaagtggtgatggtggtgtccgtatgtttggcgtctttgggctgggtttggtttttgctgctggtagaatcagggtcctcgggcatgaacgcgagcccaaagtgccagtctgcgattggaaatttccagccactttaagccagtgctgagtagggcttctgcagagccatgtttgagccaaggtcttggaaggcattgccccatgggctcaggtgactcggggtggagtgagcacgtctgcagggccctctcatacacgcctgaggcagaagcagcgtcccccgtgaaagccaccttccgaagctcctgcgttttttgcaaacttggcttcccccaggggcaggctggactttccctgccccctatgattgaagtcctcctgcttttgggggctgccttcccagagtcccccgggtgctcccctgccgaggtcaggagctgaccaagccttggcccggtgacacctgcagccctcactcctgtcatcccaggacacttgaggcccaaggaggtggagtggagagtgggctcgggtacatgggagccagaagccagatggacttggtcaagtgtcggtcacttggagcctccagtgtgcgtcagggtctgtgggcaggggacagggcgtgggtgggggccgaggctggcacgcccctctgccctcaccgtcttggtgacctggcctcggcccctcccccaagtctcttctgtgcaaggcccgcctcggcctcggcagctggttcctgtcctgttttctgtgtctgaaagtttacaggttgtggtgcatcagcccaaactcactggcgttgtgttttttttttctttaattttcagattttttttttaaacaaagtatttttttaggtgcgataacccagaaagggcccgttgggtgtgtgtgtgtgtcctgaactcctcaagcagcgattggagcccaagcacccctggagaggaagggagggtccccactggcccgtggggtctgagttcaggggtgtggagggagcagactccaccggcccaggcccagctaagagggggccgacccctttccccaggcacagccccaggctggcaaagggagggccctgggctgggtgcaaggcgcgccaggagtcccagccagggtggccccggcgggggcgggtccagctttggaagccaggctcccctgtgagccgtggcttgtctggtcttcgcccacgggaggctggacagaggctgtagccaacacaatcacctttactttgtactctgtgtgtatgttttggttttctgtgttttaataaatcctttgggaaagg

SEQ ID NO: 5887 - DNA, 9752 bp, Homo sapiens
  source 1..9752: mol_type = unassigned DNA
tcgcccgccgcgcgcgccggtccggcagcgcacgggttaaggctggcaccgcgcccggcgggagggggggcgcccacctcccctcctccccgcgccgggcatgcggggcccagtgggcaccgaggaggagctgccgcggctgttcgccgaggagatggagaatgaggacgagatgtcagaagaagaagatggtggtcttgaagccttcgatgactttttccctgtggagcccgtgagccttcctaagaagaagaaacccaagaagctcaaggaaaacaagtgtaaagggaagcggaagaagaaagaggggagcaatgatgagctatcagagaatgaagaggatctggaagagaagtcggagagtgaaggcagtgactactccccgaataaaaagaagaagaagaaactcaaggacaagaaggagaaaaaagccaagcgaaaaaagaaggatgaggatgaggatgataatgatgatggatgcttaaaggagcccaagtcctcggggcagctcatggccgagtggggcctggacgacgtggactacctgttctcggaggaggattaccacacgctgaccaactacaaggccttcagccagttcctcaggccactcattgccaagaagaacccgaagatccccatgtccaaaatgatgaccgtcctgggtgccaagtggcgggagttcagcgccaacaaccccttcaagggcagctccgcggcagcagcggcggcggcggtggctgcggctgtagagacggtcaccatctcccctccgctagccgtcagccccccgcaggtgccccagcctgtgcctatccgcaaggccaagaccaaggagggcaaagggcctggagtgaggaagaagatcaaaggctccaaagatgggaagaaaaagggcaaagggaaaaagacggccgggctcaagttccgcttcggggggatcagcaacaagaggaagaaaggctcctcgagtgaagaagatgagagggaggagtcggacttcgacagcgccagcatccacagtgcctccgtgcgctccgaatgctctgcagccctgggcaagaagagcaagaggaggcgcaagaagaagaggattgatgatggtgacggctatgagacagaccaccaggattactgtgaggtgtgccagcagggtggggagatcatcctgtgcgacacctgcccgagggcctaccatctcgtatgcctggacccagagctggagaaggctcccgagggcaagtggagctgcccccactgtgagaaggaggggatccagtgggagccgaaggacgacgacgatgaagaggaggagggcggctgcgaggaggaggaggacgaccacatggagttctgccgcgtgtgcaaggacgggggcgagctgctctgctgcgacgcctgcccctcctcctaccacctgcattgcctcaacccgccgctgcccgagatcccaaacggtgaatggctctgcccgcgctgtacttgccccccactgaagggcaaagtccagcggattctacactggaggtggacggagccccctgcccccttcatggtggggctgccggggcctgacgtggagcccagcctccctccacctaagcccctggagggcatccctgagagagagttctttgtcaagtgggcagggctgtcctactggcattgctcctgggtgaaggagctacagctggagctgtaccacacggtgatgtatcgcaactaccaaagaaagaacgacatggatgagccgcccccctttgactacggctctggggatgaagacggcaagagcgagaagaggaagaacaaggaccccctctatgccaagatggaggagcgcttctaccgctatggcatcaagccagagtggatgatgattcaccgaatcctgaaccatagctttgacaagaagggggatgtgcactacctgatcaagtggaaagacctgccctacgaccagtgcacctgggagatcgatgacatcgacatcccctactacgacaacctcaagcaggcctactggggccacagggagctgatgctgggagaagacaccaggctgcccaagaggctgctcaagaagggcaagaagctgagggacgacaagcaggagaagccgccggacacgcccattgtggaccccacggtcaagttcgacaagcagccatggtacatcgactccacaggcggcacactgcacccgtaccagctggagggcctcaactggctgcgcttctcttgggcccagggcactgacaccatcctggccgatgagatgggtctgggcaagacggtgcagaccatcgtgttcctttactccctctacaaggagggccactccaaagggccctacctggttagcgcgcccctctccaccatcatcaactgggaacgcgagtttgagatgtgggcgcccgacttctacgtggtcacctacacgggggacaaggagagccgctcggtgattcgggagaacgagttttcctttgaggacaacgccattcggagtgggaagaaggtattccgtatgaagaaagaagtgcagatcaaattccacgtgctgctcacctcctatgagctcatcaccattgaccaggccatcctgggctccatcgagtgggcctgcctggtggtagatgaggcccaccgcctcaagaacaaccagtccaagttttttagggtcttaaacagctacaagattgattacaagctgctgctgacagggaccccccttcagaacaacctggaggagctgttccatctcctcaacttcctgactccagagaggttcaacaacctggagggcttcctggaggagtttgctgacatctccaaggaagaccagatcaagaagctgcatgacctgctggggccgcacatgctcaggcggctcaaggctgacgtgttcaagaacatgccggccaagaccgagctcattgtccgggtggagctgagccagatgcagaagaagtactacaagttcatcctcacacggaactttgaggcactgaactccaaggggggcgggaaccaagtatcgctgctcaacatcatgatggacctgaaaaagtgctgcaaccacccctacctcttccctgtggctgccgtggaggcccctgtcttgcccaatggctcctacgatggaagctccctggtcaagtcttcagggaagctcatgctgctacagaagatgctgaagaaactgcgggatgaggggcaccgtgtgctcatcttctcccagatgaccaagatgctggacctcctggaggacttcctggagtacgaaggctacaagtatgagcggattgatggtggcatcaccgggggcctccggcaggaggcaatcgacagattcaatgcccccggggcccagcagttctgcttcctcctctcaacccgggcaggtggtctgggcatcaacctggccacggcggacactgtcatcatctacgactcggactggaacccgcacaatgacatccaggccttcagccgcgcccaccgcatcggccagaacaagaaggtgatgatctaccgcttcgtgactcgggcctcggtggaggagcgcatcacgcaggtggccaagcgcaagatgatgctcacccacctggtggtgcggcccggcctcggctccaagtcggggtccatgaccaagcaggagctggacgacatcctcaagttcggcacggaggaactcttcaaggacgacgtggagggcatgatgtctcagggccagaggccggtcacacccatccctgatgtccagtcctccaaaggggggaacttggccgccagtgcaaagaagaagcacggtagcaccccgccaggtgacaacaaggacgtggaggacagcagtgtgatccactatgacgatgcggccatctccaagctgctggaccggaaccaggacgctacagatgacacggagctacagaacatgaacgagtacctgagctccttcaaggtggcgcagtacgtggtgcgcgaggaggacggcgtggaggaggtggagcgggaaatcatcaagcaggaggagaacgtggaccccgactactgggagaagctgctgcggcaccactatgagcagcagcaggaggacctggcccgcaacctgggcaagggcaagcgcatccgcaagcaggtcaactacaacgatgcctcccaggaggaccaggagtggcaggatgagctctctgataaccagtcagaatattccattggctctgaggatgaggatgaggactttgaagagaggccggaagggcagagtggacgacgacaatcccggaggcagctgaagagtgacagggacaagcccctgcccccgcttctcgcccgagttggtggcaacatcgaggtgctgggcttcaatgcccgacagcggaaggcctttctgaacgccatcatgcgctggggcatgcccccgcaggacgccttcaactcccactggctggtgcgggaccttcgagggaagagcgagaaggagtttagagcctatgtgtccctcttcatgcggcacctgtgtgagccgggggcggatggtgcagagaccttcgcagacggcgtgccccgggagggcctctccaggcagcacgtgctgacccgcatcggggtcatgtcactagttaggaagaaggttcaggagtttgagcatgtcaacgggaagtacagcaccccagacttgatccctgaggggcccgaggggaagaagtcgggcgaggtgatctcctcggaccccaacacaccagtgcccgccagccctgcccacctcctgccagccccgctgggcctgccagacaaaatggaagcccagctgggctacatggatgagaaagaccccggggcacagaagccaaggcagcccctggaagtccaggcccttccagccgccttggatagagtggagagtgaggacaagcacgagagcccagccagcaaggagagagcccgagaggagcggccagaggagacggagaaggccccgccctccccggagcagctgccgagagcgtcttgctctgtcactcaggctggagtgcagtggcgccatctcggctcatgggagcctttatctcctcggctcaagcgaccctcccacctcagcttcctgaacagaggaggtgcttcctgagaaggagaagatcctggacaagctggagctgagcttgatccacagcagaggggacagttccgaactcaggccagatgacaccaaggctgaggagaaggagcccattgaaacacagcaaaatggtgacaaagaggaagatgacgaggggaagaaggaggacaagaaggggaaattcaagttcatgttcaacatcgcggacgggggcttcacggagttgcacacgctgtggcagaacgaggagcgggctgctgtatcctctgggaaaatctacgacatctggcaccggcgccatgactactggctgctggcgggcatcgtgacgcacggctacgcccgctggcaggacatccagaatgacccacggtacatgatcctcaacgagcccttcaagtctgaggtccacaagggcaactacctggagatgaagaacaagttcctggcccgcaggtttaagctgctggagcaggcgttggtcattgaggagcagctccggagggccgcgtacctgaacatgacgcaggaccccaaccaccccgccatggccctcaacgcccgcctggctgaagtggagtgcctcgccgagagccaccagcacctgtccaaggagtcccttgctgggaacaagcctgccaatgccgtcctgcacaaggtcctgaaccagctggaggagctgctgagcgacatgaaggccgacgtgacccggctgccatccatgctgtcccgcatccccccggtggccgcccggctgcagatgtcggagcgcagcatcctgagccgcctgaccaaccgcgccggggaccccaccatccagcagggcgctttcggctcctcccagatgtacagcaacaactttgggcccaacttccggggccctggaccgggagggattgtcaactacaaccagatgcccctggggccctatgtgaccgatatctagccgtcctcgagacttccctgtgttgcagcgctcatttccagctgagccacgcctgccgggccacctgcccgacccacatgggagagaaaagctgccacctttttaggagccagcgccaccttgggacaaaaagggaaacctagtaatgccatcacatggaggacgaggcccagctcagctgggccagagcccagaagtgccacctcatcataattcaagtgttcttccacacagcgttgcccccacaaccacgccggacgtgccccctcgccaccttttccagacgacttcttagaagagatttcatttatttgtacatcttttgcactttcctattgaagacttgaacacgtttgtcttgataaaagttggatgacgtatggaagattcgaacctgcagcactgatgtctctttaccgatgggttccagacccaaggtagtcctggcactgccctgtggactcagcccagctggggaggacatggcgcccggtgccctaggagccctcagtgtcccctacctgacctgtctgcacctgtgtgacagccccttctgatttggccccctgcccgcttggagcctcccagcaccagacagggcaggtttggggagccgctgtccagccctatggtgagaccctggctgacatttcccctccttcctgccaaggctggaggccgccaggtgtttgctctctccttgtggggaggtggatcctctgccagcaggtgtctgtccccggcccagcgcatcttgaaggccctggactctgttaccagtggggggcctgtggccccggctcttcacagcaggcagaagcgtatgatcccagggagggtgggctggggggggggcagcacttgcctcggagccactgctgcgttgggtttgccttctgccagaggtgtggttaagggcagtgatagctgcgccccagcaaggagggtcatgggccctgagctggcccaggagaccctggccctgccctgtgccctgggatgcctaccctgcccacctccggaggtggaaccgggctgcccctgggggcctggacttgtcccattcccctgtccctggaaaggccttcccgggggctttttgcctgaggctgcactcttggaaggcgtggggagagttctgcctggagggggactggacccagtgccctctgcagacccctcccagccgcagcaccaagggcttgctgccttgtttcctgccaggagcgccctgacatcccaaaaccatcttcccacatgtgggttgttggaatcccacccactcccccggaccctgcccctccaagttggggacggagatggggagcaggtcaggccctccctaggcctgtttgtgtgtgatccttctcctggccccaggtcgacctggaaggcgtttctgagtcttgtactgggaccttcccagggaaggtgccttggggtgcagaatcctgggaatgttaggaaagggctgcgtgaaaaacccagctgggcctggggtggaggtgcacacgggctggggctcagctccttggagagggcctgcctgggactgagggggccagggctgggtcaggattcaccagcttgtgttgcagacactggagcgattgcctggccctccctaagccctatatgcctcactcataatgaggctgtctctgaaccccggagggcgggacctacaagtccttcctcttggcgcattcccacactccagtctggatccaggtctgcaaggccagcccgaccctgacactgcacgtgggcgtagtggggagcaccctggagtggagatgattgtcagcgggctcacatgttatggttcatccacatgcgtgttgtgtgctctgcggtgcctcctggcaaagggtcctggctcgggtcagaagctcactcccgtgccctcgtccccaaacaagcagtggcaagcactggggttggccctcgttgggagcagtgcccaccttccttggcccacagcagataggtcccgagcagcaggactggaggcctgtggcggtcagggcaggggtctgtgtctccaccccaagggctgatggtccctcccctgtgcgccttcctctcaggcaggcttgctctgtcccttcctctctgcttccctcccaggcctcgccagggctcccttctcctctgcctggttagactcgggcacccaggaaagcctggccagggctcctttgggcctgggccccctgcactgcctggtccagaaggggtggtgctgtccgtggccagcaccccggggcccgggaggggtgggctactagagtcagagcgggtttggggctgaccagtttgggagaggagaaaagatctgagaatgtccttcttggtttgtcagtcatctctgccaaaagtggtgatggtggtgtccgtatgtttggcgtctttgggctgggtttggtttttgctgctggtagaatcagggtcctcgggcatgaacgcgagcccaaagtgccagtctgcgattggaaatttccagccactttaagccagtgctgagtagggcttctgcagagccatgtttgagccaaggtcttggaaggcattgccccatgggctcaggtgactcggggtggagtgagcacgtctgcagggccctctcatacacgcctgaggcagaagcagcgtcccccgtgaaagccaccttccgaagctcctgcgttttttgcaaacttggcttcccccaggggcaggctggactttccctgccccctatgattgaagtcctcctgcttttgggggctgccttcccagagtcccccgggtgctcccctgccgaggtcaggagctgaccaagccttggcccggtgacacctgcagccctcactcctgtcatcccaggacacttgaggcccaaggaggtggagtggagagtgggctcgggtacatgggagccagaagccagatggacttggtcaagtgtcggtcacttggagcctccagtgtgcgtcagggtctgtgggcaggggacagggcgtgggtgggggccgaggctggcacgcccctctgccctcaccgtcttggtgacctggcctcggcccctcccccaagtctcttctgtgcaaggcccgcctcggcctcggcagctggttcctgtcctgttttctgtgtctgaaagtttacaggttgtggtgcatcagcccaaactcactggcgttgtgttttttttttctttaattttcagattttttttttaaacaaagtatttttttaggtgcgataacccagaaagggcccgttgggtgtgtgtgtgtgtcctgaactcctcaagcagcgattggagcccaagcacccctggagaggaagggagggtccccactggcccgtggggtctgagttcaggggtgtggagggagcagactccaccggcccaggcccagctaagagggggccgacccctttccccaggcacagccccaggctggcaaagggagggccctgggctgggtgcaaggcgcgccaggagtcccagccagggtggccccggcgggggcgggtccagctttggaagccaggctcccctgtgagccgtggcttgtctggtcttcgcccacgggaggctggacagaggctgtagccaacacaatcacctttactttgtactctgtgtgtatgttttggttttctgtgttttaataaatcctttgggaaagg

SEQ ID NO: 5888 - DNA, 10446 bp, Homo sapiens
  source 1..10446: mol_type = unassigned DNA
cggcggcggcggcagcggcggcggcggcggcggcgcgggggttgagtcgtggtggtgcggacgcgctcgtgctcgggaactatcggattaaacttgaatcgagtgaaattacacaaaggagcgccgcggaggaggcggcccggggacccggacaccctgaaactcaccagagacccgttcgcccccggccaactccgtgcccgtggattcagccccctggccgcagctgccgagccaactccggagcccgctctgcgttttgttttcccctcggcactaggcagcggaggagcccgaccgacccggacctatatccagactttgcctgacactgcagggtccaagagaattaaagaaatatggaatgacatgaagaagattagttaaggattataggctttgagggcaaacacctcagtgaagtgaagcacaggcaagctcctgagctgtggtttggaggagccgtgtgttggaagaagatggcagatccaggaatgatgagtctttttggcgaggatgggaatattttcagtgaaggtcttgaaggcctcggagaatgtggttacccggaaaatccagtaaatcctatgggtcagcaaatgccaatagaccaaggctttgcctctttacagccatcccttcatcatccttcaactaatcaaaatcaaacaaagctgacacattttgatcactataatcagtatgaacaacaaaagatgcatctgatggatcagccgaacagaatgatgagcaacacccctgggaacggactcgcgtctccgcactcgcagtatcacacccctcccgttcctcaggtgccccatggtggcagtggtggcggtcagatgggtgtctaccctggcatgcagaatgagaggcatgggcaatcctttgtggacagcagctccatgtggggccccagggctgttcaggtaccagaccagatacgagccccctaccagcagcagcagccacagccgcagccaccgcagccggctccgtcggggccccctgcacagggccaccctcagcacatgcagcagatgggcagctatatggcacgtggggatttttccatgcagcagcatggtcagccacagcagaggatgagccagttttcccaaggccaagagggcctcaatcagggaaatccttttattgccacctcaggacctggccacttgtcccacgtgccccagcagagtcccagcatggcaccttccttgcgtcactcggtgcagcagttccatcaccacccctctactgctctccatggagaatccgttgcccacagtcccagattctccccgaatcctccccaacaaggggctgttaggccgcaaacccttaactttagttctcggagccagacagtcccctctcctactataaacaactcagggcagtattctcgatatccttacagtaacctaaatcagggattagttaacaatacagggatgaatcaaaatttaggccttacaaataatactccaatgaatcagtccgtaccaagataccccaatgctgtaggattcccatcaaacagtggtcaaggactaatgcaccagcagcccatccaccccagtggctcacttaaccaaatgaacacacaaactatgcatccttcacagcctcagggaacttatgcctctccacctcccatgtcacccatgaaagcaatgagtaatccagcaggcactcctcctccacaagtcaggccgggaagtgctgggataccaatggaagttggcagttatccaaatatgccccatcctcagccatctcaccagccccctggtgccatgggaatcggacagaggaatatgggccccagaaacatgcagcagtctcgtccatttataggcatgtcctcggcaccaagggaattgactgggcacatgaggccaaatggttgtcctggtgttggccttggagacccacaagcaatccaggaacgactgatacctggccaacaacatcctggtcaacagccatcttttcagcagttgccaacctgtcctccactgcagcctcacccgggcttgcaccaccagtcttcacctccacaccctcatcaccagccttgggcacagctccacccatcaccccagaacaccccgcagaaagtgcctgtgcatcagcattccccgtcggagccctttctagagaaaccagtgccggatatgactcaggttagtggaccgaatgctcagctagtgaagagtgatgattacctgccatcaatagaacagcagccacaacaaaagaagaagaaaaagaaaaacaaccacattgtagcagaggatcccagtaaaggttttggtaaagatgacttccctggtggggtagataaccaagaactaaataggaactcactggatgggtcccaagaagaaaaaaagaaaaagaaaaggtcaaaggcaaaaaaagacccgaaggaaccgaaagaacccaaggagaaaaaagagcccaaggaacccaagaccccgaaagcccctaagattcccaaagagccaaaggaaaagaaagcaaaaactgccacgccaaaacccaaatccagcaaaaagtcaagtaataagaaacctgactcagaagcaagtgctttgaagaaaaaggtcaacaagggaaaaacagaaggttctgaaaattcagacttagacaaaacacccccaccatctcctcctcctgaagaagatgaggacccaggtgttcagaagagacggtccagcagacaggtgaagagaaagcgctacactgaagacctggagttcaagatttctgatgaggaggcagatgatgcagatgctgctgggagggattccccctccaacacctcccagtcagaacagcaggaatctgttgatgcagaaggcccagtggtagaaaaaattatgagcagtcgttcagtaaaaaagcagaaggaatctggagaggaggtagaaattgaggaattctatgtgaaatacaaaaacttctcttatcttcattgtcagtgggcatctatagaagatctggaaaaagataagagaattcagcaaaaaattaaacgatttaaggcaaagcagggccagaacaagttcctttcagagattgaggatgagctttttaatccagattatgtggaggttgaccggataatggactttgcacgtagcacagatgaccggggagagcctgtgactcactatctggtgaagtggtgttcacttccttatgaagacagcacgtgggagcggaggcaggacatagatcaagcaaagatcgaggagtttgagaaactaatgtccagggagccggaaacagagcgtgtggagcgacctcctgctgatgattggaagaaatcggagagttccagggagtataaaaacaataacaaactcagggaataccagttggagggagtaaactggctacttttcaattggtacaacatgcgaaactgcattttagcagatgaaatgggtttgggaaaaactatccagtccattacatttctctatgagatatatttgaaaggaatccatggcccttttttagtaattgccccattgtccacaatccccaactgggaaagggaattccgaacctggacagagttgaacgtggttgtgtatcatgggagtcaagctagtcgtcggaccattcagttgtatgaaatgtacttcaaagatccccagggtcgagtgataaaggggtcctataagtttcatgccatcatcactacatttgagatgattttgactgattgtcctgagctgcggaatattccatggcgctgtgtagtcattgatgaagcccacaggctgaagaacaggaactgcaagctgttggagggactcaagatgatggacttggaacacaaagtgctgctgacgggaaccccactccagaacactgtggaagaactcttcagcttgcttcatttcttggaaccaagtcgcttcccttcagaaaccacatttatgcaagaatttggtgatctaaaaacagaagagcaggtgcaaaaacttcaagctattctaaagccaatgatgttgagacgtctcaaagaggatgtagaaaagaacttggcccccaaagaagaaactattattgaagttgagctaacaaacattcagaagaaatattaccgagccatccttgagaagaatttcacatttctttccaaaggcggtggtcaagctaacgtacctaacctattaaacactatgatggaattgcggaagtgctgcaatcatccgtaccttatcaatggtgctgaagagaaaattttggaagagtttaaagaaacacacaatgcagagtctccagattttcagctccaggcaatgatccaggctgctggcaagctagtgctgattgacaagctgctgccaaaactgaaggctggtggccacagggtgcttatcttttcccagatggtgcgctgcttggacatactggaagactacctcattcaaagacggtacccatatgaaaggatcgacggccgagtaagaggcaacctccgccaggcagctatcgacagattctccaaacctgattctgataggtttgttttcctcctgtgtacaagggcaggaggtttaggcattaacctcactgctgctgatacctgcatcatctttgattcagactggaatccccaaaatgacctccaggctcaggctagatgtcatagaataggacagagcaaatctgtgaaaatctacaggctgattacaagaaattcctatgaaagggaaatgttcgacaaggctagtttgaaactgggcctggataaagctgtgctacagtctatgagtggaagagaaaatgctaccaatggggtacaacagctttccaagaaagaaatagaggatcttctacgaaaaggggcctatggtgcactcatggatgaggaggatgaagggtctaaattctgtgaagaagatattgatcagatcctcctacgtcgaacccacaccattaccattgagtcagaagggaaaggttccacatttgctaaggccagttttgttgcatctggaaataggacagatatttccttggatgatccaaatttctggcaaaagtgggctaagaaggctgaattggatattgatgccttaaatgggaggaacaacctggttattgatactccaagagtgagaaagcagaccaggctctacagtgcagtgaaggaagatgagctgatggagttctcagacttggaaagtgattctgaagaaaagccctgtgcaaagccacggcgtccccaggataagtcacagggctatgcaaggagtgaatgtttcagggtggagaagaatctgcttgtctatggttggggacggtggacagacattctttcccacggacgctataaacgccaactcactgagcaagatgtagaaaccatctgcagaaccatcctggtgtactgtcttaatcattacaaaggggatgagaatatcaaaagcttcatctgggatctgatcacacccacagcggatggccagactcgagccttggtcaaccattccggtttgtcagctcctgtgccaaggggaaggaagggaaagaaggtgaaagcccagagcacacagccggtggtgcaggatgccgactggctggccagctgcaacccagatgccctgttccaggaggacagctacaagaaacacctgaagcatcactgtaacaaggtcctgctgcgtgtccgcatgctgtactacctaagacaagaagtgataggagaccaggcggataagatcttagagggtgctgactcaagtgaagccgatgtgtggatccctgaacctttccatgctgaagttcctgcagattggtgggataaggaagcagacaaatccctcttaattggagtgttcaaacatggctatgagaagtacaactccatgcgagctgaccccgcgctgtgctttctggaacgagtcggtatgcctgatgccaaggccatagctgccgagcaaagaggaacagacatgctagcagatggtggtgacgggggagaatttgatagagaagatgaagacccagaatataaaccaaccagaacaccgttcaaagatgaaatagatgaatttgcaaattctccttcagaggataaggaagaatccatggaaatacatgccacaggtaagcacagtgagagtaatgctgagttaggccaactttactggcctaacacttcaaccctgactacacgtctgcgccggctcattactgcctatcagcgcagctataaaaggcaacagatgaggcaagaggccctaatgaagactgaccggcgcagacggcggcctcgagaggaagtgagagctctggaagcggaaagggaagctattatatctgagaagcggcaaaagtggacaagaagagaagaggctgatttttaccgtgtggtatccacctttggggttatttttgaccctgtgaaacagcaatttgactggaaccaatttagagcctttgccaggcttgacaaaaaatctgatgagagtttggagaaatacttcagttgttttgtggccatgtgtaggcgagtatgtcgaatgcccgtcaagccagatgatgaaccgcccgacctctcctccataattgagccgatcacagaggagcgagcctctcgaactctgtaccgcattgagctgctacggaagatccgcgagcaggttctccatcacccccagctgggagagaggcttaagctctgccagccaagcttggatctgccagagtggtgggagtgtggacggcatgaccgagacttgctggttggtgctgctaaacacggggtcagtcggacggattatcacatcctcaatgaccctgagttatccttcttggatgcacataaaaactttgctcaaaacagaggggcaggtaatacatcttccttgaacccactggcagttggatttgtccagactcctccagtcatctcatctgctcatattcaagatgagagggtactggaacaagccgaaggcaaagtggaggagcctgaaaacccagctgccaaggagaaatgtgagggcaaagaagaggaagaagaaaccgatggcagcgggaaggagagcaagcaggaatgtgaggcagaggccagctctgtgaaaaatgaactgaaaggtgttgaggtcggcgcagacactgggtccaaatctatttcagagaaaggttccgaagaggatgaagaggaaaagctggaggatgacgataagtcggaagagtcttcccagcccgaagcaggagctgtctctagagggaagaattttgatgaagaaagcaatgcttccatgagcactgctagagatgaaacccgagatggattctacatggaggacggagatccttcagtagctcagctccttcatgaaagaacatttgccttctcgttttggcctaaggatagagtaatgataaaccgcttagacaacatctgtgaagcagtgttgaaaggcaaatggccagtaaataggcgccagatgtttgatttccaaggcctcatcccaggttacacacccaccacagtggacagccccttgcagaagaggagctttgctgagctctccatggtcggccaagccagcattagtgggagtgaggacatcactacgtctcctcagttgtcaaaggaagatgccctcaacctctctgtccctcgccagcggaggaggaggaggagaaaaatcgaaattgaggccgaaagagctgccaagaggcgaaatctcatggagatggttgcccagcttcgagagtctcaggtggtctcagaaaatggacaagaaaaagttgtagatttatcaaaggcctcaagagaggcaacaagctctacctcaaatttttcatctctttcttcaaagtttatcttgcctaatgtctcaacaccagtgtctgatgcctttaagactcaaatggaactgctccaagcaggcctttcgcgcacacccacaaggcatctccttaatggctccctagtggatggagagcctcccatgaagaggaggcggggaaggaggaaaaatgtggagggacttgatctgcttttcatgagccacaaacggacgtcattgagtgcagaggatgctgaggtgaccaaagcttttgaagaagatatagagaccccaccaacaagaaacattccttctcccggacagctggacccagacacacggatccctgttatcaatcttgaagatgggactaggctggtgggggaagatgctcctaaaaataaggatttagttgaatggctgaagctgcaccctacttacactgttgatatgccaagttatgtaccaaagaatgcagatgtgctgttttcctcatttcagaaaccgaaacagaaacgacatagatgtcgaaaccctaataaattggatataaacactttgacaggagaagaaagggtgcctgttgtcaataaacgaaatgggaagaagatgggtggagctatggcgcctccaatgaaggatctacccaggtggctggaagaaaatcctgaatttgcagttgctccagactggactgatatagttaagcagtctggttttgttcctgagtcgatgtttgaccgccttctcactgggcctgtagtgcggggagagggagcgagcagaagaggaagaaggcccaaaagtgagatcgccagagcagccgcggccgccgctgctgtggcctccacgtcagggatcaaccctttgctggtgaacagcctgtttgctggaatggacctgacgagccttcagaatctccagaatctccagtcgctccagctggcaggcctcatgggcttccctccaggactggcaacagctgccaccgccggaggcgatgcgaagaaccctgctgctgtgctgcccctgatgctgccaggaatggcgggcctgcccaacgtgtttggcttgggcgggctgttgaataaccctctgtcagctgctactggaaacaccactactgcttctagtcaaggagaaccggaagacagcacttcaaaaggagaggagaaaggaaatgagaatgaagacgagaacaaagactctgagaaaagcacagatgctgtttcggctgctgactctgcgaatggatctgttggtgctgctactgccccggctggattgccctcaaacccgctagccttcaaccctttcctcctgtccacaatggccccgggcctcttctacccatccatgtttctacctccaggactggggggattgacgctgcctgggttcccagcattggcaggacttcagaatgccgtgggctccagcgaagaaaaggctgctgacaaggctgagggaggaccctttaaagatggagagacccttgaaggcagcgatgccgaggagagcctggataagactgcagagtcctccctcttagaagacgaaatagcacagggtgaagagctagactcacttgatgggggggatgaaatagaaaacaatgaaaatgatgaataaccagtaccagttccagttcaagtgtttaaaacttttgacaagtggtagtcctactgtttacactcacagttaatgttcatacctagttttataagctgttctgtaacatagtgtagcaaaaaaaaaagttcaagtcatgttatacaggtgtgtcaaaaggtatcttggtcattaagtattgtgcagtgcattatttattatccctaggagagatgaaatttgagaggtgatcatgtctttttaaggaaacttacataatgctctgctttttttttttctcttggtaccattggtattataataaagagcaatttgtaactgagtggcactaatggaagaaagtgctgctcaaaggaagtatgaagttatatatttaattttttaattttaatttttaatttttttgctgtgaaggtcaagctgaaatttaccatacatatcatacttgctcatttgtttccctttttgactgtatgggggttcccacactcgtgcatacacacacatccatacactctgacaatctccacgctagtgtgaacgcctctgtcccgaggcgcagcaataataaggcagctgttgaatgtgaagggtccctttggaaaattaacctactgggagggttcttgccagacagaactacagttccattgtctcgtggtcttgtaatgcactggtaaaaacaaaataaatagatgaataaataaagagtgagagaagagagaatcaggtaccttttttaaattaaaggactttgttactttagccacaaagctaaaacagcattacctcagctctaaactagccttgaagtttacagacatgactttgtaaatgtattgtttttctttgttgtgatgtccttttatttttttctttgaaaactgctatcatgtaagataaaatgtaaattgctgccaactgtagtaatgatgcttttaataaaagtgacccatgatatgcagagatgtaa

SEQ ID NO: 5889 - DNA, 10442 bp, Homo sapiens
  source 1..10442: mol_type = unassigned DNA
gcggcggcggcagcggcggcggcggcggcggcgcgggggttgagtcgtggtggtgcggacgcgctcgtgctcgggaactatcggattaaacttgaatcgagtgaaattacacaaaggagcgccgcggaggaggcggcccggggacccggacaccctgaaactcaccagagacccgttcgcccccggccaactccgtgcccgtggattcagccccctggccgcagctgccgagccaactccggagcccgctctgcgttttgttttcccctcggcactaggcagcggaggagcccgaccgacccggacctatatccagactttgcctgacactgcagggtccaagagaattaaagaaatatggaatgacatgaagaagattagttaaggattataggctttgagggcaaacacctcagtgaagtgaagcacaggcaagctcctgagctgtggtttggaggagccgtgtgttggaagaagatggcagatccaggaatgatgagtctttttggcgaggatgggaatattttcagtgaaggtcttgaaggcctcggagaatgtggttacccggaaaatccagtaaatcctatgggtcagcaaatgccaatagaccaaggctttgcctctttacagccatcccttcatcatccttcaactaatcaaaatcaaacaaagctgacacattttgatcactataatcagtatgaacaacaaaagatgcatctgatggatcagccgaacagaatgatgagcaacacccctgggaacggactcgcgtctccgcactcgcagtatcacacccctcccgttcctcaggtgccccatggtggcagtggtggcggtcagatgggtgtctaccctggcatgcagaatgagaggcatgggcaatcctttgtggacagcagctccatgtggggccccagggctgttcaggtaccagaccagatacgagccccctaccagcagcagcagccacagccgcagccaccgcagccggctccgtcggggccccctgcacagggccaccctcagcacatgcagcagatgggcagctatatggcacgtggggatttttccatgcagcagcatggtcagccacagcagaggatgagccagttttcccaaggccaagagggcctcaatcagggaaatccttttattgccacctcaggacctggccacttgtcccacgtgccccagcagagtcccagcatggcaccttccttgcgtcactcggtgcagcagttccatcaccacccctctactgctctccatggagaatccgttgcccacagtcccagattctccccgaatcctccccaacaaggggctgttaggccgcaaacccttaactttagttctcggagccagacagtcccctctcctactataaacaactcagggcagtattctcgatatccttacagtaacctaaatcagggattagttaacaatacagggatgaatcaaaatttaggccttacaaataatactccaatgaatcagtccgtaccaagataccccaatgctgtaggattcccatcaaacagtggtcaaggactaatgcaccagcagcccatccaccccagtggctcacttaaccaaatgaacacacaaactatgcatccttcacagcctcagggaacttatgcctctccacctcccatgtcacccatgaaagcaatgagtaatccagcaggcactcctcctccacaagtcaggccgggaagtgctgggataccaatggaagttggcagttatccaaatatgccccatcctcagccatctcaccagccccctggtgccatgggaatcggacagaggaatatgggccccagaaacatgcagcagtctcgtccatttataggcatgtcctcggcaccaagggaattgactgggcacatgaggccaaatggttgtcctggtgttggccttggagacccacaagcaatccaggaacgactgatacctggccaacaacatcctggtcaacagccatcttttcagcagttgccaacctgtcctccactgcagcctcacccgggcttgcaccaccagtcttcacctccacaccctcatcaccagccttgggcacagctccacccatcaccccagaacaccccgcagaaagtgcctgtgcatcagcattccccgtcggagccctttctagagaaaccagtgccggatatgactcaggttagtggaccgaatgctcagctagtgaagagtgatgattacctgccatcaatagaacagcagccacaacaaaagaagaagaaaaagaaaaacaaccacattgtagcagaggatcccagtaaaggttttggtaaagatgacttccctggtggggtagataaccaagaactaaataggaactcactggatgggtcccaagaagaaaaaaagaaaaagaaaaggtcaaaggcaaaaaaagacccgaaggaaccgaaagaacccaaggagaaaaaagagcccaaggaacccaagaccccgaaagcccctaagattcccaaagagccaaaggaaaagaaagcaaaaactgccacgccaaaacccaaatccagcaaaaagtcaagtaataagaaacctgactcagaagcaagtgctttgaagaaaaaggtcaacaagggaaaaacagaaggttctgaaaattcagacttagacaaaacacccccaccatctcctcctcctgaagaagatgaggacccaggtgttcagaagagacggtccagcagacaggtgaagagaaagcgctacactgaagacctggagttcaagatttctgatgaggaggcagatgatgcagatgctgctgggagggattccccctccaacacctcccagtcagaacagcaggaatctgttgatgcagaaggcccagtggtagaaaaaattatgagcagtcgttcagtaaaaaagcagaaggaatctggagaggaggtagaaattgaggaattctatgtgaaatacaaaaacttctcttatcttcattgtcagtgggcatctatagaagatctggaaaaagataagagaattcagcaaaaaattaaacgatttaaggcaaagcagggccagaacaagttcctttcagagattgaggatgagctttttaatccagattatgtggaggttgaccggataatggactttgcacgtagcacagatgaccggggagagcctgtgactcactatctggtgaagtggtgttcacttccttatgaagacagcacgtgggagcggaggcaggacatagatcaagcaaagatcgaggagtttgagaaactaatgtccagggagccggaaacagagcgtgtggagcgacctcctgctgatgattggaagaaatcggagagttccagggagtataaaaacaataacaaactcagggaataccagttggagggagtaaactggctacttttcaattggtacaacatgcgaaactgcattttagcagatgaaatgggtttgggaaaaactatccagtccattacatttctctatgagatatatttgaaaggaatccatggcccttttttagtaattgccccattgtccacaatccccaactgggaaagggaattccgaacctggacagagttgaacgtggttgtgtatcatgggagtcaagctagtcgtcggaccattcagttgtatgaaatgtacttcaaagatccccagggtcgagtgataaaggggtcctataagtttcatgccatcatcactacatttgagatgattttgactgattgtcctgagctgcggaatattccatggcgctgtgtagtcattgatgaagcccacaggctgaagaacaggaactgcaagctgttggagggactcaagatgatggacttggaacacaaagtgctgctgacgggaaccccactccagaacactgtggaagaactcttcagcttgcttcatttcttggaaccaagtcgcttcccttcagaaaccacatttatgcaagaatttggtgatctaaaaacagaagagcaggtgcaaaaacttcaagctattctaaagccaatgatgttgagacgtctcaaagaggatgtagaaaagaacttggcccccaaagaagaaactattattgaagttgagctaacaaacattcagaagaaatattaccgagccatccttgagaagaatttcacatttctttccaaaggcggtggtcaagctaacgtacctaacctattaaacactatgatggaattgcggaagtgctgcaatcatccgtaccttatcaatggtgctgaagagaaaattttggaagagtttaaagaaacacacaatgcagagtctccagattttcagctccaggcaatgatccaggctgctggcaagctagtgctgattgacaagctgctgccaaaactgaaggctggtggccacagggtgcttatcttttcccagatggtgcgctgcttggacatactggaagactacctcattcaaagacggtacccatatgaaaggatcgacggccgagtaagaggcaacctccgccaggcagctatcgacagattctccaaacctgattctgataggtttgttttcctcctgtgtacaagggcaggaggtttaggcattaacctcactgctgctgatacctgcatcatctttgattcagactggaatccccaaaatgacctccaggctcaggctagatgtcatagaataggacagagcaaatctgtgaaaatctacaggctgattacaagaaattcctatgaaagggaaatgttcgacaaggctagtttgaaactgggcctggataaagctgtgctacagtctatgagtggaagagaaaatgctaccaatggggtacaacagctttccaagaaagaaatagaggatcttctacgaaaaggggcctatggtgcactcatggatgaggaggatgaagggtctaaattctgtgaagaagatattgatcagatcctcctacgtcgaacccacaccattaccattgagtcagaagggaaaggttccacatttgctaaggccagttttgttgcatctggaaataggacagatatttccttggatgatccaaatttctggcaaaagtgggctaagaaggctgaattggatattgatgccttaaatgggaggaacaacctggttattgatactccaagagtgagaaagcagaccaggctctacagtgcagtgaaggaagatgagctgatggagttctcagacttggaaagtgattctgaagaaaagccctgtgcaaagccacggcgtccccaggataagtcacagggctatgcaaggagtgaatgtttcagggtggagaagaatctgcttgtctatggttggggacggtggacagacattctttcccacggacgctataaacgccaactcactgagcaagatgtagaaaccatctgcagaaccatcctggtgtactgtcttaatcattacaaaggggatgagaatatcaaaagcttcatctgggatctgatcacacccacagcggatggccagactcgagccttggtcaaccattccggtttgtcagctcctgtgccaaggggaaggaagggaaagaaggtgaaagcccagagcacacagccggtggtgcaggatgccgactggctggccagctgcaacccagatgccctgttccaggaggacagctacaagaaacacctgaagcatcactgtaacaaggtcctgctgcgtgtccgcatgctgtactacctaagacaagaagtgataggagaccaggcggataagatcttagagggtgctgactcaagtgaagccgatgtgtggatccctgaacctttccatgctgaagttcctgcagattggtgggataaggaagcagacaaatccctcttaattggagtgttcaaacatggctatgagaagtacaactccatgcgagctgaccccgcgctgtgctttctggaacgagtcggtatgcctgatgccaaggccatagctgccgagcaaagaggaacagacatgctagcagatggtggtgacgggggagaatttgatagagaagatgaagacccagaatataaaccaaccagaacaccgttcaaagatgaaatagatgaatttgcaaattctccttcagaggataaggaagaatccatggaaatacatgccacaggcaagcacagtgagagtaatgctgagttaggccaactttactggcctaacacttcaaccctgactacacgtctgcgccggctcattactgcctatcagcgcagctataaaaggcaacagatgaggcaagaggccctaatgaagactgaccggcgcagacggcggcctcgagaggaagtgagagctctggaagcggaaagggaagctattatatctgagaagcggcaaaagtggacaagaagagaagaggctgatttttaccgtgtggtatccacctttggggttatttttgaccctgtgaaacagcaatttgactggaaccaatttagagcctttgccaggcttgacaaaaaatctgatgagagtttggagaaatacttcagttgttttgtggccatgtgtaggcgagtatgtcgaatgcccgtcaagccagatgatgaaccgcccgacctctcctccataattgagccgatcacagaggagcgagcctctcgaactctgtaccgcattgagctgctacggaagatccgcgagcaggttctccatcacccccagctgggagagaggcttaagctctgccagccaagcttggatctgccagagtggtgggagtgtggacggcatgaccgagacttgctggttggtgctgctaaacacggggtcagtcggacggattatcacatcctcaatgaccctgagttatccttcttggatgcacataaaaactttgctcaaaacagaggggcaggtaatacatcttccttgaacccactggcagttggatttgtccagactcctccagtcatctcatctgctcatattcaagatgagagggtactggaacaagccgaaggcaaagtggaggagcctgaaaacccagctgccaaggagaaatgtgagggcaaagaagaggaagaagaaaccgatggcagcgggaaggagagcaagcaggaatgtgaggcagaggccagctctgtgaaaaatgaactgaaaggtgttgaggtcggcgcagacactgggtccaaatctatttcagagaaaggttccgaagaggatgaagaggaaaagctggaggatgacgataagtcggaagagtcttcccagcccgaagcaggagctgtctctagagggaagaattttgatgaagaaagcaatgcttccatgagcactgctagagatgaaacccgagatggattctacatggaggacggagatccttcagtagctcagctccttcatgaaagaacatttgccttctcgttttggcctaaggatagagtaatgataaaccgcttagacaacatctgtgaagcagtgttgaaaggcaaatggccagtaaataggcgccagatgtttgatttccaaggcctcatcccaggttacacacccaccacagtggacagccccttgcagaagaggagctttgctgagctctccatggtcggccaagccagcattagtgggagtgaggacatcactacgtctcctcagttgtcaaaggaagatgccctcaacctctctgtccctcgccagcggaggaggaggaggagaaaaatcgaaattgaggccgaaagagctgccaagaggcgaaatctcatggagatggttgcccagcttcgagagtctcaggtggtctcagaaaatggacaagaaaaagttgtagatttatcaaaggcctcaagagaggcaacaagctctacctcaaatttttcatctctttcttcaaagtttatcttgcctaatgtctcaacaccagtgtctgatgcctttaagactcaaatggaactgctccaagcaggcctttcgcgcacacccacaaggcatctccttaatggctccctagtggatggagagcctcccatgaagaggaggcggggaaggaggaaaaatgtggagggacttgatctgcttttcatgagccacaaacggacgtcattgagtgcagaggatgctgaggtgaccaaagcttttgaagaagatatagagaccccaccaacaagaaacattccttctcccggacagctggacccagacacacggatccctgttatcaatcttgaagatgggactaggctggtgggggaagatgctcctaaaaataaggatttagttgaatggctgaagctgcaccctacttacactgttgatatgccaagttatgtaccaaagaatgcagatgtgctgttttcctcatttcagaaaccgaaacagaaacgacatagatgtcgaaaccctaataaattggatataaacactttgacaggagaagaaagggtgcctgttgtcaataaacgaaatgggaagaagatgggtggagctatggcgcctccaatgaaggatctacccaggtggctggaagaaaatcctgaatttgcagttgctccagactggactgatatagttaagcagtctggttttgttcctgagtcgatgtttgaccgccttctcactgggcctgtagtgcggggagagggagcgagcagaagaggaagaaggcccaaaagtgagatcgccagagcagccgcggccgccgctgctgtggcctccacgtcagggatcaaccctttgctggtgaacagcctgtttgctggaatggacctgacgagccttcagaatctccagaatctccagtcgctccagctggcaggcctcatgggcttccctccaggactggcaacagctgccaccgccggaggcgatgcgaagaaccctgctgctgtgctgcccctgatgctgccaggaatggcgggcctgcccaacgtgtttggcttgggcgggctgttgaataaccctctgtcagctgctactggaaacaccactactgcttctagtcaaggagaaccggaagacagcacttcaaaaggagaggagaaaggaaatgagaatgaagacgagaacaaagactctgagaaaagcacagatgctgtttcggctgctgactctgcgaatggatctgttggtgctgctactgccccggctggattgccctcaaacccgctagccttcaaccctttcctcctgtccacaatggccccgggcctcttctacccatccatgtttctacctccaggactggggggattgacgctgcctgggttcccagcattggcaggacttcagaatgccgtgggctccagcgaagaaaaggctgctgacaaggctgagggaggaccctttaaagatggagagacccttgaaggcagcgatgccgaggagagcctggataagactgcagagtcctccctcttagaagacgaaatagcacagggtgaagagctagactcacttgatgggggggatgaaatagaaaacaatgaaaatgatgaataaccagtaccagttccagttcaagtgtttaaaacttttgacaagtggtagtcctactgtttacactcacagttaatgttcatacctagttttataagctgttctgtaacatagtgtagcaaaaaaaaaagttcaagtcatgttatacaggtgtgtcaaaaggtatcttggtcattaagtattgtgcagtgcattatttattatccctaggagagatgaaatttgagaggtgatcatgtctttttaaggaaacttacataatgctctgctttttttttttctcttggtaccattggtattataataaagagcaatttgtaactgagtggcactaatggaagaaagtgctgctcaaaggaagtatgaagttatatatttaattttttaattttaatttttaatttttttgctgtgaaggtcaagctgaaatttaccatacatatcatacttgctcatttgtttccctttttgactgtatgggggttcccacactcgtgcatacacacacatccatacactctgacaatctccacgctagtgtgaacgcctctgtcccgaggcgcagcaataataaggcagctgttgaatgtgaagggtccctttggaaaattaacctactgggagggttcttgccagacagaactacagttccattgtctcgtggtcttgtaatgcactggtaaaaacaaaataaatagatgaataaataaagagtgagagaagagagaatcaggtaccttttttaaattaaaggactttgttactttagccacaaagctaaaacagcattacctcagctctaaactagccttgaagtttacagacatgactttgtaaatgtattgtttttctttgttgtgatgtccttttatttttttctttgaaaactgctatcatgtaagataaaatgtaaattgctgccaactgtagtaatgatgcttttaataaaagtgacccatgatatgcagagatgt

SEQ ID NO: 5890 - DNA, 500 bp, Homo sapiens
  source 1..500: mol_type = unassigned DNA
ttgggctccaactcaagtgcgagcgggcgatgggcgcgcgggcgcggggcggctgagcagcggcggcggcggctcggggacggcggcgacccccgcctcccgcccccgccccccgctccggaccgaccacgccgcgctcgccgggagctgcggccgcaccggcgcgaacaaagtgcgttcctcccggcgcggcggcgccagcccgcgcggggaccgccaccgagcgaggacctatatccagactttgcctgacactgcagggtccaagagaattaaagaaatatggaatgacatgaagaagattagttaaggattataggctttgagggcaaacacctcagtgaagtgaagcacaggcaagctcctgagctgtggtttggaggagccgtgtgttggaagaagatggcagatccaggaatgatgagtctttttggcgaggatgggaatattttcagtgaaggtcttgaaggcctcggagaatgtggttacccggaaaatcc

SEQ ID NO: 5891 - DNA, 7324 bp, Homo sapiens
  source 1..7324: mol_type = unassigned DNA
aaaggtgaatcgaaacgcatcaccctggtcctccagcagccacagtctggaggtccccaaggacatcggcatgttgtgctagggagtctaccaggcaagatagtgttacagggcaaccagctggcagccctgactcaagccaagaatgcccaagggcagcctgccaaggtagtaactatccagctgcaggtgcagcagccacagcaaaaaatccagattgtaccacaaccaccatcatcgcagccacagccccagcagccaccctccacccagccagtgactctgtcctctgtacagcaggctcagataatgggaccaggacaaagcccaggacaaagactttcagtaccagtcaaggtggtactgcagccacaggctggctcttcccaaggggcctcttctgggctctctgtagttaaagttctgagtgccagtgaagtggcagctttgtcatcaccagcaagctctgctcctcattcggggggaaagacaggaatggaggaaaaccgcagattggaacaccagaagaagcaagagaaagcaaatcggattgtagcagaggccattgcgagagcccgtgcccgcggtgagcagaacatacctcgagtcttaaatgaggacgagttgcccagcgttcggccagaggaggaaggcgagaagaaacgcaggaagaagagtgctggggagaggctgaaagaggagaagccaaagaagagtaaaacatctggtgcctccaaaacaaagggcaagagcaagctcaacaccatcactcctgtagtgggtaagaagagaaaacgtaatacctcatctgataattcagatgtggaagtcatgcctgcacagtcacctcgagaagatgaagaaagcagcattcagaagagacgctcaaaccgccaagttaagcgaaaaaaatatacagaggacctggatataaagatcacagatgatgaagaagaagaagaggtggatgtaactggtccaataaaacctgagcctatcctccctgaaccagtgcaagaaccagatggcgagactttgccttccatgcagttctttgtggagaatcccagtgaagaagatgcagccattgtagacaaagtgctttctatgcggattgtgaagaaggagctcccttctggacaatatactgaagcagaagaattctttgtcaagtacaagaactactcctatctgcattgtgaatgggctactatctcccaactagagaaggataagaggatacatcaaaaattaaagcgcttcaaaaccaaaatggctcagatgagacacttcttccatgaggatgaagagccctttaatccagactacgtagaggtggataggatattggatgagtctcacagtattgacaaggacaatggggagcccgttatttactacctggtgaaatggtgctctctgccctatgaggatagcacatgggagctaaaagaagatgttgatgagggcaagattcgagaatttaaacggattcagtcaaggcacccagaactcaaaagggtgaatcgtccgcaggcaagtgcctggaagaaattggagctatcacatgaatataaaaacagaaaccagctacgggaatatcagttggaaggggttaattggctgctctttaattggtataacaggcagaactgcatcctggctgatgagatgggattgggcaaaactattcagtccattgccttcttgcaggaagtatataatgtgggcatccatggtcccttcttggtcattgccccactgtccacaattactaactgggagcgagaatttaatacatggacagaaatgaacactattgtgtaccatggcagtctggccagcaggcagatgattcaacagtatgaaatgtactgcaaagattcacggggacgcctcatcccaggcgcatacaagtttgacgctctgatcaccacttttgagatgattttgtcagattgtcctgagcttcgtgaaattgaatggcgttgtgttatcattgatgaagcccatcgactgaaaaaccgtaattgcaagctgcttgatagtctcaagcacatggacctggaacacaaggtgctactcacaggaacaccattgcaaaatactgtagaagaactgtttagcttgcttcatttcttggaaccgtcacaatttccctcagaatcagagtttctcaaggactttggggatctcaagacagaggaacaggttcaaaagctacaggccattcttaagccaatgatgctgagaagactcaaagaggatgttgaaaaaaacttggcacccaaacaggaaacaattattgaagtagagctgactaatatccagaagaaatactatcgggctattttggagaagaatttctccttcctttccaaaggggcaggtcataccaacatgcctaatctacttaacacaatgatggagttgcgcaagtgctgcaaccacccatatctcatcaatggtgctgaagaaaaaatcctaacagaattccgtgaagcttgccatattatacctcatgactttcacctgcaggccatggttcgttcagccggcaaactggttcttattgacaagttgcttccaaagcttaaagctggtggccataaagttctgatcttctctcagatggtgcgctgcctagacatcctagaggattatttaatccagaggaggtacttatatgaacgtattgatgggcgagttagaggcaaccttcgacaggctgccattgaccgcttcagcaagcctgactcagaccgctttgtcttcttactgtgtacccgggctggtggacttggtattaatcttacagctgctgatacctgcatcatctttgattcagactggaatccacaaaatgacctgcaggcccaggcacgatgtcatcgaattgggcagagcaaagctgtgaaggtgtaccgcctcatcactcgtaattcctacgagagagagatgtttgataaggccagcctcaagttggggttggataaggctgtgcttcaatccatgagtggtcgggatggcaacattactggaatccaacagttctctaagaaggagattgaagatcttttaagaaaaggagcatatgcagccatcatggaggaagatgatgaaggctccaagttttgtgaagaggacattgaccagatcttgttaagacgaactacaaccatcaccattgaatctgaaggaaaaggttccacctttgctaaggcaagctttgttgcttctgaaaacaggacagatatttctttggatgaccccaacttttggcaaaagtgggccaaaaaggctgacctagacatggatctgctcaacagcaagaataatttggtaattgacacacctagagtacgaaaacaaacgcgccactttagcactctgaaagatgatgacctggtggaattctctgatttggaaagtgaggatgatgagcggccacgctcccgcagacatgaccgtcatcatgcctatgggcgcactgactgctttcgggtggaaaagcatctcctggtatatggttggggacgatggcgagatattttatctcatggacgcttcaagcgacgtatgactgaacgagatgtggagaccatttgtcgggccattctcgtgtactgtcttctacactaccgtggggatgaaaatattaaaggcttcatctgggacttgattagcccagctgaaaatggcaagacaaaagaattgcagaatcattcaggtctatctatccctgtgcctcgtggacgcaaaggaaaaaaagtaaagtcacaaagcacttttgatatccataaggcagattggatccggaaatataaccctgacactttgttccaagatgaaagttataagaagcacttgaaacatcagtgtaacaaggtactgttgcgggtacgaatgctatactacctgaggcaggaggttattggagaccaagcagaaaaggtgttagggggtgcgattgccagtgagattgacatatggttcccagtagtggatcaactggaggttccaacaacttggtgggacagtgaggctgacaagtcgctgctcattggagtctttaaacatggctatgagaaatataataccatgagggcagacccagccttatgtttcctagaaaaggctggccgaccagatgacaaagcaattgcagcagaacatcgagtgttggataacttctctgacatagtagaaggggttgactttgataaagattgtgaagatcctgaatataaaccactccaaggtcccccaaaggaccaagatgatgagggtgatcccttgatgatgatggatgaggagatctcagtgattgatggagatgaagcccaggtgacccaacagccaggccatttattctggcctccgggctctgccctaacagctaggcttcggcgtctagtaacagcgtatcagcgcagctacaagagagaacaaatgaagatagaggctgcagaacgtggggaccggcgaaggcggcgttgtgaagcagccttcaagctgaaagaaattgcacggcgggagaaacaacaacgatggacaaggcgtgaacaaactgatttttatcgagtggtgtctacgtttggtgtggaatatgaccctgacaccatgcagttccattgggatcgcttccgcacttttgctcgactagacaaaaagacagatgaaagccttaccaagtacttccatggctttgtggccatgtgccgccaagtatgccgccttcccccagcagctggagatgaaccccccgaccctaacctgttcattgagcccatcactgaggagagagcctcacggactctctaccgtatagaattgcttcggcgcttacgggaacaagttttatgccacccccttttggaagatcggctggcattgtgtcagcctcctggtcctgaattgcccaaatggtgggagcctgttcggcatgatggggagcttctaagaggggcagcccgccatggggtgagccaaacagactgcaacatcatgcaggacccagacttctcttttctggctgcccgtatgaattatatgcagaaccatcaagcaggagcaccagctccatccttgtcacgctgctctactccactgctgcaccagcagtatacctcacgcactgcctcaccactgcccctgcgcccagatgctcctgttgaaaagtcacccgaggagacagctacccaggtccccagtctggagagtctgactttaaagctagagcacgaggtggtggccaggagccgaccaaccccacaagactatgagatgcgagtatccccctctgatactacccctctggtttcccggagtgttccaccagtcaaactggaggatgaggatgattcggactctgagctggacttgagcaagctgtcaccatcttcttcttcttcctcatcctcatccagctccagctccagcactgatgagagtgaggatgagaaggaagagaagctaactgaccagtcccgctcaaagctctatgatgaagagagtctcctgtccctcactatgtcccaagatggattcccaaatgaagatggagaacaaatgacccctgagcttctgctactgcaggaaagacaaagagcctctgagtggcccaaggatcgtgtcctgataaaccgtattgacctcgtctgccaggctgtactctcagggaagtggccttctagccgtaggagccaggaaatggtaacaggaggaattttggggccaggcaaccacttgctagacagtccctcattgactcctggagaatatggtgactctccagtccccacaccacgaagtagtagtgcagcttccatggcagaggaggaagcatctgcagtcagcacagcggcagcccagttcaccaaacttcgccgaggcatggatgaaaaggagtttacagttcaaatcaaagatgaggaaggattgaagttaacattccagaagcacaagttgatggcgaatggagtaatgggagatggacatccactgtttcataagaagaaggggaacagaaagaagctagtagagctggaggtggagtgcatggaagagcctaatcaccttgatgtggacctggagacccggatccctgtcatcaataaggtggatggtactttgctggtgggtgaggatgcccctcgccgggctgaactggagatgtggttacagggtcatccagagtttgctgttgatccccgatttctagcgtatatggaggatcgcagaaaacagaagtggcaaagatgtaaaaaaaataataaggcagaattgaactgtttgggaatggaaccagtacagacagctaactctagaaatgggaaaaagggtcatcacactgaaacggtgttcaaccgggttttgccagggcctattgcaccagagagcagcaagaagcgggcccgtaggatgcgaccagacctttctaagatgatggccctcatgcagggtggaagcactgggtctctatctctgcataacacgttccaacacagcagtagtggcctacagtctgtgtcatctttgggtcacagcagtgccacttctgcatctttgccttttatgccatttgtgatgggtggtgcaccatcatcccctcatgtagactccagcaccatgcttcatcaccaccaccaccacccccacccccaccatcaccaccatcaccatccaggcttgagagcccctggctacccctcttcaccagtgactaccgcctctggtactaccttgcggttgccaccactgcaacctgaggaggatgacgatgaggatgaagaagatgatgatgacttatctcagggctatgatagctcagaaagggacttctcactcattgatgatcctatgatgccagctaactcagactccagtgaagatgctgatgactgaagccccagcatgggccccattgcttgggcggctgctgtattttcatttactctggcccttggactatggaaacgtgggaggggcaggggagatgtggggaagtccaggactccaggaggtgaaaaggaaaaaaaaaaaaaaatgtacctgattgctcccaattatgagaggattgggtgggcaggggaactcctaaaataatacatgaccacttcctcatttctggggaaggaaaggagactagagcagctggtgtgctcacccctccctagtcacctccattaaccacagactatgtagcgctggccctagcctctggcagagcctgttcctggccgaactgtggatacagctggagggtcaggaactgttaccttctttccccttggcattaataaatttaagttaatccttttcc

SEQ ID NO: 5892 - DNA, 8229 bp, Homo sapiens
  source 1..8229: mol_type = unassigned DNA
gccagtaccccccctccccttccctccctagaccttggagaagtaccctccattactttcccaagatggcagaccccatcatggatctgttcgatgacccaaatttatttggcctggactctctgactgatgacagctttaaccaggtcacacaagaccccattgaggaagcccttggactgccaagctctctggactccttggatcagatgaaccaggatggtggaggtggtgatgtggggaattcatcagcaagtgaactggtccctccaccagaggaaacagctcccacagaactttccaaagaatccacagctccagctccagaatccataaccttgcatgattataccactcagcctgccagccaggagcagccagcccaacctgtcttacagacatcgacgccaacatcaggacttttgcaagtctccaagagccaggagatcctgagccaagggaatcctttcatgggtgtctctgccacagctgtctcctccagtagtgctggagggcagccacctcagtcagcccctaagattgttatccttaaggccccaccaagctcctcagtcactggtgcccatgtggcacaaattcaggcccaaggtatcaccagcacagctcagcccctggtggcaggcacagccaatggtggaaaagtcacttttaccaaagtgctaaccggcacaccccttcgaccaggtgtttccattgtctctggtaatacagtgttggccgccaaggtccctgggaaccaggctgctgttcagcgcattgtccagcccagccgaccagtaaagcagctggtcctccagccagttaagggttcagctcctgctggaaaccctggggccacagggcccccactgaagcctgcagttacactgacctctacacctacccagggtgaatcgaaacgcatcaccctggtcctccagcagccacagtctggaggtccccaaggacatcggcatgttgtgctagggagtctaccaggcaagatagtgttacagggcaaccagctggcagccctgactcaagccaagaatgcccaagggcagcctgccaaggtagtaactatccagctgcaggtgcagcagccacagcaaaaaatccagattgtaccacaaccaccatcatcgcagccacagccccagcagccaccctccacccagccagtgactctgtcctctgtacagcaggctcagataatgggaccaggacaaagcccaggacaaagactttcagtaccagtcaaggtggtactgcagccacaggctggctcttcccaaggggcctcttctgggctctctgtagttaaagttctgagtgccagtgaagtggcagctttgtcatcaccagcaagctctgctcctcattcggggggaaagacaggaatggaggaaaaccgcagattggaacaccagaagaagcaagagaaagcaaatcggattgtagcagaggccattgcgagagcccgtgcccgcggtgagcagaacatacctcgagtcttaaatgaggacgagttgcccagcgttcggccagaggaggaaggcgagaagaaacgcaggaagaagagtgctggggagaggctgaaagaggagaagccaaagaagagtaaaacatctggtgcctccaaaacaaagggcaagagcaagctcaacaccatcactcctgtagtgggtaagaagagaaaacgtaatacctcatctgataattcagatgtggaagtcatgcctgcacagtcacctcgagaagatgaagaaagcagcattcagaagagacgctcaaaccgccaagttaagcgaaaaaaatatacagaggacctggatataaagatcacagatgatgaagaagaagaagaggtggatgtaactggtccaataaaacctgagcctatcctccctgaaccagtgcaagaaccagatggcgagactttgccttccatgcagttctttgtggagaatcccagtgaagaagatgcagccattgtagacaaagtgctttctatgcggattgtgaagaaggagctcccttctggacaatatactgaagcagaagaattctttgtcaagtacaagaactactcctatctgcattgtgaatgggctactatctcccaactagagaaggataagaggatacatcaaaaattaaagcgcttcaaaaccaaaatggctcagatgagacacttcttccatgaggatgaagagccctttaatccagactacgtagaggtggataggatattggatgagtctcacagtattgacaaggacaatggggagcccgttatttactacctggtgaaatggtgctctctgccctatgaggatagcacatgggagctaaaagaagatgttgatgagggcaagattcgagaatttaaacggattcagtcaaggcacccagaactcaaaagggtgaatcgtccgcaggcaagtgcctggaagaaattggagctatcacatgaatataaaaacagaaaccagctacgggaatatcagttggaaggggttaattggctgctctttaattggtataacaggcagaactgcatcctggctgatgagatgggattgggcaaaactattcagtccattgccttcttgcaggaagtatataatgtgggcatccatggtcccttcttggtcattgccccactgtccacaattactaactgggagcgagaatttaatacatggacagaaatgaacactattgtgtaccatggcagtctggccagcaggcagatgattcaacagtatgaaatgtactgcaaagattcacggggacgcctcatcccaggcgcatacaagtttgacgctctgatcaccacttttgagatgattttgtcagattgtcctgagcttcgtgaaattgaatggcgttgtgttatcattgatgaagcccatcgactgaaaaaccgtaattgcaagctgcttgatagtctcaagcacatggacctggaacacaaggtgctactcacaggaacaccattgcaaaatactgtagaagaactgtttagcttgcttcatttcttggaaccgtcacaatttccctcagaatcagagtttctcaaggactttggggatctcaagacagaggaacaggttcaaaagctacaggccattcttaagccaatgatgctgagaagactcaaagaggatgttgaaaaaaacttggcacccaaacaggaaacaattattgaagtagagctgactaatatccagaagaaatactatcgggctattttggagaagaatttctccttcctttccaaaggggcaggtcataccaacatgcctaatctacttaacacaatgatggagttgcgcaagtgctgcaaccacccatatctcatcaatggtgctgaagaaaaaatcctaacagaattccgtgaagcttgccatattatacctcatgactttcacctgcaggccatggttcgttcagccggcaaactggttcttattgacaagttgcttccaaagcttaaagctggtggccataaagttctgatcttctctcagatggtgcgctgcctagacatcctagaggattatttaatccagaggaggtacttatatgaacgtattgatgggcgagttagaggcaaccttcgacaggctgccattgaccgcttcagcaagcctgactcagaccgctttgtcttcttactgtgtacccgggctggtggacttggtattaatcttacagctgctgatacctgcatcatctttgattcagactggaatccacaaaatgacctgcaggcccaggcacgatgtcatcgaattgggcagagcaaagctgtgaaggtgtaccgcctcatcactcgtaattcctacgagagagagatgtttgataaggccagcctcaagttggggttggataaggctgtgcttcaatccatgagtggtcgggatggcaacattactggaatccaacagttctctaagaaggagattgaagatcttttaagaaaaggagcatatgcagccatcatggaggaagatgatgaaggctccaagttttgtgaagaggacattgaccagatcttgttaagacgaactacaaccatcaccattgaatctgaaggaaaaggttccacctttgctaaggcaagctttgttgcttctgaaaacaggacagatatttctttggatgaccccaacttttggcaaaagtgggccaaaaaggctgacctagacatggatctgctcaacagcaagaataatttggtaattgacacacctagagtacgaaaacaaacgcgccactttagcactctgaaagatgatgacctggtggaattctctgatttggaaagtgaggatgatgagcggccacgctcccgcagacatgaccgtcatcatgcctatgggcgcactgactgctttcgggtggaaaagcatctcctggtatatggttggggacgatggcgagatattttatctcatggacgcttcaagcgacgtatgactgaacgagatgtggagaccatttgtcgggccattctcgtgtactgtcttctacactaccgtggggatgaaaatattaaaggcttcatctgggacttgattagcccagctgaaaatggcaagacaaaagaattgcagaatcattcaggtctatctatccctgtgcctcgtggacgcaaaggaaaaaaagtaaagtcacaaagcacttttgatatccataaggcagattggatccggaaatataaccctgacactttgttccaagatgaaagttataagaagcacttgaaacatcagtgtaacaaggtactgttgcgggtacgaatgctatactacctgaggcaggaggttattggagaccaagcagaaaaggtgttagggggtgcgattgccagtgagattgacatatggttcccagtagtggatcaactggaggttccaacaacttggtgggacagtgaggctgacaagtcgctgctcattggagtctttaaacatggctatgagaaatataataccatgagggcagacccagccttatgtttcctagaaaaggctggccgaccagatgacaaagcaattgcagcagaacatcgagtgttggataacttctctgacatagtagaaggggttgactttgataaagattgtgaagatcctgaatataaaccactccaaggtcccccaaaggaccaagatgatgagggtgatcccttgatgatgatggatgaggagatctcagtgattgatggagatgaagcccaggtgacccaacagccaggccatttattctggcctccgggctctgccctaacagctaggcttcggcgtctagtaacagcgtatcagcgcagctacaagagagaacaaatgaagatagaggctgcagaacgtggggaccggcgaaggcggcgttgtgaagcagccttcaagctgaaagaaattgcacggcgggagaaacaacaacgatggacaaggcgtgaacaaactgatttttatcgagtggtgtctacgtttggtgtggaatatgaccctgacaccatgcagttccattgggatcgcttccgcacttttgctcgactagacaaaaagacagatgaaagccttaccaagtacttccatggctttgtggccatgtgccgccaagtatgccgccttcccccagcagctggagatgaaccccccgaccctaacctgttcattgagcccatcactgaggagagagcctcacggactctctaccgtatagaattgcttcggcgcttacgggaacaagttttatgccacccccttttggaagatcggctggcattgtgtcagcctcctggtcctgaattgcccaaatggtgggagcctgttcggcatgatggggagcttctaagaggggcagcccgccatggggtgagccaaacagactgcaacatcatgcaggacccagacttctcttttctggctgcccgtatgaattatatgcagaaccatcaagcaggagcaccagctccatccttgtcacgctgctctactccactgctgcaccagcagtatacctcacgcactgcctcaccactgcccctgcgcccagatgctcctgttgaaaagtcacccgaggagacagctacccaggtccccagtctggagagtctgactttaaagctagagcacgaggtggtggccaggagccgaccaaccccacaagactatgagatgcgagtatccccctctgatactacccctctggtttcccggagtgttccaccagtcaaactggaggatgaggatgattcggactctgagctggacttgagcaagctgtcaccatcttcttcttcttcctcatcctcatccagctccagctccagcactgatgagagtgaggatgagaaggaagagaagctaactgaccagtcccgctcaaagctctatgatgaagagagtctcctgtccctcactatgtcccaagatggattcccaaatgaagatggagaacaaatgacccctgagcttctgctactgcaggaaagacaaagagcctctgagtggcccaaggatcgtgtcctgataaaccgtattgacctcgtctgccaggctgtactctcagggaagtggccttctagccgtaggagccaggaaatggtaacaggaggaattttggggccaggcaaccacttgctagacagtccctcattgactcctggagaatatggtgactctccagtccccacaccacgaagtagtagtgcagcttccatggcagaggaggaagcatctgcagtcagcacagcggcagcccagttcaccaaacttcgccgaggcatggatgaaaaggagtttacagttcaaatcaaagatgaggaaggattgaagttaacattccagaagcacaagttgatggcgaatggagtaatgggagatggacatccactgtttcataagaagaaggggaacagaaagaagctagtagagctggaggtggagtgcatggaagagcctaatcaccttgatgtggacctggagacccggatccctgtcatcaataaggtggatggtactttgctggtgggtgaggatgcccctcgccgggctgaactggagatgtggttacagggtcatccagagtttgctgttgatccccgatttctagcgtatatggaggatcgcagaaaacagaagtggcaaagatgtaaaaaaaataataaggcagaattgaactgtttgggaatggaaccagtacagacagctaactctagaaatgggaaaaagggtcatcacactgaaacggtgttcaaccgggttttgccagggcctattgcaccagagagcagcaagaagcgggcccgtaggatgcgaccagacctttctaagatgatggccctcatgcagggtggaagcactgggtctctatctctgcataacacgttccaacacagcagtagtggcctacagtctgtgtcatctttgggtcacagcagtgccacttctgcatctttgccttttatgccatttgtgatgggtggtgcaccatcatcccctcatgtagactccagcaccatgcttcatcaccaccaccaccacccccacccccaccatcaccaccatcaccatccaggcttgagagcccctggctacccctcttcaccagtgactaccgcctctggtactaccttgcggttgccaccactgcaacctgaggaggatgacgatgaggatgaagaagatgatgatgacttatctcagggctatgatagctcagaaagggacttctcactcattgatgatcctatgatgccagctaactcagactccagtgaagatgctgatgactgaagccccagcatgggccccattgcttgggcggctgctgtattttcatttactctggcccttggactatggaaacgtgggaggggcaggggagatgtggggaagtccaggactccaggaggtgaaaaggaaaaaaaaaaaaaaatgtacctgattgctcccaattatgagaggattgggtgggcaggggaactcctaaaataatacatgaccacttcctcatttctggggaaggaaaggagactagagcagctggtgtgctcacccctccctagtcacctccattaaccacagactatgtagcgctggccctagcctctggcagagcctgttcctggccgaactgtggatacagctggagggtcaggaactgttaccttctttccccttggcattaataaatttaagttaatccttttcc

SEQ ID NO: 5893 - DNA, 7420 bp, Homo sapiens
  source 1..7420: mol_type = unassigned DNA
tgctggagagacagggagaggggcgaaccggccccccacagccactgcaggagttccaccatcttcctctgaagacgtagccatcttgctccatgaagggtgaatcgaaacgcatcaccctggtcctccagcagccacagtctggaggtccccaaggacatcggcatgttgtgctagggagtctaccaggcaagatagtgttacagggcaaccagctggcagccctgactcaagccaagaatgcccaagggcagcctgccaaggtagtaactatccagctgcaggtgcagcagccacagcaaaaaatccagattgtaccacaaccaccatcatcgcagccacagccccagcagccaccctccacccagccagtgactctgtcctctgtacagcaggctcagataatgggaccaggacaaagcccaggacaaagactttcagtaccagtcaaggtggtactgcagccacaggctggctcttcccaaggggcctcttctgggctctctgtagttaaagttctgagtgccagtgaagtggcagctttgtcatcaccagcaagctctgctcctcattcggggggaaagacaggaatggaggaaaaccgcagattggaacaccagaagaagcaagagaaagcaaatcggattgtagcagaggccattgcgagagcccgtgcccgcggtgagcagaacatacctcgagtcttaaatgaggacgagttgcccagcgttcggccagaggaggaaggcgagaagaaacgcaggaagaagagtgctggggagaggctgaaagaggagaagccaaagaagagtaaaacatctggtgcctccaaaacaaagggcaagagcaagctcaacaccatcactcctgtagtgggtaagaagagaaaacgtaatacctcatctgataattcagatgtggaagtcatgcctgcacagtcacctcgagaagatgaagaaagcagcattcagaagagacgctcaaaccgccaagttaagcgaaaaaaatatacagaggacctggatataaagatcacagatgatgaagaagaagaagaggtggatgtaactggtccaataaaacctgagcctatcctccctgaaccagtgcaagaaccagatggcgagactttgccttccatgcagttctttgtggagaatcccagtgaagaagatgcagccattgtagacaaagtgctttctatgcggattgtgaagaaggagctcccttctggacaatatactgaagcagaagaattctttgtcaagtacaagaactactcctatctgcattgtgaatgggctactatctcccaactagagaaggataagaggatacatcaaaaattaaagcgcttcaaaaccaaaatggctcagatgagacacttcttccatgaggatgaagagccctttaatccagactacgtagaggtggataggatattggatgagtctcacagtattgacaaggacaatggggagcccgttatttactacctggtgaaatggtgctctctgccctatgaggatagcacatgggagctaaaagaagatgttgatgagggcaagattcgagaatttaaacggattcagtcaaggcacccagaactcaaaagggtgaatcgtccgcaggcaagtgcctggaagaaattggagctatcacatgaatataaaaacagaaaccagctacgggaatatcagttggaaggggttaattggctgctctttaattggtataacaggcagaactgcatcctggctgatgagatgggattgggcaaaactattcagtccattgccttcttgcaggaagtatataatgtgggcatccatggtcccttcttggtcattgccccactgtccacaattactaactgggagcgagaatttaatacatggacagaaatgaacactattgtgtaccatggcagtctggccagcaggcagatgattcaacagtatgaaatgtactgcaaagattcacggggacgcctcatcccaggcgcatacaagtttgacgctctgatcaccacttttgagatgattttgtcagattgtcctgagcttcgtgaaattgaatggcgttgtgttatcattgatgaagcccatcgactgaaaaaccgtaattgcaagctgcttgatagtctcaagcacatggacctggaacacaaggtgctactcacaggaacaccattgcaaaatactgtagaagaactgtttagcttgcttcatttcttggaaccgtcacaatttccctcagaatcagagtttctcaaggactttggggatctcaagacagaggaacaggttcaaaagctacaggccattcttaagccaatgatgctgagaagactcaaagaggatgttgaaaaaaacttggcacccaaacaggaaacaattattgaagtagagctgactaatatccagaagaaatactatcgggctattttggagaagaatttctccttcctttccaaaggggcaggtcataccaacatgcctaatctacttaacacaatgatggagttgcgcaagtgctgcaaccacccatatctcatcaatggtgctgaagaaaaaatcctaacagaattccgtgaagcttgccatattatacctcatgactttcacctgcaggccatggttcgttcagccggcaaactggttcttattgacaagttgcttccaaagcttaaagctggtggccataaagttctgatcttctctcagatggtgcgctgcctagacatcctagaggattatttaatccagaggaggtacttatatgaacgtattgatgggcgagttagaggcaaccttcgacaggctgccattgaccgcttcagcaagcctgactcagaccgctttgtcttcttactgtgtacccgggctggtggacttggtattaatcttacagctgctgatacctgcatcatctttgattcagactggaatccacaaaatgacctgcaggcccaggcacgatgtcatcgaattgggcagagcaaagctgtgaaggtgtaccgcctcatcactcgtaattcctacgagagagagatgtttgataaggccagcctcaagttggggttggataaggctgtgcttcaatccatgagtggtcgggatggcaacattactggaatccaacagttctctaagaaggagattgaagatcttttaagaaaaggagcatatgcagccatcatggaggaagatgatgaaggctccaagttttgtgaagaggacattgaccagatcttgttaagacgaactacaaccatcaccattgaatctgaaggaaaaggttccacctttgctaaggcaagctttgttgcttctgaaaacaggacagatatttctttggatgaccccaacttttggcaaaagtgggccaaaaaggctgacctagacatggatctgctcaacagcaagaataatttggtaattgacacacctagagtacgaaaacaaacgcgccactttagcactctgaaagatgatgacctggtggaattctctgatttggaaagtgaggatgatgagcggccacgctcccgcagacatgaccgtcatcatgcctatgggcgcactgactgctttcgggtggaaaagcatctcctggtatatggttggggacgatggcgagatattttatctcatggacgcttcaagcgacgtatgactgaacgagatgtggagaccatttgtcgggccattctcgtgtactgtcttctacactaccgtggggatgaaaatattaaaggcttcatctgggacttgattagcccagctgaaaatggcaagacaaaagaattgcagaatcattcaggtctatctatccctgtgcctcgtggacgcaaaggaaaaaaagtaaagtcacaaagcacttttgatatccataaggcagattggatccggaaatataaccctgacactttgttccaagatgaaagttataagaagcacttgaaacatcagtgtaacaaggtactgttgcgggtacgaatgctatactacctgaggcaggaggttattggagaccaagcagaaaaggtgttagggggtgcgattgccagtgagattgacatatggttcccagtagtggatcaactggaggttccaacaacttggtgggacagtgaggctgacaagtcgctgctcattggagtctttaaacatggctatgagaaatataataccatgagggcagacccagccttatgtttcctagaaaaggctggccgaccagatgacaaagcaattgcagcagaacatcgagtgttggataacttctctgacatagtagaaggggttgactttgataaagattgtgaagatcctgaatataaaccactccaaggtcccccaaaggaccaagatgatgagggtgatcccttgatgatgatggatgaggagatctcagtgattgatggagatgaagcccaggtgacccaacagccaggccatttattctggcctccgggctctgccctaacagctaggcttcggcgtctagtaacagcgtatcagcgcagctacaagagagaacaaatgaagatagaggctgcagaacgtggggaccggcgaaggcggcgttgtgaagcagccttcaagctgaaagaaattgcacggcgggagaaacaacaacgatggacaaggcgtgaacaaactgatttttatcgagtggtgtctacgtttggtgtggaatatgaccctgacaccatgcagttccattgggatcgcttccgcacttttgctcgactagacaaaaagacagatgaaagccttaccaagtacttccatggctttgtggccatgtgccgccaagtatgccgccttcccccagcagctggagatgaaccccccgaccctaacctgttcattgagcccatcactgaggagagagcctcacggactctctaccgtatagaattgcttcggcgcttacgggaacaagttttatgccacccccttttggaagatcggctggcattgtgtcagcctcctggtcctgaattgcccaaatggtgggagcctgttcggcatgatggggagcttctaagaggggcagcccgccatggggtgagccaaacagactgcaacatcatgcaggacccagacttctcttttctggctgcccgtatgaattatatgcagaaccatcaagcaggagcaccagctccatccttgtcacgctgctctactccactgctgcaccagcagtatacctcacgcactgcctcaccactgcccctgcgcccagatgctcctgttgaaaagtcacccgaggagacagctacccaggtccccagtctggagagtctgactttaaagctagagcacgaggtggtggccaggagccgaccaaccccacaagactatgagatgcgagtatccccctctgatactacccctctggtttcccggagtgttccaccagtcaaactggaggatgaggatgattcggactctgagctggacttgagcaagctgtcaccatcttcttcttcttcctcatcctcatccagctccagctccagcactgatgagagtgaggatgagaaggaagagaagctaactgaccagtcccgctcaaagctctatgatgaagagagtctcctgtccctcactatgtcccaagatggattcccaaatgaagatggagaacaaatgacccctgagcttctgctactgcaggaaagacaaagagcctctgagtggcccaaggatcgtgtcctgataaaccgtattgacctcgtctgccaggctgtactctcagggaagtggccttctagccgtaggagccaggaaatggtaacaggaggaattttggggccaggcaaccacttgctagacagtccctcattgactcctggagaatatggtgactctccagtccccacaccacgaagtagtagtgcagcttccatggcagaggaggaagcatctgcagtcagcacagcggcagcccagttcaccaaacttcgccgaggcatggatgaaaaggagtttacagttcaaatcaaagatgaggaaggattgaagttaacattccagaagcacaagttgatggcgaatggagtaatgggagatggacatccactgtttcataagaagaaggggaacagaaagaagctagtagagctggaggtggagtgcatggaagagcctaatcaccttgatgtggacctggagacccggatccctgtcatcaataaggtggatggtactttgctggtgggtgaggatgcccctcgccgggctgaactggagatgtggttacagggtcatccagagtttgctgttgatccccgatttctagcgtatatggaggatcgcagaaaacagaagtggcaaagatgtaaaaaaaataataaggcagaattgaactgtttgggaatggaaccagtacagacagctaactctagaaatgggaaaaagggtcatcacactgaaacggtgttcaaccgggttttgccagggcctattgcaccagagagcagcaagaagcgggcccgtaggatgcgaccagacctttctaagatgatggccctcatgcagggtggaagcactgggtctctatctctgcataacacgttccaacacagcagtagtggcctacagtctgtgtcatctttgggtcacagcagtgccacttctgcatctttgccttttatgccatttgtgatgggtggtgcaccatcatcccctcatgtagactccagcaccatgcttcatcaccaccaccaccacccccacccccaccatcaccaccatcaccatccaggcttgagagcccctggctacccctcttcaccagtgactaccgcctctggtactaccttgcggttgccaccactgcaacctgaggaggatgacgatgaggatgaagaagatgatgatgacttatctcagggctatgatagctcagaaagggacttctcactcattgatgatcctatgatgccagctaactcagactccagtgaagatgctgatgactgaagccccagcatgggccccattgcttgggcggctgctgtattttcatttactctggcccttggactatggaaacgtgggaggggcaggggagatgtggggaagtccaggactccaggaggtgaaaaggaaaaaaaaaaaaaaatgtacctgattgctcccaattatgagaggattgggtgggcaggggaactcctaaaataatacatgaccacttcctcatttctggggaaggaaaggagactagagcagctggtgtgctcacccctccctagtcacctccattaaccacagactatgtagcgctggccctagcctctggcagagcctgttcctggccgaactgtggatacagctggagggtcaggaactgttaccttctttccccttggcattaataaatttaagttaatccttttcca

SEQ ID NO: 5894 - DNA, 8137 bp, Homo sapiens
  source 1..8137: mol_type = unassigned DNA
agggtgagttgaaacgctgcctggaaaggaagtaccaggacttgcacaggagttccaccatcttcctctgaagacgtagccatcttgctccatgaaggtcaggacaatctgacatgcacttgtttcttgcctctatacttgaagagtagtcctcttacattgtgtacatttttttcttaataggggaggggaggggagagccagtaccccccctccccttccctccctagaccttggagaagtaccctccattactttcccaagatggcagaccccatcatggatctgttcgatgacccaaatttatttggcctggactctctgactgatgacagctttaaccaggtcacacaagaccccattgaggaagcccttggactgccaagctctctggactccttggatcagatgaaccaggatggtggaggtggtgatgtggggaattcatcagcaagtgaactggtccctccaccagaggaaacagctcccacagaactttccaaagaatccacagctccagctccagaatccataaccttgcatgattataccactcagcctgccagccaggagcagccagcccaacctgtcttacagacatcgacgccaacatcaggacttttgcaagtctccaagagccaggagatcctgagccaagggaatcctttcatgggtgtctctgccacagctgtctcctccagtagtgctggagggcagccacctcagtcagcccctaagattgttatccttaaggccccaccaagctcctcagtcactggtgcccatgtggcacaaattcaggcccaaggtatcaccagcacagctcagcccctggtggcaggcacagccaatggtggaaaagtcacttttaccaaagtgctaaccggcacaccccttcgaccaggtgtttccattgtctctggtaatacagtgttggccgccaaggtccctgggaaccaggctgctgttcagcgcattgtccagcccagccgaccagtaaagcagctggtcctccagccagttaagggttcagctcctgctggaaaccctggggccacagggcccccactgaagcctgcagttacactgacctctacacctacccagggtgaatcgaaacgcatcaccctggtcctccagcagccacagtctggaggtccccaaggacatcggcatgttgtgctagggagtctaccaggcaagatagtgttacagggcaaccagctggcagccctgactcaagccaagaatgcccaagggcagcctgccaaggtagtaactatccagctgcaggtgcagcagccacagcaaaaaatccagattgtaccacaaccaccatcatcgcagccacagccccagcagccaccctccacccagccagtgactctgtcctctgtacagcaggctcagataatgggaccaggacaaagcccaggacaaagactttcagtaccagtcaaggtggtactgcagccacaggctggctcttcccaaggggcctcttctgggctctctgtagttaaagttctgagtgccagtgaagtggcagctttgtcatcaccagcaagctctgctcctcattcggggggaaagacaggaatggaggaaaaccgcagattggaacaccagaagaagcaagagaaagcaaatcggattgtagcagaggccattgcgagagcccgtgcccgcggtgagcagaacatacctcgagtcttaaatgaggacgagttgcccagcgttcggccagaggaggaaggcgagaagaaacgcaggaagaagagtgctggggagaggctgaaagaggagaagccaaagaagagtaaaacatctggtgcctccaaaacaaagggcaagagcaagctcaacaccatcactcctgtagtgggtaagaagagaaaacgtaatacctcatctgataattcagatgtggaagtcatgcctgcacagtcacctcgagaagatgaagaaagcagcattcagaagagacgctcaaaccgccaagttaagcgaaaaaaatatacagaggacctggatataaagatcacagatgatgaagaagaagaagaggtggatgtaactggtccaataaaacctgagcctatcctccctgaaccagtgcaagaaccagatggcgagactttgccttccatgcagttctttgtggagaatcccagtgaagaagatgcagccattgtagacaaagtgctttctatgcggattgtgaagaaggagctcccttctggacaatatactgaagcagaagaattctttgtcaagtacaagaactactcctatctgcattgtgaatgggctactatctcccaactagagaaggataagaggatacatcaaaaattaaagcgcttcaaaaccaaaatggctcagatgagacacttcttccatgaggatgaagagccctttaatccagactacgtagaggtggataggatattggatgagtctcacagtattgacaaggacaatggggagcccgttatttactacctggtgaaatggtgctctctgccctatgaggatagcacatgggagctaaaagaagatgttgatgagggcaagattcgagaatttaaacggattcagtcaaggcacccagaactcaaaagggtgaatcgtccgcaggcaagtgcctggaagaaattggagctatcacatgaatataaaaacagaaaccagctacgggaatatcagttggaaggggttaattggctgctctttaattggtataacaggcagaactgcatcctggctgatgagatgggattgggcaaaactattcagtccattgccttcttgcaggaagtatataatgtgggcatccatggtcccttcttggtcattgccccactgtccacaattactaactgggagcgagaatttaatacatggacagaaatgaacactattgtgtaccatggcagtctggccagcaggcagatgattcaacagtatgaaatgtactgcaaagattcacggggacgcctcatcccaggcgcatacaagtttgacgctctgatcaccacttttgagatgattttgtcagattgtcctgagcttcgtgaaattgaatggcgttgtgttatcattgatgaagcccatcgactgaaaaaccgtaattgcaagctgcttgatagtctcaagcacatggacctggaacacaaggtgctactcacaggaacaccattgcaaaatactgtagaagaactgtttagcttgcttcatttcttggaaccgtcacaatttccctcagaatcagagtttctcaaggactttggggatctcaagacagaggaacaggttcaaaagctacaggccattcttaagccaatgatgctgagaagactcaaagaggatgttgaaaaaaacttggcacccaaacaggaaacaattattgaagtagagctgactaatatccagaagaaatactatcgggctattttggagaagaatttctccttcctttccaaaggggcaggtcataccaacatgcctaatctacttaacacaatgatggagttgcgcaagtgctgcaaccacccatatctcatcaatggtgctgaagaaaaaatcctaacagaattccgtgaagcttgccatattatacctcatgactttcacctgcaggccatggttcgttcagccggcaaactggttcttattgacaagttgcttccaaagcttaaagctggtggccataaagttctgatcttctctcagatggtgcgctgcctagacatcctagaggattatttaatccagaggaggtacttatatgaacgtattgatgggcgagttagaggcaaccttcgacaggctgccattgaccgcttcagcaagcctgactcagaccgctttgtcttcttactgtgtacccgggctggtggacttggtattaatcttacagctgctgatacctgcatcatctttgattcagactggaatccacaaaatgacctgcaggcccaggcacgatgtcatcgaattgggcagagcaaagctgtgaaggtgtaccgcctcatcactcgtaattcctacgagagagagatgtttgataaggccagcctcaagttggggttggataaggctgtgcttcaatccatgagtggtcgggatggcaacattactggaatccaacagttctctaagaaggagattgaagatcttttaagaaaaggagcatatgcagccatcatggaggaagatgatgaaggctccaagttttgtgaagaggacattgaccagatcttgttaagacgaactacaaccatcaccattgaatctgaaggaaaaggttccacctttgctaaggcaagctttgttgcttctgaaaacaggacagatatttctttggatgaccccaacttttggcaaaagtgggccaaaaaggctgacctagacatggatctgctcaacagcaagaataatttggtaattgacacacctagagtacgaaaacaaacgcgccactttagcactctgaaagatgatgacctggtggaattctctgatttggaaagtgaggatgatgagcggccacgctcccgcagacatgaccgtcatcatgcctatgggcgcactgactgctttcgggtggaaaagcatctcctggtatatggttggggacgatggcgagatattttatctcatggacgcttcaagcgacgtatgactgaacgagatgtggagaccatttgtcgggccattctcgtgtactgtcttctacactaccgtggggatgaaaatattaaaggcttcatctgggacttgattagcccagctgaaaatggcaagacaaaagaattgcagaatcattcaggtctatctatccctgtgcctcgtggacgcaaaggaaaaaaagtaaagtcacaaagcacttttgatatccataaggcagattggatccggaaatataaccctgacactttgttccaagatgaaagttataagaagcacttgaaacatcagtgtaacaaggtactgttgcgggtacgaatgctatactacctgaggcaggaggttattggagaccaagcagaaaaggtgttagggggtgcgattgccagtgagattgacatatggttcccagtagtggatcaactggaggttccaacaacttggtgggacagtgaggctgacaagtcgctgctcattggagtctttaaacatggctatgagaaatataataccatgagggcagacccagccttatgtttcctagaaaaggctggccgaccagatgacaaagcaattgcagcagaacatcgagtgttggataacttctctgacatagtagaaggggttgactttgataaagattgtgaagatcctgaatataaaccactccaaggtcccccaaaggaccaagatgatgagggtgatcccttgatgatgatggatgaggagatctcagtgattgatggagatgaagcccaggtgacccaacagccaggccatttattctggcctccgggctctgccctaacagctaggcttcggcgtctagtaacagcgtatcagcgcagctacaagagagaacaaatgaagatagaggctgcagaacgtggggaccggcgaaggcggcgttgtgaagcagccttcaagctgaaagaaattgcacggcgggagaaacaacaacgatggacaaggcgtgaacaaactgatttttatcgagtggtgtctacgtttggtgtggaatatgaccctgacaccatgcagttccattgggatcgcttccgcacttttgctcgactagacaaaaagacagatgaaagccttaccaagtacttccatggctttgtggccatgtgccgccaagtatgccgccttcccccagcagctggagatgaaccccccgaccctaacctgttcattgagcccatcactgaggagagagcctcacggactctctaccgtatagaattgcttcggcgcttacgggaacaagttttatgccacccccttttggaagatcggctggcattgtgtcagcctcctggtcctgaattgcccaaatggtgggagcctgttcggcatgatggggagcttctaagaggggcagcccgccatggggtgagccaaacagactgcaacatcatgcaggacccagacttctcttttctggctgcccgtatgaattatatgcagaaccatcaagcaggagcaccagctccatccttgtcacgctgctctactccactgctgcaccagcagtatacctcacgcactgcctcaccactgcccctgcgcccagatgctcctgttgaaaagtcacccgaggagacagctacccaggtccccagtctggagagtctgactttaaagctagagcacgaggtggtggccaggagccgaccaaccccacaagactatgagatgcgagtatccccctctgatactacccctctggtttcccggagtgttccaccagtcaaactggaggatgaggatgattcggactctgagctggacttgagcaagctgtcaccatcttcttcttcttcctcatcctcatccagctccagctccagcactgatgagagtgaggatgagaaggaagagaagctaactgaccagtcccgctcaaagctctatgatgaagagagtctcctgtccctcactatgtcccaagatggattcccaaatgaagatggagaacaaatgacccctgagcttctgctactgcaggaaagacaaagagcctctgagtggcccaaggatcgtgtcctgataaaccgtattgacctcgtctgccaggctgtactctcagggaagtggccttctagccgtaggagccaggaaatggtaacaggaggaattttggggccaggcaaccacttgctagacagtccctcattgactcctggagaatatggtgactctccagtccccacaccacgaagtagtagtgcagcttccatggcagaggaggaagcatctgcagtcagcacagcggcagcccagttcaccaaacttcgccgaggcatggatgaaaaggagtttacagttcaaatcaaagatgaggaaggattgaagttaacattccagaagcacaagttgatggcgaatggagtaatgggagatggacatccactgtttcataagaagaaggggaacagaaagaagctagtagagctggaggtggagtgcatggaagagcctaatcaccttgatgtggacctggagacccggatccctgtcatcaataaggtggatggtactttgctggtgggtgaggatgcccctcgccgggctgaactggagatgtggttacagggtcatccagagtttgctgttgatccccgatttctagcgtatatggaggatcgcagaaaacagaagtggcaaagatgtaaaaaaaataataaggcagaattgaactgtttgggaatggaaccagtacagacagctaactctagaaatgggaaaaagggtcatcacactgaaacggtgttcaaccgggttttgccagggcctattgcaccagagagcagcaagaagcgggcccgtaggatgcgaccagacctttctaagatgatggccctcatgcagggtggaagcactgggtctctatctctgcataacacgttccaacacagcagtagtggcctacagtctgtgtcatctttgggtcacagcagtgccacttctgcatctttgccttttatgccatttgtgatgggtggtgcaccatcatcccctcatgtagactccagcaccatgcttcatcaccaccaccaccacccccacccccaccatcaccaccatcaccatccaggcttgagagcccctggctacccctcttcaccagtgactaccgcctctggtactaccttgcggttgccaccactgcaacctgaggaggatgacgatgaggatgaagaagatgatgatgacttatctcagggctatgatagctcagaaagggacttctcactcattgatgatcctatgatgccagctaactcagactccagtgaagatgctgatgactgaagccccagcatgggccccattgcttgggcggctgctgtattttcatttactctggcccttggactatggaaacgtgggaggggcaggggagatgtggggaagtccaggactccaggaggtgaaaagg

SEQ ID NO: 5895 - DNA, 3419 bp, Homo sapiens
  source 1..3419: mol_type = unassigned DNA
ggagagaggacctatttctacctaaggacattcccggaaggcaatgggtttcaaacaatatcctgaagagactcatctcggggaactaagcaggtggtcatcagagaacacagagcccccggaagaattttatgacatttcaggcaagccacaggtcagcctggggaaaaagcaggaagaaaaactggcaatacgagggcccaacccaaaagttattcctgaagagaaacaacgtgtcagcaccagatgggccttcagaccccagcatctccgtgagcagtgagcaaagcggggcacagcagcctcccgctttacaggttgaaaggattgttgacaaaaggaaaaataaaaaagggaagacagagtatttggttcggtggaaaggctatgacagcgaggacgacacttgggagccggaacagcacctcgtgaactgtgaggaatacatccacgacttcaacagacgccacacggagaagcagaaggagagcacattgaccagaacaaacaggacctctcccaacaatgctaggaaacaaatctccagatccaccaacagcaacttttctaagacctctcctaaggcactcgtgattgggaaagaccacgaatccaaaaacagccagctgtttgctgccagccagaagttcaggaagaacacagctccatctctctccagccggaagaacatggacctagcgaagtcaggtatcaagatcctcgtgcctaaaagccccgttaagagcaggaccgcagtggacggctttcagagcgagagccctgagaaactggaccccgtcgagcagggtcaggaggacacagtggcacccgaagtggcagcggaaaagccggtcggagctttattgggccccggtgccgagagggccaggatggggagcaggcccaggatacacccactagtgcctcaggtgcccggccctgtgactgcagccatggccacaggcttagctgttaacgggaaaggtacatctccgttcatggatgcattaacagccaatgggacaaccaacatacagacatctgttacaggagtgactgccagcaaaaggaaatttattgacgacagaagagaccagccttttgacaagcgattgcgtttcagcgtgaggcaaacagaaagtgcctacagatacagagatattgtggtcaggaagcaggatggcttcacccacatcttgttatccacaaagtcctcagagaataactcactaaatccagaggtaatgagagaagtccagagtgctctgagcacggccgctgccgatgacagcaagctggtactgctcagcgccgttggcagcgtcttctgttgtggacttgactttatttattttatacgacgtctgacagatgacaggaaaagagaaagcactaaaatggcagaagctatcagaaacttcgtgaatactttcattcaatttaagaagcccattattgtagcagtcaatggcccagccattggtctaggagcatctatattgcctctttgcgatgtggtttgggctaatgaaaaggcttggtttcaaacaccctataccaccttcggacagagtccagatggctgttctaccgttatgtttcccaagataatgggaggagcatctgcaaacgagatgctgctcagtggacggaagctgacagcgcaggaggcgtgtggcaagggcctggtctcccaggtgttttggcccgggacgttcactcaggaagtgatggttcgcattaaggagcttgcctcgtgcaatccagttgtgcttgaggaatccaaagccctcgtgcgctgcaacatgaagatggagctggagcaggccaacgagagggagtgtgaggtgctgaagaaaatctggggctcggcccaggggatggactccatgttaaagtacttgcagaggaagatcgatgagttctgagtgtcgggctgcccactggtgacaccgggatcgggctgagcaggagaacatcaccggctccagttcccctgatccattctcacagcctgaaacaagctcacccgtagcttacgcttggaagcaggactgggaacatccacgctatttattatcgaggagttttaaagtactgtaactttaaaataaataactacaaagcttctttgtccaaacgtcattattttatacttatatacacgcaggtgtaaaagtataaaggtgagcactagactgctcttagaagctctaatttttgttttctttggctagtactgtataaaaaacagaattgtgttttattggttttggatgacagaaaagtctggaataatgtttgttttcctcatttcttccttctagaacacagaatctaaaggggtattagccagcctcgcctccctgccccacgtagagacacagagtgatgtgaggcgttggctttttctccaagaaggtacagatacctcagattcgggaaactcaaaatcaaaagacttagcttctaggataaatacttctgatgaaaaatccgctgaggagcataccccaaaccagacatatgcttaggattcatgctgagatatcaattggtttccccttctttttaaaatacgtccagttcttacccagttaacatgaagaaaccactgtctctagaagaaagcttgttttgcagtattagtgaatcactgaatagcttaagtatgactatctaagttataagttagtctttagtgggttttaaatagtttttctgacccttctgaaaaataactacataagtgcttcttgttgctgggtgagaaatactactttatagacagttttggttttctgtttgcagatatgattgatgtatttcaccaaaataaaatatttttatgtttataaagtgtaatttttaggttcacttagaatatattttatttaataagttaaaattcttttggcacactattaaatgcaaaaactcctttcaaaacaaaaaagaactaccttatattcaacatttaatgttcttggcctctgcttttatgtctatacaatatactgagttcagtatggtgtccaagagtgccctgtgtggatagacatgtgcactccttccaggagtgggtactgattccagactccagatgcctattattagttaggcttctgagcttgcaatcatattgaatgtatgaagagcgaaatcaaattcttatttttgtacagttttgaagtttatacttagaactgaccacctccccggccacgcggagagctgtacagtgtgtaaatctgcctttatcttggattgattggtacagtatttttgcatctgtgggacctaccttttcgttcagtagtttgaactatatataaactgtacaatctgtaaagtttttatagaataaatattcagctgtgaaaactggttaaataaaactaatatttcttaacacattt

SEQ ID NO: 5896 - DNA, 3241 bp, Homo sapiens
  source 1..3241: mol_type = unassigned DNA
ggttaaggagggaggggaaacaaaagcagtgtgctccaccaggctcctgcctcggctctaaggaaacagaggaaagcaaacgggaatactctggtttagtatactgcccgcttctggagtggacattgatttaaggttgaaaggattgttgacaaaaggaaaaataaaaaagggaagacagagtatttggttcggtggaaaggctatgacagcgaggacgacacttgggagccggaacagcacctcgtgaactgtgaggaatacatccacgacttcaacagacgccacacggagaagcagaaggagagcacattgaccagaacaaacaggacctctcccaacaatgctaggaaacaaatctccagatccaccaacagcaacttttctaagacctctcctaaggcactcgtgattgggaaagaccacgaatccaaaaacagccagctgtttgctgccagccagaagttcaggaagaacacagctccatctctctccagccggaagaacatggacctagcgaagtcaggtatcaagatcctcgtgcctaaaagccccgttaagagcaggaccgcagtggacggctttcagagcgagagccctgagaaactggaccccgtcgagcagggtcaggaggacacagtggcacccgaagtggcagcggaaaagccggtcggagctttattgggccccggtgccgagagggccaggatggggagcaggcccaggatacacccactagtgcctcaggtgcccggccctgtgactgcagccatggccacaggcttagctgttaacgggaaaggtacatctccgttcatggatgcattaacagccaatgggacaaccaacatacagacatctgttacaggagtgactgccagcaaaaggaaatttattgacgacagaagagaccagccttttgacaagcgattgcgtttcagcgtgaggcaaacagaaagtgcctacagatacagagatattgtggtcaggaagcaggatggcttcacccacatcttgttatccacaaagtcctcagagaataactcactaaatccagaggtaatgagagaagtccagagtgctctgagcacggccgctgccgatgacagcaagctggtactgctcagcgccgttggcagcgtcttctgttgtggacttgactttatttattttatacgacgtctgacagatgacaggaaaagagaaagcactaaaatggcagaagctatcagaaacttcgtgaatactttcattcaatttaagaagcccattattgtagcagtcaatggcccagccattggtctaggagcatctatattgcctctttgcgatgtggtttgggctaatgaaaaggcttggtttcaaacaccctataccaccttcggacagagtccagatggctgttctaccgttatgtttcccaagataatgggaggagcatctgcaaacgagatgctgctcagtggacggaagctgacagcgcaggaggcgtgtggcaagggcctggtctcccaggtgttttggcccgggacgttcactcaggaagtgatggttcgcattaaggagcttgcctcgtgcaatccagttgtgcttgaggaatccaaagccctcgtgcgctgcaacatgaagatggagctggagcaggccaacgagagggagtgtgaggtgctgaagaaaatctggggctcggcccaggggatggactccatgttaaagtacttgcagaggaagatcgatgagttctgagtgtcgggctgcccactggtgacaccgggatcgggctgagcaggagaacatcaccggctccagttcccctgatccattctcacagcctgaaacaagctcacccgtagcttacgcttggaagcaggactgggaacatccacgctatttattatcgaggagttttaaagtactgtaactttaaaataaataactacaaagcttctttgtccaaacgtcattattttatacttatatacacgcaggtgtaaaagtataaaggtgagcactagactgctcttagaagctctaatttttgttttctttggctagtactgtataaaaaacagaattgtgttttattggttttggatgacagaaaagtctggaataatgtttgttttcctcatttcttccttctagaacacagaatctaaaggggtattagccagcctcgcctccctgccccacgtagagacacagagtgatgtgaggcgttggctttttctccaagaaggtacagatacctcagattcgggaaactcaaaatcaaaagacttagcttctaggataaatacttctgatgaaaaatccgctgaggagcataccccaaaccagacatatgcttaggattcatgctgagatatcaattggtttccccttctttttaaaatacgtccagttcttacccagttaacatgaagaaaccactgtctctagaagaaagcttgttttgcagtattagtgaatcactgaatagcttaagtatgactatctaagttataagttagtctttagtgggttttaaatagtttttctgacccttctgaaaaataactacataagtgcttcttgttgctgggtgagaaatactactttatagacagttttggttttctgtttgcagatatgattgatgtatttcaccaaaataaaatatttttatgtttataaagtgtaatttttaggttcacttagaatatattttatttaataagttaaaattcttttggcacactattaaatgcaaaaactcctttcaaaacaaaaaagaactaccttatattcaacatttaatgttcttggcctctgcttttatgtctatacaatatactgagttcagtatggtgtccaagagtgccctgtgtggatagacatgtgcactccttccaggagtgggtactgattccagactccagatgcctattattagttaggcttctgagcttgcaatcatattgaatgtatgaagagcgaaatcaaattcttatttttgtacagttttgaagtttatacttagaactgaccacctccccggccacgcggagagctgtacagtgtgtaaatctgcctttatcttggattgattggtacagtatttttgcatctgtgggacctaccttttcgttcagtagtttgaactatatataaactgtacaatctgtaaagtttttatagaataaatattcagctgtgaaaactggttaaataaaactaatatttcttaacacatttgaaa

SEQ ID NO: 5897 - DNA, 2184 bp, Homo sapiens
  source 1..2184: mol_type = unassigned DNA
cggagaggggagccgcgatccggccgcgccgcccgcacgccgccgcgcccgccccagcccgcccggccccgcggcggggcgcgatgagcccgagcgcgagccggcccgccggggagtgagcgcggggcgcccagggcgcgttgcgtagctgctcctgcgcacaaccccgccgcgccgccggcccgcactggccgcggagtgcaagaggctcgtccgtgcccagcgcccggccggccgcgggagcaggaagcgcaggccacgcaggacccaactgaaacaaagtgtcggccgcccggcgccggcgcccgccccgaccctgcccctcccgcccgcaactccgccgcccaccatggcttccgaggagctgtacgaggttgaaaggattgttgacaaaaggaaaaataaaaaagggaagacagagtatttggttcggtggaaaggctatgacagcgaggacgacacttgggagccggaacagcacctcgtgaactgtgaggaatacatccacgacttcaacagacgccacacggagaagcagaaggagagcacattgaccagaacaaacaggacctctcccaacaatgctaggaaacaaatctccagatccaccaacagcaacttttctaagacctctcctaaggcactcgtgattgggaaagaccacgaatccaaaaacagccagctgtttgctgccagccagaagttcaggaagaacacagctccatctctctccagccggaagaacatggacctagcgaagtcaggtatcaagatcctcgtgcctaaaagccccgttaagagcaggaccgcagtggacggctttcagagcgagagccctgagaaactggaccccgtcgagcagggtcaggaggacacagtggcacccgaagtggcagcggaaaagccggtcggagctttattgggccccggtgccgagagggccaggatggggagcaggcccaggatacacccactagtgcctcaggtgcccggccctgtgactgcagccatggccacaggcttagctgttaacgggaaaggtacatctccgttcatggatgcattaacagccaatgggacaaccaacatacagacatctgttacaggagtgactgccagcaaaaggaaatttattgacgacagaagagaccagccttttgacaagcgattgcgtttcagcgtgaggcaaacagaaagtgcctacagatacagagatattgtggtcaggaagcaggatggcttcacccacatcttgttatccacaaagtcctcagagaataactcactaaatccagaggtaatgagagaagtccagagtgctctgagcacggccgctgccgatgacagcaagctggtactgctcagcgccgttggcagcgtcttctgttgtggacttgactttatttattttatacgacgtctgacagatgacaggaaaagagaaagcactaaaatggcagaagctatcagaaacttcgtgaatactttcattcaatttaagaagcccattattgtagcagtcaatggcccagccattggtctaggagcatctatattgcctctttgcgatgtggtttgggctaatgaaaaggcttggtttcaaacaccctataccaccttcggacagagtccagatggctgttctaccgttatgtttcccaagataatgggaggagcatctgcaaacgagatgctgctcagtggacggaagctgacagcgcaggaggcgtgtggcaagggcctggtctcccaggtgttttggcccgggacgttcactcaggaagtgatggttcgcattaaggagcttgcctcgtgcaatccagttgtgcttgaggaatccaaagccctcgtgcgctgcaacatgaagatggagctggagcaggccaacgagagggagtgtgaggtgctgaagaaaatctggggctcggcccaggggatggactccatgttaaagtacttgcagaggaagatcgatgagttctgagtgtcgggctgcccactggtgacaccgggatcgggctgagcaggagaacatcaccggctccagttcccctgatccattctcacagcctgaaacaagctcacccgtagcttacgcttggaagcaggactgggaacatccacgctatttattatcgaggagttttaaagtactgtaactttaaaataaataactacaaagct

SEQ ID NO: 5898 - DNA, 2139 bp, Homo sapiens
  source 1..2139: mol_type = unassigned DNA
actgtctggcactccctagtgagatgaacctggtacctcagatggaaatgctgaaatcacctgtcttctgcgtcgctcacgctgggagctgtagaccggagctgttcctattcggccatcttggctcctccccaaggcttaggtttctaagtcagccacaaatgctacccaaaactacataaagaagaaaaaagttgcatagaaccaaaaagttgaaaggattgttgacaaaaggaaaaataaaaaagggaagacagagtatttggttcggtggaaaggctatgacagcgaggacgacacttgggagccggaacagcacctcgtgaactgtgaggaatacatccacgacttcaacagacgccacacggagaagcagaaggagagcacattgaccagaacaaacaggacctctcccaacaatgctaggaaacaaatctccagatccaccaacagcaacttttctaagacctctcctaaggcactcgtgattgggaaagaccacgaatccaaaaacagccagctgtttgctgccagccagaagttcaggaagaacacagctccatctctctccagccggaagaacatggacctagcgaagtcaggtatcaagatcctcgtgcctaaaagccccgttaagagcaggaccgcagtggacggctttcagagcgagagccctgagaaactggaccccgtcgagcagggtcaggaggacacagtggcacccgaagtggcagcggaaaagccggtcggagctttattgggccccggtgccgagagggccaggatggggagcaggcccaggatacacccactagtgcctcaggtgcccggccctgtgactgcagccatggccacaggcttagctgttaacgggaaaggtacatctccgttcatggatgcattaacagccaatgggacaaccaacatacagacatctgttacaggagtgactgccagcaaaaggaaatttattgacgacagaagagaccagccttttgacaagcgattgcgtttcagcgtgaggcaaacagaaagtgcctacagatacagagatattgtggtcaggaagcaggatggcttcacccacatcttgttatccacaaagtcctcagagaataactcactaaatccagaggtaatgagagaagtccagagtgctctgagcacggccgctgccgatgacagcaagctggtactgctcagcgccgttggcagcgtcttctgttgtggacttgactttatttattttatacgacgtctgacagatgacaggaaaagagaaagcactaaaatggcagaagctatcagaaacttcgtgaatactttcattcaatttaagaagcccattattgtagcagtcaatggcccagccattggtctaggagcatctatattgcctctttgcgatgtggtttgggctaatgaaaaggcttggtttcaaacaccctataccaccttcggacagagtccagatggctgttctaccgttatgtttcccaagataatgggaggagcatctgcaaacgagatgctgctcagtggacggaagctgacagcgcaggaggcgtgtggcaagggcctggtctcccaggtgttttggcccgggacgttcactcaggaagtgatggttcgcattaaggagcttgcctcgtgcaatccagttgtgcttgaggaatccaaagccctcgtgcgctgcaacatgaagatggagctggagcaggccaacgagagggagtgtgaggtgctgaagaaaatctggggctcggcccaggggatggactccatgttaaagtacttgcagaggaagatcgatgagttctgagtgtcgggctgcccactggtgacaccgggatcgggctgagcaggagaacatcaccggctccagttcccctgatccattctcacagcctgaaacaagctcacccgtagcttacgcttggaagcaggactgggaacatccacgctatttattatcgaggagttttaaagtactgtaactttaaaataaataactacaaagcttctttgtccaaacgtcattattttatacttatatacacgcaggtgtaaaagtataaaggtgagcactagactgctcttagaagctctaatttttgttttctttggctagtactgtat

SEQ ID NO: 5899 - DNA, 2321 bp, Homo sapiens
  source 1..2321: mol_type = unassigned DNA
ctgtggatttagctactctcacctgaggctactgagcaagttgtcatgcaccatgagacaaagcccaagctgtcccaccaggcagtaagtatggagaggttcaggcacatggcatagctgctatttcgcacaattttcactacaccagtggtgacaaaatagaagaggttcatccatacacagaacctggtgaagagctggaggcagaaagaagtgtctatgtggagacgcaactgaaacaaaggtggcacagcaactgttccaatcccgtgtctttcctcatggcttcccaggagtttgaggttgaagctattgttgacaaaagacaggataaaaatgggaatacacagtatttggttcggtggaaaggttatgacaaacaggatgacacttgggaaccagagcagcacctcatgaactgtgaaaaatgtgtacatgattttaatagacgacagactgaaaaacagaaaaaactgacatggactacaaccagtagaattttttcaaacaatgccagaagaagaacttccagatctacaaaagcaaactattctaagaactctcctaaaacgccagtgactgataaacaccacaggtccaaaaaccgcaagttatttgctgccagcaagaacgttaggagaaaggcagcttcaattctctccgacacaaagaatatggagataataaattcaactattgagacccttgcacctgacagcccctttgaccacaaaactgtgagtggctttcagaaacttgagaaactggaccctattgcagcagatcagcaggacacggtggtcttcaaggtgacagaagggaaactcctccgggaccctttgtcacgtcctggtgcagaacagactggaatacagaacaagactcagatacacccactaatgtcgcagatgtctggctcagttactgcttctatggccacaggttcagctacccgaaagggtatagtggtattaatagacccattagcagccaatgggacaacagacatgcatacctcagttccaagagtgaaaggtgggcaaagaaatattactgatgacagcagagaccagccttttatcaagaagatgcacttcaccataaggctaacagaaagtgccagcacatacagagacattgtagtgaagaaagaggatggattcacccagatagtgctatcaactagatcgacagaaaaaaatgcactgaatacagaagtaattaaagaaatagttaatgctctgaatagcgctgctgcagatgacagcaagctcgtgctgttcagtgcagctggaagtgtcttttgctgcggtcttgattttgggtactttgtgaagcacttaaggaataacagaaacacagcaagccttgaaatggtggacaccatcaagaactttgtgaatacttttattcaatttaaaaagcctattgttgtatcagtcaatggccctgcgattggactaggtgcatccatcctgcctctttgtgatctcgtgtgggctaatgaaaaggcttggttccaaaccccttatacgacctttggacagagtccagatggctgttcttctattacattccccaaaatgatgggtaaagcatctgccaatgaaatgttaattgctgggcgaaagctgacagcaagggaggcatgcgccaaaggcctggtctctcaggtatttttgactggaactttcacccaagaggttatgattcaaattaaggagcttgcctcatacaatccaattgtactggaagaatgtaaggccctcgttcgctgtaatattaagttggagttggaacaggccaatgagagagagtgtgaggtgctgaggaagatctggagctcagcccaagggatagaatccatgttaaaaatacctctgttgggatataaagcagccttccctcccagaaagacacagaatgatcagagatggtgcccttgactttatagtggcacaaacgcttcagagacacacaattataagagacttatcttttagcataaatacttatggctcaaaatccactgacgatcattctcctaaactgaacacatgactagaattggtggtgagatatcgcttgattttcttttcctttataaatgtctagttcttacccagttaacaaaagaaaactttatcgctctaaagtaaaacttgttacaccacattagtgaattatggaatgattttggtggaaatatccaggttctaatgtgtggaatgtgcagatttaggttactttagtgtatgttctagttaataagttaaaattctggacacattattaaaggcagaaacttctttcaaagcaaa

SEQ ID NO: 5900 - DNA, 2220 bp, Homo sapiens
  source 1..2220: mol_type = unassigned DNA
aacaggcaggaagaaagctttctgtactacaccagagggttggggctgtggatttagctactctcacctgaggctactgagcaagttgtcatgcaccatgagacaaagcccaagctgtcccaccaggcagtaagtatggagaggttcaggcacatggcatagctgctatttcgcacaattttcactacaccagtggtgacaaaatagaagaggttcatccatacacagaacctggtgaagagctggaggcagaaagaagtgtctatgtggagacgcaactgaaacaaaggtggcacagcaactgttccaatcccgtgtctttcctcatggcttcccaggagtttgaggttgaagctattgttgacaaaagacaggataaaaatgggaatacacagtatttggttcggtggaaaggttatgacaaacaggatgacacttgggaaccagagcagcacctcatgaactgtgaaaaatgtgtacatgattttaatagacgacagactgaaaaacagaaaaaactgacatggactacaaccagtagaattttttcaaacaatgccagaagaagaacttccagatctacaaaagcaaactattctaagaactctcctaaaacgccagtgactgataaacaccacaggtccaaaaaccgcaagttatttgctgccagcaagaacgttaggagaaaggcagcttcaattctctccgacacaaagaatatggagataataaattcaactattgagacccttgcacctgacagcccctttgaccacaaaactgtgagtggctttcagaaacttgagaaactggaccctattgcagcagatcagcaggacacggtggtcttcaaggtgacagaagggaaactcctccgggaccctttgtcacgtcctggtgcagaacagactggaatacagaacaagactcagatacacccactaatgtcgcagatgtctggctcagttactgcttctatggccacaggttcagctacccgaaagggtatagtggtattaatagacccattagcagccaatgggacaacagacatgcatacctcagttccaagagtgaaaggtgggcaaagaaatattactgatgacagcagagaccagccttttatcaagaagatgcacttcaccataaggctaacagaaagtgccagcacatacagagacattgtagtgaagaaagaggatggattcacccagatagtgctatcaactagatcgacagaaaaaaatgcactgaatacagaagtaattaaagaaatagttaatgctctgaatagcgctgctgcagatgacagcaagctcgtgctgttcagtgcagctggaagtgtcttttgctgcggtcttgattttgggtactttgtgaagcacttaaggaataacagaaacacagcaagccttgaaatggtggacaccatcaagaactttgtgaatacttttattcaatttaaaaagcctattgttgtatcagtcaatggccctgcgattggactaggtgcatccatcctgcctctttgtgatctcgtgtgggctaatgaaaaggcttggttccaaaccccttatacgacctttggacagagtccagatggctgttcttctattacattccccaaaatgatgggtaaagcatctgccaatgaaatgttaattgctgggcgaaagctgacagcaagggaggcatgcgccaaaggcctggtctctcaggtatttttgactggaactttcacccaagaggttatgattcaaattaaggagcttgcctcatacaatccaattgtactggaagaatgtaaggccctcgttcgctgtaatattaagttggagttggaacaggccaatgagagagagtgtgaggtgctgaggaagatctggagctcagcccaagggatagaatccatgttaaagtatgttgaaaataaaattgatgagttttaattgtcagtctgtctgctcaggacacaagaactaaggggcaacaaatgcatcatgagttgcaagatgccctaatccatcttcatagcccaaaacaatttcacccatagctaaggcttggaaacagaactggaaatgtccaagctatgtatttaaattatcacatcatttttaagcactgtagctttacaaggagtaacaaaacagcctctttgcccaaatgtgattattttatgcacacctaagcccaaatataaaaacagactcttcttgc

SEQ ID NO: 5901 - DNA, 2063 bp, Homo sapiens
  source 1..2063: mol_type = unassigned DNA
aagggggcggcaccgctgacgtcatttccggggtcggggtatataagcggggcgcgagggcgctgctgctgccaccgctcctgccactgcagtgctcgagccccgtgcaggggagcttgcgggaggatcgaccgacagacggacgcacgccgaggcactgcgcccccagccccgcgccggtgccaccgcagcccgaccccggccgccagtccagccgcccctcgcccggtgcctaggtgcccggccccacaccgccagctgctcggcgcccgggtccgccatgcgctccgccgctgtcctggctcttctgctctgcgccgggcaagtcactgcgctccctgtgaacagccctatgaataaaggggataccgaggtgatgaaatgcatcgttgaggtcatctccgacacactttccaagcccagccccatgcctgtcagccaggaatgttttgagacactccgaggagatgaacggatcctttccattctgagacatcagaatttactgaaggagctccaagacctcgctctccaaggcgccaaggagagggcacatcagcagaagaaacacagcggttttgaagatgaactctcagaggttcttgagaaccagagcagccaggccgagctgaaagaggcggtggaagagccatcatccaaggatgttatggagaaaagagaggattccaaggaggcagagaaaagtggtgaagccacagacggagccaggccccaggccctcccggagcccatgcaggagtccaaggctgaggggaacaatcaggcccctggggaggaagaggaggaggaggaggaggccaccaacacccaccctccagccagcctccccagccagaaatacccaggcccacaggccgagggggacagtgagggcctctctcagggtctggtggacagagagaagggcctgagtgcagagccagggtggcaggcaaagagagaagaggaggaggaggaggaggaggaggctgaggctggagaggaggctgtccccgaggaagaaggccccactgtagtgctgaacccccacccgagccttggctacaaggagatccggaaaggcgagagtcggtcggaggctctggctgtggatggagctgggaagcctggggctgaggaggctcaggaccccgaagggaagggagaacaggagcactcccagcagaaagaggaggaggaggagatggcagtggtcccgcaaggcctcttccggggtgggaagagcggagagctggagcaggaggaggagcggctctccaaggagtgggaggactccaaacgctggagcaagatggaccagctggccaaggagctgacggctgagaagcggctggaggggcaggaggaggaggaggacaaccgggacagttccatgaagctctccttccgggcccgggcctacggcttcaggggccctgggccgcagctgcgacgaggctggaggccatcctcccgggaggacagccttgaggcgggcctgcccctccaggtccgaggctaccccgaggagaagaaagaggaggagggcagcgcaaaccgcagaccagaggaccaggagctggagagcctgtcggccattgaagcagagctggagaaagtggcccaccagctgcaggcactacggcggggctgagacaccggctggcagggctggccccagggcaccctgtggccctggctctgctgtccccttggcaggtcctggccagatggcccggatgctgcttccggtagggaggcagcctccagcctgcccaagcccaggccaccctatcgccccctacgcgccttgtctcctactcctgactcctacctgccctggaacatcctttgcagggcagccccacaactttaaacattgacgattccttctctgaacacaggcagctttctagaagtttcccttcctccatcctatccactgggcacaactgcaataacttctgaccttttggtgaaagctgagaactcctgactgtaacatattctgtatgaactttatctaaagaaaaataaatctgttctgggctctttcctctgaa

SEQ ID NO: 5902 - DNA, 1474 bp, Homo sapiens
  source 1..1474: mol_type = unassigned DNA
cgagccccgtgcaggggagcttgcgggaggatcgaccgacagacggacgcacgccgaggcactgcgcccccagccccgcgccggtgccaccgcagcccgaccccggccgccagtccagccgcccctcgcccggtgcctaggtgcccggccccacaccgccagctgctcggcgcccgggtccgccatgcgctccgccgctgtcctggctcttctgctctgcgccgggcaagtcactgcgctccctgtgaacagccctatgaataaaggggataccgaggtgatgaaatgcatcgttgaggtcatctccgacacactttccaagcccagccccatgcctgtcagccaggaatgttttgagacactccgaggagatgaacggatcctttccattctgagacatcagaatttactgaaggagctccaagacctcgctctccaaggcgccaaggagagggcacatcagcagaagaaacacagcggttttgaagatgaactctcagaggttcttgagaaccagagcagccaggccgagctgaaaggtcggtcggaggctctggctgtggatggagctgggaagcctggggctgaggaggctcaggaccccgaagggaagggagaacaggagcactcccagcagaaagaggaggaggaggagatggcagtggtcccgcaaggcctcttccggggtgggaagagcggagagctggagcaggaggaggagcggctctccaaggagtgggaggactccaaacgctggagcaagatggaccagctggccaaggagctgacggctgagaagcggctggaggggcaggaggaggaggaggacaaccgggacagttccatgaagctctccttccgggcccgggcctacggcttcaggggccctgggccgcagctgcgacgaggctggaggccatcctcccgggaggacagccttgaggcgggcctgcccctccaggtccgaggctaccccgaggagaagaaagaggaggagggcagcgcaaaccgcagaccagaggaccaggagctggagagcctgtcggccattgaagcagagctggagaaagtggcccaccagctgcaggcactacggcggggctgagacaccggctggcagggctggccccagggcaccctgtggccctggctctgctgtccccttggcaggtcctggccagatggcccggatgctgcttccggtagggaggcagcctccagcctgcccaagcccaggccaccctatcgccccctacgcgccttgtctcctactcctgactcctacctgccctggaacatcctttgcagggcagccccacaactttaaacattgacgattccttctctgaacacaggcagctttctagaagtttcccttcctccatcctatccactgggcacaactgcaataacttctgaccttttggtgaaagctgagaactcctgactgtaacatattctgtatgaactttat

SEQ ID NO: 5903 - DNA, 2550 bp, Homo sapiens
  source 1..2550: mol_type = unassigned DNA
ccgctcctggctgcccgctcctcccggccctgcggcccccgcctgccctttaaaagagcggggcctgcgccggccgcgccacaccgcggggaccaggaggcacgctggttttccggggccgctccatcgcgccttcctcctgcgcctcgcttctccggtccagccgccatcttcctttccgcacaggggccgccgagcggggccatgcagccaacgctgcttctcagcctcctgggagccgtggggctggcggctgtcaattccatgccagtggataacaggaaccacaatgaaggaatggtgactcgctgcatcattgaggtcctctcaaatgccttgtcgaagtccagcgctccacccatcacccctgagtgccgccaagtcctgaagacgagtagaaaagacgtcaaagacaaagagacaactgaaaatgaaaacacaaagtttgaagtaagattgttaagagacccagctgatgcctcggaagcccacgagtcctccagcaggggagaggcaggagccccaggggaggaggacatccaaggcccaacaaaggcagacacagagaaatgggcagagggaggcgggcacagccgagagcgagcggatgagccccagtggagcctctatccctccgacagccaagtctctgaagaagtgaagacacgccattctgagaagagccagagagaggatgaggaggaggaggagggagagaactatcaaaaaggggagcgaggggaagatagcagtgaagagaaacaccttgaagagccaggagagacacaaaacgcttttctcaatgaaagaaagcaggcttcagctataaaaaaagaggagttagtggccagatcggaaacacatgctgccgggcattctcaggagaagacacatagccgagagaagagtagccaggagagtggagaggagacagggagccaggagaatcacccccaggagtctaaaggccaaccccgaagccaggaagaatctgaggaaggtgaggaagatgccacctctgaggtggacaaacgacgcacgaggcccagacaccaccacgggaggagcaggcccgacaggtcctctcaaggagggagtcttccctctgaggaaaagggacacccccaggaggaatctgaggagtcaaacgtcagcatggccagtttaggggaaaagagggaccaccattcaacccactacagggcttcagaggaagaacctgaatatggagaagaaataaagggttatccaggcgtccaggcccctgaggacctggagtgggagcgctataggggcagaggaagtgaagaatacagggctccaagacctcagagtgaggagagttgggatgaggaggacaagagaaactaccccagcttagagcttgataagatggcacatggatatggtgaagaaagtgaggaagagaggggccttgagccgggaaagggacgccatcacagaggcaggggaggggagccacgtgcctatttcatgtctgacaccagagaagagaaaaggttcttgggtgaaggacaccaccgtgtccaagaaaaccagatggacaaggcaaggaggcatccacaaggtgcgtggaaagagctggacagaaattatctcaactacggtgaggaaggagccccagggaagtggcagcagcagggagacctgcaggacactaaagaaaacagggaggaagctaggtttcaagataaacaatatagctcccatcacacagctgaaaagaggaagagattaggggaactgttcaacccatactacgaccctctccagtggaagagcagccattttgaaagaagagacaacatgaatgacaattttctcgagggtgaggaggaaaatgagctgaccttgaacgagaagaatttcttcccagaatacaactatgactggtgggagaaaaagcccttctctgaggatgtgaactgggggtatgagaagagaaacctcgccagggtccccaagctggacctgaaaaggcaatatgacagggtggcccaactggaccagctccttcactacaggaagaagtcagctgagtttccagacttctatgattctgaggagccggtgagcacccaccaggaggcagaaaatgaaaaggacagggctgaccagacagtcctgacagaggacgagaaaaaagaactcgaaaacttggctgcaatggatttggaactacagaagatagctgagaaattcagccaaaggggctgactgtcattggagcggtgggcactgttaagaagcagccatcacatgatctgtttttcaccacttcactgaaagacaccatttatctacccaagggcagaaagtagaacttactattcattaaatgtttgacacaattggaattgtctttaatttctgtcagaatgctattgaaaatgtgaattgcatgacttgtagcatattcttttctgcaaaatagacatattaacatgcttatgacaatgactgtgctactgtctttggaaaaatgtttgtctcagttggaaataataaaagattcacctgagaccaaaa

SEQ ID NO: 5904 - DNA, 1129 bp, Homo sapiens
  source 1..1129: mol_type = unassigned DNA
cacgctggttttccggggccgctccatcgcgccttcctcctgcgcctcgcttctccggtccagccgccatcttcctttccgcacaggggccgccgagcggggccatgcagccaacgctgcttctcagcctcctgggagccgtggggctggcggtcatttatttgcagaagatattacagatttccagcggaaagagaaagtgctgaaatgggtgtgttctcaagtagccatttggaggatgaaagaacactgtcaattccatgccagtggataacaggaaccacaatgaaggaatggtgactcgctgcatcattgaggtcctctcaaatgccttgtcgaagtccagcgctccacccatcacccctgagtgccgccaagtcctgaagacgagtagaaaagacgtcaaagacaaagagacaactgaaaatgaaaacacaaagtttgaagtaagattgttaagagacccagctgatgcctcggaagcccacgagtcctccagcaggggagaggcaggagccccaggggaggaggacatccaaggcccaacaaaggcagacacagagaaatgggcagagggaggcgggcacagccgagagcgagcggatgagccccagtggagcctctatccctccgacagccaagtctctgaagaagtgaagacacgccattctgagaagagccagagagaggatgaggaggaggaggagggagagaactatcaaaaaggggagcgaggggaagatagcagtgaagagaaacaccttgaagagccaggagagacacaaaacgcttttctcaatgaaagaaagcaggcttcagctataaaaaaagaggagttagtggccagatcggaaacacatgctgccgggcattctcaggagaagacacatagccgagagaagagtagccaggagagtggagaggagacagggagccaggagaatcacccccaggagtctaaaggccaaccccgaagccaggaagaatctgaggaaggtgaggaagatgccacctctgaggtggacaaacgacgcacgaggcccagacaccaccacgggaggagcaggcccgacaggtcctctcaaggagggagtcttccctctgaggaaaagggacacccccaggagga

SEQ ID NO: 5905 - DNA, 5493 bp, Homo sapiens
  source 1..5493: mol_type = unassigned DNA
gtgggggccaggcagcacagatgaagcatttacctatctaggtaagtcaggaggagctcaaaaggagaagaaaacagtaggaggcaggggaagcagcctctgtctccatctctgccctttgaaacaaaagggtatttcttttctctcttcagcccccaacccagtggaggcccggcttgggacattgttcacttcccctcgcttcccctctagaagccccctttgccatccctgcaccttgtttcgggtgatgcccgagagggagctgtggccagcggggactggctcagaacccgtgacccgtgtcggcagctgtgacagcatgatgagcagcacctccacccgctctggatctagtgatagcagctacgacttcctgtccactgaagagaaggagtgtctgctcttcctggaggagaccattggctcactggacacggaggctgacagcggactgtccactgacgagtctgagccagccacaactcccagaggtttccgagcactgcccataacccaacccactccccggggaggtccagaggagaccatcactcagcaaggacgaacgccaaggacagtaactgagtccagctcatcccaccctcctgagccccagggcctaggcctcaggtctggctcctacagcctccctaggaatatccacattgccagaagccagaacttcaggaaaagcaccacccaggctagcagtcacaaccctggagaaccggggaggcttgcgccagagcctgagaaagaacaggtcagccagagcagccaacccaggcaggcacctgccagcccccaggaggctgcccttgacttggacgtggtgctcatccctccgccagaagctttccgggacacccagccagagcagtgtagggaagccagcctgcccgaggggccaggacagcagggccacacaccccagctccacacaccatccagctcccaggaaagagagcagactccttcagaagccatgtcccaaaaagccaaggaaacagtctcaaccaggtacacacaaccccagcctcctcctgcagggttgcctcagaatgcaagagctgaagatgctcccctctcatcaggggaggacccaaacagccgactagctcccctcacaacccctaagccccggaagctgccacctaatattgttctgaagagcagccgaagcagtttccacagtgacccccagcactggctgtcccgccacactgaggctgcccctggagattctggcctgatctcctgttcactgcaagagcagagaaaagcacgtaaagaagctctagagaagctggggctaccccaggatcaagatgagcctggactccacttaagtaagcccaccagctccatcagacccaaggagacacgggcccagcatctgtccccagctccaggtctggctcagcctgcagctccagcccaggcctcagcagctattcctgctgctgggaaggctctggctcaagctccggctccagctccaggtccagctcagggacctttgccaatgaagtctccagctccaggcaatgttgcagctagcaaatctatgccaatttctatccctaaggccccaagggcaaacagtgccctgactccaccgaagccagagtcagggctgactctccaggagagcaacacccctggcctgagacagatgaacttcaagtccaacactctggagcgctcaggcgtgggactgagcagctacctttcaactgagaaagatgccagccccaaaaccagcacttctctgggaaagggctccttcttggacaagatctcgcccagtgtcttacgtaattctcggccccgcccggcctccctgggcacggggaaagattttgcaggtatccaggtaggcaagctggctgacctggagcaggagcagagctccaagcgcctgtcctaccaaggacagagccgtgacaagcttcctcgccccccctgtgtcagtgtcaagatctccccaaagggtgtccccaatgaacacagaagggaggccctgaagaagctgggactgttgaaggagtagactctgcgaccagtacagaccctgtcctggctgaacaagaagagacacatgctccacttgggagcctttgccaccacgcaactcagggctcaagatgaatgggagggagagatttgagtccaagcatacatttatattcagtgttgtgccattgagttcccatgtggatcattctgaaggtgatctccacaagagggtgtgtgtgtgtgtgtttggtgtgtgtgtggagggggggccgctggatacatcactgaagctattgatataacacaatgagtcactgttcagaattttgctcttgttagatgttttcttacattgggtagagtccagcctagtgagagctgagtgaaggggctggccatgcctgagacaaaaagtcaaatgagacaatggacgtgtcaatgacttgaaaaaaagtcacatccagcaaatgcagggtcacatgaaatatgggcctcctggaatccctacagtggatggagactggctcataccttgccagatccctctctcagttccagccttctggacaaggcctgggctaagaggagctgattcgttatctcttcacccactgccctctcagtatcaccagtcccaaagacaggatacgtccctgtaacccaatctctcggttgattgatagcagaacagctcttgttggtctgagaaggcaggataagtgaccacatatttatgccactacctccaccagggagagtccttctccacaggcttgataaattcaatcaccaactgtgctgtcgtccctgactctgctactcccgttcttcctgctttcctgctccgtatctcagtctgcactgaccccagggctgggctgacatcaagatgggagcccagcccacgggctttataaacacccaagaaccgtttcagatcttctctgtgctgatgcaggtagttttaaatttttctcagttccagtgatagaaaacccacacaatacatcctctgccagtcttaatagaatatcagaggtaagaggggcctcagagaagctctgacgcagtgctgctggggaagggaagtgactaaccccgggtcagcctgccatttagggaaagagctgaggttcttacccttgttgcatgctgccacctctccttagccagtgctcttgtacatccacacagcaccctaaggagccatagtcaccatcaaagactcaaccctaaggcccttcaagatctcaaagtgccttctgaagcatcagagattaaatattgttcaaactaatagttattgctgtggcttttaattttatctttggaagatagctatatggtaactcatcattaaccagaacacctctcccctcaaattccgtgaccaagttgtgcagcttgagcaaatgccgaaagagggtattatgggtgggtggtgtgggcttgcaaatacaagcttggaggtgagacatggccagacatgactcctgcttccccttaggaagtaaatcttacttatggttgtgaactgcttggagtccaggatgcccagatgtgaggggcagatgaagggaatgttgctggaaaggtgccttttaaggctgctgagaatttctggactgtgtcctgatggacgcagcaccatcaaagcccagaatttctgaaaacggtgacaaggttaacataaggacaacaaatactccaccctgtcatggtatgtgaggtgtgggtgtggcggtttctgtgtacgtttgctcatacacgcacatccaaaagcctgtgcctcattcctggccatgggtgaggacttggtctgtcacggctgatgaggactcccacaaccggccaagttatgtcttattatacacccccagaaagagagaaagctgccttctggaggactgattccacatgctatattcagctgagttgatttctgtgtctatttcaacccataacctgaagaatgatcaccttattccttattcattaattttcttgattaatagggaaacttgggaatagctataaagtaaaacttgggtggaacctggggccctggcatcacacaagtgtgattaggatggtcaaggtcatcaggagtacagcctattatattcccacatcctgagaaaggtcatttctcccacacacgacaaagtcacagacatcctgcacctgccactaggcatcctcatcctactgacatgcccatttctccagttttcttaatctgagactcccttcccttgttttttaaagataccgtgcttctccacatcctcatccttcaaggagcatattttgctcttaggatggtctttgggattcaagaatagaataataaatccaaacttggtcattcccattttgaagagatgcaagagggcccagtgaggacatccgcctccctgaaagtggtgctagacagagctgaggtcattgtatctgtgtatccacataggatttctcttaattcagcttgaattgatggggagggaggtaagagtagggtcagagttactcatcccttttcaaagaattgtgggtggaagtttgtaaaggccattcatttgattttcaaaatcaaagcgacagctctacttccacttggccttagatctctgctataccctgccatagccttgatgccactgggcacaagccacctgccaaatacaggagtggcctctcccagcctggcatgataggggggtctgtgccctcagatgtgttgacagctgctcttctgaattgccacacctgtgctacacttggaattctgtgctctgactctgcagggtaggaccacgtgccatctcacacagaggtcaaccgatgagcccactcactcgtacatgccttcttccacagtgggaagcatgatctggcaggggccgccctgtaggctggggatgggctgctgtgtgaatgttgacgttcgtttcatggagaaaggggaggtgaaagattgaagagcaggttcctgtcaatgttctgagttcgagctggaggtgtagattgaatagtctacatggtctgtgagtgtgtgagatgaacccttccatcctttgacacctggttgtatgtgtaggctaagaaggaaggaccctcctgtcagtgtgcaaagctgtaatctcatggactagaggagagggggccaaggggatggacaggagaagtcatgcagaatctaagcaggaatgcagatagaacacatctaggctcttttccccaggagagtgatgatggagcatatagatctggctcaaattcagcctccatcacttaccagtcaggaaccctggcgatatcactttaactttctgaacctcagagtcttcacctataagacggggaaaataataccaccctttcaagattgttgagataaataagtgatataaaacatgtaaagcttagttctggccacagtgtagctactcaataaatgataatactacc

SEQ ID NO: 5906 - DNA, 3142 bp, Homo sapiens
  source 1..3142: mol_type = unassigned DNA
agtggcagggtgggggccaggcagcacagatgaagcatttacctatctaggtaagtcaggaggagctcaaaaggagaagaaaacagtaggaggcaggggaagcagcctctgtctccatctctgccctttgaaacaaaagggtatttcttttctctcttcagcccccaacccagtggagagtgatagcagctacgacttcctgtccactgaagagaaggagtgtctgctcttcctggaggagaccattggctcactggacacggaggctgacagcggactgtccactgacgagtctgagccagccacaactcccagaggtttccgagcactgcccataacccaacccactccccggggaggtccagaggagaccatcactcagcaaggacgaacgccaaggacagtaactgagtccagctcatcccaccctcctgagccccagggcctaggcctcaggtctggctcctacagcctccctaggaatatccacattgccagaagccagaacttcaggaaaagcaccacccaggctagcagtcacaaccctggagaaccggggaggcttgcgccagagcctgagaaagaacaggtcagccagagcagccaacccaggcaggcacctgccagcccccaggaggctgcccttgacttggacgtggtgctcatccctccgccagaagctttccgggacacccagccagagcagtgtagggaagccagcctgcccgaggggccaggacagcagggccacacaccccagctccacacaccatccagctcccaggaaagagagcagactccttcagaagccatgtcccaaaaagccaaggaaacagtctcaaccaggtacacacaaccccagcctcctcctgcagggttgcctcagaatgcaagagctgaagatgctcccctctcatcaggggaggacccaaacagccgactagctcccctcacaacccctaagccccggaagctgccacctaatattgttctgaagagcagccgaagcagtttccacagtgacccccagcactggctgtcccgccacactgaggctgcccctggagattctggcctgatctcctgttcactgcaagagcagagaaaagcacgtaaagaagctctagagaagctggggctaccccaggatcaagatgagcctggactccacttaagtaagcccaccagctccatcagacccaaggagacacgggcccagcatctgtccccagctccaggtctggctcagcctgcagctccagcccaggcctcagcagctattcctgctgctgggaaggctctggctcaagctccggctccagctccaggtccagctcagggacctttgccaatgaagtctccagctccaggcaatgttgcagctagcaaatctatgccaatttctatccctaaggccccaagggcaaacagtgccctgactccaccgaagccagagtcagggctgactctccaggagagcaacacccctggcctgagacagatgaacttcaagtccaacactctggagcgctcaggcgtgggactgagcagctacctttcaactgagaaagatgccagccccaaaaccagcacttctctgggaaagggctccttcttggacaagatctcgcccagtgtcttacgtaattctcggccccgcccggcctccctgggcacggggaaagattttgcaggtatccaggtaggcaagctggctgacctggagcaggagcagagctccaagcgcctgtcctaccaaggacagagccgtgacaagcttcctcgccccccctgtgtcagtgtcaagatctccccaaagggtgtccccaatgaacacagaagggaggccctgaagaagctgggactgttgaaggagtagactctgcgaccagtacagaccctgtcctggctgaacaagaagagacacatgctccacttgggagcctttgccaccacgcaactcagggctcaagatgaatgggagggagagatttgagtccaagcatacatttatattcagtgttgtgccattgagttcccatgtggatcattctgaaggtgatctccacaagagggtgtgtgtgtgtgtgtttggtgtgtgtgtggagggggggccgctggatacatcactgaagctattgatataacacaatgagtcactgttcagaattttgctcttgttagatgttttcttacattgggtagagtccagcctagtgagagctgagtgaaggggctggccatgcctgagacaaaaagtcaaatgagacaatggacgtgtcaatgacttgaaaaaaagtcacatccagcaaatgcagggtcacatgaaatatgggcctcctggaatccctacagtggatggagactggctcataccttgccagatccctctctcagttccagccttctggacaaggcctgggctaagaggagctgattcgttatctcttcacccactgccctctcagtatcaccagtcccaaagacaggatacgtccctgtaacccaatctctcggttgattgatagcagaacagctcttgttggtctgagaaggcaggataagtgaccacatatttatgccactacctccaccagggagagtccttctccacaggcttgataaattcaatcaccaactgtgctgtcgtccctgactctgctactcccgttcttcctgctttcctgctccgtatctcagtctgcactgaccccagggctgggctgacatcaagatgggagcccagcccacgggctttataaacacccaagaaccgtttcagatcttctctgtgctgatgcaggtagttttaaatttttctcagttccagtgatagaaaacccacacaatacatcctctgccagtcttaatagaatatcagaggtaagaggggcctcagagaagctctgacgcagtgctgctggggaagggaagtgactaaccccgggtcagcctgccatttagggaaagagctgaggttcttacccttgttgcatgctgccacctctccttagccagtgctcttgtacatccacacagcaccctaaggagccatagtcaccatcaaagactcaaccctaaggcccttcaagatctcaaagtgccttctgaagcatcagagattaaatattgttcaaactaa

SEQ ID NO: 5907 - DNA, 7346 bp, Homo sapiens
  source 1..7346: mol_type = unassigned DNA
acatcctccggctgcccgcgcacctctccacgccggccccgttccgcggctcgccctcggctgcgctcggctcccgcgggcgctcggccccgagcccctcctccccctacccgccggccggacagggaggagccaatggctgggcctgccatccacaccgctcccatgctgttcctcgtcctcctgctgcccctggagctgagcctggcaggcgcccttgcacctgggacccctgcccggaacctccctgagaatcacattgacctcccaggcccagcgctgtggacgcctcaggccagccaccaccgccggcggggcccgggcaagaaggagtggggcccaggcctgcccagccaggcccaggatggggctgtggtcaccgccaccaggcaggcctccaggctgccagaggctgaggggctgctgcctgagcagagtcctgcaggcctgctgcaggacaaggacctgctcctgggactggcattgccctaccccgagaaggagaaccgacctccaggttgggagaggaccaggaaacgcagcagggagcacaagagacgcagggacaggttgaggctgcaccaaggccgagccttggtccgaggtcccagctccctgatgaagaaggcagagctctccgaagcccaggtgctggatgcagccatggaggaatcctccaccagcctggcgcccaccatgttctttctcaccacctttgaggcagcacctgccacagaagagtccctgatcctgcccgtcacctccctgcggccccagcaggcacagcccaggtctgacggggaggtgatgcccacgctggacatggccttgttcgactggaccgattatgaagacttaaaacctgatggttggccctctgcaaagaagaaagagaaacaccgcggtaaactctccagtgatggtaacgaaacatcaccagccgaaggggaaccatgcgaccatcaccaagactgcctgccagggacttgctgcgacctgcgggagcatctctgcacaccccacaaccgaggcctcaacaacaaatgcttcgatgactgcatgtgtgtggaagggctgcgctgctatgccaaattccaccggaaccgcagggttacacggaggaaagggcgctgtgtggagcccgagacggccaacggcgaccagggatccttcatcaacgtctagcggccccgcgggactggggactgagcccaggaggtttgcacaagccgggcgatttgtttgtaactagcagtgggagatcaagttggggaacagatggctgaggctgcagactcaggcccaggacactcaaccccaggaggggagccgctcggcgaatgagctgggtgggtgcccaggagccggcccgcagcacctgcacacacgaagtccggacccacgcagcctccatcccgcgtgtcttgctctccgcgatggcaatgccgagagtgccctctactgtccgactccagcactgcaacagcttcaagttcaaaaccaagaggcgtttttgagagtggaaaagaaatttaaacttcccgaaagaaggtccaccatcaggagatgaatatggaacatctcctatgtaccaggcactgtgctaagtgctggaatacattatctcattgaattatcacaacgaccttttcaagtaggcattatcaccatgcgacaggttgaggaccgtgaggcacgctggagttatttgactcgacttgcccagggtcccaggtcagtgctcctcaaacctgaacatgctaagagtcacctggaggtccagttaaaaatgtacatctggccgggcgcggcggctcacgcttgtaatcccagcactttgggaggccaaggcgggtggctcacctgaggtcaggagttcgagaccagcctggccaacatggggaaaccccgtctctattaaaaatacaaaaattaggccaggcgcggtggtgcacacctgtaatcccagctactcggaggctgaggcaccagaatcgcttgaacttgggaggcagaggttgcagtgagcagagatcgtgccactgcactccagcctgggggacaagagtgaaactccatctcaaaaaaaaaaaaaaaaaaaagcacatctgactcagtgggctctgtgctctaacaagctcccagggaacgcgaggctgctggcccagggacccactgagaggtcctgggaagtacatggcagagcaaggacatgaacctgggccaaggctgtccagctccaaggcccacgttcttgctgctccacagccaagaatttcttccagattctctaaggcttttggcaagagaggctcacaccctggtattcccttcctctgtggctggaataacttgactgttctctgccttccctggataaaggtgtatcatgtttaaaaacaaaacaaaatacaacttaagcacatacttgcttgcaggaataagttgggcaggttgatccctgtggtctagtagctgatatcctgggataagaagtgtttggggaaaagaatcatgttggcctttatgtccctgtggtcctgatcatccagtcctggacaggcactttacagttttctggagcacttcccccccaggggttctgatgcaagcatggaatccaaaaaaaccccacacatattgcccatgtttacccactttgcatactgtttagtgatttccaggaccacaaaaccatccctggaaccccaccccacatttttgcagcagagcccactgggaagttgaggctcacctgaaattgaggtgctatctgaagctaactgcccctaacaggccagactcacaatgcccacccaggacatctgtcccagcagatctggcttcaggggtcacttcaggagaaccatttaaatccccccacttggcatctcactcctggccaaccctctgttccagggcgaaccaggttgcaaatgacaaaagactttcctggccaaattcctcactggcctggatcacgcccataagatgccagagatgtttactgcgttggaaaaatcagtcggggtcaggggtcaggcaccaaggaaagcaggcagatctagaagaaattaaatatgcttgttctctccctatccaagtttgatgggcatgggaaccttgtggggagggagcagggagggcaggggaactgggagatcaaagcaggctagctgaaaggcagatatggctagacacaatggctcatgcctgtaatcccagcactttgggaggctgaggtgggcggaccacctcaggtcaggagtttgagaccagcctggccaacatggcaaaacccggtctctaccaaatatacaaaaattaaggctgggcacgagggctcatgtctgacatcccagcactctgggaggccgaggtaggcagatcacttgaagtaaggcgttcgagaacagcctgaccaacatggtgaaaccccatctctactaaaaatacaaaaattagccaggcatggtggcaggtgcctgtaatcccagctactcaggaggctcaggcgggagaatcacttgaacccaggaggcggaggttgcggtgagccaagatcacgccattgcactccagcctgggcgacagagtgagactccaaaaatataaaacacttaaaaatgtaaaaaggcagatctgccagcagcttcgtacttgagaccagacaacccacacatgctgtgtgtgcctcacattaagtggtgactcgggactgtgctggctctgtggggctagaaccctaaggagtaccgccggaagaaagcccagcattactatggctgggggacagctgttagatggtcctaggacatcagccatggagaacacagagggtcaggacaaagctaaaatgcccatagaactgccactggttgccagggtagttccatggttggaaattcaaggcccgtctctttgccctagctatctctatttgacatttccaaagagggatgggtggatggaacctcttaactccagagctgggaatcccaaagccctctcaagtgtctaaccaacctctctgccaggaagttcttccttaggtctatcttaaatttattttgctcatacagaagccagtttcctctaatccagggtttagcaaacttttactgtgaggagccaaataaacattttaggatttgcaagccatctgatctccaccagctactcagctctgccgtagctcgaagcagccacagagagtgtgtaaatgaattcatggctatgctccaggaaaactatttctggacacacatgtgaattctgtatacttttcacatgtcacaaaatattattctctctttccttttttttttttttggagatggagttttgctctgctgcccaggctggaatgcagtggctcagtctcagctcactgcaacctcttcatcccaggttcaagcaattctcctgcctcagcctcccaagtagctgtgactacaggcatgtgccaccacacctggttaatttttgtatttttagtagagataaggttttaccatgttggccaggctggtctcaaacttctgacctcaggtgatccgcccgcctcagcctcccaaaatgctgggattacaggtgtgagccaccgcacctggccataaaatattattagtttaattttctaaaaccatttaaaagtgcaaaaactgctctttgcttgccaactgcgcaaaaccaggcagtggggcagatttggcctgagggtcacggtttgccaacccctgctcaagcctgctcactctcaacgctggctgcacgttgcaataatccaggaacattcacaggcctggggcccacccacaaagcttctgttttgtttggtctgggcttcatagtttttctcccaggtaacttcaggtgcagctggggcggagagtctctgctctccccttccatctgtagcagtgtggctggtgttaaatccacctattccacctctcacagctttggcaaccttaggaaagtttcttaaggtctctgtgccttgattttttcatctgtaaaatgggaataataactctcccttcatagggttgttgtgagtagtgaatgcatacttctttttttttttttttcttttgagacagagtttcactcttgttgcccaggctggagtgcagtggcacgatctcggctcactgcgacctctgcctcctgggtacaagtgattctcccgcctcagcctctcgcgtacctgggattataggcaagcatcaccacgcccggttactgtttgtatttttagtagagatggggtttcaccatgttggccaggctggtctcaaactcctgacctcaggtgatccccccgtctcagcctcccaaagtgctgggattacaggcatgagccagcatgcctggcctgtgaacgcagaattcttataaggtgtttagaacagtgcctagcacctaataaacctccagtgttagctaatttgttattctaggagaattttagatgtcggttctttgacaatgacccatcacatactctgagatcatttctaagtcaccattcaagctccttccccaaagtgtgttccatagaacactgggaccatgagatgctctattagaaagggtcagggtacggttccatggtcagagaggtttggaaaactgttctggcctcagcccttggcagcatgtgcagattccaggcaccgaggcagggctggaggagtaagtggctttgcaataaaatgggtgctggagtctaaaatgataccctgggtggagtgggggagctgagcaggaggccaggtggcaaccagtagctgctgggcccgtggcctgaaccctcctgcactcctccagctggagtctcaccgcggatcccaggaatacctgctgttcccacagggctgcctttccgtagtttgtctggagacaccaagagtggtttccatgcctgctgggaataggctgagcatgcaatgacatgagggccaaggcttgtgggaaaatgacagcttcacagccccttgaggagtgaccaagccacaaagtaaatcctaaagccacaaccccttctaccactgagctgctggaggtgggtccttatttcaagccatattcaacccacccaacaaaacctaacattgaggtggtgggcacacggcccctgccgtggggctcactctgcagctggagagacagcatacctgaaacctgcaaggaaccggtttataaaacaacagaacagccaggaaaatggtgctaggagagacagtggagaggccagagaagcaaaccactgtggctcctcactgggggtttcacggggttggactgagccctgtcacctctgtgatagtcttcactctgacaggcaatggtgactgtgtgtgtttcctggggaggaggttagcagggacggttgcctttcctgggaagggcagtttgcagaaccaggggtttatattgcagggagtgtattttctgaattctaagtcagaacaagcagtctgatacaggatccatggctgggtcacttctgggtgcaagaggctttctagaccttagacactcaagattacggtcccgggccagtaacagcacctgggagcttggtagaaatgcagaatcttagcctaggcaacatagggagacctcatctctgcaaaaaataacaaaattagccgggcatggtggtgcacacctgtagtcccagctattctccaggctgaggtgggaggatcgcttgagcccaagaggttgaggctgcagtgagccatgatcgcaccactgcactccagcttaggcaatacagcgagaccttgtctcaaaaaaagacaaaaaaaacaaaaagaaatgtagattcttgggccccaccaccccacgcctactgagccagaatctctgggggtggggcccagccatttggcttttcacaagttctccaggtcattcttgggcacgatcaaatttgagaatcacaggtctaggatacgacggggaaaacagaaatgtggggtggtcagggacattcggataattcgggctatttgtattcaggtgtgagctggcaaatccgagacctgttttgcgtagctaattaccagcaatgacaaactcccaggctctgaggcccaagcctcctgggctgcaactggtctttatttttggaggcaatgaatggagcacctcggcctgggaccctcagtgtagggttttctgactcttaggcaacttcctagggtgctgtacttcctttttaaagttggggagcggcagggggagggggaagtgccacgcccttgtagtttcatgatgtcatgttgcatgtgctcttgagctgtaaataaagagacgatggttaaaaagcc

SEQ ID NO: 5908 - DNA, 746 bp, Homo sapiens
  source 1..746: mol_type = unassigned DNA
gcagtacacaagtgctagccctagcagctcgcgatgtgcttcagcagagcagacgctgcggataactacccttttggaacatgtcaacagaggaaactttttcctcacttccatcccccgaatttgattgggaacaagtttgtccctcttaggggatcaccccacagagggcctgggtgttatttttcagatgaaatgacacctcatgcaggcaggtaccagaaagtaagtcctcagcaggaaaaacacaaacaaaattttgctccatttaatgtcttggtgcctcgatttaagaactacccaaaggacacttactatcccagccctggtgcatacaacccagagaagaagccaccgccaaaaattgcctggccaatgaaatttggatctccagactgggctcaggttccatgtctacagaaaagaaccctaaaagctgagctgtccacagacaaagactttagaaagcatcggaaccgtgtggcctacctaagcctgtattataattgagcggctgtaactaccttcacgtgctcctcttatacacagactctccaggactgaggacagagctgctcttcttcttctacgttactgtggccctcttgtctggcagcctggagcccagggagggacaggggcttatagctgctgtatgagaacataaagactagtgcacagtgctatctccatctactgacttgtggtgtacacgtgcatgtctgggtctgtgggtttctgttggg

SEQ ID NO: 5909 - DNA, 2627 bp, Homo sapiens
  source 1..2627: mol_type = unassigned DNA
ccttacttgctggtggcccagacttcgggacattctgaacctcactgtccttccctctacaacagcgcattcctcttggcccagcttccaaagctatttgccgccccgtcaaccctgcagcccctacagccgcgaatccaggaaaccctctacccgcagcccagctactgagtttacaatcccctgggctttgggctccaaggtgcgggttcctgccccagtagtggctcggtggacgccccaacttgccgcgcaggcgcgctcgggccctctccccctccccgcgctccgcagctgggaatcacgggactagccttcgtttccttggcaacgcagtacacaagtgctagccctagcagctcgcgatgtgcttcagcagagcagacgctgcggataactacccttttggaacatgtcaacagaggaaactttttcctcacttccatcccccgaatttgattgggaacaagtttgtccctcttaggggatcaccccacagagggcctgggtgttatttttcagatggatatggcttggcatacgacttatctaagatcccaaccagtataaaaggatatactttgggagccagaacagctgtgaggtttaagccaatacagaaggaaatgacacctcatgcaggcaggtaccagaaagtaagtcctcagcaggaaaaacacaaacaaaattttgctccatttaatgtcttggtgcctcgatttaagaactacccaaaggacacttactatcccagccctggtgcatacaacccagagaagaagccaccgccaaaaattgcctggccaatgaaatttggatctccagactgggctcaggttccatgtctacagaaaagaaccctaaaagctgagctgtccacagacaaagactttagaaagcatcggaaccgtgtggcctacctaagcctgtattataattgagcggctgtaactaccttcacgtgctcctcttatacacagactctccaggactgaggacagagctgctcttcttcttctacgttactgtggccctcttgtctggcagcctggagcccagggagggacaggggcttatagctgctgtatgagaacataaagactagtgcacagtgctatctccatctactgacttgtggtgtacacgtgcatgtctgggtctgtgggtttctgttgggtgctgagttgggtgatttcattttagtgaaatatttgtgggcccctgctctctagttctaattcccaggagccaattttatatattctaccactagccctggtcataggaggctgttagcctatacatgtcaagggtttggatgggatttgggcttgctagatacagaaaacacttaaggcagattaaaacatgtattggagctctcccaattgtgttgctcagtgtggagtgggaaggtcttgatttggttgactttcccagattgacataaaactcaaaaaccaaaaaattgcccctttcctatgacatcatccatttagtctgtgagtcaacatatatactgaggtcctactatgtgttgagcagagcagtaagcactggggatatggcaggaatcaaaataaacttatctactaagtccttgggcctggcctgaagtcagaggaggactccccagggcagctaggggattgggtctgccctccaatctgaatgaccccctagaaccttacaagtcattctggggttataaagatcataacatttatagccccagactgacttgtaagcagctgcatttaaagtacttactcagacactcaggcctgagagatagacccctttctttccagcactagctgaaataatcaagtatatagtttgttcaggattggcactaaatgtgatttaatcttttaataaaagggtccttttgtacccacttaggcttcttcgtaattaccagaaaggtgataagcctgcatgtgtctggacaccaaagattgagaagctgccagtggctgcaagagagcctactgtaaccctcatggccaccccctgatgagtgttacctggggaaagggctagcaagaggtgaagcctcctggtcatatgatgctgggggtgcctaattccttaaaggccaaggtcttctgaaataataatggtgaaggacagaaaagtctttatgagaaatcacataggatatattaagataatgataaagatacctcagcaagaacatacctaatatatacacttcttttaatctgatgacttaatgatttctgttatcaagaagtatttatgacttgagataagtcaggattaactgttatcacctctcctgtacacctccctcctttttctcctttgtacccacatgtgcagattttttcagaggtgacaatttagcatttaatgtttttttttctgcttcaagttcttaggtccctttggaggatattgatgggggtggaggtggggatagaacatctttcacactgtttggtacagagacgctcaaagcttttcccagggaaaggaactctctaaaatagtaatctgatttgatgaaagataaaattttaatatagcttcagttaaccttcaggatactttaaatgctacattgtatataaaagtaataaagtacaaatgaacacgaa

SEQ ID NO: 5910 - DNA, 3131 bp, Homo sapiens
  source 1..3131: mol_type = unassigned DNA
tgggcatatgtgtgaagcagcaacgtagaggggctgaagaggagaaattcatggagagaaagaatgcacctagagtgagctctgcagagtgctgcgtgggatatccctagagtttggtctagtgaaggcacgctaaccaggcacctaaggcatttcaagtagtgacttcccacatttggctaggaatgtgggtcctcctccgaagtgggtaccccctccgtatcttgttacccctgcgtggggagtggatgggtcggaggggcctgccccgaaacttggccccaggccctcctcgcagacgttacaggaaggagactctccaagccttggatatgccagtgttgcctgtaactgcaactgaaatccgccagtatttgcgggggcatgggatccccttccaggatggtcacagttgcctgcgggcactgagcccctttgcagagtcttcacagctcaaaggccagactggtgttaccacttccttcagcctcttcattgacaagaccacaggccactttctctgcatgaccagcctagcagaagggagctgggaagacttccaggccagcgtggaggggcgaggggatggggccagggaggggtttctgcttagcaaggcaccagaatttgaggacagcgaggaggtccggaggatctggaaccgagcaatacctctctgggagctgcctgatcaggaggaggttcagctggctgatacaatgtttggccttaccaaggttacagatgacacactcaagcgtttcagtgtgcgatatctgcgacctgctcgcagtcttgtcttcccttggttctcccctgggggctcaggattacgaggcctgaagctcctagaggctaaatgccagggggatggagtgagctacgaggaaaccactattccccgacccagcgcctaccacaatctgtttggattaccactgattagtcgtcgagatgctgaggtggtactgacgagtcgtgagcttgacagcctggccttgaaccagtccacggggctgcctacccttactctaccccgaggaacgacctgcttaccccctgccttactcccttacctggaacagttccggcggattgtattctggttgggggatgaccttcggtcctgggaagccgccaagttgtttgcacgaaaactgaaccccaaacgatgcttcttggtgcgaccaggagaccagcaaccccgtcccctggaggccctgaacggaggcttcaatctttctcgtattcttcgtaccgccctgcctgcctggcacaagtccatcgtatctttccggcagcttcgggaggaggtgctaggagaactgtcaaatgtggagcaagcagctggcctccgctggagccgctttccagacctcaatcgtatcttgaagggacatcgaaagggcgagctgacggtcttcacagggccaacaggcagtggaaagacgacattcatcagtgagtatgccctggatttgtgttcccagggggtgaacacactgtggggtagcttcgagatcagcaatgtgagactagcccgggtcatgctgacacagtttgccgaggggcggctggaagatcaactggacaaatatgatcactgggctgaccgctttgaggacctgcccctctatttcatgactttccatggacagcaaagcatcaggactgtaatagatacaatgcaacatgcagtctacgtctatgacatttgtcatgtgatcatcgacaacctgcagttcatgatgggtcacgagcagctgtccacagacaggatcgcagctcaagactacatcatcggggtctttcggaagtttgcaacagacaataactgccatgtgacactggtcattcacccccggaaagaggatgatgacaaggaactgcagacagcgtccatttttggctcagccaaagcaagccaggaagcagacaatgttctgatcctgcaggacaggaagctggtaaccgggccagggaaacggtatctgcaggtgtccaagaaccgctttgatggagatgtaggtgtcttcccgcttgagttcaacaagaactccctcaccttctccattccaccaaagaacaaggcccggctcaagaagatcaaggatgacactggaccagtggccaaaaagccctcttctggcaaaaagggggctacgacacagaactctgagatttgctcaggccaggcccccactcccgaccagccagacacctccaagcgttcaaagtgaaggccgtgcagagctggtcactgaaatgagcctgataggataggctggagcataaaactctgcaagggctcctctatcctgtggtcctgagctgtgtgcccttctcagtctgaggggcctaacctagagcaggtttccatagtgagaaaattcaatgtagcagactactgagaaactactgtgttgctcaggctttgtttgaggtcctgtatatacagcactgaaaagagagataaagtccctgcctgcatgcattctggcggaagagacaagcaagcaatgaacaaattagcagaaaacctagttttagtgaaaaatgctgtaaagaaaatagaaatgcgatagagtgctggcaggctagtgtagataagtggtctgaaaaggtgtctctgagccgagggcatgtgagctggggcctaaacaactagaaggagagagccacgtgaacatccggcgaaggggacccaggcagagagaaaaggaaatccaagccctgaggtaggaatgagcaggtcagattcaaggcagtgaggtcaggccgcatgaacctggaggggaatcggggacttcatgcgaaactccagcctaggctttcaaagtcaaagggtgatacagtgggtaccaagctcctctgctccccactttgtagagcctagcatgaggtggcatgtactagaattggatcctaggtgcttagccctgcaatatcagggcctcactggtgggagctgcctcgggctgggttgcttggtcatagagccatagaaggaagctgtcagcccggagtgcctgccacctagacactgatgccattgtgtgctgcctcaagactgctggagtcaggacattttatagagccttttccagttttactaaaaaatttttccattg

SEQ ID NO: 5911 - DNA, 3175 bp, Homo sapiens
  source 1..3175: mol_type = unassigned DNA
tgggcatatgtgtgaagcagcaacgtagaggggctgaagaggagaaattcatggagagaaagaatgcacctagagtgagctctgcagagtgctgcgtgggatatccctagagtttggtctagtgaaggcacgctaaccaggcacctaaggcatttcaagtagtgacttcccacatttggctaggaatgtgggtcctcctccgaagtgggtaccccctccgtatcttgttacccctgcgtggggagtggatgggtcggaggggcctgccccgaaacttggccccaggccctcctcgcagacgttacaggaaggagactctccaagccttggatatgccagtgttgcctgtaactgcaactgaaatccgccagtatttgcgggggcatgggatccccttccaggatggtcacagttgcctgcgggcactgagcccctttgcagagtcttcacagctcaaaggccagactggtgttaccacttccttcagcctcttcattgacaagaccacaggccactttctctgcatgaccagcctagcagaagggagctgggaagacttccaggccagcgtggaggggcgaggggatggggccagggaggggtttctgcttagcaaggcaccagaatttgaggacagcgaggaggtccggaggatctggaaccgagcaatacctctctgggagctgcctgatcaggaggaggttcagctggctgatacaatgtttggccttaccaaggttacagatgacacactcaagcgtttcagtgtgcgatatctgcgacctgctcgcagtcttgtcttcccttggttctcccctgggggctcaggattacgaggcctgaagctcctagaggctaaatgccagggggatggagtgagctacgaggaaaccactattccccgacccagcgcctaccacaatctgtttggattaccactgattagtcgtcgagatgctgaggtggtactgacgagtcgtgagcttgacagcctggccttgaaccagtccacggggctgcctacccttactctaccccgaggaacgacctgcttaccccctgccttactcccttacctggaacagttccggcggattgtattctggttgggggatgaccttcggtcctgggaagccgccaagttgtttgcacgaaaactgaaccccaaacgatgcttcttggtgcgaccaggagaccagcaaccccgtcccctggaggccctgaacggaggcttcaatctttctcgtattcttcgtaccgccctgcctgcctggcacaagtccatcgtatctttccggcagcttcgggaggaggtgctaggagaactgtcaaatgtggagcaagcagctggcctccgctggagccgctttccagacctcaatcgtatcttgaagggacatcgaaagggcgagctgacggtcttcacagggccaacaggcagtggaaagacgacattcatcagtgagtatgccctggatttgtgttcccagggggtgaacacactgtggggtagcttcgagatcagcaatgtgagactagcccgggtcatgctgacacagtttgccgaggggcggctggaagatcaactggacaaatatgatcactgggctgaccgctttgaggacctgcccctctatttcatgactttccatggacagcaaagcatcaggactgtaatagatacaatgcaacatgcagtctacgtctatgacatttgtcatgtgatcatcgacaacctgcagttcatgatgggtcacgagcagctgtccacagacaggatcgcagctcaagactacatcatcggggtctttcggaagtttgcaacagacaataactgccatgtgacactggtcattcacccccggaaagaggatgatgacaaggaactgcagacagcgtccatttttggctcagccaaagtgagtggcctttagcggagctcaagctttggaaaatagagtgggcaagccaggaagcagacaatgttctgatcctgcaggacaggaagctggtaaccgggccagggaaacggtatctgcaggtgtccaagaaccgctttgatggagatgtaggtgtcttcccgcttgagttcaacaagaactccctcaccttctccattccaccaaagaacaaggcccggctcaagaagatcaaggatgacactggaccagtggccaaaaagccctcttctggcaaaaagggggctacgacacagaactctgagatttgctcaggccaggcccccactcccgaccagccagacacctccaagcgttcaaagtgaaggccgtgcagagctggtcactgaaatgagcctgataggataggctggagcataaaactctgcaagggctcctctatcctgtggtcctgagctgtgtgcccttctcagtctgaggggcctaacctagagcaggtttccatagtgagaaaattcaatgtagcagactactgagaaactactgtgttgctcaggctttgtttgaggtcctgtatatacagcactgaaaagagagataaagtccctgcctgcatgcattctggcggaagagacaagcaagcaatgaacaaattagcagaaaacctagttttagtgaaaaatgctgtaaagaaaatagaaatgcgatagagtgctggcaggctagtgtagataagtggtctgaaaaggtgtctctgagccgagggcatgtgagctggggcctaaacaactagaaggagagagccacgtgaacatccggcgaaggggacccaggcagagagaaaaggaaatccaagccctgaggtaggaatgagcaggtcagattcaaggcagtgaggtcaggccgcatgaacctggaggggaatcggggacttcatgcgaaactccagcctaggctttcaaagtcaaagggtgatacagtgggtaccaagctcctctgctccccactttgtagagcctagcatgaggtggcatgtactagaattggatcctaggtgcttagccctgcaatatcagggcctcactggtgggagctgcctcgggctgggttgcttggtcatagagccatagaaggaagctgtcagcccggagtgcctgccacctagacactgatgccattgtgtgctgcctcaagactgctggagtcaggacattttatagagccttttccagttttactaaaaaatttttccattg

SEQ ID NO: 5912 - DNA, 4104 bp, Homo sapiens
  source 1..4104: mol_type = unassigned DNA
tttactttgtctgctttgctaaagaaggccggtgaaccaggaccaccgcacacacaggcccaccaggggcaatgctcattccaagaccttaacttttaagagccctttgttccaacgttagtgtggacgatgctcttgcaggatgcctttccttttgggtcttagacaggataaggaagcctgtgtgggtaccaacaatcaaagctacatctgtgacacaggacactgctgtggacagtctcagtgctgcaactactactatgaactctggtggttctggctggtgtggaccatcatcatcatcctgagctgctgctgtgtttgccaccaccgccgagccaagcaccgccttcaggcccagcagcggcaacatgaaatcaacctgatcgcttaccgagaagcccacaattactcagcgctgccattttatttcaggtttttgccaaactatttactacctccttatgaggaagtggtgaaccgacctccaactcctcccccaccatacagtgccttccagctacagcagcagcagctgctgcctccacagtgtggccctgcaggtggcagtcccccgggcatcgatcccaccaggggatcccagggggcacagagcagccccttgtctgagcccagcagaagcagcacaagacccccaagcatcgctgaccctgatccctctgacctaccagttgaccgagcagccaccaaagccccagggatggagcccagtggctctgtggctggcctgggggagctggacccgggggccttcctggacaaagatgcagaatgtagggaggagctgctgaaagatgacagctctgaacacggcgcacccgacagcaaagagaagacgcctgggagacatcgccgcttcacaggtgactcgggcattgaagtgtgtgtgtgcaaccggggccaccatgacgatgacctcaaagagttcaacacactcatcgatgatgctctggatgggcccctggacttctgcgacagctgccatgtgcggccccctggtgatgaggaggaaggcctctgtcagtcctctgaggagcaggctcgagagcctgggcacccgcacctgccacggccgcccgcatgcctgctgctgaacaccatcaacgagcaggactctcccaactcccagagcagcagctcccccagctagagcaggtcctgccagcacccagcaacttggcaaagcaaccagggtaggggagaaccacgagagaagcattaagtgactttcaaagactttcagagtacagccacttggttcctttttgtttgttttccttctcctctcctgcattttcctccatctccaggtacagttcggggtgtggatgcctcttcctccacaagggcacagtgttgtggagggctaagttggttctgtgactcattcctcataccctaactccatctcctttctttaaagtcaaatctcacctacctgtttgggtcagagagatgtgttttaaaagcccccaaggaaggaggctgggactgtgccctgacatgattcttggtgatggaataggtttgtgctctgattctagtttaagagaacgttgctgtatctcagtccaggagaggcagcccatcttggccctggatgaagaaggaaacccacagaggcccagggcttgtcattgggctgccagtgtctgccaagccagcattgagctaatcctgtgggaggatgagagctactgggccgttgtatgataggttggtaggggcttgttgatctgtcaaattccaggtgacaagatctatgcaccccatgcgtccttgaggggcctcttccccgcaggctctggctggccgcaggctggttctggtgtgaaaggttatactgccttttctttgtttgtttgtttttttctctaaaaacaaacagcaaaagacagctgaaaacaagaacttcaccggtgggcaggcaagaattctcttctggaaaatgacgtttgtggctctttcccaagttggccttcaaagagcctgcctgctgttgagccagaagatgtctcgtgtgaaggctggggtggcggctgtcttggaacctctgtgagcaggaggccctaagccgcagcagtggatagaggtgcagctctctgcctctctgccctttggtctgtgttcacaggtgacccgtgtcagcctgcatcgcaagcacacaccctgcgggccttcaagtctcactgttccgtatgaggaaacagacagcggactgaggaagcgatggccccagagaaagggcccctgtagcctggctctcacacagtattttatctttgattctgaataaatattttttgtggggttttttttttttttttggtggcagttgtttgttttaaactgaccacttggaagaaacaccttggttatctgtggttttcatgccttgtccctgcctctacccccaccccttttgagtcgggtgactcatttttctgtgtagagactcggtggcccaggcaggaggtgaaagcagccatccggaaggccctggggacccttgtgcctgttgctcgccttcaggtcaccagctgagctgcgataggaaaatctgaatggaggcagcaaacagccaaaacaaacattccccacccggccctgtgcatatgaagtctttcttcccccaactcttgaacgatgatgatattcagacgaagcattgatgttatggaagaaagaaagaaacaaacaaaatatatatatatatgtccaaaaacagacaaatccaagggtgtgaggtaaacgagtgtctgcatttagattccacaaaaccaaaatccatgttgaacaaagttaagtccgtacacagtgactttttgggtgagccgtgtgtgtctgtctgttgtgtgtgtgcctcaagccctgttttcctgtgaagatactttgagtggcagccattctctccacgtgaaccacacgtctggagcacagacaggcctctcaaggtcattgatcttacgcatttactgtttaccgaacaaatgtctgactgtgtactcgggtgtactccgcagcattgtcgactgcagtcccctgtgtttgccagagatactgtgctcgaagtagaggttttactctactcatcactgcgatttgcacattgctccgtggacactcggaggcctgcgttctgttccctataaatggaagcgtgctctgagcctgtctgcctccctcggctgctgctggtcctcagtaccagcgcccgggggtgtccacaaccacttgggacagaagaaggtggaatttcagacagaagcttgactgggtcttcaatgacaggcttggactagctgtggcccagacatcggccctgcccagaattgccaggaggaggctttgcaggctctagaggagccgcagggcctgcctgcctctggtgagtccaacaggcacaagcaagctggcgtgtggccagaggtagccggagtgtgtcacagcccctcagatgcctttccttccacctttttttattttttaagaatcccaaataactcactgaagtgtctcaaaggcgaacaagttttaccaaaatgaatcctttttcagttaacagatcaaatggatgagttctgagcctctcaagttcctttccccagttagagtggggaactgggcaagtgttaactgtgggactcactgcagcgtcctatcctaaaggcacgagaagacggaaatgcaacctgcggagctgggcttggttcccaggtcacagtttggcccccgctacaggatgctgccctgctcagagagagatttaatagggagctgaaggaatcgttagggggccagggagatgtgactgaggctggctttccacgtgaatgagacggggtcggtggagggtttggtgctacagccagtcagaagatttgcaaatgcgaacacattcctgtgtgaggcacgttaccctttgtcagttattgtgaatatgtgtattttaagcaataagattcagctggtcagacttttctgggcagtctcagtgacgcatttcctgtgctgtgattgttctgaagacagagtggctctaaccactgtgagaagcccaaataaaaattgatcccaaaaatg

SEQ ID NO: 5913 - DNA, 4085 bp, Homo sapiens
  source 1..4085: mol_type = unassigned DNA
gaaggaagaagagggtagaggaggagagggaggaggaggagggaggtggcggcgccgtggcggaggagcaggagcaggagggggatggagaggagaaggctcctgggtggcatggcgctcctgctcctccaggcgctgcccagccccttgtcagccagggctgaacccccgcaggataaggaagcctgtgtgggtaccaacaatcaaagctacatctgtgacacaggacactgctgtggacagtctcagtgctgcaactactactatgaactctggtggttctggctggtgtggaccatcatcatcatcctgagctgctgctgtgtttgccaccaccgccgagccaagcaccgccttcaggcccagcagcggcaacatgaaatcaacctgatcgcttaccgagaagcccacaattactcagcgctgccattttatttcaggtttttgccaaactatttactacctccttatgaggaagtggtgaaccgacctccaactcctcccccaccatacagtgccttccagctacagcagcagcagctgctgcctccacagtgtggccctgcaggtggcagtcccccgggcatcgatcccaccaggggatcccagggggcacagagcagccccttgtctgagcccagcagaagcagcacaagacccccaagcatcgctgaccctgatccctctgacctaccagttgaccgagcagccaccaaagccccagggatggagcccagtggctctgtggctggcctgggggagctggacccgggggccttcctggacaaagatgcagaatgtagggaggagctgctgaaagatgacagctctgaacacggcgcacccgacagcaaagagaagacgcctgggagacatcgccgcttcacaggtgactcgggcattgaagtgtgtgtgtgcaaccggggccaccatgacgatgacctcaaagagttcaacacactcatcgatgatgctctggatgggcccctggacttctgcgacagctgccatgtgcggccccctggtgatgaggaggaaggcctctgtcagtcctctgaggagcaggctcgagagcctgggcacccgcacctgccacggccgcccgcatgcctgctgctgaacaccatcaacgagcaggactctcccaactcccagagcagcagctcccccagctagagcaggtcctgccagcacccagcaacttggcaaagcaaccagggtaggggagaaccacgagagaagcattaagtgactttcaaagactttcagagtacagccacttggttcctttttgtttgttttccttctcctctcctgcattttcctccatctccaggtacagttcggggtgtggatgcctcttcctccacaagggcacagtgttgtggagggctaagttggttctgtgactcattcctcataccctaactccatctcctttctttaaagtcaaatctcacctacctgtttgggtcagagagatgtgttttaaaagcccccaaggaaggaggctgggactgtgccctgacatgattcttggtgatggaataggtttgtgctctgattctagtttaagagaacgttgctgtatctcagtccaggagaggcagcccatcttggccctggatgaagaaggaaacccacagaggcccagggcttgtcattgggctgccagtgtctgccaagccagcattgagctaatcctgtgggaggatgagagctactgggccgttgtatgataggttggtaggggcttgttgatctgtcaaattccaggtgacaagatctatgcaccccatgcgtccttgaggggcctcttccccgcaggctctggctggccgcaggctggttctggtgtgaaaggttatactgccttttctttgtttgtttgtttttttctctaaaaacaaacagcaaaagacagctgaaaacaagaacttcaccggtgggcaggcaagaattctcttctggaaaatgacgtttgtggctctttcccaagttggccttcaaagagcctgcctgctgttgagccagaagatgtctcgtgtgaaggctggggtggcggctgtcttggaacctctgtgagcaggaggccctaagccgcagcagtggatagaggtgcagctctctgcctctctgccctttggtctgtgttcacaggtgacccgtgtcagcctgcatcgcaagcacacaccctgcgggccttcaagtctcactgttccgtatgaggaaacagacagcggactgaggaagcgatggccccagagaaagggcccctgtagcctggctctcacacagtattttatctttgattctgaataaatattttttgtggggttttttttttttttttggtggcagttgtttgttttaaactgaccacttggaagaaacaccttggttatctgtggttttcatgccttgtccctgcctctacccccaccccttttgagtcgggtgactcatttttctgtgtagagactcggtggcccaggcaggaggtgaaagcagccatccggaaggccctggggacccttgtgcctgttgctcgccttcaggtcaccagctgagctgcgataggaaaatctgaatggaggcagcaaacagccaaaacaaacattccccacccggccctgtgcatatgaagtctttcttcccccaactcttgaacgatgatgatattcagacgaagcattgatgttatggaagaaagaaagaaacaaacaaaatatatatatatatgtccaaaaacagacaaatccaagggtgtgaggtaaacgagtgtctgcatttagattccacaaaaccaaaatccatgttgaacaaagttaagtccgtacacagtgactttttgggtgagccgtgtgtgtctgtctgttgtgtgtgtgcctcaagccctgttttcctgtgaagatactttgagtggcagccattctctccacgtgaaccacacgtctggagcacagacaggcctctcaaggtcattgatcttacgcatttactgtttaccgaacaaatgtctgactgtgtactcgggtgtactccgcagcattgtcgactgcagtcccctgtgtttgccagagatactgtgctcgaagtagaggttttactctactcatcactgcgatttgcacattgctccgtggacactcggaggcctgcgttctgttccctataaatggaagcgtgctctgagcctgtctgcctccctcggctgctgctggtcctcagtaccagcgcccgggggtgtccacaaccacttgggacagaagaaggtggaatttcagacagaagcttgactgggtcttcaatgacaggcttggactagctgtggcccagacatcggccctgcccagaattgccaggaggaggctttgcaggctctagaggagccgcagggcctgcctgcctctggtgagtccaacaggcacaagcaagctggcgtgtggccagaggtagccggagtgtgtcacagcccctcagatgcctttccttccacctttttttattttttaagaatcccaaataactcactgaagtgtctcaaaggcgaacaagttttaccaaaatgaatcctttttcagttaacagatcaaatggatgagttctgagcctctcaagttcctttccccagttagagtggggaactgggcaagtgttaactgtgggactcactgcagcgtcctatcctaaaggcacgagaagacggaaatgcaacctgcggagctgggcttggttcccaggtcacagtttggcccccgctacaggatgctgccctgctcagagagagatttaatagggagctgaaggaatcgttagggggccagggagatgtgactgaggctggctttccacgtgaatgagacggggtcggtggagggtttggtgctacagccagtcagaagatttgcaaatgcgaacacattcctgtgtgaggcacgttaccctttgtcagttattgtgaatatgtgtattttaagcaataagattcagctggtcagacttttctgggcagtctcagtgacgcatttcctgtgctgtgattgttctgaagacagagtggctctaaccactgtgagaagccc

SEQ ID NO: 5914 - DNA, 1583 bp, Homo sapiens
  source 1..1583: mol_type = unassigned DNA
acaaagcaggcagacttgcccacagaacccacagccttcccctcgatttgtcctcttgctccttcctgctaggacagcagggcttctcgtacacatgctgtagcgggcactgccttggcaggaggatttggggcttccacatatcctgttctcaagattgtagcatctcagtactctagagcccagtacctgacatcaaggatgtctggagcttccttttaaggaaagaaaagatcagcaaacttgcctgttcccgtttacacttccaccaccagttcgtgagagttcctgttctgcatcctcaacactagtattaagtgagagttcctgttctgcatcctcaacgctagtattaagtgcactggcctttagtctgttaaaaagcatacaatggctacagatgttcaattggctgattatccactgatgagtccaaaggctgagctgaaactggagaagaagtcagggcgcaagccaaggagccccagggacagtgggccacagaaagaactggtgatcccagggattgtggatttcgagcggatccgccgggcattgaggaccccaaagccccaaacccctggcacctactgctttggacgcctcagtcaccactccttcttctcccggcaccacccacacccccagcacgtgacccacatccaagatctcaccgggaagcctgtctgtgtcgtcagggattttccagcccccttgcctgagtcaactgtcttttccggctgtcaaatggggatacccaccatctctgtccccattggagacccacagtctaatcggaacccccagctttcttctgaagcctggaagaaggagttgaaggagctagcttcccgggtggccttcctcaccaaggaggatgaactgaagaagaaagagaaggagcagaaggaggagcctctgcgggagcagggggcaaagtactcagcagagactgggaggctcatccccgcttccacccgggctgtcggccgccgcagatctcaccagggccagcagagtcagtcttccagcagacatgaaggagtccaggctttcctccttcaggatcaggagctgctggtcctggagctcctgtgtcggatcctggaaacagacttgctaagcgcaatccagttctggctgctctacgctccgcccaaggaaaaagacctcgctctgggactcctgcagacagcagtggctcagctccttccccagcccctagtctccatccctacagaaaagctcctaagccagcttccagaagtgcatgaacctcctcaagagaagcaagagccaccctgcagtcaatccccgaagaaaacgaagatatcaccttttacaaaaagcgaaaaaccagagtacattggagaagctcaagtcctccagatgcattcaagccagaacacagagaagaagacatcgaagccgagggcagagagctgaggggccctaacacttgcacctgccttgctcaagagcagccccaagggttcaggggtgtttctgtctccaccaccttcacagcagtacctgattccctaccgtgaaaactcttactaaataaaaccgtcttccctgag

SEQ ID NO: 5915 - DNA, 353 bp, Homo sapiens
  source 1..353: mol_type = unassigned DNA
caatgtgctgaactctggggatcagtgaggaagaattcagacaagttcctgctgtcacggaacttacatcccagcaaggaggaatacagacaacaaattaaaacacctggggaggagtggagacagatactagtacattggagaagctcaagtcctccagatgcattcaagccagaacacagagaagaagacatcgaagccgagggcagagagctgaggggccctaacacttgcacctgccttgctcaagagcagccccaagggttcaggggtgtttctgtctccaccaccttcacagcagtacctgattccctaccgtgaaaactcttactaaataaaaccgtcttccctga

SEQ ID NO: 5916 - DNA, 824 bp, Homo sapiens
  source 1..824: mol_type = unassigned DNA
atggctacagatgttcaattggctgattatccactgatgagtccaaaggctgagctgaaactggagaagaagtcagggcgcaagccaaggagccccagggacagtgggccacagaaagaactggtgatcccagggattgtggatttcgagcggatccgccgggcattgaggaccccaaagccccaaacccctggcacctactgctttggacgcctcagtcaccactccttcttctcccggcaccacccacacccccagcacgtgacccacatccaagatctcaccgggaagcctgtctgtgtcgtcagggattttccagcccccttgcctgagtcaactgtcttttccggctgtcaaatggggatacccaccatctctgtccccattggagacccacagtctaatcggaacccccagctttcttctgaagcctggaagaaggagttgaaggagctagcttcccgggtggccttcctcaccaaggaggatgaactgaagaagaaagagaaggagcagaaggaggagcctctgcgggagcagggggcaaagtactcagcagagactgggaggctcatccccgcttccacccgggctgtcggccgccgcagatctcaccagggccagcagagtcagtcttccagcagacatgaaggagtccaggctttcctccttcaggatcaggagctgctgaaaaagacctcgctctgggactcctgcagacagcagtggctcagctccttccccagcccctagtctccatccctacagaaaagctcctaagccagcttccagaagtgcatgaacctcctcaagagaagcaagag

SEQ ID NO: 5917 - DNA, 973 bp, Homo sapiens
  source 1..973: mol_type = unassigned DNA
agtccaaaggctgagctgaaactggagaagaagtcagggcgcaagccaaggagccccagggacagtgggccacagaaagaactggtgatcccagggattgtggatttcgagcggatccgccgggcattgaggaccccaaagccccaaacccctggcacctactgctttggacgcctcagtcaccactccttcttctcccggcaccacccacacccccagcacgtgacccacatccaagatctcaccgggaagcctgtctgtgtcgtcagggattttccagcccccttgcctgagtcaactgtcttttccggctgtcaaatggggatacccaccatctctgtccccattggagacccacagtctaatcggaacccccagctttcttctgcctggaagaaggagttgaaggagctagcttcccgggtggccttcctcaccaaggaggatgaactgaagaagaaagaggatactaccagtcttaattggaattgcaagagcaggaggccccaggcaccaggcctctctgggacagacctgggggcagctgagctgggaattaagaaggagcagaaggaggagcctctgcgggagcagggggcaaagtactcagcagagactgggaggctcatccccgcttccacccgggctgtcggccgccgcagatctcaccagggccagcagagtcagtcttccagcagacatgaaggagtccaggctttcctccttcaggatcaggagctgctgggcggcctcacctcacctggagctcctgtgtcggatcctggaaacagacttgctaagcgcaatccagttctggctgctctacgctccgcccaaggaaaaagacctcgctctgggactcctgcagacagcagtggctcagctccttccccagcccctagtctccatccctacagaaaagctcctaagccagcttccagaagtgcatgaacctcctcaagagaagcaagag

SEQ ID NO: 5918 - DNA, 946 bp, Homo sapiens
  source 1..946: mol_type = unassigned DNA
acagccccagtagctgctgcgtcagctcttcctctcctaggagggacccccatgggaacagaacttgctggtctggtctggcctaagctccagctctggcctctggacgctgagtctgagccaagactactcctgagtgcatgggggaggatgacagcctatagctggcctctgggctgtccacagtctggcttggggagaggcccctgttgagaccatccccatccccagggatgtatataagtccaaaggctgagctgaaactggagaagaagtcagggcgcaagccaaggagccccagggacagtgggccacagaaagaactggtgatcccagggattgtggatttcgagcggatccgccgggcattgaggaccccaaagccccaaacccctggcacctactgctttggacgcctcagtcaccactccttcttctcccggcaccacccacacccccagcacgtgacccacatccaagatctcaccgggaagcctgtctgtgtcgtcagggattttccagcccccttgcctgagtcaactgtcttttccggctgtcaaatggggatacccaccatctctgtccccattggagacccacagtctaatcggaacccccagctttcttctgcctggaagaaggagttgaaggagctagcttcccgggtggccttcctcaccaaggaggatgaactgaagaagaaagaggtgggtgcggaacacaggagctagtctgggaagaggagaaacggatccttccctgtgtaaggagatccctcccgagtcagttcagcctaccagaggtggggtggggggactgattcatacaaacgtcaggggaaaggtcacagtgagggagagagcacacctaggtggagaaatccaagcaggggttttaggacaggaggcacttgggggccttcgatatctaagtgagatgttcacaa

SEQ ID NO: 5919 - DNA, 1241 bp, Homo sapiens
  source 1..1241: mol_type = unassigned DNA
ggagggtgcagcagggggcctgcctgtcagacatccttggggagcctgccctttcaagcatgaatcataccaccagagatcacccagcgtgctcttagctctgcctgcctggtgtagggtcctggagaccttcttggagctcatccagcagccatcatgcaaggtggtgctggggactgccctcttgctaggaggtggaggtctcatgctgtgggttcagagaaagaggagaagaaaggaaacctctgagtgtccatcagacaaggacaagtcaccagaatcccataaagcaaagaatgaaagctggattaaatcccactttagccgcctttccgaagagaagctggccctcgacaacaatgccagcgctagtggcaatgctacccagactgagagtgggagtgaagaggtcagctccacggttcacatagagaccttcaccacgaggcacggagaagtgggctccgctctgcaccgggaatccttcaccagcaggcagaagacatctgggccctcagtgatccaagagatccaccaggagtctggaaaagccccatccactgatgaggccacgtgggccgctgtggctgcctgcaccaaggagattgacacccaggggcggcacctggctcactccatgctgcagcgggccatagcttaccagcactcaggtcacctagagtccaaggacatcaaccaggaggagctgagggccctcgaggaggtagagatgaagctgcaaaagaatttcctcacccagcgggaaaacaccatagctggtgccaatcacacacacaccttctatggccacagtcaccacagtcaccatggccacccaagccaccagagccacagcctgcctaatcgcagacactagatctgtgacttcttggaagccacctaaccatggatggagacgcccctgcccccagcaaggctggctcacacacacgtctgttttctctcctatggggccatctatgcaggccagggtgagatgctgtgcccaaatccctactttcttaggctcctcacggggattatgggctctttaaactccatgagtggggtctgccacagaagatggcccctgttggagggagagctgggaggacacagcgcaggtgagatagaccctgaggcccctgaagacccaccaagagaagacagatgggagcaggcaagagccccacactgatgtcattgcctggaacggagccaataaagctttgtgtgccttc

SEQ ID NO: 5920 - DNA, 2956 bp, Homo sapiens
  source 1..2956: mol_type = unassigned DNA
aggaggtaggctgcatccgcccctctgtctgtctgtcaacatcgccctaggaccgagctgctgggtgccccggaagaagggcaggcaggaaggggaggggcagtgaggttggctccccccaccacctcaccctggtgcccccagcccagcccaagacaccagggcatttgctgacatctgaggcccttcccaggaagacatggcctcgttcttggtgtggccactgaggacggcgctgagagggggaaagtcatgggcaggacctggtgtgggatgtggaggagacggcgcccggggaggaggagcgctgtgcccaggtggcctcacttgtcatctcaaagtggcgtcgaaccccctgacaggtggacgggaacccccggctggccctccagagaccaggaggcccctggctcaatgatgccacctgcagctgcccaaccctccgcccatggtgcccttgttccacctgccaccgctcatgaacctgtggatcacccagctctgcactggcttgcctgctgctgctgtctcagtttacctgggcagttgcccctggctatccggctgggatgggacttggacttagaagcaggcccctcctctggaaagctgtgtcctcgggccaggaggtggcagcctctaccttcctgagacagggacccttttctgtccatcagaggacagctgtatgaagacacagagagaaggcagccatctgtaagccaggaagagagccctcaccaagactggaatcagcagcaccttgatattggacttccagcctccagaactgcaagaaataagcacctgctgtttacatgcccagcctgcagtgcttccttatggcagattggagctaactgagacagctcccagcactcattcattcattcattcattcactcacctcatgtctactaaacagctctgggctggctctgggaagcagtgagtcacacacactgcccccagcaacgtgtgaaatatgtttagagacagtgggctacagcggaaagggtagatgccctgagaaccccagcggtgctggtcagaagcacaggccttgttgggctgaggctggcatggggtgaacctggggagcctcgggggcagaggtgatagatgtggggtgtttcaaggcagtgagacaaagaagggagatgggtggtgccccccaatgccaggcttcaccagcctcccaacacacgagtgttcacccgcctggatgagacacctctgtggacttgggagtgaaggcagtgaatttgggcaatgctggaggccgtgcaggtgggaggtgggacaggggcaagaggccggggcccaggcaggagctgacagcccaccagtggtgctcccctgagaagcaacctcagtgggtggcttggggtctgctgggctgtccccacactgacaccctggctgcagggcccccctgtgtccccagtgaggggtctcgggagctgtgtgtcctactcagggccatccctgcagcccatgctctctgggtgaccagttgccagcagtgtcccccctgccttgggcggaggctgaggaccccagggtgggagggaaggtgcggtgggggctcagccaatgctgcccagcctgagggtccctcacatgtgggccgcacccctgcgtcagccggagtgatctctgcttagggtggtttgaggtgagttctgatatctcaaacaccagcatcagggccagggcagacaaaataagagtgagctggtcaggggtgtcccagttgggagctcgctcacagtctttaaggaggcagggcacagcccagtgggggtggccacgaggccccgggcctgtggctgagatggcaactggcaccggcagtgattggaacagtccagcccatggagccctgtggccttggccggtggctcacggtgccacgggagctggagcaatgggtggcctcccttgcctggtgcctgagtgaaggaggactgggtgcccctgaggaaggaccttgccatactcctacaaatttacattattcttctttccccagtctcccctcagggacctgcagccatttgctggggtggctagtggaaagggggatcatcagactcagggggattactggactctaactctaacctgacacccactcctggggacacaaacacccatcggatctaatagtcagaggaggggcgtatggaggtcagtgggctcacggagttctagctcaggtccaaccctcggtgggtgcagaggtcacttccctagcctcagatgggtgagtaaacagacgtatgtggcagccagcagagcccccacatttgttccctgacctgagggtgggggctactatgctgggaaaggccaggtggaagccattggggtgaactctgcctaggaaaattgtcagtcaaaagcaacctgcagccctggagggactgcaaaggtcagtgccgccatcgaggacttggaagatgcagggtggtgacccccactgcagcctcgttccactcgtctaattggcttgtgtggaagacaggggggtcccggagaaagaaggacagtgaatcctggtaaacttaaccaggactccaattgcaactgctgttccagatatgactactgatcactggggcaaatcaaagcatccccggacacctggtctacagccattgatctggtgaaagctttaatttttaatatagattttattttttagagcagtttcatgtttacagagaaattgagcatatttgagagtcctcatatagcatctctccctacacacagtttcccttattattcatatcttgaattactgtgatacatctttgcaattgatgaaccaatattgacctagtcattgatcaggttacatgagggttcactcttcttgttgtacatgctgtgagttcgggcaaatgtgtaatggcatatctccactattacagtgtcacacagaatt

SEQ ID NO: 5921 - DNA, 1366 bp, Homo sapiens
  source 1..1366: mol_type = unassigned DNA
agcccaagacaccagggcatttgctgacatctgaggcccttcccaggaagacatggcctcgttcttggtgtggccactgaggacggcgctgagagggggaaagtcatgggcaggacctggtgtgggatgtggaggagacggcgcccggggaggaggagaattgtctctctccaaccttgacctccctggagctggtgaggcgggcctggagcaccacccgcttctgggacacctcttcatcagcgctgtgcccaggtggcctcacttgtcatctcaaagtggcgtcgaaccccctgacaggtggacgggaacccccggctggccctccagagaccaggaggcccctggctcaatgatgccacctgcagctgcccaaccctccgcccatggtgcccttgttccacctgccaccgctcatgaacctgtggatcacccagctctgcactggcttgcctgctgctgctgtctcagtttacctgggcagttgcccctggctatccggctgggatgggacttggacttagaagcaggcccctcctctggaaagctgtgtcctcgggccaggaggtggcagcctctaccttcctgagacagggacccttttctgtccatcagaggacagctgtatgaagacacagagagaaggcagccatctgtaagccaggaagagagccctcaccaagactggaatcagcagcaccttgatattggacttccagcctccagaactgcaagaaataagcacctgctgtttacatgcccagcctgcagtgcttccttatggcagattggagctaactgagacagctcccagcactcattcattcattcattcattcactcacctcatgtctactaaacagctctgggctggctctgggaagcagtgagtcacacacactgcccccagcaacgtgtgaaatatgtttagagacagtgggctacagcggaaagggtagatgccctgagaaccccagcggtgctggtcagaagcacaggccttgttgggctgaggctggcatggggtgaacctggggagcctcgggggcagaggtgatagatgtggggtgtttcaaggcagtgagacaaagaagggagatgggtggtgccccccaatgccaggcttcaccagcctcccaacacacgagtgttcacccgcctggatgagacacctctgtggacttgggagtgaaggcagtgaatttgggcaatgctggaggccgtgcaggtgggaggtgggacaggggcaagaggccggggcccaggcaggagctgacagcccaccagtggtgctcccctgagaagcaacctcagtgggtggcttggggtctgctgggctgtccccacactgacaccctggctgcag

SEQ ID NO: 5922 - DNA, 2063 bp, Homo sapiens
  source 1..2063: mol_type = unassigned DNA
cccggagctgcctgggttgcgctgccggccacgtccccgcgccgggcctcaggctccttcctactgtccgagggccaccaggccgccgggggcctgctgcgcccggatgcgtctgttactagagtggagagtctaccttcgtctcacatgtgccacaaaggatggcatggcccgggagtgccccaccacgtggctttcaccccctgcaaagccagacttcgcccagcgacacagtgtcaagcccacagctctccaaggaggaagatggtccaggctgggagcatccccttagcagcagcctctgatcccttggccaagcaggagggaaccattagcagcctgaggagctggctggctgggagcctcggggaccgcccagccttgctcccagctcacccacaagatgtggacagctcttgtgctcatttggattttctccttgtccttatctgaaagccatgcggcatccaacgatccacgcaactttgtccctaacaaaatgtggaagggattagtcaagaggaatgcatctgtggaaacagttgataataaaacgtctgaggatgtaaccatggcagcagcttctcctgtcacattgaccaaagggacttcggcagcccacctcaactctatggaagtcacaacagaggacacaagcaggacagatgtgagtgaaccagcaacttcaggaggtgcagctgatggtgtgacctccattgctcccacggctgtggcctccagtacgactgcggcctccattacgactgcggcctccagtatgactgtggcctccagtgctcccacgactgcagcctccagtacaactgtggcctccattgctcccacgactgcagcctccagtatgactgcggcctccagcactcccatgacacttgcactccccgcgcccacgtccacttccacagggcggaccccgtccactaccgccactgggcatccatctctcagcacagccctcgcacaagtgccaaagagcagcgcgttgccaagaacagcaaccctggccacattggccacacgtgctcagactgtagcgaccacagcaaacacaagcagccccatgagcactcgtccaagtccttccaagcacatgcccagtgacaccgcggcaagccctgtaccccctatgcgtccccaagcacaaggtcccattagccaggtgtcagtggaccagcctgtggttaacacaacaaataaatccacacccatgccctcaaacacaaccccagagcccgcccccacccccacagtggtgaccaccaccaaggcacaagccagggagccaactgccagcccagtgccagtacctcacaccagcccaatccctgagatggaggccatgtcccccacgacacagccaagccccatgccatatacccagagggccgctgggccaggcacatcccaggcaccggagcaggtagagactgaagccacaccaggtactgattccactgggccaacacccaggagctcagggggcactaagatgccagccacggactcgtgccagcccagcacccaaggccagtacatggtggtcaccactgagcccctcacccaggccgtggtagacaaaactctccttctggtggtgctgttactcggggtgacccttttcatcacagtcttggttttgtttgccctgcaggcctatgagagctacaagaagaaggactacacccaggtggactacttaatcaacgggatgtatgcggactcagaaatgtgaggggggcgggggcctggcgggaggcctggccccttcctcgtcctttccttttgcctttgagaccaaaccaagtgcttccaaattcttttggtgcaattgaggagatatgccagatgcttaaacacatttaattgctgtcagattaattccatgatcactaaagagttgctgcttttttcatatttatttttgtaaatgattctgtgcccaggagcagctgggggttccacctcagggtggggcgggcaggaccccgtctccccaggtgtcggagcctgacctgaattaaagtactgactgctcgccacaa

SEQ ID NO: 5923 - DNA, 533 bp, Homo sapiens
  source 1..533: mol_type = unassigned DNA
tgggcggggcccgggcagggcgcgctgcccggagctgcctgggttgcgctgccggccacgtccccgcgccgggcctcaggctccttcctactgtccgagggccaccaggccgccgggggcctgctgcgcccgggaatgtggactttttttcaaactctagatgcgtctgttactagagtggagagtctaccttcgtctcacatgtgccacaaaggatggcatggcccgggagtgccccaccacgtggctttcaccccctgcaaagccagacttcgcccagcgacacagtgtcaagcccacagctctccaaggaggaagatggtccaggctgggagcatccccttagcagcagcctctgatcccttggccaagcaggagggaaccattagcagcctgaggagctggctggctgggagcctcggggaccgcccagccttgctcccagctcacccacaagatgtggacagctcttgtgctcatttggattttctccttgtccttatctgaaagccatgcggcatccaacgatccac

SEQ ID NO: 5924 - DNA, 5508 bp, Homo sapiens
  source 1..5508: mol_type = unassigned DNA
gtcgccatcttgccccttcagaggcaccgcaaacaaacccaattcctggtgtcccctagtcttggcggaggagccttttagatgagccccgaaaggccgggcagggaggacaagctctttggggctaccaaacagaagcagcaatgcctgttgtgtggccaacccttctggatctcagcagggatgaatgcaaaagaattcttcgaaaattggaattggaggcatatgctggagttatcagtgcacttcgggcacagggggatctcaccaaggaaaagaaagatcttcttggagaactatcaaaagttcttagcatctcaacagaacgccaccgtgctgaagttcggagagcagtaaacgatgaacggttaacaacaattgcacataatatgtctggacctaatagctcttcagaatggtccattgaaggtcgtcgattggtaccactgatgccccggctcgttccccaaaccgcctttactgtaacagctaatgctgttgctaatgcagctatccagcataatgcatctcttccagtgcctgcagaaacaggaagcaaggaagtggtttgctattcctacacaagtaccacgtcaaccccaacctctacccctgttccaagtggcagcatagcaacggttaagtctccaagacctgccagtcctgcctccaatgtagttgtcttgccaagtggaagtactgtttatgtcaaaagtgtaagctgttcagatgaagatgaaaaacccagaaaacgaaggcgaacaaactcttccagctcctctcctgttgttctaaaggaagttccaaaggccgttgttccagtctcaaagacgatcactgtgcctgtgagtggtagtcccaagatgagcaacatcatgcagagcattgccaactccttaccaccccacatgtctcctgtaaaaataaccttcactaaaccatcaacacagacaacaaacacaacaacacagaaggttattatagtcaccacatcaccaagctcaaccttcgtgcccaacattctctccaaatcccataactatgcagcagtcactaagcttgtaccaacgtcagtcattgcttctacaacccagaagccaccagttgttataactgcttcacagtcctctctggtcagtaatagcagcagtggcagcagcagttctacaccatcacctattcctaatacagttgcagtaacagctgtggtgtcctctacaccatctgtggtcatgtcaacagtagcacaaggtgtatctacatcagcaatcaaaatggcatcaaccagacttccttcccccaaaagcttagtgagtgccccaactcagattcttgcacagttccctaaacaacatcaacagtctcctaagcagcagttatatcaagtgcaacagcagacacagcaacaagtggcccagccttctccagtatctcatcagcaacagcctcagcagtctcctttgccacctggtattaaacctaccatccaaatcaaacaggagtcaggtgttaaaatcatcacacaacaggttcaaccaagtaaaatcttacccaaaccagtgacagcaactctacccaccagtagcaattcccctattatggtggttagcagtaatggtgcaattatgacaactaaactggtaaccactcctactggcacacaagcaacctatacccggccaacagtgagcccatccattggtcggatggctgcaacccctggagctgcaacctatgtgaaaactacgagtggtagcatcattacagtagtacccaaatcattagctaccttggggggcaagataattagcagtaatatagtttctggaacgactaccaaaatcactacaatcccaatgacttccaagcccaacgtgattgttgtacaaaagactacaggaaaaggaacgaccattcaaggcctcccgggcaaaaatgttgtcacaacgttgctaaatgctggaggagaaaagactattcagacagtgccaacaggagcaaagccagctatccttactgctacaagacccatcaccaaaatgattgtaacgcagccaaaaggaataggttctacagttcaaccagcagctaaaatcatcccaacaaaaattgtttatgggcagcaagggaaaacgcaggttcttattaaacccaaaccagtgacttttcaagcgacagttgttagtgaacaaacaagacagctagtaacagaaacattacagcaagcatccagggtagcagaggctggtaattcatctattcaggaaggaaaagaagaaccacagaattatacagatagtagttcctcttctacagagtcctcccagagttcccaagattcccagcctgtagttcatgtaattgcttcccggcgtcaggattggtcagaacatgagattgcaatggagactagccctaccataatttatcaggatgtatccagtgaatcacaatcagctacttcaacaatcaaagctctgttagaactccaacagacaacagtaaaggaaaaattggaatctaaaccaagacaacccactattgacctgagtcaaatggcagtgcctattcagatgacccaggaaaagagacattctcctgagagtccatcaattgctgtggtagagtcagaactagtagctgaatacatcactactgaacgcactgatgaggggacagaggttgcttttccccttctagtcagccatcgctcccagccccaacagccttcccagccccagcggaccctgctccagcatgtggctcagtcacagaccgcaacacagacttcggtggtggtgaagtccatcccagcatcttcccctggagcaatcacccacattatgcagcaggcattaagcagtcacactgcttttaccaaacacagcgaggaacttggaactgaggagggcgaggttgaagagatggacactttagaccctcagacaggtctgttttaccgatctgccctgactcagtcacagtcagctaaacagcagaaacttagccagcccccgctggaacagactcagctgcaagtgaaaactctgcagtgcttccagactaaacagaagcagaccatccacctgcaggcagaccagctccagcacaaactcccgcaaatgccccagctttccatcaggcatcaaaaactcacccctctccagcaagaacaagcacagcccaagccagatgtacagcacacacagcatcccatggtggccaaagacaggcagcttcctaccttaatggcacagcccccgcaaactgtagtacaggtgcttgcagtgaaaaccacgcagcagctccctaaactgcagcaggctccgaaccaaccaaaaatctacgtgcaaccccaaaccccccagagccaaatgtcgctcccagcttcttcagagaaacagacggcaagccaggtggagcagccaattataacccaaggatcctctgttacaaagataacttttgaggggcgccagcctcccacagttacaaagataactggtggcagttctgtgcctaagctgacatcaccagttacaagcatatctcccattcaggcctctgagaagacagcagtgtctgacattttgaaaatgtctttgatggaagctcagattgatacaaatgtagaacatatgatagtggatcccccaaagaaggctcttgccactagcatgctcactggtgaagcaggatcattaccctccacccacatggtggtggcagggatggcgaattccactccccagcaacagaaatgtagagagtcctgttcgagtccatccactgttggctcttccctaacgacaaggaaaattgatccaccagcagtgcctgcgacaggccagttcatgcgtattcagaatgtaggccaaaagaaagctgaagagagtccagcagaaattatcatccaggctattcctcagtatgctattccttgtcactccagctccaatgtggtggtggagcccagtgggcttcttgagctaaacaacttcactagtcaacagctggatgatgaggagacagcaatggagcaggacatagacagtagcacggaggatggaactgaacccagcccttctcagagctctgctgaacggtcctagtgtttggacacaatagtgcactttaaaacctgcttggttaccaagtgtccagggaaacccttgtattttgatgactaaaaagagcactttgcccgtacttaggctgtggaccctaaaacagcagtgtttcaacaagatgttgctgcaggagcagctttttaaaacaagataaaactcacaggggaatgtacttttttaaaaaaaaatgaaaaagaaaaaaaaagctgcacatttacagtgacttaagacctggtcttctttctctgttggatcatggccggtgaaacagttttgtcttgcagtggaaagagacttcctgtgaatgtttctcaactggtttctactgagcaaaataccatctaaaaggagaatgtgaatagttgtattttgaaatgatgtgtcaggaaaagttttttaaaaacttgtatgtttttgcaaatccctggaagtgttgaattggttaaaattttacattttctcagttcataattagtttataaacacctagaataatactggcattaaagaatccttgttggatggtagaaatcagatccctaaccagtgggaggtactttttgggtggcttgtgcattcttatcagttgtgtgctaatttattgtattgttcctttgtgctctaagcagcacacttgccttctatttatttaagtgtaaacatttcaaagcaggccgtactccttctgacaaatttcttgtaaaccaggattgcctacgctttccactgtcgtcgtctccccactttccctcttcctttaagaaaacttactaaaaaatgtttcattgcgaagcagaggaaaagaaacgttttcagacctaaaggaaatgtttggtcatgttaagaaaacaaattattcattcatatgatgctttcttaacgttgaaattgcacattcacattggactgagactttgaaaataacttttacatacttttgtttaagcccctttgaaatgtataaaaagttcatttacagttctaaatgtaatgtttttaagccttctatctttttaggacacagtttgtttaagcaatatgttttggtcttgtgatcactgtctgtcacaagtagagtgaaaggggtaagggggtgggagggtaagagttttgacaagttgtggcaaaggaaactatacttttcatttttaaaaatgtaaatagaaaagtttttaacggttttatatagatttcactataaataagcattttaagactgacaaatgttgaactgtacatacatttatcagcataactgcccagtttttttggtgctgaagtactgtaagtagaattcatcaacggtctcctaatttttgcatctacatctggggggaaaaagctgtgatactatagttaataaattcccactagagtg

SEQ ID NO: 5925 - DNA, 5007 bp, Homo sapiens
  source 1..5007: mol_type = unassigned DNA
gtcgccatcttgccccttcagaggcaccgcaaacaaacccaattcctggtgtcccctagtcttggcggaggagccttttagatgagccccgaaaggccgggcagggaggacaagctctttggggctaccaaacagaagcagcaatgcctgttgtgtggccaacccttctggatctcagcagggatgaatgcaaaagaattcttcgaaaattggaattggaggcatatgctggagttatcagtgcacttcgggcacagggggatctcaccaaggaaaagaaagatcttcttggagaactatcaaaagttcttagcatctcaacagaacgccaccgtgctgaagttcggagagcagtaaacgatgaacggttaacaacaattgcacataatatgtctggacctaatagctcttcagaatggtccattgaaggtcgtcgattggtaccactgatgccccggctcgttccccaaaccgcctttactgtaacagctaatgctgttgctaatgcagctatccagcataatgcatctcttccagtgcctgcagaaacaggaagcaaggaagtggtttgctattcctacacaagtaccacgtcaaccccaacctctacccctgttccaagtggcagcatagcaacggttaagtctccaagacctgccagtcctgcctccaatgtagttgtcttgccaagtggaagtactgtttatgtcaaaagtgtaagctgttcagatgaagatgaaaaacccagaaaacgaaggcgaacaaactcttccagctcctctcctgttgttctaaaggaagttccaaaggccgttgttccagtctcaaagacgatcactgtgcctgtgagtggtagtcccaagatgagcaacatcatgcagagcattgccaactccttaccaccccacatgtctcctgtaaaaataaccttcactaaaccatcaacacagacaacaaacacaacaacacagaaggttattatagtcaccacatcaccaagctcaaccttcgtgcccaacattctctccaaatcccataactatgcagcagtcactaagcttgtaccaacgtcagtcattgcttctacaacccagaagccaccagttgttataactgcttcacagtcctctctggtcagtaatagcagcagtggcagcagcagttctacaccatcacctattcctaatacagttgcagtaacagctgtggtgtcctctacaccatctgtggtcatgtcaacagtagcacaaggtgtatctacatcagcaatcaaaatggcatcaaccagacttccttcccccaaaagcttagtgagtgccccaactcagattcttgcacagttccctaaacaacatcaacagtctcctaagcagcagttatatcaagtgcaacagcagacacagcaacaagtggcccagccttctccagtatctcatcagcaacagcctcagcagtctcctttgccacctggtattaaacctaccatccaaatcaaacaggagtcaggtgttaaaatcatcacacaacaggttcaaccaagtaaaatcttacccaaaccagtgacagcaactctacccaccagtagcaattcccctattatggtggttagcagtaatggtgcaattatgacaactaaactggtaaccactcctactggcacacaagcaacctatacccggccaacagtgagcccatccattggtcggatggctgcaacccctggagctgcaacctatgtgaaaactacgagtggtagcatcattacagtagtacccaaatcattagctaccttggggggcaagataattagcagtaatatagtttctggaacgactaccaaaatcactacaatcccaatgacttccaagcccaacgtgattgttgtacaaaagactacaggaaaaggaacgaccattcaaggcctcccgggcaaaaatgttgtcacaacgttgctaaatgctggaggagaaaagactattcagacagtgccaacaggagcaaagccagctatccttactgctacaagacccatcaccaaaatgattgtaacgcagccaaaaggaataggttctacagttcaaccagcagctaaaatcatcccaacaaaaattgtttatgggcagcaagggaaaacgcaggttcttattaaacccaaaccagtgacttttcaagcgacagttgttagtgaacaaacaagacagctagtaacagaaacattacagcaagcatccagggtagcagaggctggtaattcatctattcaggaaggaaaagaagaaccacagaattatacagatagtagttcctcttctacagagtcctcccagagttcccaagattcccagcctgtagttcatgtaattgcttcccggcgtcaggattggtcagaacatgagattgcaatggagactagccctaccataatttatcaggatgtatccagtgaatcacaatcagctacttcaacaatcaaagctctgttagaactccaacagacaacagtaaaggaaaaattggaatctaaaccaagacaacccactattgacctgagtcaaatggcagtgcctattcagatgacccaggaaaagagacattctcctgagagtccatcaattgctgtggtagagtcagaactagtagctgaatacatcactactgaacgcactgatgaggggacagaggttgcttttccccttctagtcagccatcgctcccagccccaacagccttcccagccccagcggaccctgctccagcatgtggctcagtcacagaccgcaacacagacttcggtggtggtgaagtccatcccagcatcttcccctggagcaatcacccacattatgcagcaggcattaagcagtcacactgcttttaccaaacacagcgaggaacttggaactgaggagggcgaggttgaagagatggacactttagaccctcagacaggtctgttttaccgatctgccctgactcagtcacagtcagctaaacagcagaaacttagccagcccccgctggaacagactcagctgcaagtgaaaactctgcagtgcttccagactaaacagaagcagaccatccacctgcaggcagaccagctccagcacaaactcccgcaaatgccccagctttccatcaggcatcaaaaactcacccctctccagcaagaacaagcacagcccaagccagatgtacagcacacacagcatcccatggtggccaaagacaggcagcttcctaccttaatggcacagcccccgcaaactgtagtacaggtgcttgcagtgaaaaccacgcagcagctccctaaactgcagcaggctccgaaccaaccaaaaatctacgtgcaaccccaaaccccccagagccaaatgtcgctcccagcttcttcagagaaacagacggcaagccaggctattcctcagtatgctattccttgtcactccagctccaatgtggtggtggagcccagtgggcttcttgagctaaacaacttcactagtcaacagctggatgatgaggagacagcaatggagcaggacatagacagtagcacggaggatggaactgaacccagcccttctcagagctctgctgaacggtcctagtgtttggacacaatagtgcactttaaaacctgcttggttaccaagtgtccagggaaacccttgtattttgatgactaaaaagagcactttgcccgtacttaggctgtggaccctaaaacagcagtgtttcaacaagatgttgctgcaggagcagctttttaaaacaagataaaactcacaggggaatgtacttttttaaaaaaaaatgaaaaagaaaaaaaaagctgcacatttacagtgacttaagacctggtcttctttctctgttggatcatggccggtgaaacagttttgtcttgcagtggaaagagacttcctgtgaatgtttctcaactggtttctactgagcaaaataccatctaaaaggagaatgtgaatagttgtattttgaaatgatgtgtcaggaaaagttttttaaaaacttgtatgtttttgcaaatccctggaagtgttgaattggttaaaattttacattttctcagttcataattagtttataaacacctagaataatactggcattaaagaatccttgttggatggtagaaatcagatccctaaccagtgggaggtactttttgggtggcttgtgcattcttatcagttgtgtgctaatttattgtattgttcctttgtgctctaagcagcacacttgccttctatttatttaagtgtaaacatttcaaagcaggccgtactccttctgacaaatttcttgtaaaccaggattgcctacgctttccactgtcgtcgtctccccactttccctcttcctttaagaaaacttactaaaaaatgtttcattgcgaagcagaggaaaagaaacgttttcagacctaaaggaaatgtttggtcatgttaagaaaacaaattattcattcatatgatgctttcttaacgttgaaattgcacattcacattggactgagactttgaaaataacttttacatacttttgtttaagcccctttgaaatgtataaaaagttcatttacagttctaaatgtaatgtttttaagccttctatctttttaggacacagtttgtttaagcaatatgttttggtcttgtgatcactgtctgtcacaagtagagtgaaaggggtaagggggtgggagggtaagagttttgacaagttgtggcaaaggaaactatacttttcatttttaaaaatgtaaatagaaaagtttttaacggttttatatagatttcactataaataagcattttaagactgacaaatgttgaactgtacatacatttatcagcataactgcccagtttttttggtgctgaagtactgtaagtagaattcatcaacggtctcctaatttttgcatctacatctggggggaaaaagctgtgatactatagttaataaattcccactagagtg

SEQ ID NO: 5926 - DNA, 4554 bp, Homo sapiens
  source 1..4554: mol_type = unassigned DNA
gtcgccatcttgccccttcagaggcaccgcaaacaaacccaattcctggtgtcccctagtcttggcggaggagccttttagatgagccccgaaaggccgggcagggaggacaagctctttggggctaccaaacagaagcagcaatgcctgttgtgtggccaacccttctggatctcagcagggatgaatgcaaaagaattcttcgaaaattggaattggaggcatatgctggagttatcagtgcacttcgggcacagggggatctcaccaaggaaaagaaagatcttcttggagaactatcaaaagttcttagcatctcaacagaacgccaccgtgctgaagttcggagagcagtaaacgatgaacggttaacaacaattgcacataatatgtctggacctaatagctcttcagaatggtccattgaaggtcgtcgattggtaccactgatgccccggctcgttccccaaaccgcctttactgtaacagctaatgctgttgctaatgcagctatccagcataatgcatctcttccagtgcctgcagaaacaggaagcaaggaaggtgtaagctgttcagatgaagatgaaaaacccagaaaacgaaggcgaacaaactcttccagctcctctcctgttgttctaaaggaagttccaaaggccgttgttccagtctcaaagacgatcactgtgcctgtgagtggtagtcccaagatgagcaacatcatgcagagcattgccaactccttaccaccccacatgtctcctgtaaaaataaccttcactaaaccatcaacacagacaacaaacacaacaacacagaaggttattatagtcaccacatcaccaagctcaaccttcgtgcccaacattctctccaaatcccataactatgcagcagtcactaagcttgtaccaacgtcagtcattgcttctacaacccagaagccaccagttgttataactgcttcacagtcctctctggtcagtaatagcagcagtggcagcagcagttctacaccatcacctattcctaatacagttgcagtaacagctgtggtgtcctctacaccatctgtggtcatgtcaacagtagcacaaggtgtatctacatcagcaatcaaaatggcatcaaccagacttccttcccccaaaagcttagtgagtgccccaactcagattcttgcacagttccctaaacaacatcaacagtctcctaagcagcagttatatcaagtgcaacagcagacacagcaacaagtggcccagccttctccagtatctcatcagcaacagcctcagcagtctcctttgccacctggtattaaacctaccatccaaatcaaacaggagtcaggtgttaaaatcatcacacaacaggttcaaccaagtaaaatcttacccaaaccagtgacagctatccttactgctacaagacccatcaccaaaatgattgtaacgcagccaaaaggaataggttctacagttcaaccagcagctaaaatcatcccaacaaaaattgtttatgggcagcaagggaaaacgcaggttcttattaaacccaaaccagtgacttttcaagcgacagttgttagtgaacaaacaagacagctagtaacagaaacattacagcaagcatccagggtagcagaggctggtaattcatctattcaggaaggaaaagaagaaccacagaattatacagatagtagttcctcttctacagagtcctcccagagttcccaagtcagccatcgctcccagccccaacagccttcccagccccagcggaccctgctccagcatgtggctcagtcacagaccgcaacacagacttcggtggtggtgaagtccatcccagcatcttcccctggagcaatcacccacattatgcagcaggcattaagcagtcacactgcttttaccaaacacagcgaggaacttggaactgaggagggcgaggttgaagagatggacactttagaccctcagacaggtctgttttaccgatctgccctgactcagtcacagtcagctaaacagcagaaacttagccagcccccgctggaacagactcagctgcaagtgaaaactctgcagtgcttccagactaaacagaagcagaccatccacctgcaggcagaccagctccagcacaaactcccgcaaatgccccagctttccatcaggcatcaaaaactcacccctctccagcaagaacaagcacagcccaagccagatgtacagcacacacagcatcccatggtggccaaagacaggcagcttcctaccttaatggcacagcccccgcaaactgtagtacaggtgcttgcagtgaaaaccacgcagcagctccctaaactgcagcaggctccgaaccaaccaaaaatctacgtgcaaccccaaaccccccagagccaaatgtcgctcccagcttcttcagagaaacagacggcaagccaggtggagcagccaattataacccaaggatcctctgttacaaagataacttttgaggggcgccagcctcccacagttacaaagataactggtggcagttctgtgcctaagctgacatcaccagttacaagcatatctcccattcaggcctctgagaagacagcagtgtctgacattttgaaaatgtctttgatggaagctcagattgatacaaatgtagaacatatgatagtggatcccccaaagaaggctcttgccactagcatgctcactggtgaagcaggatcattaccctccacccacatggtggtggcagggatggcgaattccactccccagcaacagaaatgtagagagtcctgttcgagtccatccactgttggctcttccctaacgacaaggaaaattgatccaccagcagtgcctgcgacaggccagttcatgcgtattcagaatgtaggccaaaagaaagctgaagagagtccagcagaaattatcatccaggctattcctcagtatgctattccttgtcactccagctccaatgtggtggtggagcccagtgggcttcttgagctaaacaacttcactagtcaacagctggatgatgaggagacagcaatggagcaggacatagacagtagcacggaggatggaactgaacccagcccttctcagagctctgctgaacggtcctagtgtttggacacaatagtgcactttaaaacctgcttggttaccaagtgtccagggaaacccttgtattttgatgactaaaaagagcactttgcccgtacttaggctgtggaccctaaaacagcagtgtttcaacaagatgttgctgcaggagcagctttttaaaacaagataaaactcacaggggaatgtacttttttaaaaaaaaatgaaaaagaaaaaaaaagctgcacatttacagtgacttaagacctggtcttctttctctgttggatcatggccggtgaaacagttttgtcttgcagtggaaagagacttcctgtgaatgtttctcaactggtttctactgagcaaaataccatctaaaaggagaatgtgaatagttgtattttgaaatgatgtgtcaggaaaagttttttaaaaacttgtatgtttttgcaaatccctggaagtgttgaattggttaaaattttacattttctcagttcataattagtttataaacacctagaataatactggcattaaagaatccttgttggatggtagaaatcagatccctaaccagtgggaggtactttttgggtggcttgtgcattcttatcagttgtgtgctaatttattgtattgttcctttgtgctctaagcagcacacttgccttctatttatttaagtgtaaacatttcaaagcaggccgtactccttctgacaaatttcttgtaaaccaggattgcctacgctttccactgtcgtcgtctccccactttccctcttcctttaagaaaacttactaaaaaatgtttcattgcgaagcagaggaaaagaaacgttttcagacctaaaggaaatgtttggtcatgttaagaaaacaaattattcattcatatgatgctttcttaacgttgaaattgcacattcacattggactgagactttgaaaataacttttacatacttttgtttaagcccctttgaaatgtataaaaagttcatttacagttctaaatgtaatgtttttaagccttctatctttttaggacacagtttgtttaagcaatatgttttggtcttgtgatcactgtctgtcacaagtagagtgaaaggggtaagggggtgggagggtaagagttttgacaagttgtggcaaaggaaactatacttttcatttttaaaaatgtaaatagaaaagtttttaacggttttatatagatttcactataaataagcattttaagactgacaaatgttgaactgtacatacatttatcagcataactgcccagtttttttggtgctgaagtactgtaagtagaattcatcaacggtctcctaatttttgcatctacatctggggggaaaaagctgtgatactatagttaataaattcccactagagtg

SEQ ID NO: 5927 - DNA, 6848 bp, Homo sapiens
  source 1..6848: mol_type = unassigned DNA
atgcctgttgtgtggccaacccttctggatctcagcagggatgaatgcaaaagaattcttcgaaaattggaattggaggcatatgctggagttatcagtgcacttcgggcacagggggatctcaccaaggaaaagaaagatcttcttggagaactatcaaaagttcttagcatctcaacagaacgccaccgtgctgaagttcggagagcagtaaacgatgaacggttaacaacaattgcacataatatgtctggacctaatagctcttcagaatggtccattgaaggtcgtcgattggtaccactgatgccccggctcgttccccaaaccgcctttactgtaacagctaatgctgttgctaatgcagctatccagcataatgcatctcttccagtgcctgcagaaacaggaagcaaggaagtggtttgctattcctacacaagtaccacgtcaaccccaacctctacccctgttccaagtggcagcatagcaacggttaagtctccaagacctgccagtcctgcctccaatgtagttgtcttgccaagtggaagtactgtttatgtcaaaagtgtaagctgttcagatgaagatgaaaaacccagaaaacgaaggcgaacaaactcttccagctcctctcctgttgttctaaaggaagttccaaaggccgttgttccagtctcaaagacgatcactgtgcctgtgagtggtagtcccaagatgagcaacatcatgcagagcattgccaactccttaccaccccacatgtctcctgtaaaaataaccttcactaaaccatcaacacagacaacaaacacaacaacacagaaggttattatagtcaccacatcaccaagctcaaccttcgtgcccaacattctctccaaatcccataactatgcagcagtcactaagcttgtaccaacgtcagtcattgcttctacaacccagaagccaccagttgttataactgcttcacagtcctctctggtcagtaatagcagcagtggcagcagcagttctacaccatcacctattcctaatacagttgcagtaacagctgtggtgtcctctacaccatctgtggtcatgtcaacagtagcacaaggtgtatctacatcagcaatcaaaatggcatcaaccagacttccttcccccaaaagcttagtgagtgccccaactcagattcttgcacagttccctaaacaacatcaacagtctcctaagcagcagttatatcaagtgcaacagcagacacagcaacaagtggcccagccttctccagtatctcatcagcaacagcctcagcagtctcctttgccacctggtattaaacctaccatccaaatcaaacaggagtcaggtgttaaaatcatcacacaacaggttcaaccaagtaaaatcttacccaaaccagtgacagcaactctacccaccagtagcaattcccctattatggtggttagcagtaatggtgcaattatgacaactaaactggtaaccactcctactggcacacaagcaacctatacccggccaacagtgagcccatccattggtcggatggctgcaacccctggagctgcaacctatgtgaaaactacgagtggtagcatcattacagtagtacccaaatcattagctaccttggggggcaagataattagcagtaatatagtttctggaacgactaccaaaatcactacaatcccaatgacttccaagcccaacgtgattgttgtacaaaagactacaggaaaaggaacgaccattcaaggcctcccgggcaaaaatgttgtcacaacgttgctaaatgctggaggagaaaagactattcagacagtgccaacaggagcaaagccagctatccttactgctacaagacccatcaccaaaatgattgtaacgcagccaaaaggaataggttctacagttcaaccagcagctaaaatcatcccaacaaaaattgtttatgggcagcaagggaaaacgcaggttcttattaaacccaaaccagtgacttttcaagcgacagttgttagtgaacaaacaagacagctagtaacagaaacattacagcaagcatccagggtagcagaggctggtaattcatctattcaggaaggaaaagaagaaccacagaattatacagatagtagttcctcttctacagagtcctcccagagttcccaagattcccagcctgtagttcatgtaattgcttcccggcgtcaggattggtcagaacatgagattgcaatggagactagccctaccataatttatcaggatgtatccagtgaatcacaatcagctacttcaacaatcaaagctctgttagaactccaacagacaacagtaaaggaaaaattggaatctaaaccaagacaacccactattgacctgagtcaaatggcagtgcctattcagatgacccaggaaaagagacattctcctgagagtccatcaattgctgtggtagagtcagaactagtagctgaatacatcactactgaacgcactgatgaggggacagaggttgcttttccccttctagtcagccatcgctcccagccccaacagccttcccagccccagcggaccctgctccagcatgtggctcagtcacagaccgcaacacagacttcggtggtggtgaagtccatcccagcatcttcccctggagcaatcacccacattatgcagcaggcattaagcagtcacactgcttttaccaaacacagcgaggaacttggaactgaggagggcgaggttgaagagatggacactttagaccctcagacaggtctgttttaccgatctgccctgactcagtcacagtcagctaaacagcagaaacttagccagcccccgctggaacagactcagctgcaagtgaaaactctgcagtgcttccagactaaacagaagcagaccatccacctgcaggcagaccagctccagcacaaactcccgcaaatgccccagctttccatcaggcatcaaaaactcacccctctccagcaagaacaagcacagcccaagccagatgtacagcacacacagcatcccatggtggccaaagacaggcagcttcctaccttaatggcacagcccccgcaaactgtagtacaggtgcttgcagtgaaaaccacgcagcagctccctaaactgcagcaggctccgaaccaaccaaaaatctacgtgcaaccccaaaccccccagagccaaatgtcgctcccagcttcttcagagaaacagacggcaagccaggtggagcagccaattataacccaaggatcctctgttacaaagataacttttgaggggcgccagcctcccacagttacaaagataactggtggcagttctgtgcctaagctgacatcaccagttacaagcatatctcccattcaggcctctgagaagacagcagtgtctgacattttgaaaatgtctttgatggaagctcagattgatacaaatgtagaacatatgatagtggatcccccaaagaaggctcttgccactagcatgctcactggtgaagcaggatcattaccctccacccacatggtggtggcagggatggcgaattccactccccagcaacagaaatgtagagagtcctgttcgagtccatccactgttggctcttccctaacgacaaggaaaattgatccaccagcagtgcctgcgacaggccagttcatgcgtattcagaatgtaggccaaaagaaagctgaagagagtccagcagaaattatcatccaggctattcctcagtatgctattccttgtcactccagctccaatgtggtggtggagcccagtgggcttcttgagctaaacaacttcactagtcaacagctggatgatgaggagacagcaatggagcaggacatagacagtagcacggaggatggaactgaacccagcccttctcagagctctgctgaacggtcctagtgtttggacacaatagtgcactttaaaacctgcttggttaccaagtgtccagggaaacccttgtattttgatgactaaaaagagcactttgcccgtacttaggctgtggaccctaaaacagcagtgtttcaacaagatgttgctgcaggagcagctttttaaaacaagataaaactcacaggggaatgtacttttttaaaaaaaaatgaaaaagaaaaaaaaagctgcacatttacagtgacttaagacctggtcttctttctctgttggatcatggccggtgaaacagttttgtcttgcagtggaaagagacttcctgtgaatgtttctcaactggtttctactgagcaaaataccatctaaaaggagaatgtgaatagttgtattttgaaatgatgtgtcaggaaaagttttttaaaaacttgtatgtttttgcaaatccctggaagtgttgaattggttaaaattttacattttctcagttcataattagtttataaacacctagaataatactggcattaaagaatccttgttggatggtagaaatcagatccctaaccagtgggaggtactttttgggtggcttgtgcattcttatcagttgtgtgctaatttattgtattgttcctttgtgctctaagcagcacacttgccttctatttatttaagtgtaaacatttcaaagcaggccgtactccttctgacaaatttcttgtaaaccaggattgcctacgctttccactgtcgtcgtctccccactttccctcttcctttaagaaaacttactaaaaaatgtttcattgcgaagcagaggaaaagaaacgttttcagacctaaaggaaatgtttggtcatgttaagaaaacaaattattcattcatatgatgctttcttaacgttgaaattgcacattcacattggactgagactttgaaaataacttttacatacttttgtttaagcccctttgaaatgtataaaaagttcatttacagttctaaatgtaatgtttttaagccttctatctttttaggacacagtttgtttaagcaatatgttttggtcttgtgatcactgtctgtcacaagtagagtgaaaggggtaagggggtgggagggtaagagttttgacaagttgtggcaaaggaaactatacttttcatttttaaaaatgtaaatagaaaagtttttaacggttttatatagatttcactataaataagcattttaagactgacaaatgttgaactgtacatacatttatcagcataactgcccagtttttttggtgctgaagtactgtaagtagaattcatcaacggtctcctaatttttgcatctacatctggggggaaaaagctgtgatactatagttaataaattcccactagagtgacactgaagatttaaacacaagcattcataagatgcgctgatctctggtggttgtcactagttctgctaggtgataatgatttacccatagatggagctgttggatattattttattgtacaaattcatgtttaaaaaactttgtgactgtttctagttaagtaattttttaacctttcttgggtcatagacttctttggtaaactatgaactctcaccaaaaagatacacatgcaacatgttaaatacatgttagactttgcatacaattttaggggctcatgggcctctaagcctatccatgtattccaggttaagccctctgttatgatcaatccattacttacagattaagtttttataaaataaagtatcttttaaatattcatggatcaagtaacaagagcaaacttgaataaagttatgttctacatattttggcagcatagcatacctgtgtcccttgagaatttagccttcatatgtttctgcaattggaatggcaaataaaagtgctatcatctacatttttttaaagaattacaaatattaagaaattatcaagtgaaatttaaaatttttcttttaaaggtgttaattccaaatagagcatgcattcatttatttattcaacaaatattaattgagcatcttctgtatgacaagtagtattctgtgcactggggataccatagtgaacaaacaggaaatcctatccttatgaagtttataaacagggcttcctgctcatgaaatggatacaaggaatgaagacaggagaaaataagaacaatacttaggtttttttataaagtggatagatgatgatgccatatatggattttcagacatccctttactgaaagtcttagcattatatctattagtattccacatttaagtacataatttaaaagtaatttaaagtcatctctttgaaggatattaacaaattacaatgcaaatgctacagaatttttagaatcctaacaactattaggcagtgataagaaaaatccatttggcttaaagtaaactttaataagtgcctagtattgcagatgcagtttatggtgaacttagaggattaaaaaccaaagggggcttcattgagatattcacatgccataaactctcccatttaaagtataccgtttaatggttttagtatatccacagagttgggcaagccattaccacaatcaatttgagaacattttcattaatcacaaaagaaatcctgaaatgaaaccaccaccaccatcgctccagccctgggtggccactcctctactttctgcctcttatggatgtgccataagaaatgtggacatttcatataaatgagattatataatatgtggtcttttgtgacttctttcacttagcgtattttcaaggttcatccgtgttgtagaatgtgtcagtactacatttctttttatggccattccattgtgtgaaatatatcacattttgttta

SEQ ID NO: 5928 - DNA, 1541 bp, Homo sapiens
  source 1..1541: mol_type = unassigned DNA
aatgacaggcgtaaaagaaaaccatattcaggacattccctttcttgagcaaaactgcaatttgcaaaatcatcggtgacaggtaatggtgactggtgattcattcctggtgatgtcttgggccaaattccagaatccaatgtatattcagaaggggcagggagaagatctgcatgtatgacttcacccagaagccctggcatataaacaagaggtgagttgtcagtttcacccaattccaggcctagcactttccaaacagactgagaccatggcagtcttccatgacatgctgctgcagccactggggatgtttctgtgcctcagtctgcagctttcttctgccacctttataaggtacagtagcacctgcttcacctttgatgaatactacaccataaccctagacatcaaggccagttcacatatctacgaaagcaatgcagtctattctgtatttgttcccgtgaatgacagcgtctatgctgtggtcatgaaaaccttggacgagaacagtgactcagcgggcctctggcaaagagcggataaaaattgctacagcaactccacgtattacgtgaaagatcaatacatgacggtcttagaggcacagtggcaagctcctgaacctgagaacataactgaagtggagatacaagctttcactgtccagatcagagcgctgcctatactttctactctgaagctaagagaaaaactgtcaaccttagccttagctgccaagattccccagagctcagccttcaagcctttcttcatgattacacccaagagtatcagactcgaaggcttggccaaccaagtcttcagcagccccatcacagaggccatttatatcctgcttgcttttctcaccagcacacttctcttctaaagggaagccagggaaacaattgtttctgcctccactgcatcctcctacattcagttccaagctagtgctgggaaccgaatgtgtgtaaatgaaggctttacattctcaaatgtgcaactttgctgccacggcttcagaccaaaacaaagatctggaggcactcattggcaggcttgggtcacatagatgttcatctggatctttcaggacacatattacactttttgaaaatatttagaactggccggaacttagtcacctaggttctccctattggttgaacaggttggcagccaattccacagccaatctcaacttttgttcactgccaaatgattcccctgcaacctctgagtttctgtgggaagaatccttccttactttcaagatgatctcagatttctaaccaaacccattcaggttacaaggaacttctgtgactcatgtgactcaagaaagaaaggagaaaggagaaatagctctgaggctgctggcagcttcccatttgtccacaccagtagattttgaagggcaagagaacaggaacgaaccatgtctgagaagccaatatagaaaaaaactatgttataaaaacatttttgtcacaacaaataaattatactttaaacaagaataatgaatgtgt

SEQ ID NO: 5929 - DNA, 4492 bp, Homo sapiens
  source 1..4492: mol_type = unassigned DNA
tcattccatcatctctgagccagcagagcaatcccccaaagtgctgttagttccccaaacagctccagccgacccctctttaggtcagaacatagctaatcccttaatcccattttctgatgaaatggaccacactgcatcccaaaatgcccaggatctcataggcatccctcatctaggtgtttctggatcctcaacaaaatggcattccgagctgtccccaacagagggtccccattcagcaggttcatccacacctgggtttttgagccccatggcagaactgtcccatccgtctccccctcccccagcacttggaagtcttcttcagcttccagatggaagcccctcatggtcaatgttggaagtggcttcaggtcctgcatccacccagcagatcaaagctggggtgcctggaagagtgcacaatggggtgtctttgccaacttttaagaatacagaaacagcgacccatgaggctgagcctccacttttccagactgcagaatcaggggccatagaaatgaccagcagaaagctagcctctgccactgcaaatgactctgctaacccgctgcatttgtcagcagctccagagaattccagagggcccgccctttcggcagaacacacctcttctttggtgccttctctgcatatcaccacactgggtcaagagcaagccatcctttctggggcggttcccgcatcaccatcaactgggacagccgactttccctccatacttactttcctccagcccacagagaatcatgcctccccatctcctgtgccagaaatgcccactcttccagcagagggcagtgatgggtcccctcctgcaactagagacttgctcctctcaagcaaagttcctaatcttctttccacatcttggacatttccccggtggaaaaaggacagtgtgacagccattttagggaagaatgaagaggcaaatgtgacgattcctctccaggcctttccaaggaaagaggttttgagtcttcacactgtaaatggatttgtctctgatttcagcaccggtagtgtctcatctcccatcattacagcaccaaggacgaatccccttccttcaggaccacctctaccttccatactctccatacaagccacccagactgttttcccatctcttggcttttccagcaccaagccagaggcttatgcagctgctgtggaccattctgggttgccagcttcagcttccaaacaggtgagagcatcgccctcctccatggatgtatatgattccttaacaataggagacatgaaaaagccagcaaccacagatgttttctggagttctctttcagcagaaactggatctctttccacagaatcaataatatctggcttgcagcagcaaacaaattatgatttaaatggacacacaattagcaccacaagttgggaaactcatttagctccaacagctcctcccaatggtttaacttcagctgccgatgccataaaatctcaggatttcaaagatactgctgggcattcagtgactgcagaagggtttagtattcaggatctagtcctcggtacaagcattgagcagcctgtgcaacagtcagacatgaccatggttggaagccatatagacctctggcccacaagcaataacaaccattccagagacttccaaacagctgaagttgcatattactcacccacaactcgacattccgtgtctcatcctcagctacagttgcccaaccagccagcacatcctcttttgctaacctcaccaggaccaacttctacaggtagcttgcaggaaatgctttcagatggaacagatacaggttctgaaatttccagtgacatcaattcatcacctgagagaaatgcttccacaccattccagaacatcttgggatatcactctgctgctgaatcttctatatcgaccagtgtctttcccaggacctcctccagagtgctgcgggcttctcagcaccccaagaaatggacaggtgcagccactaatgcagcggacacagtatcatctaaggtacagccaacagcagcagctgccgtcacattgtttctgaggaaatcaagtccacctgcactgtctgcagccctggttgctaagggcaccagcagcagccctttggccgtggcctcaggaccagctaagagcagttcgatgactactcttgctaaaaatgtcacaaacaaggccgcatctggcccaaagaggacaccaggggcagtccatacagccttcccattcacaccaacctacatgtatgcaagaacaggacataccacgagcacacatacagccatgcaaggaaacatggacactgcctctggcctgttgtctacaacttacctccccaggaaaccacaagccatgcacaccggcctcccaaaccccaccaacctggagatgcccagagcatccacgccacgcccactgacagtcacggccgcgctgacatccattacagcctcagtgaaggccacccggttgccaccattgcgagcagaaaacacagatgctgtccttcctgctgcatcggctgcagtggtcacgactggcaaaatggcatccaacctggagtgtcagatgtccagtaagctcctggtgaagacagttctctttctcacccaaaggagagtgcagatcagtgaatccttgaagttcagtatcgccaaagggctcacacaggcattgcggaaggctttccaccagaacgatgtctcagctcacgtggacattctggaatattctcataatgtcacagttggttattatgctaccaaagggaagttggtgtatttgcctgctgtggtgatcgaaatgctgggtgtgtatggagtcagcaacgtcactgcagacctgaagcaacacaccccacacttacagtctgtggcagtacttgcctccccatggaatccccagcctgcaggctacttccagctaaaaacagtgctgcagtttgtgagccaagcggacaacatacagtcctgcaagtttgctcagacaatggaacagaggctgcagaaggcattccaggatgccgagaggaaagtcctgaataccaaaagcaacttgacaattcagattgtgagcacgtccaatgcctcccaggcagtcaccttggtgtacgtcgtgggcaatcagagcacattcctcaacggcaccgtcgccagcagcctcctcagccagctctcggctgagctggtgggattctacctcacctatccgccgctaaccattgctgaaccactggaatatcccaaccttgacatatcagaaacaaccagagactattgggtaattacagtgctgcagggtgtggacaattcgctggtgggcctgcacaaccagagctttgcccgggtcatggagcagcgcctggcccagctattcatgatgtcccagcaacaaggccggcggtttaaacgggccaccaccctgggaagctacactgtgcagatggtgaagatgcagcgtgtcccaggcccgaaggacccagcggagctgacttactataccctgtacaacgggaagcctttgttggggaccgcagctgccaagatcctgagcaccattgattcccaaaggatggccttgacccttcatcacgttgtccttctgcaagctgaccccgtggtgaagaacccgcccaataacctgtggatcatcgctgcagtgctggcgcccattgccgtggtcacggtcatcatcatcatcatcactgccgtgctctgcaggaagaacaagaacgacttcaagcctgacaccatgataaacctgccgcagagagcaaagcaggtcgcccagtgagaatggctctgtcatcagcaacgaatcagggaagcccagctcagggagacgctcaccccagaatgtaatggcacagcagaaagtgacaaaggaggaggcaaggaagagaaatggtgagaagccttccctccaagaaccacccccagctgctcccacgcgtgcccgcacacacatgcgtgcacacgtgtgcacaaactcacacacagccactgggctctgaccctcagtcgttctttctattctgccccacaagggccaggagtctgtatgtaccccttgggttctcaccttaccccttgtctgaattgtcctgtctcacttcctccgcccctgttcttatgaaatggtgtagttccttaggaaaaaccttttgcggaatgaactgatgtttgcttagaggtttttctaattctctagttagaaatcctctaaaatttctaatttctaatcacatgaattgacgcaatttcttgcaccagttccactaaggcagcagatctctgaaataactgctcatcttggagattcctctcattttcctgccctgactcccctgataagtttcatgggttcagtctgtgccactgagtccagatattgcaactccacttctcccaggaaaaaactaacccaaaacaataaaggaacagatctgtcatc

SEQ ID NO: 5930 - DNA, 11678 bp, Homo sapiens
  source 1..11678: mol_type = unassigned DNA
gacattcccccactcctccctctacctccatcctcttcattggctcctgactcacctcattccatcatctctgagccagcagagcaatcccccaaagtgctgttagttccccaaacagctccagccgacccctctttaggtcagaacatagctaatcccttaatcccattttctgatgaaatggaccacactgcatcccaaaatgcccaggatctcataggcatccctcatctaggtgtttctggatcctcaacaaaatggcattccgagctgtccccaacagagggtccccattcagcaggttcatccacacctgggtttttgagccccatggcagaactgtcccatccgtctccccctcccccagcacttggaagtcttcttcagcttccagatggaagcccctcatggtcaatgttggaagtggcttcaggtcctgcatccacccagcagatcaaagctggggtgcctggaagagtgcacaatggggtgtctttgccaacttttaagaatacagaaacagcgacccatgaggctgagcctccacttttccagactgcagaatcaggggccatagaaatgaccagcagaaagctagcctctgccactgcaaatgactctgctaacccgctgcatttgtcagcagctccagagaattccagagggcccgccctttcggcagaacacacctcttctttggtgccttctctgcatatcaccacactgggtcaagagcaagccatcctttctggggcggttcccgcatcaccatcaactgggacagccgactttccctccatacttactttcctccagcccacagagaatcatgcctccccatctcctgtgccagaaatgcccactcttccagcagagggcagtgatgggtcccctcctgcaactagagacttgctcctctcaagcaaagttcctaatcttctttccacatcttggacatttccccggtggaaaaaggacagtgtgacagccattttagggaagaatgaagaggcaaatgtgacgattcctctccaggcctttccaaggaaagaggttttgagtcttcacactgtaaatggatttgtctctgatttcagcaccggtagtgtctcatctcccatcattacagcaccaaggacgaatccccttccttcaggaccacctctaccttccatactctccatacaagccacccagactgttttcccatctcttggcttttccagcaccaagccagaggcttatgcagctgctgtggaccattctgggttgccagcttcagcttccaaacaggtgagagcatcgccctcctccatggatgtatatgattccttaacaataggagacatgaaaaagccagcaaccacagatgttttctggagttctctttcagcagaaactggatctctttccacagaatcaataatatctggcttgcagcagcaaacaaattatgatttaaatggacacacaattagcaccacaagttgggaaactcatttagctccaacagctcctcccaatggtttaacttcagctgccgatgccataaaatctcaggatttcaaagatactgctgggcattcagtgactgcagaagggtttagtattcaggatctagtcctcggtacaagcattgagcagcctgtgcaacagtcagacatgaccatggttggaagccatatagacctctggcccacaagcaataacaaccattccagagacttccaaacagctgaagttgcatattactcacccacaactcgacattccgtgtctcatcctcagctacagttgcccaaccagccagcacatcctcttttgctaacctcaccaggaccaacttctacaggtagcttgcaggaaatgctttcagatggaacagatacaggttctgaaatttccagtgacatcaattcatcacctgagagaaatgcttccacaccattccagaacatcttgggatatcactctgctgctgaatcttctatatcgaccagtgtctttcccaggacctcctccagagtgctgcgggcttctcagcaccccaagaaatggacagcggacacagtatcatctaaggtacagccaacagcagcagctgccgtcacattgtttctgaggaaatcaagtccacctgcactgtctgcagccctggttgctaagggcaccagcagcagccctttggccgtggcctcaggaccagctaagagcagttcgatgactactcttgctaaaaatgtcacaaacaaggccgcatctggcccaaagaggacaccaggggcagtccatacagccttcccattcacaccaacctacatgtatgcaagaacaggacataccacgagcacacatacagccatgcaaggaaacatggacactgcctctggcctgttgtctacaacttacctccccaggaaaccacaagccatgcacaccggcctcccaaaccccaccaacctggagatgcccagagcatccacgccacgcccactgacagtcacggccgcgctgacatccattacagcctcagtgaaggccacccggttgccaccattgcgagcagaaaacacagatgctgtccttcctgctgcatcggctgcagtggtcacgactggcaaaatggcatccaacctggagtgtcagatgtccagtaagctcctggtgaagacagttctctttctcacccaaaggagagtgcagatcagtgaatccttgaagttcagtatcgccaaagggctcacacaggcattgcggaaggctttccaccagaacgatgtctcagctcacgtggacattctggaatattctcataatgtcacagttggttattatgctaccaaagggaagttggtgtatttgcctgctgtggtgatcgaaatgctgggtgtgtatggagtcagcaacgtcactgcagacctgaagcaacacaccccacacttacagtctgtggcagtacttgcctccccatggaatccccagcctgcaggctacttccagctaaaaacagtgctgcagtttgtgagccaagcggacaacatacagtcctgcaagtttgctcagacaatggaacagaggctgcagaaggcattccaggatgccgagaggaaagtcctgaataccaaaagcaacttgacaattcagattgtgagcacgtccaatgcctcccaggcagtcaccttggtgtacgtcgtgggcaatcagagcacattcctcaacggcaccgtcgccagcagcctcctcagccagctctcggctgagctggtgggattctacctcacctatccgccgctaaccattgctgaaccactggaatatcccaaccttgacatatcagaaacaaccagagactattgggtaattacagtgctgcagggtgtggacaattcgctggtgggcctgcacaaccagagctttgcccgggtcatggagcagcgcctggcccagctattcatgatgtcccagcaacaaggccggcggtttaaacgggccaccaccctgggaagctacactgtgcagatggtgaagatgcagcgtgtcccaggcccgaaggacccagcggagctgacttactataccctgtacaacgggaagcctttgttggggaccgcagctgccaagatcctgagcaccattgattcccaaaggatggccttgacccttcatcacgttgtccttctgcaagctgaccccgtggtgaagaacccgcccaataacctgtggatcatcgctgcagtgctggcgcccattgccgtggtcacggtcatcatcatcatcatcactgccgtgctctgcaggaagaacaagaacgacttcaagcctgacaccatgataaacctgccgcagagagcaaagcctgtgcaaggctttgattatgccaagcaacacctgggccagcaaggggcagatgaggaggtcatccctgtgactcaggagacagtggttctcccactgcccattagagatgctcctcaggaaagagacgtcgctcaggatggaagcaccatcaagaccgccaaatccactgaaaccaggaagagcaggtcgcccagtgagaatggctctgtcatcagcaacgaatcagggaagcccagctcagggagacgctcaccccagaatgtaatggcacagcagaaagtgacaaaggaggaggcaaggaagagaaatgtgccagcgagtgacgaagaggagggagcggttctatttgacaactccagcaaggtggccgctgaaccctttgacacatcttctgggtctgtgcagctcattgccataaaacccacagccctccccatggtgccccccacctcggacaggagccaggagtcatcggcagtcctcaacggcgaggtgaacaaagccctgaagcagaagtcagacatcgagcactatcggaacaagctgcgcctcaaagccaagaggaagggatattacgacttccctgcagtggagacgagcaagggtctgaccgaaagaaagaagatgtatgaaaaagccccgaaggaaatggagcatgttttggatccagattcagaactctgtgctccattcaccgagtctaaaaacaggcaacagatgaagaactctgtctacagaagccggcagtctctgaacagcccgagtccaggggaaaccgagatggaccttctggtgactcgggagcgaccccggcgtggaatccgcaacagcggatacgatactgagcctgaaatcatagaggaaaccaacattgacagagttcctgagccccggggctattccaggtctcgacaggtgaaaggccactcggagacctccacactgagctcccagccatccatcgacgaggtcaggcagcagatgcacatgctgctggaggaggccttcagcctggcatccgcgggccacgcaggccagagccggcaccaagaggcctacggctcagcccagcacctgccctattcggaggtggtgaccagcgctccggggaccatgacgcggcccagggccggggtgcagtgggtgccgacctaccgcccagaaatgtatcagtacagtctgccccggccggcttacaggttttcccagcttcctgagatggtcatgggctcaccgcctccacccgtacctccccggactggtcctgtggctgtcgcttctctcaggcgatccacctcagacatcggcagcaagaccagaatggccgagtctacagggcccgagccggcccagctgcacgacagcgcctccttcacgcagatgtccagaggccctgtgtccgtgacgcagttggatcagtcggctttaaattactcaggtaatacggtgccagcagtgttcgccatcccagctgccaacagacctggcttcaccggctacttcatcccaacgcctccctcatcctataggaaccaggcctggatgtcctatgcaggagagaatgagctcccgagccagtgggcagattcggtgcccctcccagggtacatcgaggcctacccccgatcacggtacccccagagctctccctccaggcttcctcgtcagtacagccagccagccaacctgcaccccagcctggagcaggccccggcgccctccacagcggcctcgcagcagagcctggcagaaaacgacccgtctgacgctcccctgaccaacatctccactgcggcccttgtgaaggccatccgggaggaggtggccaagctggccaaaaaacagacagacatgtttgagttccaggtctaacgccttagccccgtgggactctggacttccaaactctgaggactcagcctttgggtttcccatgcctacgtgttaggacttgagacatagcaatgggtgagtctttctcaccctccatttctgaaaaggtgaactatggggcttctgggaacaggaaactcttgaacgactagattcttggctcatccaactgattgtgggtcaagtccctggcttggggccttatgtttgatactctctcatgtcaaatgtttgaactttgggcatgtgccctatggaagcttagtcacaagaggcactagctaatctacagattcctatccaatgccacattttaataaatcaccggaagcgggagaatgtagctcttatcttcggtgacctctgcatgttaactctgtttctgtgttaaaggcaatgcaggagtgtggattaagcaccagactgtattctcattcaaccatgaccgtgcgcattaaaatcagtttgtaagggagacactgactccagccaagaaacctgagccccttttttttaggttcatattcaaagtcaaatgaactggatgaaagtcagtaccaatggctgtgcctataaatagacctgattctttgtttccctcgtcaattaaacaaaggccaagaaagagagaagatgagagggaatggtggatttgcgttgacagattttttaaaaggtgttgccattttggaaataaaagtcccctacaagttaggatctaactgaaagagaatcggtgctaagagcttttaggatcctacaaaagaaacacagttatttgtgaaggtttttctttgccttgttttgaaggtggcctgagaatggagcttctctttttcttgggataatagatacatcaacttttacaagaaaatctctgtctcttcaacaatgatgtccagtgtgtgctgctgagtggtacaaaaggaaatagtacttgattcctgttagaaacaggagtggtagaaccacagtcttcccaggccgcagcctctgtttatagaagcttctgaatgtagaaaagctgttgaatttcatttaaatgtaaataaccttttaaaaagcgtatggagttagccagttccccctagttaatggacataggaagacatttgctgaaatggtagggtggccactttgtgaccatgatgttgcaagttgccctccctggcatggtgagttggcttccagagctgtgggtagaggacatcgcctcacggcactgaggcaccagccgctgcctacccatcaatgcaagcaaaacagctactgactttgtgtagcagggagattggggactctggttccctcgccaagtgtggcagcctgtgcagtgttgggggcttacttggtatctgttggagaatgaggtcctgtcctgctttcacccatgacccatctagcttcagctgtatccattttcttctgagcccatcttccattgtcctcaacgagtttctttggtctttactgaaagaagatagtagaaatttaaaagttgagagaagactagaaatggaactgattagaaggggaggttcaaactgtcaatgcacagacttttcaaagaagttgtttatattttccaatggcaaactgccctttctggaatgttcagagatgatgtgtcatggaaccttcaaacaagtctcttgttcggatgataataggtagtgtccttttagtatgctggttgatctttcatagtgttagtgttttgttacttaaaaaggaaatcagctataaataaaatgtatttttgtaattcccgtgtgtatatatggtatatttctatcaatggccagttgttgtagtccaaaacctaaatcagtttgcaaaacactgtggacagtgcgagattttattgacaggttaacacaatgcctacgtctatccacataggcattcaatgcacttgaatgaacaaagagccaaagaaactcagcctgttcatgcaaatggtatgagtctgataaaatcagctacattgtcctgctttatcaataataatatttcattagtgcaatgatatcaaccagtactttgtctacttggtaaatgcctggaaatactgtatgtgaaaatgatgtttcaagatcttactgtaattgaagtatacgtaaatgtttcagaagacagtgtctgaaatttggctgtttcaatgacttacagagactgagtctacagtttgcagagctatggctccagagtgctaagagggtggagtcacaaatcactgtggtctttacagagccccaggaaatactgagtgagtcaactgagacgactaaaaagatagcatgctaaatcagatactgtcttaaactagacaccatgggttcaagaatagtattaatagatgagaggaaaaccttaagttggaaagaaatcagtctgttcatgttatcccactcatggggagacagagccactctggtcagattttctgtgagtgagatgtggtcccttccctgaagaatctcctaacctcatagaggtgagagagatgactggacagctgactctaagagatggtcaaaagtgcctcaaggaattgaaataaggttcccagagagccctgaggaggcagcaatgaacaaacaccctgttcatcagaaccctctagatagtcacagaagccacaaaaggaccttggttgaccttggaggaggaagcagaagtaccacgaagtggagtgactggcccagtgattcagtcccaacctcctggttcacgaacctgcttgctttccatctcgccatgtggcctgcaggcttgtcagtaacacatttctttagctgtgcctagaggtttaaaaaaaagataagggtcatatgaagaactccataatgttcttgccaagaaaaaagatgattgagtatataacgaacttcagatacagtgtatagaggatgatgcatttgtggcataataaatagttttcagtgctggttttgatatgagttttctgcattcatgaaaaagaaatgcattttggctttttccagaaagagtaccatcaaggaaacggagacctcaactgctgttctagactgtgggggtgcattcctgtctcagcaccaaggatcccaacaggcaggcagggaggcccttgactttgtgtcactgtgaggcagcagagtccatgctctgcatcaggggaggtgcagtaaaggtccattgtgtggcttgagacctatgatctgaggcttgtgcataataagatggcagctgttacctacagagcaaggagtttcctctttcagggtagattatgtaagaatcaattccctggtcccaggagaagttttattgtgagtttgttaatttaagaactcactcagcagaaggacatgtaatgtctgagtaatcttgatggaagaaaggaaatagatctgtgattaaaacacacacacacacacacacacacacacacacacaccctacttcggagagagaatgtagaatggaggaggtgaggaatttaactaatagagatgctttttctaacaggcagaaattagagaaatggatcaaaagatttaaacattgattacatataaacgagtttcctttttttctacatagcacacaggtgctcaacatttaatgaataatataacagatactgtcttaaaagtttaaaaacaggatttgtacttaatcctaaattcctcttatcacacaccagaaaataatttggattttatttacaaactacatccaaatactcttaaggaaagagtgtcatttagcttggagtagggactgactggggtctaagtgttggaaattaaattctgccattcagtccaacctcaaaggtgttccaggcaaggagttttgcaaggactagaaaccctttcacacttgaagtgcaggtgttggctgaaagaatagagggacatttcacaaacacagaacacggctcccctacaggaaagggatggagacagctacctttgctcttgctctcacattctctgtcctcatggactttcttctctgtttccctctgcctatctatctgcctggttctcttgcttctcctggccaaccagctttctcattagtgcatatgtagctgaaaaatccacccctcaagaacccactccacacaacctttccttttcagtacccaccacgctctgactagcatctctgtgatgcctaaggcaaatttttgaggatctgattggtttagttcatctgcctatgggtgagccaccctggggtcaggtgcctgtccaatcacctgttaccaaggaggcagggccgtgtcatttaagcatggccccatggactgaccctttcagcagggacttttattgggggctggtacccagaagaaggagcatgagtgggcaagaccttcaaaaagaacctactacacactggaactgactagtactcctgggatgccatgccacgcagcagccagcactcggagagcagtcccctggatactaccacacagagaaaaggggcatcttcacttgcacatcaggtgagggtgcacacacttgaaactctgctagactggccagagctgccccagccacttctcaccccaccaccagttattgatacagccgctgggtctaggaagcgatttctgaacaaggcccagttagcacaatgtcttgctcagcagacaataaatacttgtaaattgaattgcatgatcttagctcaggtgctactaatgtggctcacggccacacacttgcatggataagaaaaccaatgagcccctcaacagagtcttttgaaacaaaattggtttcaagtgaaacttacattattttttggctgtgaccttctgaatataataacttagtgtcctgagaattgaaaggcctcttgatttcttaggtgaactgttacagaatcctagcctgtggtaaatgctaaaatgtaaggtgtttctgagaaggaatatttaggaaatataattgtgccacacacacattactttagaagatatgcagttgctctgattctgcaggtttaaaaaaaatgggaagtttgtgatatggcagaatctgtctccattggtcaaaccatacttcagtgagagccattataagtgaaatctaaaaattgatcgttttcattctctgactttggtcagacttttgcaaattatggagagaggccatcaacatattttacataaattactgtggccccatcttatttctcctcatttcttccttatgtttaaacacgcccccatctcacacacaaactgagaaaagatttgtatcaaacagaatcagaggcatatgaatggactggaaattgtgaaaaaggtataaatatcctagaccttgatcaactcactttaaactggtctctgattcctcatctgtcaaatgagtataagaccctctgtacttcccatggtgattttgaggagcacatgcataatgtatctgaaaatggcttgacaagcacttgaagccattcttactaaattattagttttgtaattcggttttatccaggaaaatattttagctcctcctatctgctgaattaatttatacagtcacatgttccatgacaccatgttttgccaaggaaaaataaagaaattcctaaatttgaaattgcccacaagatctagcctcatctggagttgctgttattgtccttgttgtctatgatttggaggatatgtaagtacttgtacatgtgctttaactctgggtgaaaaaccccaaccggtgagtctttaaaaccatattagacacattgggcaaagtactgagcagaagctttgaatgtagctgttgttattttaatgcttcgctttctaatgaactttgtacgtccttagcctctgccgggaacagagtgttcatatgctgttagaattttttattgtaaaataaaatgacaaaggctttcataccccaaaa

SEQ ID NO: 5931 - DNA, 11640 bp, Homo sapiens
  source 1..11640: mol_type = unassigned DNA
tcattccatcatctctgagccagcagagcaatcccccaaagtgctgttagttccccaaacagctccagccgacccctctttaggtcagaacatagctaatcccttaatcccattttctgatgaaatggaccacactgcatcccaaaatgcccaggatctcataggcatccctcatctaggtgtttctggatcctcaacaaaatggcattccgagctgtccccaacagagggtccccattcagcaggttcatccacacctgggtttttgagccccatggcagaactgtcccatccgtctccccctcccccagcacttggaagtcttcttcagcttccagatggaagcccctcatggtcaatgttggaagtggcttcaggtcctgcatccacccagcagatcaaagctggggtgcctggaagagtgcacaatggggtgtctttgccaacttttaagaatacagaaacagcgacccatgaggctgagcctccacttttccagactgcagaatcaggggccatagaaatgaccagcagaaagctagcctctgccactgcaaatgactctgctaacccgctgcatttgtcagcagctccagagaattccagagggcccgccctttcggcagaacacacctcttctttggtgccttctctgcatatcaccacactgggtcaagagcaagccatcctttctggggcggttcccgcatcaccatcaactgggacagccgactttccctccatacttactttcctccagcccacagagaatcatgcctccccatctcctgtgccagaaatgcccactcttccagcagagggcagtgatgggtcccctcctgcaactagagacttgctcctctcaagcaaagttcctaatcttctttccacatcttggacatttccccggtggaaaaaggacagtgtgacagccattttagggaagaatgaagaggcaaatgtgacgattcctctccaggcctttccaaggaaagaggttttgagtcttcacactgtaaatggatttgtctctgatttcagcaccggtagtgtctcatctcccatcattacagcaccaaggacgaatccccttccttcaggaccacctctaccttccatactctccatacaagccacccagactgttttcccatctcttggcttttccagcaccaagccagaggcttatgcagctgctgtggaccattctgggttgccagcttcagcttccaaacaggtgagagcatcgccctcctccatggatgtatatgattccttaacaataggagacatgaaaaagccagcaaccacagatgttttctggagttctctttcagcagaaactggatctctttccacagaatcaataatatctggcttgcagcagcaaacaaattatgatttaaatggacacacaattagcaccacaagttgggaaactcatttagctccaacagctcctcccaatggtttaacttcagctgccgatgccataaaatctcaggatttcaaagatactgctgggcattcagtgactgcagaagggtttagtattcaggatctagtcctcggtacaagcattgagcagcctgtgcaacagtcagacatgaccatggttggaagccatatagacctctggcccacaagcaataacaaccattccagagacttccaaacagctgaagttgcatattactcacccacaactcgacattccgtgtctcatcctcagctacagttgcccaaccagccagcacatcctcttttgctaacctcaccaggaccaacttctacaggtagcttgcaggaaatgctttcagatggaacagatacaggttctgaaatttccagtgacatcaattcatcacctgagagaaatgcttccacaccattccagaacatcttgggatatcactctgctgctgaatcttctatatcgaccagtgtctttcccaggacctcctccagagtgctgcgggcttctcagcaccccaagaaatggacaggtgcagccactaatgcagcggacacagtatcatctaaggtacagccaacagcagcagctgccgtcacattgtttctgaggaaatcaagtccacctgcactgtctgcagccctggttgctaagggcaccagcagcagccctttggccgtggcctcaggaccagctaagagcagttcgatgactactcttgctaaaaatgtcacaaacaaggccgcatctggcccaaagaggacaccaggggcagtccatacagccttcccattcacaccaacctacatgtatgcaagaacaggacataccacgagcacacatacagccatgcaaggaaacatggacactgcctctggcctgttgtctacaacttacctccccaggaaaccacaagccatgcacaccggcctcccaaaccccaccaacctggagatgcccagagcatccacgccacgcccactgacagtcacggccgcgctgacatccattacagcctcagtgaaggccacccggttgccaccattgcgagcagaaaacacagatgctgtccttcctgctgcatcggctgcagtggtcacgactggcaaaatggcatccaacctggagtgtcagatgtccagtaagctcctggtgaagacagttctctttctcacccaaaggagagtgcagatcagtgaatccttgaagttcagtatcgccaaagggctcacacaggcattgcggaaggctttccaccagaacgatgtctcagctcacgtggacattctggaatattctcataatgtcacagttggttattatgctaccaaagggaagttggtgtatttgcctgctgtggtgatcgaaatgctgggtgtgtatggagtcagcaacgtcactgcagacctgaagcaacacaccccacacttacagtctgtggcagtacttgcctccccatggaatccccagcctgcaggctacttccagctaaaaacagtgctgcagtttgtgagccaagcggacaacatacagtcctgcaagtttgctcagacaatggaacagaggctgcagaaggcattccaggatgccgagaggaaagtcctgaataccaaaagcaacttgacaattcagattgtgagcacgtccaatgcctcccaggcagtcaccttggtgtacgtcgtgggcaatcagagcacattcctcaacggcaccgtcgccagcagcctcctcagccagctctcggctgagctggtgggattctacctcacctatccgccgctaaccattgctgaaccactggaatatcccaaccttgacatatcagaaacaaccagagactattgggtaattacagtgctgcagggtgtggacaattcgctggtgggcctgcacaaccagagctttgcccgggtcatggagcagcgcctggcccagctattcatgatgtcccagcaacaaggccggcggtttaaacgggccaccaccctgggaagctacactgtgcagatggtgaagatgcagcgtgtcccaggcccgaaggacccagcggagctgacttactataccctgtacaacgggaagcctttgttggggaccgcagctgccaagatcctgagcaccattgattcccaaaggatggccttgacccttcatcacgttgtccttctgcaagctgaccccgtggtgaagaacccgcccaataacctgtggatcatcgctgcagtgctggcgcccattgccgtggtcacggtcatcatcatcatcatcactgccgtgctctgcaggaagaacaagaacgacttcaagcctgacaccatgataaacctgccgcagagagcaaagcctgtgcaaggctttgattatgccaagcaacacctgggccagcaaggggcagatgaggaggtcatccctgtgactcaggagacagtggttctcccactgcccattagagatgctcctcaggaaagagacgtcgctcaggatggaagcaccatcaagaccgccaaatccactgaaaccaggaagagcaggtcgcccagtgagaatggctctgtcatcagcaacgaatcagggaagcccagctcagggagacgctcaccccagaatgtaatggcacagcagaaagtgacaaaggaggaggcaaggaagagaaatgtgccagcgagtgacgaagaggagggagcggttctatttgacaactccagcaaggtggccgctgaaccctttgacacatcttctgggtctgtgcagctcattgccataaaacccacagccctccccatggtgccccccacctcggacaggagccaggagtcatcggcagtcctcaacggcgaggtgaacaaagccctgaagcagaagtcagacatcgagcactatcggaacaagctgcgcctcaaagccaagaggaagggatattacgacttccctgcagtggagacgagcaagggtctgaccgaaagaaagaagatgtatgaaaaagccccgaaggaaatggagcatgttttggatccagattcagaactctgtgctccattcaccgagtctaaaaacaggcaacagatgaagaactctgtctacagaagccggcagtctctgaacagcccgagtccaggggaaaccgagatggaccttctggtgactcgggagcgaccccggcgtggaatccgcaacagcggatacgatactgagcctgaaatcatagaggaaaccaacattgacagagttcctgagccccggggctattccaggtctcgacaggtgaaaggccactcggagacctccacactgagctcccagccatccatcgacgaggtcaggcagcagatgcacatgctgctggaggaggccttcagcctggcatccgcgggccacgcaggccagagccggcaccaagaggcctacggctcagcccagcacctgccctattcggaggtggtgaccagcgctccggggaccatgacgcggcccagggccggggtgcagtgggtgccgacctaccgcccagaaatgtatcagtacagtctgccccggccggcttacaggttttcccagcttcctgagatggtcatgggctcaccgcctccacccgtacctccccggactggtcctgtggctgtcgcttctctcaggcgatccacctcagacatcggcagcaagaccagaatggccgagtctacagggcccgagccggcccagctgcacgacagcgcctccttcacgcagatgtccagaggccctgtgtccgtgacgcagttggatcagtcggctttaaattactcaggtaatacggtgccagcagtgttcgccatcccagctgccaacagacctggcttcaccggctacttcatcccaacgcctccctcatcctataggaaccaggcctggatgtcctatgcaggagagaatgagctcccgagccagtgggcagattcggtgcccctcccagggtacatcgaggcctacccccgatcacggtacccccagagctctccctccaggcttcctcgtcagtacagccagccagccaacctgcaccccagcctggagcaggccccggcgccctccacagcggcctcgcagcagagcctggcagaaaacgacccgtctgacgctcccctgaccaacatctccactgcggcccttgtgaaggccatccgggaggaggtggccaagctggccaaaaaacagacagacatgtttgagttccaggtctaacgccttagccccgtgggactctggacttccaaactctgaggactcagcctttgggtttcccatgcctacgtgttaggacttgagacatagcaatgggtgagtctttctcaccctccatttctgaaaaggtgaactatggggcttctgggaacaggaaactcttgaacgactagattcttggctcatccaactgattgtgggtcaagtccctggcttggggccttatgtttgatactctctcatgtcaaatgtttgaactttgggcatgtgccctatggaagcttagtcacaagaggcactagctaatctacagattcctatccaatgccacattttaataaatcaccggaagcgggagaatgtagctcttatcttcggtgacctctgcatgttaactctgtttctgtgttaaaggcaatgcaggagtgtggattaagcaccagactgtattctcattcaaccatgaccgtgcgcattaaaatcagtttgtaagggagacactgactccagccaagaaacctgagccccttttttttaggttcatattcaaagtcaaatgaactggatgaaagtcagtaccaatggctgtgcctataaatagacctgattctttgtttccctcgtcaattaaacaaaggccaagaaagagagaagatgagagggaatggtggatttgcgttgacagattttttaaaaggtgttgccattttggaaataaaagtcccctacaagttaggatctaactgaaagagaatcggtgctaagagcttttaggatcctacaaaagaaacacagttatttgtgaaggtttttctttgccttgttttgaaggtggcctgagaatggagcttctctttttcttgggataatagatacatcaacttttacaagaaaatctctgtctcttcaacaatgatgtccagtgtgtgctgctgagtggtacaaaaggaaatagtacttgattcctgttagaaacaggagtggtagaaccacagtcttcccaggccgcagcctctgtttatagaagcttctgaatgtagaaaagctgttgaatttcatttaaatgtaaataaccttttaaaaagcgtatggagttagccagttccccctagttaatggacataggaagacatttgctgaaatggtagggtggccactttgtgaccatgatgttgcaagttgccctccctggcatggtgagttggcttccagagctgtgggtagaggacatcgcctcacggcactgaggcaccagccgctgcctacccatcaatgcaagcaaaacagctactgactttgtgtagcagggagattggggactctggttccctcgccaagtgtggcagcctgtgcagtgttgggggcttacttggtatctgttggagaatgaggtcctgtcctgctttcacccatgacccatctagcttcagctgtatccattttcttctgagcccatcttccattgtcctcaacgagtttctttggtctttactgaaagaagatagtagaaatttaaaagttgagagaagactagaaatggaactgattagaaggggaggttcaaactgtcaatgcacagacttttcaaagaagttgtttatattttccaatggcaaactgccctttctggaatgttcagagatgatgtgtcatggaaccttcaaacaagtctcttgttcggatgataataggtagtgtccttttagtatgctggttgatctttcatagtgttagtgttttgttacttaaaaaggaaatcagctataaataaaatgtatttttgtaattcccgtgtgtatatatggtatatttctatcaatggccagttgttgtagtccaaaacctaaatcagtttgcaaaacactgtggacagtgcgagattttattgacaggttaacacaatgcctacgtctatccacataggcattcaatgcacttgaatgaacaaagagccaaagaaactcagcctgttcatgcaaatggtatgagtctgataaaatcagctacattgtcctgctttatcaataataatatttcattagtgcaatgatatcaaccagtactttgtctacttggtaaatgcctggaaatactgtatgtgaaaatgatgtttcaagatcttactgtaattgaagtatacgtaaatgtttcagaagacagtgtctgaaatttggctgtttcaatgacttacagagactgagtctacagtttgcagagctatggctccagagtgctaagagggtggagtcacaaatcactgtggtctttacagagccccaggaaatactgagtgagtcaactgagacgactaaaaagatagcatgctaaatcagatactgtcttaaactagacaccatgggttcaagaatagtattaatagatgagaggaaaaccttaagttggaaagaaatcagtctgttcatgttatcccactcatggggagacagagccactctggtcagattttctgtgagtgagatgtggtcccttccctgaagaatctcctaacctcatagaggtgagagagatgactggacagctgactctaagagatggtcaaaagtgcctcaaggaattgaaataaggttcccagagagccctgaggaggcagcaatgaacaaacaccctgttcatcagaaccctctagatagtcacagaagccacaaaaggaccttggttgaccttggaggaggaagcagaagtaccacgaagtggagtgactggcccagtgattcagtcccaacctcctggttcacgaacctgcttgctttccatctcgccatgtggcctgcaggcttgtcagtaacacatttctttagctgtgcctagaggtttaaaaaaaagataagggtcatatgaagaactccataatgttcttgccaagaaaaaagatgattgagtatataacgaacttcagatacagtgtatagaggatgatgcatttgtggcataataaatagttttcagtgctggttttgatatgagttttctgcattcatgaaaaagaaatgcattttggctttttccagaaagagtaccatcaaggaaacggagacctcaactgctgttctagactgtgggggtgcattcctgtctcagcaccaaggatcccaacaggcaggcagggaggcccttgactttgtgtcactgtgaggcagcagagtccatgctctgcatcaggggaggtgcagtaaaggtccattgtgtggcttgagacctatgatctgaggcttgtgcataataagatggcagctgttacctacagagcaaggagtttcctctttcagggtagattatgtaagaatcaattccctggtcccaggagaagttttattgtgagtttgttaatttaagaactcactcagcagaaggacatgtaatgtctgagtaatcttgatggaagaaaggaaatagatctgtgattaaaacacacacacacacacacacacacacacacacacaccctacttcggagagagaatgtagaatggaggaggtgaggaatttaactaatagagatgctttttctaacaggcagaaattagagaaatggatcaaaagatttaaacattgattacatataaacgagtttcctttttttctacatagcacacaggtgctcaacatttaatgaataatataacagatactgtcttaaaagtttaaaaacaggatttgtacttaatcctaaattcctcttatcacacaccagaaaataatttggattttatttacaaactacatccaaatactcttaaggaaagagtgtcatttagcttggagtagggactgactggggtctaagtgttggaaattaaattctgccattcagtccaacctcaaaggtgttccaggcaaggagttttgcaaggactagaaaccctttcacacttgaagtgcaggtgttggctgaaagaatagagggacatttcacaaacacagaacacggctcccctacaggaaagggatggagacagctacctttgctcttgctctcacattctctgtcctcatggactttcttctctgtttccctctgcctatctatctgcctggttctcttgcttctcctggccaaccagctttctcattagtgcatatgtagctgaaaaatccacccctcaagaacccactccacacaacctttccttttcagtacccaccacgctctgactagcatctctgtgatgcctaaggcaaatttttgaggatctgattggtttagttcatctgcctatgggtgagccaccctggggtcaggtgcctgtccaatcacctgttaccaaggaggcagggccgtgtcatttaagcatggccccatggactgaccctttcagcagggacttttattgggggctggtacccagaagaaggagcatgagtgggcaagaccttcaaaaagaacctactacacactggaactgactagtactcctgggatgccatgccacgcagcagccagcactcggagagcagtcccctggatactaccacacagagaaaaggggcatcttcacttgcacatcaggtgagggtgcacacacttgaaactctgctagactggccagagctgccccagccacttctcaccccaccaccagttattgatacagccgctgggtctaggaagcgatttctgaacaaggcccagttagcacaatgtcttgctcagcagacaataaatacttgtaaattgaattgcatgatcttagctcaggtgctactaatgtggctcacggccacacacttgcatggataagaaaaccaatgagcccctcaacagagtcttttgaaacaaaattggtttcaagtgaaacttacattattttttggctgtgaccttctgaatataataacttagtgtcctgagaattgaaaggcctcttgatttcttaggtgaactgttacagaatcctagcctgtggtaaatgctaaaatgtaaggtgtttctgagaaggaatatttaggaaatataattgtgccacacacacattactttagaagatatgcagttgctctgattctgcaggtttaaaaaaaatgggaagtttgtgatatggcagaatctgtctccattggtcaaaccatacttcagtgagagccattataagtgaaatctaaaaattgatcgttttcattctctgactttggtcagacttttgcaaattatggagagaggccatcaacatattttacataaattactgtggccccatcttatttctcctcatttcttccttatgtttaaacacgcccccatctcacacacaaactgagaaaagatttgtatcaaacagaatcagaggcatatgaatggactggaaattgtgaaaaaggtataaatatcctagaccttgatcaactcactttaaactggtctctgattcctcatctgtcaaatgagtataagaccctctgtacttcccatggtgattttgaggagcacatgcataatgtatctgaaaatggcttgacaagcacttgaagccattcttactaaattattagttttgtaattcggttttatccaggaaaatattttagctcctcctatctgctgaattaatttatacagtcacatgttccatgacaccatgttttgccaaggaaaaataaagaaattcctaaatttgaaattgcccacaagatctagcctcatctggagttgctgttattgtccttgttgtctatgatttggaggatatgtaagtacttgtacatgtgctttaactctgggtgaaaaaccccaaccggtgagtctttaaaaccatattagacacattgggcaaagtactgagcagaagctttgaatgtagctgttgttattttaatgcttcgctttctaatgaactttgtacgtccttagcctctgccgggaacagagtgttcatatgctgttagaattttttattgtaaaataaaatgacaaaggctttcataccccaaaa

SEQ ID NO: 5932 - DNA, 11015 bp, Homo sapiens
  source 1..11015: mol_type = unassigned DNA
attccagagggcctttcggcagaacacacctcttctttggtgccttctctgcatatcaccacactgggtcaagagcaagccatcctttctggggcggttcccgcatcaccatcaactgggacagccgactttccctccatacttactttcctccagcccacagagaatcatgcctccccatctcctgtgccagaaatgcccactcttccagcagagggcagtgatgggtcccctcctgcaactagagacttgctcctctcaagcaaagttcctaatcttctttccacatcttggacatttccccggtggaaaaaggacagtgtgacagccattttagggaagaatgaagaggcaaatgtgacgattcctctccaggcctttccaaggaaagaggttttgagtcttcacactgtaaatggatttgtctctgatttcagcaccggtagtgtctcatctcccatcattacagcaccaaggacgaatccccttccttcaggaccacctctaccttccatactctccatacaagccacccagactgttttcccatctcttggcttttccagcaccaagccagaggcttatgcagctgctgtggaccattctgggttgccagcttcagcttccaaacaggtgagagcatcgccctcctccatggatgtatatgattccttaacaataggagacatgaaaaagccagcaaccacagatgttttctggagttctctttcagcagaaactggatctctttccacagaatcaataatatctggcttgcagcagcaaacaaattatgatttaaatggacacacaattagcaccacaagttgggaaactcatttagctccaacagctcctcccaatggtttaacttcagctgccgatgccataaaatctcaggatttcaaagatactgctgggcattcagtgactgcagaagggtttagtattcaggatctagtcctcggtacaagcattgagcagcctgtgcaacagtcagacatgaccatggttggaagccatatagacctctggcccacaagcaataacaaccattccagagacttccaaacagctgaagttgcatattactcacccacaactcgacattccgtgtctcatcctcagctacagttgcccaaccagccagcacatcctcttttgctaacctcaccaggaccaacttctacaggtagcttgcaggaaatgctttcagatggaacagatacaggttctgaaatttccagtgacatcaattcatcacctgagagaaatgcttccacaccattccagaacatcttgggatatcactctgctgctgaatcttctatatcgaccagtgtctttcccaggacctcctccagagtgctgcgggcttctcagcaccccaagaaatggacagcggacacagtatcatctaaggtacagccaacagcagcagctgccgtcacattgtttctgaggaaatcaagtccacctgcactgtctgcagccctggttgctaagggcaccagcagcagccctttggccgtggcctcaggaccagctaagagcagttcgatgactactcttgctaaaaatgtcacaaacaaggccgcatctggcccaaagaggacaccaggggcagtccatacagccttcccattcacaccaacctacatgtatgcaagaacaggacataccacgagcacacatacagccgcaaggaaacatggacactgcctctggcctgttgtctacaacttacctcccaggaaaccacaagccatgcacaccggcctcccaaaccccaccaacctggagatgcccagagcatccacgccacgcccactgacagtcacggccgcgctgacatccattacagcctcagtgaaggccacccggttgccaccattgcgagcagaaaacacagatgctgtccttcctgctgcatcggctgcagtggtcacgactggcaaaatggcatccaacctggagtgtcagatgtccagtaagctcctggtgaagacagttctctttctcacccaaaggagagtgcagatcagtgaatccttgaagttcagtatcgccaaagggctcacacaggcattgcggaaggctttccaccagaacgatgtctcagctcacgtggacattctggaatattctcataatgtcacagttggttattatgctaccaaagggaagttggtgtatttgcctgctgtggtgatcgaaatgctgggtgtgtatggagtcagcaacgtcactgcagacctgaagcaacacaccccacacttacagtctgtggcagtacttgcctccccatggaatccccagcctgcaggctacttccagctaaaaacagtgctgcagtttgtgagccaagcggacaacatacagtcctgcaagtttgctcagacaatggaacagaggctgcagaaggcattccaggatgccgagaggaaagtcctgaataccaaaagcaacttgacaattcagattgtgagcacgtccaatgcctcccaggcagtcaccttggtgtacgtcgtgggcaatcagagcacattcctcaacggcaccgtcgccagcagcctcctcagccagctctcggctgagctggtgggattctacctcacctatccgccgctaaccattgctgaaccactggaatatcccaaccttgacatatcagaaacaaccagagactattgggtaattacagtgctgcagggtgtggacaattcgctggtgggcctgcacaaccagagctttgcccgggtcatggagcagcgcctggcccagctattcatgatgtcccagcaacaaggccggcggtttaaacgggccaccaccctgggaagctacactgtgcagatggtgaagatgcagcgtgtcccaggcccgaaggacccagcggagctgacttactataccctgtacaacgggaagcctttgttggggaccgcagctgccaagatcctgagcaccattgattcccaaaggatggccttgacccttcatcacgttgtccttctgcaagctgaccccgtggtgaagaacccgcccaataacctgtggatcatcgctgcagtgctggcgcccattgccgtggtcacggtcatcatcatcatcatcactgccgtgctctgcaggaagaacaagaacgacttcaagcctgacaccatgataaacctgccgcagagagcaaagcctgtgcaaggctttgattatgccaagcaacacctgggccagcaaggggcagatgaggaggtcatccctgtgactcaggagacagtggttctcccactgcccattagagatgctcctcaggaaagagacgtcgctcaggatggaagcaccatcaagaccgccaaatccactgaaaccaggaagagcaggtcgcccagtgagaatggctctgtcatcagcaacgaatcagggaagcccagctcagggagacgctcaccccagaatgtaatggcacagcagaaagtgacaaaggaggaggcaaggaagagaaatgtgccagcgagtgacgaagaggagggagcggttctatttgacaactccagcaaggtggccgctgaaccctttgacacatcttctgggtctgtgcagctcattgccataaaacccacagccctccccatggtgccccccacctcggacaggagccaggagtcatcggcagtcctcaacggcgaggtgaacaaagccctgaagcagaagtcagacatcgagcactatcggaacaagctgcgcctcaaagccaagaggaagggatattacgacttccctgcagtggagacgagcaagggtctgaccgaaagaaagaagatgtatgaaaaagccccgaaggaaatggagcatgttttggatccagattcagaactctgtgctccattcaccgagtctaaaaacaggcaacagatgaagaactctgtctacagaagccggcagtctctgaacagcccgagtccaggggaaaccgagatggaccttctggtgactcgggagcgaccccggcgtggaatccgcaacagcggatacgatactgagcctgaaatcatagaggaaaccaacattgacagagttcctgagccccggggctattccaggtctcgacaggtgaaaggccactcggagacctccacactgagctcccagccatccatcgacgaggtcaggcagcagatgcacatgctgctggaggaggccttcagcctggcatccgcgggccacgcaggccagagccggcaccaagaggcctacggctcagcccagcacctgccctattcggaggtggtgaccagcgctccggggaccatgacgcggcccagggccggggtgcagtgggtgccgacctaccgcccagaaatgtatcagtacagtctgccccggccggcttacaggttttcccagcttcctgagatggtcatgggctcaccgcctccacccgtacctccccggactggtcctgtggctgtcgcttctctcaggcgatccacctcagacatcggcagcaagaccagaatggccgagtctacagggcccgagccggcccagctgcacgacagcgcctccttcacgcagatgtccagaggccctgtgtccgtgacgcagttggatcagtcggctttaaattactcaggtaatacggtgccagcagtgttcgccatcccagctgccaacagacctggcttcaccggctacttcatcccaacgcctccctcatcctataggaaccaggcctggatgtcctatgcaggagagaatgagctcccgagccagtgggcagattcggtgcccctcccagggtacatcgaggcctacccccgatcacggtacccccagagctctccctccaggcttcctcgtcagtacagccagccagccaacctgcaccccagcctggagcaggccccggcgccctccacagcggcctcgcagcagagcctggcagaaaacgacccgtctgacgctcccctgaccaacatctccactgcggcccttgtgaaggccatccgggaggaggtggccaagctggccaaaaaacagacagacatgtttgagttccaggtctaacgccttagccccgtgggactctggacttccaaactctgaggactcagcctttgggtttcccatgcctacgtgttaggacttgagacatagcaatgggtgagtctttctcaccctccatttctgaaaaggtgaactatggggcttctgggaacaggaaactcttgaacgactagattcttggctcatccaactgattgtgggtcaagtccctggcttggggccttatgtttgatactctctcatgtcaaatgtttgaactttgggcatgtgccctatggaagcttagtcacaagaggcactagctaatctacagattcctatccaatgccacattttaataaatcaccggaagcgggagaatgtagctcttatcttcggtgacctctgcatgttaactctgtttctgtgttaaaggcaatgcaggagtgtggattaagcaccagactgtattctcattcaaccatgaccgtgcgcattaaaatcagtttgtaagggagacactgactccagccaagaaacctgagccccttttttttaggttcatattcaaagtcaaatgaactggatgaaagtcagtaccaatggctgtgcctataaatagacctgattctttgtttccctcgtcaattaaacaaaggccaagaaagagagaagatgagagggaatggtggatttgcgttgacagattttttaaaaggtgttgccattttggaaataaaagtcccctacaagttaggatctaactgaaagagaatcggtgctaagagcttttaggatcctacaaaagaaacacagttatttgtgaaggtttttctttgccttgttttgaaggtggcctgagaatggagcttctctttttcttgggataatagatacatcaacttttacaagaaaatctctgtctcttcaacaatgatgtccagtgtgtgctgctgagtggtacaaaaggaaatagtacttgattcctgttagaaacaggagtggtagaaccacagtcttcccaggccgcagcctctgtttatagaagcttctgaatgtagaaaagctgttgaatttcatttaaatgtaaataaccttttaaaaagcgtatggagttagccagttccccctagttaatggacataggaagacatttgctgaaatggtagggtggccactttgtgaccatgatgttgcaagttgccctccctggcatggtgagttggcttccagagctgtgggtagaggacatcgcctcacggcactgaggcaccagccgctgcctacccatcaatgcaagcaaaacagctactgactttgtgtagcagggagattggggactctggttccctcgccaagtgtggcagcctgtgcagtgttgggggcttacttggtatctgttggagaatgaggtcctgtcctgctttcacccatgacccatctagcttcagctgtatccattttcttctgagcccatcttccattgtcctcaacgagtttctttggtctttactgaaagaagatagtagaaatttaaaagttgagagaagactagaaatggaactgattagaaggggaggttcaaactgtcaatgcacagacttttcaaagaagttgtttatattttccaatggcaaactgccctttctggaatgttcagagatgatgtgtcatggaaccttcaaacaagtctcttgttcggatgataataggtagtgtccttttagtatgctggttgatctttcatagtgttagtgttttgttacttaaaaaggaaatcagctataaataaaatgtatttttgtaattcccgtgtgtatatatggtatatttctatcaatggccagttgttgtagtccaaaacctaaatcagtttgcaaaacactgtggacagtgcgagattttattgacaggttaacacaatgcctacgtctatccacataggcattcaatgcacttgaatgaacaaagagccaaagaaactcagcctgttcatgcaaatggtatgagtctgataaaatcagctacattgtcctgctttatcaataataatatttcattagtgcaatgatatcaaccagtactttgtctacttggtaaatgcctggaaatactgtatgtgaaaatgatgtttcaagatcttactgtaattgaagtatacgtaaatgtttcagaagacagtgtctgaaatttggctgtttcaatgacttacagagactgagtctacagtttgcagagctatggctccagagtgctaagagggtggagtcacaaatcactgtggtctttacagagccccaggaaatactgagtgagtcaactgagacgactaaaaagatagcatgctaaatcagatactgtcttaaactagacaccatgggttcaagaatagtattaatagatgagaggaaaaccttaagttggaaagaaatcagtctgttcatgttatcccactcatggggagacagagccactctggtcagattttctgtgagtgagatgtggtcccttccctgaagaatctcctaacctcatagaggtgagagagatgactggacagctgactctaagagatggtcaaaagtgcctcaaggaattgaaataaggttcccagagagccctgaggaggcagcaatgaacaaacaccctgttcatcagaaccctctagatagtcacagaagccacaaaaggaccttggttgaccttggaggaggaagcagaagtaccacgaagtggagtgactggcccagtgattcagtcccaacctcctggttcacgaacctgcttgctttccatctcgccatgtggcctgcaggcttgtcagtaacacatttctttagctgtgcctagaggtttaaaaaaaagataagggtcatatgaagaactccataatgttcttgccaagaaaaaagatgattgagtatataacgaacttcagatacagtgtatagaggatgatgcatttgtggcataataaatagttttcagtgctggttttgatatgagttttctgcattcatgaaaaagaaatgcattttggctttttccagaaagagtaccatcaaggaaacggagacctcaactgctgttctagactgtgggggtgcattcctgtctcagcaccaaggatcccaacaggcaggcagggaggcccttgactttgtgtcactgtgaggcagcagagtccatgctctgcatcaggggaggtgcagtaaaggtccattgtgtggcttgagacctatgatctgaggcttgtgcataataagatggcagctgttacctacagagcaaggagtttcctctttcagggtagattatgtaagaatcaattccctggtcccaggagaagttttattgtgagtttgttaatttaagaactcactcagcagaaggacatgtaatgtctgagtaatcttgatggaagaaaggaaatagatctgtgattaaaacacacacacacacacacacacacacacacacacaccctacttcggagagagaatgtagaatggaggaggtgaggaatttaactaatagagatgctttttctaacaggcagaaattagagaaatggatcaaaagatttaaacattgattacatataaacgagtttcctttttttctacatagcacacaggtgctcaacatttaatgaataatataacagatactgtcttaaaagtttaaaaacaggatttgtacttaatcctaaattcctcttatcacacaccagaaaataatttggattttatttacaaactacatccaaatactcttaaggaaagagtgtcatttagcttggagtagggactgactggggtctaagtgttggaaattaaattctgccattcagtccaacctcaaaggtgttccaggcaaggagttttgcaaggactagaaaccctttcacacttgaagtgcaggtgttggctgaaagaatagagggacatttcacaaacacagaacacggctcccctacaggaaagggatggagacagctacctttgctcttgctctcacattctctgtcctcatggactttcttctctgtttccctctgcctatctatctgcctggttctcttgcttctcctggccaaccagctttctcattagtgcatatgtagctgaaaaatccacccctcaagaacccactccacacaacctttccttttcagtacccaccacgctctgactagcatctctgtgatgcctaaggcaaatttttgaggatctgattggtttagttcatctgcctatgggtgagccaccctggggtcaggtgcctgtccaatcacctgttaccaaggaggcagggccgtgtcatttaagcatggccccatggactgaccctttcagcagggacttttattgggggctggtacccagaagaaggagcatgagtgggcaagaccttcaaaaagaacctactacacactggaactgactagtactcctgggatgccatgccacgcagcagccagcactcggagagcagtcccctggatactaccacacagagaaaaggggcatcttcacttgcacatcaggtgagggtgcacacacttgaaactctgctagactggccagagctgccccagccacttctcaccccaccaccagttattgatacagccgctgggtctaggaagcgatttctgaacaaggcccagttagcacaatgtcttgctcagcagacaataaatacttgtaaattgaattgcatgatcttagctcaggtgctactaatgtggctcacggccacacacttgcatggataagaaaaccaatgagcccctcaacagagtcttttgaaacaaaattggtttcaagtgaaacttacattattttttggctgtgaccttctgaatataataacttagtgtcctgagaattgaaaggcctcttgatttcttaggtgaactgttacagaatcctagcctgtggtaaatgctaaaatgtaaggtgtttctgagaaggaatatttaggaaatataattgtgccacacacacattactttagaagatatgcagttgctctgattctgcaggtttaaaaaaaatgggaagtttgtgatatggcagaatctgtctccattggtcaaaccatacttcagtgagagccattataagtgaaatctaaaaattgatcgttttcattctctgactttggtcagacttttgcaaattatggagagaggccatcaacatattttacataaattactgtggccccatcttatttctcctcatttcttccttatgtttaaacacgcccccatctcacacacaaactgagaaaagatttgtatcaaacagaatcagaggcatatgaatggactggaaattgtgaaaaaggtataaatatcctagaccttgatcaactcactttaaactggtctctgattcctcatctgtcaaatgagtataagaccctctgtacttcccatggtgattttgaggagcacatgcataatgtatctgaaaatggcttgacaagcacttgaagccattcttactaaattattagttttgtaattcggttttatccaggaaaatattttagctcctcctatctgctgaattaatttatacagtcacatgttccatgacaccatgttttgccaaggaaaaataaagaaattcctaaatttgaaattgcccacaagatctagcctcatctggagttgctgttattgtccttgttgtctatgatttggaggatatgtaagtacttgtacatgtgctttaactctgggtgaaaaaccccaaccggtgagtctttaaaaccatattagacacattgggcaaagtactgagcagaagctttgaatgtagctgttgttattttaatgcttcgctttctaatgaactttgtacgtccttagcctctgccgggaacagagtgttcatatgctgttagaattttttattgtaaaataaaatgacaaaggctttcataccccaaaa

SEQ ID NO: 5933 - DNA, 2430 bp, Homo sapiens
  source 1..2430: mol_type = unassigned DNA
acgtctctttgtggtggcgttgagctcctctagcccgcgcttgccgtcctctcagtggtagcgcggggactggctgggaagcggtcggtcgagtgtggcctgtgtggactcgcatcttgcccgaagccgggcggaggagagctcaagctaagggtgatcagcccatgacctaaacctccagacaaaataaaacggaaaatttgctagaatcaagaatgatggatccatgttcagttggagtccagcttcgtactacaaatgagtgccataaaacctactatactcgtcacacaggttttaagactttgcaagaattgtcatcaaatgatatgcttttacttcaacttagaactggaatgacactttctgggaacaatacaatttgctttcatcatgtaaaaatttacattgacagatttgaggatttacagaagtcatgttgtgacccatttaacatacacaagaaattagccaaaaaaaatttgcatgtaattgacttagatgatgccacttttctgagtgctaaatttggaagacagcttgtacctggttggaagctttgtccaaaatgcacacagataatcaatggaagtgtggatgttgatactgaagaccgccagaaaaggaaacctgagtcagatggaagaactgctaaagctttgaggtcattacaatttacgaatccaggaaggcaaactgaatttgctccagaaactggtaaaagagaaaaaagaaggcttacaaaaaatgcaaccgctggttcagacagacaagtgataccagcaaagagtaaggtctatgatagccagggtctcctgatttttagtgggatggacctctgtgactgcctggatgaagactgcttaggatgtttctatgcttgtcctgcctgtggttctaccaagtgtggagctgaatgccgctgtgaccgcaagtggctgtatgagcaaattgaaattgaaggaggagaaataattcataataaacatgctggataatctgcggtaccaaactatggagcctttaaaggtctttatttctaaaaatctgttactctaagatacattttaagcttgattatcatatgacaaagattttaaaaccatctcagtgtgccctaatttttcatcatgggtgctttaagattcactatttgatataaattcagataggctatttttcagtagtcagcgttaagcctgtctggatcaatataaacaagtagggtgtaggcagtcctctatttgcatgtttcccatgggcacaaatttcagtgacctagatttagtttaaataccagtttccttaccaggaaggaaagaaaactggtaaggaaactgttgttgttaaaatctaggttaaaattttagttagcacattgtaactgagtaattacatgaagtacaaacctctctgctagctcttcagtctacaaatcgctatgtaaataacagatatgcttcatgattgtgaccagtcatgttatttctttcaaattcttccagtggtttgtccctgtgcatctgttaattcagttcacgtacagcagagcatgtagttatgctgtctctctgtcatctacttgacattctatagaagtgaacactcgaaagaactggtcaacaaagatgaaagtgcagcaaagcaatgaaaaatgataacactggaagtgaaattttaatcaaacataaatgaatttgtagaagaagtcactgaccatgggaatgttgttcttgctgctgtgtattcataggagcttagtgaaggcaaacttaccaacacaaataagcaaagtggttgcaataaagacagatacgtcccagaggaagtgatggttaaaaaaaaaaaactttacattaaaagatatttaatgtgaatatagaaatatttcacaacattgaaagcacaagcaataaaagggtggaagctgacccaaacttagaaggagtatggcagtttgccgtgaacataaaagatgcttactcagtatggtaagttacttgccagaaaaaaaggcaagccctattcaaactactttgtttttacaatgaaataaaacactttaattctatttctaatgttttaaattacagtgtactaaatatttttaaacatttttgcatttttttctacatttataactggtcttaagagtttttaatatttgagcagaaccttaaaggtcatggaacaatcatcattttccctattgattattaagattgcaggaccatttttatggtcccacagtaccatgtgaaatgaggatcgcttgtagctgggaacagtgcttacttcagggaaaactgattttgatagaaccgactagttgagtattaaactgttttggaaataatttatatatctaagtgctgaaatatatttctcttctccccacttattcaaataaaaaagttttaatactataaa

SEQ ID NO: 5934 - DNA, 3417 bp, Homo sapiens
  source 1..3417: mol_type = unassigned DNA
atacattgccacatagttcgttgccttgtaactttacctctgatttcctttttctcctccttaatttatcttaatccaattatctgtttgaagaaaaaaaaaattttttttatttttttattttttgagatgagagtctcgctttgtcgcccgggctggagtccagtgacacgatctcggctcaccgcaacttccgcctcctgggttcaagcgattctcatgcctcaacctcccatatagctgcactaccacacctgactaatatttttgtatttttagtagacacgagatttcactatgttagccagtctagtctagaactcctggcatcaagtgatcaacccacattggcctcccaaagtgctgggattacaggcaggagccacaatgcctggctagaagaaacttttctaattattactgtgatagaagccattttatctgatttgattgggacctgtattagttcattttaaaaactgactaaaacacagtaaatgaatataaatatactctgtttttaccagctttaaaacttttttcagttaaaatgttcagtaacatattttaacactttaaagtgtattttattttttaactttgtaaatacagtattttgacctaaaacacagacatttattcgccattttttgttacctgaggccagagtcttctttttatatgattttgctgattattgtttttctctgcagaaaccatatcaaaatgtgtttaagatttctctccagtttttgttttttttttaattttgcaaagcttaaaaacacttgtaaaattgctgaatcctagacttcacagtccctccctaccactcagatttcagtggttcacattttttctcaacagcagattttttcctaatgagttgcattggttgcatattttcttgagaatccaacttttttttttaatttgctttgaaaattatttatgaaaaatttcaaatagaaagtatggacagtagtgaagcacttatgtacatgtcaccaaaccttattttctgtaaatctttttggggaaaataatgttttttcccctcagaagtatccacaaatgtgatatatgttactcttatgtatattttagtatatattcatgtttcatctgtaaatcttatgtactatcttatctttttaaattttacctttaatgatgatactatataacctttacaacttttttcacttaagattgtctttgagatttattcatgttgattcacgtaattcatgtagtttattcattttaactgttatgtgggagtcccttgtatgagtaacgatttcacatcctttacaattaggttatttgtcatctttcactgccaaaggcagtgaatgctgaaagttttcgtatataacttgtgctcttattggagatatttttctccatctgacacccagaactgaaaagagctgagtcccaaggtgtatgcttcctcagttttacaagaaattgcagaaaatgttctaaagcagttgcagcaatttacattcctaccaaagttattataaggagcatgtgagagttggacacatcttaaccagatatcagatttttaaattgatttcaagcaaatgtttaataaatgatatttaatttgcattttcctaggaactatgggggaaacagtttgtatgcatgtattggcttttgttctctttctctgtgaattgcctgactatatttgtttagttttccagtggactctgtcattttctaattgatttttggaagtgaggagttactcgaatatttatgataataatcctaacacctttcaagtgtctttttttttctcctttagttatacagaaatgtgtaaattttacatataatcaaatatatccatctttttatttatttatttttttggtatctgcttgcttgtttgaaaaattcttccatacttccatgtcagaaaaccttctttattttctcataaacatgtttagtttttcttttcatgtttaaatctttaatccacttgttattgatttttgtttgtgcagaagagatctaattgtttttccatatggttaaagtcccttcttcattagtgtgtgatacccatcgattaatagtaccacatgtcatatactgagccctcatctactcatggatctgtttgtttatactataccaataccatagttttaattagaataggtttaaagtaaatcaatatgttactgtattttccttcaggattaccttggctttcttagacctttgctctttcatatagaccagcttgctaaattccaagggggtggcagtagaatatctgatggaactttgattgtaacagaactgaatttacagatgtattcccagataattgacatattttttataatgagccactccatgatatatagctgcatttatttagggtaccgtttttgtcttgcagtttgataattttctccatgaaggtcttgttgtatgtcttttgtaagagtcacatattttgtaagatacagtgttttttggtttctagcatccctggtgaattctcttattagttctaatagtttgttaaacctcttgtatttctcatgtatcttaggataatatttcttatttcctcctttttaattcttatgtggtcttaaatataatctgtaattgcagatgttttcgtgaagttctgactttacagggaacgcttctgtttgattattaaatgtctattataagacttcgataaataccttttttattccttattttcttttagataggtgttgaattttatcaaatgctttttcagtttcctagataaacttgcagcacaaatttgattctctttaatattttctctagggtgatcagcccatgacctaaacctccagacaaaataaaacggaaaatttgctagaatcaagaatgatggatccatgttcagttggagtccagcttcgtactacaaatgagtgccataaaacctactatactcgtcacacaggttttaagactttgcaagaattgtcatcaaatgatatgcttttacttcaacttagaactggaatgacactttctgggaacaatacaatttgctttcatcatgtaaaaatttacattgacagatttgaggatttacagaagtcatgttgtgacccatttaacatacacaagaaattagccaaaaaaaatttgcatgtaattgacttagatgatgccacttttctgagtgctaaatttggaagacagcttgtacctggttggaagctttgtccaaaatgcacacagataatcaatggaagtgtggatgttgatactgaagaccgccagaaaaggaaacctgagtcagatggaagaactgctaaagctttgaggtcattacaatttacgaatccaggaaggcaaactgaatttgctccagaaactggt

SEQ ID NO: 5935 - DNA, 1104 bp, Homo sapiens
  source 1..1104: mol_type = unassigned DNA
ggggaagagggggcgggagccgaggcccgggcgggggcagccagcgagttagggttaggacgggaggattcggcttcccggcggcagagggcgcctggcgctgcggtctggcgcgccagagtcgcccgcgcgggcgccgagaggagaggcgaggcggggagcgcaagcggcggcggccactgccacgtattcccggcagtggtggcggcggcggcggcggcgcccgcgggcaggaataactcaagtcacctgtactggaaatcagtttgctgaaattaatcaacgattcttgaagttgaagaaaaggaggttccagccttggcaagaggagtgtggcccttcctggaatccctctggacacaccctcctagcatcctctaggaaagatgcggcagctcaaagggaagcccaagaaggagacctccaaggacaagaaggagcggaagcaagccatgcaggaggcccggcagcagatcactacagtggtgctgcccacgctggccgtggtcgtgctcttgatcgtggtgtttgtgtacgtggccacgcgccccaccatcaccgagtgagccccgcagccggctgcggaccccatcggcagggagaggaggcgcgggagggggacgcaaacaaaaaatggctttcatattcagagatgttcatgttgctgagctgtaagcaggagcaccctgtcttctctggtctttgacttgattaaagtatctccgctttcttgggagggaataggggatgttttatcagtgaatgtgccatacaccttatggtccacttcatgtgcctttcagacttcaaagcgcgcgcgcatgtgtgtgtgtgtgtgtgtgtgtgtgtgtgtgtgtgtgtgcttctttttctctcctaaaaatcgataagtagctccacctgaagagggatggaacctctgggtcaggaaacagctggaatccacactcacctcattcccattgtttggatcatgcttctttccaacacgtgttcacaatctccaaagggactgtatttcttctctgtgcttaatgtgatttgaaatatgttgaatcaaagtgaaatatttattttttgaataaaggagataatagccttaaa

SEQ ID NO: 5936 - DNA, 889 bp, Homo sapiens
  source 1..889: mol_type = unassigned DNA
caggaataactcaagtcacctgtactggaaatcagtttgctgaaattaatcaacgattcttgaagttgaagaaaagttgttctctctacaggaggttccagccttggcaagaggagtgtggcccttcctggaatccctctggacacaccctcctagcatcctctaggaaagatgcggcagctcaaagggaagcccaagaaggagacctccaaggacaagaaggagcggaagcaagccatgcaggaggcccggcagcagatcactacagtggtgctgcccacgctggccgtggtcgtgctcttgatcgtggtgtttgtgtacgtggccacgcgccccaccatcaccgagtgagccccgcagccggctgcggaccccatcggcagggagaggaggcgcgggagggggacgcaaacaaaaaatggctttcatattcagagatgttcatgttgctgagctgtaagcaggagcaccctgtcttctctggtctttgacttgattaaagtatctccgctttcttgggagggaataggggatgttttatcagtgaatgtgccatacaccttatggtccacttcatgtgcctttcagacttcaaagcgcgcgcgcatgtgtgtgtgtgtgtgtgtgtgtgtgtgtgtgtgtgtgtgcttctttttctctcctaaaaatcgataagtagctccacctgaagagggatggaacctctgggtcaggaaacagctggaatccacactcacctcattcccattgtttggatcatgcttctttccaacacgtgttcacaatctccaaagggactgtatttcttctctgtgcttaatgtgatttgaaatatgttgaatcaaagtgaaatatttattttttgaataaaggagataatagccttaaa

SEQ ID NO: 5937 - DNA, 374 bp, Homo sapiens
  source 1..374: mol_type = unassigned DNA
gcggggagcgcaagcggcggcggccactgccacgtattcccggcagtggtggcggcggcggcggcggcgcccgcgggcaggaataactcaagtcacctgtactggaaatcagtttgctgaaattaatcaacgattcttgaagttgaagaaaaggaggttccagccttggcaagaggagtgtggcccttcctggaatccctctggacacaccctcctagcatcctctaggaaagatgcggcagctcaaagggaagcccaagaaggagacctccaaggacaagaaggagcggaagcaagccatgcaggaggcccggcagcagatcactacagtggtgctgcccacgctggccgtggtcgtgctcttgatcgtggtg

SEQ ID NO: 5938 - DNA, 472 bp, Homo sapiens
  source 1..472: mol_type = unassigned DNA
ggaggaagccaggttacctctgttggacctgcctgctcccagcatctccagcaacaagctgtctctgccggaataactcaagtcacctgtactggaaatcagtttgctgaaattaatcaacgattcttgaagttgaagaaaaggaggttccagccttggcaagaggagtgtggcccttcctggaatccctctggacacaccctcctagcatcctctaggaaagatgcggcagctcaaagggaagcccaagaaggagacctccaaggacaagaaggagcggaagcaagccatgcaggaggcccggcagcagatcactacagtggtgctgcccacgctggccgtggtcgtgctcttgatcgtggtgtttgtgtacgtggccacgcgccccaccatcaccgagtgagccccgcagccggctgcggaccccatcggcagggagaggaggcgcgggagggggacgcaaacaaaaaat

SEQ ID NO: 5939 - DNA, 355 bp, Homo sapiens
  source 1..355: mol_type = unassigned DNA
cctcttcaaagacctaatcagcgtctagtgggaataactcaagtcacctgtactggaaatcagtttgctgaaattaatcaacgattcttgaagttgaagaaaagttgttctctctacaggaggttccagccttggcaagaggagtgtggcccttcctggaatccctctggacacaccctcctagcatcctctaggaaagatgcggcagctcaaagggaagcccaagaaggagacctccaaggacaagaaggagcggaagcaagccatgcaggaggcccggcagcagatcactacagtggtgctgcccacgctggccgtggtcgtgctcttgatcgtggtgtttgtgtacgtggcc

SEQ ID NO: 5940 - DNA, 5745 bp, Homo sapiens
  source 1..5745: mol_type = unassigned DNA
cacagggcctgcagagaggggacccaccgggcaggatgcactggcttccagcaggccacgacatcaacggtgccctggagccctccaacatagacaccagcatcctggaggagtacatcagcaaggaggatgcctccgacctctgcttccctgacatctctgctccagccagctcggcctcctactcccacgggcagcctgcgatgcctggctccagcggggtccaccacctgagcccccctgggggtggaccctccccggggcgccatggtcccctcccacccccgggctacggcaccccgctgaactgcaacaacaacaacggcatgggcgctgcccccaagcccttcccggggggcaccgggccccccatcaaggctgagcccaaggctccctatgccccaggcacactgccggactctcccccagactcgggctccgaggcctactccccccagcaggtgaatgagccccacctcctgcgcacgataacccctgagacactgtgccacgtgggagtgccctcccgcctggagcatccgcccccacctccagcccacttgccaggccccccgccacccccaccacccccacctcactaccctgtcctgcagcgggatctgtacatgaaggccgagcccccgatcccccactacgctgccatggggcaggggctggtgcccactgatcttcaccacacccagcagtcccagatgctgcaccagctcctgcagcagcacggagctgagctccctacacacccctccaagaagaggaagcactctgaatccccccccagcaccctcaatgcccagatgctgaatggaatgatcaaacaggagcctgggaccgtgacagccctgcctctgcaccccactcgagccccatcgccaccctggcctccccagggtccgctctccccgggccctggttccttgcctctcagcattgcccgtgtccagacaccgccttggcacccgccaggtgccccctccccaggcctcctgcaggacagtgacagcctcagtggctcctacctggaccccaactaccagtccatcaagtggcagcctcatcagcagaacaagtgggcgaccctgtacgatgctaactacaaggagctgcccatgctcacctaccgcgtggatgcggacaagggcttcaacttttcggtgggcgacgacgcctttgtgtgccagaagaagaaccacttccaggtgacagtgtacatcggcatgctgggcgagcccaagtacgtcaagacgcccgagggcctcaagcccctcgactgcttctatctgaagctgcacggagtgaagctggaggccctgaaccagtccattaacatcgagcagtcccagtcagaccggagcaagcggcccttcaacccggtcacggtcaatctgccccctgagcaggtcacgaaggtgactgtggggcggctgcacttcagcgagaccaccgctaacaacatgcgtaagaagggcaagcccaacccggaccagaggtacttcatgctggtggtggccctccaggctcatgcacagaaccagaactacacgctggccgcccagatctcagagcgcatcattgtgcgggcctccaacccaggccagttcgagagcgacagcgatgtgttgtggcagcgggcacaggtgcccgacaccgtcttccaccacggccgcgtgggcatcaacacagaccggccggatgaggcgctggttgtgcacgggaatgtcaaggtcatgggctcgcttatgcacccctccgacctgcgcgccaaggaacacgtgcaggaggtggacaccaccgagcaattgaagaggatctcgcgcatgcggctggtgcactacagatacaagcccgagttcgccgccagcgcgggcatcgaggccaccgcgccagagacaggtgtcatcgctcaggaggtgaaggagatcttgcctgaggctgtgaaagacaccggagacatggtctttgccaatgggaaaaccatagagaacttcctggtggtgaacaaggagcgcatcttcatggagaacgtaggggccgtgaaggagctgtgcaagctgacagacaacctggagacgcgcattgatgagctggagcgctggagccacaagctggccaagctgcggcggctcgacagcctcaagtccaccggcagctcgggcgccttcagccatgcagggagccagttcagtcgggcgggcagcgtcccccacaagaagaggccccccaaggtggccagcaagtcatcgtccgtggttccggaccaggcctgcatcagccagcgcttcctgcagggaaccatcattgccctggtggtggtcatggccttcagcgtggtgtccatgtccacactgtacgtgctgagcctgcgcacagaggaggacctggtagacactgatggcaggtccagccagagctttgggaccacgcagctccgacagtcccccttgaccacggggctaccaggcatacagccctctttgctgctggtgaccaccagcctcaccagctcggccccaggttctgctgtccgcaccttggacatgtgttccagccacccctgccctgtcatctgctgttcctcacccactaccaaccctaccactggtcctagtcttggccccagctttaaccctggccatgttctcagcccaagtcccagccccagcaccaaccgctcaggccccagccagatggcccttctgccagtcaccaacatcagagccaagtcctggggtctttcagtcaatggcattggccactccaagcatcacaagagtctggagcctctggccagccctgcagtccccttccctggggggcagggcaaagccaagaacagtcccagccttggtttccatggccgggcccgccgaggggccctccagtccagcgtgggccctgctgagcccacctgggcccagggccagtcagagccagtgccctccctgacctccatccaggtgctggagaattcgatgtccatcacctcccagtactgtgctccaggggatgcctgcaggcctgggaacttcacctaccacatccctgtcagtagtggcaccccactgcacctcagcctgactctgcagatgaactcctcctcccccgtgtctgtggtgctgtgcagcctgaggtcaaaggaggaaccatgtgaggaggggagccttccacagagtctccacacccaccaggacacccagggcacctctcaccggtggccaataaccatcctgtccttccgtgaattcacctaccacttccgggtggcactgctgggtcaggccaactgcagttcagaggctctcgcccagccagccacagactaccacttccacttctaccgcctgtgtgactgagctgccctcctgaggcagcaccacaccagggaccaggggtgcccaggcaccccccaacactggatgcaatggtgttacactggagcccgctgcaggccagctctgctgttcactggccctacccgagactggtgaaactggaagtcttcacactggagttgctgttccagctggtcgcccctcacggcacagagggaacctgagagccagagacttcttgggccttcctgcctgccaccccctaggggccaggacaggaccagtttacctctttccagatatggtggttggagggctggttcaggtgccctggagggaaggggaagcctgtggccctgatttgttcagagcccattctcccttgcctccccttttgagactggagccaacccttttggagagaggacctgcccacctttgagatcagcagggggctcggatccagccctaagagacttgggtggacccccatgagtcaatggagggcagacggctctcccccttaaagctgttccctgggggatggcttggtagtggactttctggggtttgcctgttacgccagactcggacttctaagctttaagtgtggcccaggaggtttcttctccctgggagggcttggctcccaagaagtcccagggcagccgaggccagccctgcctgggttggagaaactgactttgtgccttaagtctactcagtgcctggtgaagccaccctcagcccttcacaggcctgaaccagtaggggccagtgggccaggtaagccctagagccttgaaccaggaatatccaggaagaggaaattccctttgagcccccagatggtattgcagcttcactgcctgcgttcctgggagcgtctggagctcacagtgatcagtgaccacatcattctctctgagcagaggagcaggaatccctcaagcagcagcctggtcttggctggtgggcagatgcaaatagcttttgctgttattaatgaagtaattactaaatgcacttaaaccagggcaggaaggaatggaaggatggagctagaaagctcagagtgggccagagcaggggtgtgacacttgcaaagacagggctctgactctgatccctcccagggagcctccgacacccatcccactcccaaccaccaagaccctgggttagggaagaagttgtatcttaagtgccaccttcaagtttcttagtggtgcctggtgcattccgaggctacatccaggctcatggaaggagtgtagtattcatttagccatgtctgccatgggtccagaaatgggaaagggaattgctgtccttgccctgtggtatgctgccacctctttgggaagcaggccttgcccctgtcccaccactcattctcagctttgaatgggaggcctttctatagtggaggcctttccttgaagcctatgaactgcaggcccccttttgccattgatctcaaagcacttgtcctcaggatagggaagagcagggggatgcaggaatagcagggatagcttgctcccagccccctccccaatttggttccgttgacataggaattttacgattcccaaaccatgcaggggctgagccttccttatgatgactttgttctccctcccactgggggaatcctccctatgccttaaaactgccgagccccactccatgtaataggattcctgggcttcctcaatgggggttcatgttcttggactgcgggccctcagtccttaactggaaagtgaccgtccactgccccatggagcccatctggacacagcacagccccaaaaccgttagcagctggctctgtttccaagcctggggaggggttcctcagtgcaggagttggggacaggctggggatccaagctgcttgagggggtcaaccttggaccaaagttgccttaagcctgtggtaaaagggcttcagggaaggtaagtgggccacctgctggaagctgccagctgcccggctggcaatggtgtgagtgtcttggccctgtccctgccctggggtccagcaggtcatccctcccttcttctctctcctttggcgtttgttcctgtagtcactgggctaatctccccctagcttcaagctgtacatagggcctcccagtgcaaatcctcctgcccataccgtgcacccttagaagcctgcgtgtgcatagagcgccccctacttcccagttaactcccagttcttctccctgagcttggtatttgtcatgtgccaactctgactctgaggtgggcagtgagggaagcagccccgggcctgcttgcttcctgtccccgaaatgttcgtttcttctgaagtaaatatacatatataaataaatgtataaatactgctttgtatctg

SEQ ID NO: 5941 - DNA, 5927 bp, Homo sapiens
  source 1..5927: mol_type = unassigned DNA
agccgggactgtcgcgcgggccgcgccggcgatgccgcgcccccgggccgggctgtagcggggccgcggctggagtgtgcgccgggcaggcgggacatggaggtggtggacgagacggaggcgctgcagcgcttcttcgaaggccacgacatcaacggtgccctggagccctccaacatagacaccagcatcctggaggagtacatcagcaaggaggatgcctccgacctctgcttccctgacatctctgctccagccagctcggcctcctactcccacgggcagcctgcgatgcctggctccagcggggtccaccacctgagcccccctgggggtggaccctccccggggcgccatggtcccctcccacccccgggctacggcaccccgctgaactgcaacaacaacaacggcatgggcgctgcccccaagcccttcccggggggcaccgggccccccatcaaggctgagcccaaggctccctatgccccaggcacactgccggactctcccccagactcgggctccgaggcctactccccccagcaggtgaatgagccccacctcctgcgcacgataacccctgagacactgtgccacgtgggagtgccctcccgcctggagcatccgcccccacctccagcccacttgccaggccccccgccacccccaccacccccacctcactaccctgtcctgcagcgggatctgtacatgaaggccgagcccccgatcccccactacgctgccatggggcaggggctggtgcccactgatcttcaccacacccagcagtcccagatgctgcaccagctcctgcagcagcacggagctgagctccctacacacccctccaagaagaggaagcactctgaatccccccccagcaccctcaatgcccagatgctgaatggaatgatcaaacaggagcctgggaccgtgacagccctgcctctgcaccccactcgagccccatcgccaccctggcctccccagggtccgctctccccgggccctggttccttgcctctcagcattgcccgtgtccagacaccgccttggcacccgccaggtgccccctccccaggcctcctgcaggacagtgacagcctcagtggctcctacctggaccccaactaccagtccatcaagtggcagcctcatcagcagaacaagtgggcgaccctgtacgatgctaactacaaggagctgcccatgctcacctaccgcgtggatgcggacaagggcttcaacttttcggtgggcgacgacgcctttgtgtgccagaagaagaaccacttccaggtgacagtgtacatcggcatgctgggcgagcccaagtacgtcaagacgcccgagggcctcaagcccctcgactgcttctatctgaagctgcacggagtgaagctggaggccctgaaccagtccattaacatcgagcagtcccagtcagaccggagcaagcggcccttcaacccggtcacggtcaatctgccccctgagcaggtcacgaaggtgactgtggggcggctgcacttcagcgagaccaccgctaacaacatgcgtaagaagggcaagcccaacccggaccagaggtacttcatgctggtggtggccctccaggctcatgcacagaaccagaactacacgctggccgcccagatctcagagcgcatcattgtgcgggcctccaacccaggccagttcgagagcgacagcgatgtgttgtggcagcgggcacaggtgcccgacaccgtcttccaccacggccgcgtgggcatcaacacagaccggccggatgaggcgctggttgtgcacgggaatgtcaaggtcatgggctcgcttatgcacccctccgacctgcgcgccaaggaacacgtgcaggaggtggacaccaccgagcaattgaagaggatctcgcgcatgcggctggtgcactacagatacaagcccgagttcgccgccagcgcgggcatcgaggccaccgcgccagagacaggtgtcatcgctcaggaggtgaaggagatcttgcctgaggctgtgaaagacaccggagacatggtctttgccaatgggaaaaccatagagaacttcctggtggtgaacaaggagcgcatcttcatggagaacgtaggggccgtgaaggagctgtgcaagctgacagacaacctggagacgcgcattgatgagctggagcgctggagccacaagctggccaagctgcggcggctcgacagcctcaagtccaccggcagctcgggcgccttcagccatgcagggagccagttcagtcgggcgggcagcgtcccccacaagaagaggccccccaaggtggccagcaagtcatcgtccgtggttccggaccaggcctgcatcagccagcgcttcctgcagggaaccatcattgccctggtggtggtcatggccttcagcgtggtgtccatgtccacactgtacgtgctgagcctgcgcacagaggaggacctggtagacactgatggctcttttgccgtgtccacttcctgtctcctggccctgctccggccccagccccctggggggagtgaggccttgtgcccatggtccagccagagctttgggaccacgcagctccgacagtcccccttgaccacggggctaccaggcatacagccctctttgctgctggtgaccaccagcctcaccagctcggccccaggttctgctgtccgcaccttggacatgtgttccagccacccctgccctgtcatctgctgttcctcacccactaccaaccctaccactggtcctagtcttggccccagctttaaccctggccatgttctcagcccaagtcccagccccagcaccaaccgctcaggccccagccagatggcccttctgccagtcaccaacatcagagccaagtcctggggtctttcagtcaatggcattggccactccaagcatcacaagagtctggagcctctggccagccctgcagtccccttccctggggggcagggcaaagccaagaacagtcccagccttggtttccatggccgggcccgccgaggggccctccagtccagcgtgggccctgctgagcccacctgggcccagggccagtcagcctctctccttgcagagccagtgccctccctgacctccatccaggtgctggagaattcgatgtccatcacctcccagtactgtgctccaggggatgcctgcaggcctgggaacttcacctaccacatccctgtcagtagtggcaccccactgcacctcagcctgactctgcagatgaactcctcctcccccgtgtctgtggtgctgtgcagcctgaggtcaaaggaggaaccatgtgaggaggggagccttccacagagtctccacacccaccaggacacccagggcacctctcaccggtggccaataaccatcctgtccttccgtgaattcacctaccacttccgggtggcactgctgggtcaggccaactgcagttcagaggctctcgcccagccagccacagactaccacttccacttctaccgcctgtgtgactgagctgccctcctgaggcagcaccacaccagggaccaggggtgcccaggcaccccccaacactggatgcaatggtgttacactggagcccgctgcaggccagctctgctgttcactggccctacccgagactggtgaaactggaagtcttcacactggagttgctgttccagctggtcgcccctcacggcacagagggaacctgagagccagagacttcttgggccttcctgcctgccaccccctaggggccaggacaggaccagtttacctctttccagatatggtggttggagggctggttcaggtgccctggagggaaggggaagcctgtggccctgatttgttcagagcccattctcccttgcctccccttttgagactggagccaacccttttggagagaggacctgcccacctttgagatcagcagggggctcggatccagccctaagagacttgggtggacccccatgagtcaatggagggcagacggctctcccccttaaagctgttccctgggggatggcttggtagtggactttctggggtttgcctgttacgccagactcggacttctaagctttaagtgtggcccaggaggtttcttctccctgggagggcttggctcccaagaagtcccagggcagccgaggccagccctgcctgggttggagaaactgactttgtgccttaagtctactcagtgcctggtgaagccaccctcagcccttcacaggcctgaaccagtaggggccagtgggccaggtaagccctagagccttgaaccaggaatatccaggaagaggaaattccctttgagcccccagatggtattgcagcttcactgcctgcgttcctgggagcgtctggagctcacagtgatcagtgaccacatcattctctctgagcagaggagcaggaatccctcaagcagcagcctggtcttggctggtgggcagatgcaaatagcttttgctgttattaatgaagtaattactaaatgcacttaaaccagggcaggaaggaatggaaggatggagctagaaagctcagagtgggccagagcaggggtgtgacacttgcaaagacagggctctgactctgatccctcccagggagcctccgacacccatcccactcccaaccaccaagaccctgggttagggaagaagttgtatcttaagtgccaccttcaagtttcttagtggtgcctggtgcattccgaggctacatccaggctcatggaaggagtgtagtattcatttagccatgtctgccatgggtccagaaatgggaaagggaattgctgtccttgccctgtggtatgctgccacctctttgggaagcaggccttgcccctgtcccaccactcattctcagctttgaatgggaggcctttctatagtggaggcctttccttgaagcctatgaactgcaggcccccttttgccattgatctcaaagcacttgtcctcaggatagggaagagcagggggatgcaggaatagcagggatagcttgctcccagccccctccccaatttggttccgttgacataggaattttacgattcccaaaccatgcaggggctgagccttccttatgatgactttgttctccctcccactgggggaatcctccctatgccttaaaactgccgagccccactccatgtaataggattcctgggcttcctcaatgggggttcatgttcttggactgcgggccctcagtccttaactggaaagtgaccgtccactgccccatggagcccatctggacacagcacagccccaaaaccgttagcagctggctctgtttccaagcctggggaggggttcctcagtgcaggagttggggacaggctggggatccaagctgcttgagggggtcaaccttggaccaaagttgccttaagcctgtggtaaaagggcttcagggaaggtaagtgggccacctgctggaagctgccagctgcccggctggcaatggtgtgagtgtcttggccctgtccctgccctggggtccagcaggtcatccctcccttcttctctctcctttggcgtttgttcctgtagtcactgggctaatctccccctagcttcaagctgtacatagggcctcccagtgcaaatcctcctgcccataccgtgcacccttagaagcctgcgtgtgcatagagcgccccctacttcccagttaactcccagttcttctccctgagcttggtatttgtcatgtgccaactctgactctgaggtgggcagtgagggaagcagccccgggcctgcttgcttcctgtccccgaaatgttcgtttcttctgaagtaaatatacatatataaataaatgtataaatactgctttgtatctga

SEQ ID NO: 5942 - DNA, 1449 bp, Homo sapiens
  source 1..1449: mol_type = unassigned DNA
atgctcacctaccgcgtggatgcggacaagggcttcaacttttcggtgggcgacgacgcctttgtgtgccagaagaagaaccacttccaggtgacagtgtacatcggcatgctgggcgagcccaagtacgtcaagacgcccgagggcctcaagcccctcgactgcttctatctgaagctgcacggactggaggccctgaaccagtccattaacatcgagcagtcccagtcagaccggagcaagcggcccttcaacccggtcacggtcaatctgccccctgagcaggtcacgaaggtgactgtggggcggctgcacttcagcgagaccaccgctaacaacatgcgtaagaagggcaagcccaacccggaccagaggtacttcatgctggtggtggccctccaggctcatgcacagaaccagaactacacgctggccgcccagatctcagagcgcatcattgtgcgggcctccaacccaggccagttcgagagcgacagcgatgtgttgtggcagcgggcacaggtgcccgacaccgtcttccaccacggccgcgtgggcatcaacacagaccggccggatgaggcgctggttgtgcacgggaatgtcaaggtcatgggctcgcttatgcacccctccgacctgcgcgccaaggaacacgtgcaggaggtggacaccaccgagcaattgaagaggatctcgcgcatgcggctggtgcactacagatacaagcccgagttcgccgccagcgcgggcatcgaggccaccgcgccagagacaggtgtcatcgctcaggaggtgaaggagatcttgcctgaggctgtgaaagacaccggagacatggtctttgccaatgggaaaaccatagagaacttcctggtggtgaacaaggtctgtgggctgaaatacgtggtttattgtgaggacgacgtttgtcacttacctgtcctgagtctgggcgccaaggaggcatgggccgtgaaggagctgtgcaagctgacagacaacctggagacgcgcattgatgagctggagcgctggagccacaagctggccaagctgcggcggctcgacagcctcaagtccaccggcagctcgggcgccttcagccatgcagggagccagttcagtcgggcgggcagcgtcccccacaagaagaggccccccaaggtggccagcaaggtagggtcatcgtccgtggttccggaccaggcctgcatcagccagcgcttcctgcagggaaccatcattgccctggtggtggtcatggccttcaggcatcacctgggagcccagcctcaggagcaaggaccacagccttgtcctagagagagggcactggatggtggctccagctctaacggtcacccttttctgtggctccagcgtggtgtccatgtccacactgtacgtgctgagcctgcgcacagaggaggacctggtagacactga

SEQ ID NO: 5943 - DNA, 1920 bp, Homo sapiens
  source 1..1920: mol_type = unassigned DNA
acaatcctttgcggtggttcaagatggcggcgcccagtggcacagtgagcgattcggaaagtagtaacagcagtagcgatgcggaggagctggagcggtgccgcgaggcggcaatgccggcttggggcttggagcaacgcccgcacgtggcagggaagccaagagccggtgctgcaaatagccagttgtcaacctcccaaccgagcctcaggcataaggtgaatgagcatgaacaagatggcaacgagcttcagaccacccctgaattccgagcccacgtagccaagaagctgggagccctgctggacagcttcattaccatctcagaagcagcaaaggagccagcaaaagctaaggtacagaaagtcgctttggaggatgatggtttccgccttttcttcacatctgtccctggaggccgtgagaaggaagagtctccccaaccccgccgaaagcgacagccctccagctccagtgaggacagtgacgaggagtggcggcggtgccgggaggcagctgtgtcggcgtccgacatcctacaggagtcagccatccacagccctggaacagtggagaaggaggcaaagaagaaaaggaagttgaaaaagaaagccaagaaggtggccagtgtcgactcggctgtcgctgccaccacccccaccagcatggccacagtccagaagcagaagtcaggtgagctcaacggggaccaggtgtcgcttgggaccaaaaagaagaaaaaggcaaagaaggccagcgagacctctccattcccaccagcaaagagtgctacagctatacctgcaaactgaacccagccatgggcacagggctcagccagctccaaggacaaggtgtcccccccaccctggggacaaggcatttccaagccccacctccctctccaagttcaaggactgggctggcaaacccagactgcccatgagaccctgatggtgatgaaggcttgctcgagagttgggccaaaaaagtggctgtagggtgagaagaccaatcaaggcctgcccctctgtgctcccacggagggctggcgggggcgctgtggttccagaacatttcatgacctcaggaaaaaaggaaccttccagttatttgagactagtggccaagtggtgaaacctccatctccctagaactgtctgaggtgggcaggggaagggagaccttccccaccacctccttagcctggtgtgagaaacagtttttagaaaatgagagaagggatccccaagaggccaaggcccagagaaacttttgttcttctctccttagcccacatagacttcacagaatcgtctgagaaaggagagctttttcacccctggctttctagaattttctttgtctgcatttgtgaatataccacacatgatggtgtctctgagccgaccagattatggaaactcaattgtcagaggacccaaaacaaaacttagagtgatttggatattgcctctctgtcaatgctgaaccttaagacattttaagtaaacatcctcctcctctctacacccccaggatttgtgcgttcaccccacccaagacttcaggaagtgtcatagcactcgtggactaggtttcatgggacaaaggcattctgcaagaagtagaagcttgtggccgggtgcagtggctcatgcctgtaatccaagcattttgagaggccaaggaggtggatcaattgaggccaggagtttgagaccagcctggccaacatggcgagaccccatctctactaaaaatacaaaaattagctgagcatgttgacacacgcccgtaatcccagctactcaggaggctgaggtgggagaatcgcttgaacccaggaggtgcaggttgcagtgagccgagattgcgccactgcactctagcctaagcaatggagcaagaccctatctc

SEQ ID NO: 5944 - DNA, 1339 bp, Homo sapiens
  source 1..1339: mol_type = unassigned DNA
gcggtggttcaagatggcggcgcccagtggcacagtgagcgattcggaaagtagtaacagcagtagcgatgcggaggagctggagcggtgccgcgaggcggcaatgccggcttggggcttggagcaacgcccgcacgtggcagggaagccaagagccgtagagatggggtttcaccatgttgaccaggatggtctcgatctcttgacctcgtgatccgcctgcctcagcctcccaaagtgctgggattacaggcgtgagccaccgcgcccggccttgactccatcttaaaagtgcatctatctggagttcacccacttctcaccacatcaattactgcagcagactccgtgttcctgcctttgccccaacagtctcacgctgcacagcagccaaagatgttctgtcaaaacccaggtgctgcaaatagccagttgtcaacctcccaaccgagcctcaggcataaggtgaatgagcatgaacaagatggcaacgagcttcagaccacccctgaattccgagcccacgtagccaagaagctgggagccctgctggacagcttcattaccatctcagaagcagcaaaggagccagcaaaagctaaggtacagaaagtcgctttggaggatgatggtttccgccttttcttcacatctgtccctggaggccgtgagaaggaagagtctccccaaccccgccgaaagcgacagccctccagctccagcagtgaggacagtgacgaggagtggcggcggtgccgggaggcagctgtgtcggcgtccgacatcctacaggagtcagccatccacagccctggaacagtggagaaggaggcaaagaagaaaaggaagttgaaaaagaaagccaagaaggtggccagtgtcgactcggctgtcgctgccaccacccccaccagcatggccacagtccagaagcagaagtcaggtgagctcaacggggaccaggtgtcgcttgggaccaaaaagaagaaaaaggcaaagaaggccagcgagacctctccattcccaccagcaaagagtgctacagctatacctgcaaactgaacccagccatgggcacagggctcagccagctccaaggacaaggtgtcccccccaccctggggacaaggcatttccaagccccacctccctctccaagttcaaggactgggctggcaaacccagactgcccatgagaccctgatggtgatgaaggcttgctcgagagttgggccaaaaaagtggctgtagggtgagaagaccaatcaaggcctgcccctctgtgctcccacggagggctggcgggggcgctgtggttccagaacatttcatgacctca

SEQ ID NO: 5945 - DNA, 2515 bp, Homo sapiens
  source 1..2515: mol_type = unassigned DNA
gcggtggttcaagatggcggcgcccagtggcacagtgagcgattcggaaagtagtaacagcagtagcgatgcggaggagctggagcggtgccgcgaggcggcaatgccggcttggggcttggagcaacgcccgcacgtggcagggaagccaagagccggtgctgcaaatagccagttgtcaacctcccaaccgagcctcaggcataaggtgaatgagcatgaacaagatggcaacgagcttcagaccacccctgaattccgagcccacgtagccaagaagctgggagccctgctggacagcttcattaccatctcagaagcagcaaaggagccagcaaaagctaaggtacagaaagtcgctttggaggatgatggtttccgccttttcttcacatctgtccctggaggccgtgagaaggaagagtctccccaaccccgccgaaagcgacagccctccagctccagtgaggacagtgacgaggagtggcggcggtgccgggaggcagctgtgtcggcgtccgacatcctacaggagtcagccatccacagccctggaacagtggagaaggaggcaaagaagaaaaggaagttgaaaaagaaagccaagaaggtggccagtgtcgactcggctgtcgctgccaccacccccaccagcatggccacagtccagaagcagaagtcaggtgagctcaacggggaccaggtgtcgcttgggaccaaaaagaagaaaaaggcaaagaaggccagcgagacctctccattcccaccagcaaagagtgctacagctatacctgcaaactgaacccagccatgggcacagggctcagccagctccaaggacaaggtgtcccccccaccctggggacaaggcatttccaagccccacctccctctccaagttcaaggactgggctggcaaacccagactgcccatgagaccctgatggtgatgaaggcttgctcgagagttgggccaaaaaagtggctgtagggtgagaagaccaatcaaggcctgcccctctgtgctcccacggagggctggcgggggcgctgtggttccagaacatttcatgacctcaggaaaaaaggaaccttccagttatttgagactagtggccaagtggtgaaacctccatctccctagaactgtctgaggtgggcaggggaagggagaccttccccaccacctccttagcctggtgtgagaaacagtttttagaaaatgagagaagggatccccaagaggccaaggcccagagaaacttttgttcttctctccttagcccacatagacttcacagaatcgtctgagaaaggagagctttttcacccctggctttctagaattttctttgtctgcatttgtgaatataccacacatgatggtgtctctgagccgaccagattatggaaactcaattgtcagaggacccaaaacaaaacttagagtgatttggatattgcctctctgtcaatgctgaaccttaagacattttaagtaaacatcctcctcctctctacacccccaggatttgtgcgttcaccccacccaagacttcaggaagtgtcatagcactcgtggactaggtttcatgggacaaaggcattctgcaagaagtagaagcttgtggccgggtgcagtggctcatgcctgtaatccaagcattttgagaggccaaggaggtggatcaattgaggccaggagtttgagaccagcctggccaacatggcgagaccccatctctactaaaaatacaaaaattagctgagcatgttgacacacgcccgtaatcccagctactcaggaggctgaggtgggagaatcgcttgaacccaggaggtgcaggttgcagtgagccgagattgcgccactgcactctagcctaagcaatggagcaagaccctatctcaaaaaaaaaaaaagaaaaagaaaaagaaaagaagtagaagctcatggccagggatggtggctcacacctgtaatcccagcactttgggaggccgaggcaggtggatcacttgagccgagttccagaccagcctaggcaacatggtgaaacctcgtctctataaaaaaaagaatacaaaaattagttgggcatggtagtgagcgcctgtgaggctgcttgtgaggctgaggtgggaggatccctttagtccaggagttcaaggctgcagtgagctgtataatgccactgcagtccagcctgggtgacagtgagaccctgtctccaaaacaaaatttttttaaaaagtagaagcttgaggttaagatgaaatctggctttgtcattagagtctcagcagagcaagaaaagcagagatgtggggtgtgagagcgtgggtgctggagcctgtctcctcttcgcaggcctctggcctgccccagcctcccgctacctgcccaaaccccatctgaatgatttgtggacaagcaagaagtttccaccgcatttctccttgactttactaaaagttaaataaacgtgccactcgccccggctggctacaagct

SEQ ID NO: 5946 - DNA, 3189 bp, Homo sapiens
  source 1..3189: mol_type = unassigned DNA
gaactgtattcagcggcgacagcggcgactgcggcggccgcgggagggcatcccgttggggatccttccgcacactgaagagtacgtcttcgggtctacccctaatcacataatggctgtgtttaatcagaagtctgtctcggatatgattaaagagtttcgaaaaaattggcgtgctctttgtaactctgagagaactactctatgtggtgcagactccatgctcttggcattgcagctttctatggcggagaacaacaaacaggagagacggggtttcaccatgttagccaggatggtctcgatctcctgacttcgtgatccacccgcctcggcctcccaaagtgctaaaattacaggcgtgaaccaccaccacagtggagaatttacagtctctctcagtgatgttttattgacatggaaatacttgctccatgagaaattgaacttaccagttgaaaacatggacgtgactgaccattatgaggacgttaggaagatttatgatgatttcttgaagaacagtaatatgttagatctgattgatgtttatcaaaaatgtagggctttgacttctaattgtgaaaattataacacagtatctcctagtcaactactggattttctgtctggcaaacagtatgcagtaggtgatgaaactgatctttctataccaacatcaccaacaagtaaatacaaccgtgataatgaaaaggtgcagctgctagcaaggaaaattatcttttcatatttaaatctgctagtgaattcaaagaatgacctggctgtggcttatattctcaatattcctgatagaggactaggaagagaagccttcactgatttgaaacatgctgctcgagagaaacaaatgtctatctttttggtggccacgtcttttattagaacaatagagcttggagggaaaggatatgcaccaccaccatcagatcctttaaggacacatgtaaagggattgtctaattttattaatttcattgacaaattagatgagattcttggagaaataccaaacccaagcattgcagggggtcaaatactgtcagtgataaagatgcaactgattaaaggccaaaacagcagggatcctttttgcaaagcaatagaggaagttgctcaggatttggatttgaggattaaaaatattatcaattctcaagaaggtgttgtagctcttagcaccactgacatcagtcctgctcggccaaaatctcatgccataaaccatggtactgcatactgtggcagagatactgtgaaagccttattagttcttttggacgaagaagcagctaatgctcctaccaaaaacaaagcagagcttttatatgatgaggaaaacacaatccatcatcatggaacgtctattcttacactttttaggtctcccacacaggtgaataattcgataaaacccctaagagaacgcatctgtgtgtcaatgcaagagaaaaaaattaagatgaagcaaactttaattagatcccaatttgcttgtacttataaagatgactacatgataagcaaggataattggaataatgttaatttagcatcaaagcctttgtgtgttctttacatggaaaatgacctttctgagggtgtaaatccatctgttggaagatcaacaattggaacgagttttggaaatgttcatctggacagaagtaaaaatgaaaaagtatcaagaaaatcaaccagtcagacaggaaataaaagctcaaaaaggaaacaggtggatttggatggtgaaaatattctctgtgataatagaaatgaaccacctcaacataaaaatgctaaaatacctaagaaatcaaatgattcacagaatagattgtacggcaaactagctaaagtagcaaaaagtaataaatgtactgccaaggacaagttgatttctggccaggcaaagttaactcagttttttagactataaatttgtgtcttatatgctttaggtttatgtatctataaaccattcaccaaagacatgcttaatttttaagagatcaaggtgtaaattatgatgatttattattttggtctacagtgtatgtaaggttagtatgttaagcattgtttaaaaatactagtaagtcataattatgcagaattttcacaaagtttaatgcacagagaaagcatatcatttcagttactgatacatcttaacactactttcttttaaaacagacatttaacatacacaagttatagtagcagtatgggcttctcctcccattggcaattaaatgcttttattttcttctgaaaagatgatgtggaccaacaggtatcagacttgccaacaaggtcggtagactcttcccagcatacatctgagcactgaaggaagaagaaagtttaaattgtttaaaggactataattatcacacaaaatttattaagaaaaaaagaatggatctagtataactaattctgagtaaaccaaaatgataataattaattgttgctatttaatcccacatttttggcaggtgtaattgagccatggtcttatttgattttgttatgattgcatccaaattcactttaactcagagttctgtttaatggtggtaggatgtaagaattgaattttgaaaagactactcactgtcaaaatctctccttcctataggaaatttagctgagttttcttcatccccaatttctctcttttcttgtgttgattcagtattctgaactccattctcagctgggaaagctacagatccttttagtgcaagataaggttttatagccagattcagtggcagaccatgatttaagaaattatgtttggagcctgtgttctgtaaagagaaggttgatttggtttttagctatcgtattcggagtggaactataatacaattgtataatattcttgttgatcaattcaaagttactctgcactgtttttgactttttaaaaataccttagatgcaaatttataggagaaaaaacactttcagataagaggtgtttgctgggatggaagaactacctggcatgtaagaaatatcgtcagtcgtcctaatgcatattgtgactgtttgcatatacttctgtttataaaagtatcagttttacttttcagaggatttgtaagaatcatttaaattttcattgaaataaacgacaagtcacattgccactta

SEQ ID NO: 5947 - DNA, 2086 bp, Homo sapiens
  source 1..2086: mol_type = unassigned DNA
ccgcacactgaagagtacgtcttcgggtctacccctaatcacataatggctgtgtttaatcagaagtctgtctcggatatgattaaagagtttcgaaaaaattggcgtgctctttgtaactctgagagaactactctatgtggtgcagactccatgctcttggcattgcagctttctatggcggagaacaacaaacagcacagtggagaatttacagtctctctcagtgatgttttattgacatggaaatacttgctccatgagaaattgaacttaccagttgaaaacatggacgtgactgaccattatgaggacgttaggaagatttatgatgatttcttgaagaacagtaatatgttagatctgattgatgtttatcaaaaatgtagggctttgacttctaattgtgaaaattataacacagtatctcctagtcaactactggattttctgtctggcaaacagtatgcagtaggtgatgaaactgatctttctataccaacatcaccaacaagtaaatacaaccgtgataatgaaaaggtgcagctgctagcaaggaaaattatcttttcatatttaaatctgctagtgaattcaaagaatgacctggctgtggcttatattctcaatattcctgatagaggactaggaagagaagccttcactgatttgaaacatgctgctcgagagaaacaaatgtctatctttttggtggccacgtcttttattagaacaatagagcttggagggaaaggatatgcaccaccaccatcagatcctttaaggacacatgtaaagggattgtctaattttattaatttcattgacaaattagatgagattcttggagaaataccaaacccaagcattgcagggggtcaaatactgtcagtgataaagatgcaactgattaaaggccaaaacagcagggatcctttttgcaaagcaatagaggaagttgctcaggatttggatttgaggattaaaaatattatcaattctcaagaaggtgttgtagctcttagcaccactgacatcagtcctgctcggccaaaatctcatgccataaaccatggtactgcatactgtggcagagatactgtgaaagccttattagttcttttggacgaagaagcagctaatgctcctaccaaaaacaaagcagagcttttatatgatgaggaaaacacaatccatcatcatggaacgtctattcttacactttttaggtctcccacacaggtgaataattcgataaaacccctaagagaacgcatctgtgtgtcaatgcaagagaaaaaaattaagatgaagcaaactttaattagatcccaatttgcttgtacttataaagatgactacatgataagcaaggataattggaataatgttaatttagcatcaaagcctttgtgtgttctttacatggaaaatgacctttctgagggtgtaaatccatctgttggaagatcaacaattggaacgagttttggaaatgttcatctggacagaagtaaaaatgaaaaagtatcaagaaaatcaaccagtcagacaggaaataaaagctcaaaaaggaaacaggtggatttggatggtgaaaatattctctgtgataatagaaatgaaccacctcaacataaaaatgctaaaatacctaagaaatcaaatgattcacagaatagattgtacggcaaactagctaaagtagcaaaaagtaataaatgtactgccaaggacaagttgatttctggccaggcaaagttaactcagttttttagactataaatttgtgtcttatatgctttaggtttatgtatctataaaccattcaccaaagacatgcttaatttttaagagatcaaggtgtaaattatgatgatttattattttggtctacagtgtatgtaaggttagtatgttaagcattgtttaaaaatactagtaagtcataattatgcagaattttcacaaagtttaatgcacagagaaagcatatcatttcagttactgatacatcttaacactactttcttttaaaacagacatttaacatacacaagttatagtagcagtatgggcttctcct

SEQ ID NO: 5948 - DNA, 2503 bp, Homo sapiens
  source 1..2503: mol_type = unassigned DNA
gaactgtattcagcggcgacagcggcgactgcggcggccgcgggagggcatcccgttggggatccttccgcacactgaagagtacgtcttcgggtctacccctaatcacataatggctgtgtttaatcagaagtctgtctcggatatgattaaagagtttcgaaaaaattggcgtgctctttgtaactctgagagaactactctatgtggtgcagactccatgctcttggcattgcagctttctatggcggagaacaacaaacagcacagtggagaatttacagtctctctcagtgatgttttattgacatggaaatacttgctccatgagaaattgaacttaccagttgaaaacatggacgtgactgaccattatgaggacgttaggaagatttatgatgatttcttgaagaacagtaatatgttagatctgattgatgtttatcaaaaatgtagggctttgacttctaattgtgaaaattataacacagtatctcctagtcaactactggattttctgtctggcaaacagtatgcagtaggtgatgaaactgatctttctataccaacatcaccaacaagtaaatacaaccgtgataatgaaaaggtgcagctgctagcaaggaaaattatcttttcatatttaaatctgctagtgaattcaaagaatgacctggctgtggcttatattctcaatattcctgatagaggactaggaagagaagccttcactgatttgaaacatgctgctcgagagaaacaaatgtctatctttttggtggccacgtcttttattagaacaatagagcttggagggaaaggatatgcaccaccaccatcagatcctttaaggacacatgtaaagggattgtctaattttattaatttcattgacaaattagatgagattcttggagaaataccaaacccaagagggtgtaaatccatctgttggaagatcaacaattggaacgagttttggaaatgttcatctggacagaagtaaaaatgaaaaagtatcaagaaaatcaaccagtcagacaggaaataaaagctcaaaaaggaaacaggtggatttggatggtgaaaatattctctgtgataatagaaatgaaccacctcaacataaaaatgctaaaatacctaagaaatcaaatgattcacagaatagattgtacggcaaactagctaaagtagcaaaaagtaataaatgtactgccaaggacaagttgatttctggccaggcaaagttaactcagttttttagactataaatttgtgtcttatatgctttaggtttatgtatctataaaccattcaccaaagacatgcttaatttttaagagatcaaggtgtaaattatgatgatttattattttggtctacagtgtatgtaaggttagtatgttaagcattgtttaaaaatactagtaagtcataattatgcagaattttcacaaagtttaatgcacagagaaagcatatcatttcagttactgatacatcttaacactactttcttttaaaacagacatttaacatacacaagttatagtagcagtatgggcttctcctcccattggcaattaaatgcttttattttcttctgaaaagatgatgtggaccaacaggtatcagacttgccaacaaggtcggtagactcttcccagcatacatctgagcactgaaggaagaagaaagtttaaattgtttaaaggactataattatcacacaaaatttattaagaaaaaaagaatggatctagtataactaattctgagtaaaccaaaatgataataattaattgttgctatttaatcccacatttttggcaggtgtaattgagccatggtcttatttgattttgttatgattgcatccaaattcactttaactcagagttctgtttaatggtggtaggatgtaagaattgaattttgaaaagactactcactgtcaaaatctctccttcctataggaaatttagctgagttttcttcatccccaatttctctcttttcttgtgttgattcagtattctgaactccattctcagctgggaaagctacagatccttttagtgcaagataaggttttatagccagattcagtggcagaccatgatttaagaaattatgtttggagcctgtgttctgtaaagagaaggttgatttggtttttagctatcgtattcggagtggaactataatacaattgtataatattcttgttgatcaattcaaagttactctgcactgtttttgactttttaaaaataccttagatgcaaatttataggagaaaaaacactttcagataagaggtgtttgctgggatggaagaactacctggcatgtaagaaatatcgtcagtcgtcctaatgcatattgtgactgtttgcatatacttctgtttataaaagtatcagttttacttttcagaggatttgtaagaatcatttaaattttcattgaaataaacgacaagtcacattgccactta

SEQ ID NO: 5949 - DNA, 1916 bp, Homo sapiens
  source 1..1916: mol_type = unassigned DNA
gcacactgaagagtacgtcttcgggtctacccctaatcacataatggctgtgtttaatcagaagtctgtctcggatatgattaaagagtttcgaaaaaattggcgtgctctttgtaactctgagagaactactctatgtggtgcagactccatgctcttggcattgcagctttctatggcggagaacaacaaacagtggagaatttacagtctctctcagtgatgttttattgacatggaaatacttgctccatgagaaattgaacttaccagttgaaaacatggacgtgactgaccattatgaggacgttaggaagatttatgatgatttcttgaagaacagtaatatgttagatctgattgatgtttatcaaaaatgtagggctttgacttctaattgtgaaaattataacacagtatctcctagtcaactactggattttctgtctggcaaacagtatgcagtaggtgatgaaactgatctttctataccaacatcaccaacaagtaaatacaaccgtgataatgaaaaggtgcagctgctagcaaggaaaattatcttttcatatttaaatctgctagtgaattcaaagaatgacctggctgtggcttatattctcaatattcctgatagaggactaggaagagaagccttcactgatttgaaacatgctgctcgagagaaacaaatgtctatctttttggtggccacgtcttttattagaacaatagagcttggagggaaaggatatgcaccaccaccatcagatcctttaaggacacatgtaaagggattgtctaattttattaatttcattgacaaattagatgagattcttggagaaataccaaacccaagcattgcagggggtcaaatactgtcagtgataaagatgcaactgattaaaggccaaaacagcagggatcctttttgcaaagcaatagaggaagttgctcaggatttggatttgaggattaaaaatattatcaattctcaagaaggtgttgtagctcttagcaccactgacatcagtcctgctcggccaaaatctcatgccataaaccatggtactgcatactgtggcagagatactgtgaaagccttattagttcttttggacgaagaagcagctaatgctcctaccaaaaacaaagcagagcttttatatgatgaggaaaacacaatccatcatcatggaacgtctattcttacactttttaggtctcccacacaggtgaataattcgataaaacccctaagagaacgcatctgtgtgtcaatgcaagagaaaaaaattaagatgaagcaaactttaattagatcccaatttgcttgtacttataaagatgactacatgataagcaaggataattggaataatgttaatttagcatcaaagcctttgtgtgttctttacatggaaaatgacctttctgagggtgtaaatccatctgttggaagatcaacaattggaacgagttttggaaatgttcatctggacagaagtaaaaatgaaaaagtatcaagaaaatcaaccagtcagacaggaaataaaagctcaaaaaggaaacaggtggatttggatggtgaaaatattctctgtgataatagaaatgaaccacctcaacataaaaatgctaaaatacctaagaaatcaaatgattcacagaatagattgtacggcaaactagctaaagtagcaaaaagtaataaatgtactgccaaggacaagttgatttctggccaggcaaagttaactcagttttttagactataaatttgtgtcttatatgctttaggtttatgtatctataaaccattcaccaaagacatgcttaatttttaagagatcaaggtgtaaattatgatgatttattattttggtctacagtgtatgtaaggttagtatgttaag

SEQ ID NO: 5950 - DNA, 1361 bp, Homo sapiens
  source 1..1361: mol_type = unassigned DNA
ggggaggtagcccgcagtgcaggggcagcgcggcgcggggccaccgacgggacgcggctccgggaacatggctcgcttcgctctgactgttgtccggcatggagaaacaagatttaacaaggagaaaataatccaaggacaaggagtagatgaacctctttcagaaactggatttaaacaagcagcagctgctggtatatttctgaataatgtgaagtttactcatgctttctccagtgatctcatgaggacaaagcagaccatgcatggaattttggagagaagcaaattttgcaaagatatgacggtaaagtatgactcaagacttcgggaaaggaaatacggggttgtagaaggcaaagcgctaagtgagctgagggccatggccaaagcagccagggaagagtgccctgtgtttacaccgcccggaggagagacgctggaccaggtgaaaatgcgtggaatagacttttttgaatttctttgtcaactaatcctgaaagaagcggatcaaaaagaacagttttcccaaggatctccaagcaactgtctggaaacttctttggcagagatatttcctttaggaaaaaatcacagctctaaagttaattcagacagcggtattccaggattagcagccagtgtcttagttgtgagtcacggtgcttacatgagaagtctgtttgattattttctgactgaccttaagtgttccttaccagccactctgagcagatctgaacttatgtcagtcactcccaatacagggatgagtctctttatcataaactttgaggaaggaagagaagttaaaccaacggttcagtgtatttgtatgaacctacaggatcatctaaatggactgactgaaactcgctaaggttaaatctgcatcaaaatctaaccattttgagcctctgaagggagtgccattggctttatttacttctctcctctgctagttctgatttggaaacagttaaaagccaatttttagctccagtggaaccatagccacataaaactttaatggacaaccatatagaattaacttattttgtccaagtacagttggcattttccagaataattttaccaccctgctagatgtcatctctggattgcacatggatgatgaaggaactcagcattgaaagttgggggattagtaaccttgttacaacggtttctttttcattttagcctattttaatggctattggtaagatactgtatgtttttagtatctcatccagtgcttagaagaaagaatggtttataattcccagtacatgtttatattgactgtgttatatttttaaatcctttaaataaaaaatccttataagtttatgtaaagc

SEQ ID NO: 5951 - DNA, 2073 bp, Homo sapiens
  source 1..2073: mol_type = unassigned DNA
cacacgccgaagggctccgagggggtcaggccaatcggcagccgtcaccccacaccccagcccatcaccacactcaaggggccgctaagacagtgtctcctaagtctcgtctcctgtccccagcggcctacagctccctgcaggctggtggccgcttacctggccgccgctcccgctgccgatgtcagggtcatgcaagcggcctctcgcgaccgttacccgagggagcgcgcgcgcgcccggcgtctctccagtgattggctgcccggaaggaggcggagacagcctcgcatggcgcgcgcgtccacctcgccgttccccctcgcgcagctccaaccaaagagagacatccaaccccgggggagtgacaagggggcgggattgctgtgaaactctcttctctgattggctctctgggagccagccgctgccacgagggaaagaagcttcagtttctcgcatgcgcagtgagtaaacatgagcctctggtagataagagaaaccgcgatcggagtacggcgcgtgcgcagatcagggatcgcgattgcgaatcctccgctgaggtgatttggatatccctagaacgttgagggcacgagtcgggtcctgagaccaggtcctcagccagcagagccacgttccttatgagcaccgtgggtttatttcattttcctacaccactgacccgaatatgcccggcgccatggggactccggctttgggagaagctgacgttgttatccccaggaatagctgtcactccggtccagatggcaggcaagaaggactaccctgcactgctttccttggatgagaatgaactcgaagagcagtttgtgaaaggacacggtccagggggccaggcaaccaacaaaaccagcaactgcgtggtgctgaagcacatcccctcaggcatcgttgtaaagtgccatcagacaagatcagttgatcagaacagaaagctagctcggaaaatcctacaagagaaagtagatgttttctacaatggtgaaaacagtcctgttcacaaagaaaaacgagaagcggcgaagaaaaaacaagaaaggaaaaaaagagcaaaggaaaccctggaaaaaaagaagctacttaaagaactgtgggagtcaagtaaaaaggtccactgagaaaagaattagagattccaactgacagaatctgccagaagctcccagggaataatggtggcgagttccatcaccagcattattatagtgcttcaaaagaaatatttttgatgaacttaaaagacaacaaatttatttaaatggtgcactaaactgtagtgaacagagacatgcacgattcaagaataaaactcggctgggcacggtggacggtgcctcacatctgtaatcccagcactttgggaggccgaggcgggcggatcacttgaggtcaggagtttgagaccagcctggccaacatggtgaaaccccgtctctactaaaaatacaaaaaattagccaggcatggtggcgggcacctgtaatcccagctactcgggaggccgaggcaggagaattgcgtgaacctgggaggcggaggttgcagtgagctgagatcgcgccactgcactcaagcctgggcaacacctgggtgacagagcgagaccccatctcaaaaaaaaaataaaactagttcaagtgcaatgacacacgcctataatcccagcaccttgggaggctaagacaggaagatcacctgagcccaggagctcaagattgcagtgagctatgaacaccactgcactccacctgtccacttgttcttgtgtgacagaacaagaccctgtctctaaaaaataagataaaaccataaagaaacacagtcagtactatacaagaataatggctacttctagagggaaggagttgtcattgtgatgaggcacttggaggggttctggggtgcctgacaaagttctgtttcttcacctgggtggtagttagaagggtgtccccgtatttcaaattgtacctttgtgagattgtatgttttgtaataataaaattttttttgtaattagtaaagtcaatttttatggagaactgg

SEQ ID NO: 5952 - DNA, 1575 bp, Homo sapiens
  source 1..1575: mol_type = unassigned DNA
cctggggctgttcaggcactcagggcaggggagaggagagactaccgtcctggagataacggttccacggaggcccaaggcgaaacggaaggatcctcatgtacaaaactgagcggaatggagctgtgagcacgcatcaggtcctcagccagcagagccacgttccttatgagcaccgtgggtttatttcattttcctacaccactgacccgaatatgcccggcgccatggggactccggctttgggagaagctgacgttgttatccccaggaatagctgtcactccggtccagatggcaggcaagaaggactaccctgcactgctttccttggatgagaatgaactcgaagagcagtttgtgaaaggacacggtccagggggccaggcaaccaacaaaaccagcaactgcgtggtgctgaagcacatcccctcaggcatcgttgtaaagtgccatcagacaagatcagttgatcagaacagaaagctagctcggaaaatcctacaagagaaagtagatgttttctacaatggtgaaaacagtcctgttcacaaagaaaaacgagaagcggcgaagaaaaaacaagaaaggaaaaaaagagcaaaggaaaccctggaaaaaaagaagctacttaaagaactgtgggagtcaagtaaaaaggtccactgagaaaagaattagagattccaactgacagaatctgccagaagctcccagggaataatggtggcgagttccatcaccagcattattatagtgcttcaaaagaaatatttttgatgaacttaaaagacaacaaatttatttaaatggtgcactaaactgtagtgaacagagacatgcacgattcaagaataaaactcggctgggcacggtggacggtgcctcacatctgtaatcccagcactttgggaggccgaggcgggcggatcacttgaggtcaggagtttgagaccagcctggccaacatggtgaaaccccgtctctactaaaaatacaaaaaattagccaggcatggtggcgggcacctgtaatcccagctactcgggaggccgaggcaggagaattgcgtgaacctgggaggcggaggttgcagtgagctgagatcgcgccactgcactcaagcctgggcaacacctgggtgacagagcgagaccccatctcaaaaaaaaaataaaactagttcaagtgcaatgacacacgcctataatcccagcaccttgggaggctaagacaggaagatcacctgagcccaggagctcaagattgcagtgagctatgaacaccactgcactccacctgtccacttgttcttgtgtgacagaacaagaccctgtctctaaaaaataagataaaaccataaagaaacacagtcagtactatacaagaataatggctacttctagagggaaggagttgtcattgtgatgaggcacttggaggggttctggggtgcctgacaaagttctgtttcttcacctgggtggtagttagaagggtgtccccgtatttcaaattgtacctttgtgagattgtatgttttgtaataataaaattttttttgtaattagtaaa

SEQ ID NO: 5953 - DNA, 1326 bp, Homo sapiens
  source 1..1326: mol_type = unassigned DNA
cttggaagatatttttggtctattgcaagaaaatatgtattagctggcagggcatgtcctggtaacatggcagacagtgcaaggctgaggagaggggcgtcttgctgaataatgtgtctctactcatttcctaaattccctcggtaacagatgggtcatcatttgaattgctttataaaaagctgtctttgaatctgaagcataatcttgagggcagatgcctcttactgaaagctctccttattcatctaacccaggtcctcagccagcagagccacgttccttatgagcaccgtgggtttatttcattttcctacaccactgacccgaatatgcccggcgccatggggactccggctttgggagaagctgacgttgttatccccaggaatagctgtcactccggtccagatggcaggcaagaaggactaccctgcactgctttccttggatgagaatgaactcgaagagcagtttgtgaaaggacacggtccagggggccaggcaaccaacaaaaccagcaactgcgtggtgctgaagcacatcccctcaggcatcgttgtaaagtgccatcagacaagatcagttgatcagaacagaaagctagctcggaaaatcctacaagagaaagtagatgttttctacaatggtgaaaacagtcctgttcacaaagaaaaacgagaagcggcgaagaaaaaacaagaaaggaaaaaaagagcaaaggaaaccctggaaaaaaagaagctacttaaagaactgtgggagtcaagtaaaaaggtccactgagaaaagaattagagattccaactgacagaatctgccagaagctcccagggaataatggtggcgagttccatcaccagcattattatagtgcttcaaaagaaatatttttgatgaacttaaaagacaacaaatttatttaaatggtgcactaaactgtagtgaacagagacatgcacgattcaagaataaaactcggctgggcacggtggacggtgcctcacatctgtaatcccagcactttgggaggccgaggcgggcggatcacttgaggtcaggagtttgagaccagcctggccaacatggtgaaaccccgtctctactaaaaatacaaaaaattagccaggcatggtggcgggcacctgtaatcccagctactcgggaggccgaggcaggagaattgcgtgaacctgggaggcggaggttgcagtgagctgagatcgcgccactgcactcaagcctgggcaacacctgggtgacagagcgagaccccatctcaaaaaaaaaataaaactagttcaagtgcaatgacacacgcctata

SEQ ID NO: 5954 - DNA, 604 bp, Homo sapiens
  source 1..604: mol_type = unassigned DNA
gattgcgaatcctccgctgaggtgatttggatatccctagaacgttgagggcacgagtcgggtcctgagaccaggtaagcatctgcggagaagccaggtaaccctacggctgccgacgactgtcaaaggctccggagagaggactgcgagccgggacgcctgggtttttcccgacttgcgaccccgagtggcgcagccagtttacctgaggccgcgctggcggtggggtggggccggccgtgacacccgagctcagttttctcgggacctggtttacgctaggtgctgtgggtcggccctggggctgttcaggcactcagggcaggggagaggagagactaccgtcctggagataacggttccacggaggcccaaggcgaaacggaaggatcctcatgtacaaaactgagcggaatggagctgtgagcacgcatcaggtgctgtttcaggcctggcacgtagtagaggtcctcagccagcagagccacgttccttatgagcaccgtgggtttatttcattttcctacaccactgacccgaatatgcccggcgccatggggactccggctttgggagaagctgacgttgttatccccaggaatag

SEQ ID NO: 5955 - DNA, 3733 bp, Homo sapiens
  source 1..3733: mol_type = unassigned DNA
gctgaacataggaccccaatcccttctagcttgtagtgtttctcctgagaaatctgctgttaatctgataggttttcctttataggttacctggtgcttctgtctcacagactcttaaaattctttctttcattttaactttgtccggaattggtgggttcttggtcttgctgacttcaagaatgaagccacggaccctcatggtgagtattacagctcttaaagatggtgtgtccagagtttgttccttcagatgttcagatgcatccagagtttcttccttctggtgggtttgtggtctcgctgacttcaggagtgaacctgcagaccttcgcagtgagtgttgcagctcttaaaggcagcacagacccaaggagtgagcagcagtaacatttaccacaaagaccaaaagaacaaagcttccacagtgtggaaggtgacccgaacgggttgcactgctggctcaggcagcctgcgtttattcccttatctgaccccacccacatcctgctgattggtccattttacagagagctgattggcccattttacagacagctgattggtctgttttgacagggtgctgattggtgcgtttataaaccttgagctagacacagagtgctgactggtgcatttacaatcctttagctagacacaaaagttctccaagtccctagatttagctagacacagcactgattgatgtgtttacaaaccttcagctagacacagagtgctgattggtgcatttacaatcctttagctagacacaaaagttctccaagtccccactagattagctagacatagagcactgattggtgcatttacaaaccttgagctagacacagggtgctgattggtgtatttacaaaccttgagctagacacaaagtgctgactggtgtatttataaacctttagctagacataaaagttctccaagtccccacccgactcaggagtccagctagctttgcctactggatcccatgctggggccgtgggtggagctgcctgctagtcccacaccatgcccccgcactcctcagcccttgggcggtcaatgggactggttgcagagcagggggcggcgcccgtccgggaggctctggccatgagggagcagggcagggggagggggggactcaggcatggcgggttgcaagtcccacgccctgctccacggggaggcagctgaggcccagcgagaattcaagcacagcccgggtgagctggcagtgctgggggacccggcacaccctccacagctgctggccggggtgctaagcccctcactgcctggggccggcggcaccagccggccactcctaggtcggggcccgccaagccctcactggcccgcgagctctccctccacacctccccacaagcggagggagcccgctttggccttggccagtccagagaggggcttccacagtgcagcggcgggctgaagggctcctcaagcacagccagagtggatgccgaggccaaggaggcgccgagagcgagtgagggctactagcacattgtcacctctcatttggataacctgatgacaatatgcctagatgaagatctttttgcaatggatttctcaggtgttctttgtgcttctcgtatttggatgtctaggtctctagcaaggccggggaagttttcctcgattattcccccaaatatgttttccaagcttttagatttctcttcttcctcaggaacaccaattattcttaggtttggtcgtttaacacaatcccagacttcttggaggctttgttcatattttcttattcttttttgtctttgttggattgggttaatttgaagaccttgtcttcgagctctgaatttctttattctacttgttgaattctattgctgagactttccagagcattttgcatttctaaaaatgtgtccaaagtttcctgaattttttattgttttttctttaagctatctatttccctgagtgatttctcccttcacttcttgtatcattttttggatttccttacattgggcttcacctttctctggtccttccctgattaataactaacctcctgaattctttttcaggtaaatcaggtatttcttcttggtttggatccattgccagtgaactagtatgttttttggggggtgttgaagcgtcttgttttgtcatattaccagggtttgttcatttgggtaggctctgtcagagggaaggtctagggctgaaggctgttcagattcttttgtcccatggggtgttctcttcatgtagtactctgccccttttcctatggatgtggcttcctatgagccaaacttgcagtgattgttgtctctcttctgggtctagccacccagcgaatcttcccagttccaggctggtactggaggttatctgcagagtcctgtgatgtgaaccatctatgggtctctcagccatggctaccagtgcctgttcggtggaggtggcagagggtacaatggagctttggtgggttaatggtctattttttttgctggttggcctcctgccaggaggtggtcctttccagaaagcatcagctgtggtaatatggggaggaaccagcagtgggcggggccctagaactcccaagatttatttgccctttgtcttcctgccagggtgcatagggaaggaccatcaggtgggggtggagctaggcgtgtctgagctcagactctccttgggcgggtcttgctgcggctgctgtagggaatgtgggtgagattcccaggtcactggagtcgtgtacctaggagagttatggctgcctctgctgagtcatgcaggttgtcagggaagtgggggaaagctggcagtcacaggcctcacccagctcccacacaaacccaagggccggtcttactcccaccgtgttcccccacaactgccccgagtctgtttccaggcagagggtgagactggcttgaaaatttgccccaaggctgtgcccctcccagcagcgaaagaaaagggctgtagttcttcccccacctgtgaagtctgcatgctggattcgtgcagttgcccaagttctggccaggaggcttctcaccctgtttaaattgttacgaagttcgactagagaattcttctccctgtggagttttatcccttgctcctctggccaccctcccgatggatccctgtggtgccaggcaggaatgggccttctggggacccagcgagctcccacggcctttctgctgcttcctctacccctgtagttcgctctgctgagtctgacttagctccaggtcctcagccagcagagccacgttccttatgagcaccgtgggtttatttcattttcctacaccactgacccgaatatgcccggcgccatggggactccggctttgggagaagctgacgttgttatccccaggaatagctgtcactccggtccagatggcaggcaagaaggactaccctgcactgctttccttggatgagaatgaactcgaagagcagtttgtgaaaggacacggtccagggggccaggcaaccaacaaaaccagcaactgcgtggtgctgaagcacatcccctcaggcatcgttgtaaagtgccatcagacaagatcagttgatcagaacagaaagctagctcggaaaatcctacaagagaaagtagatgttttctacaatggtgaaaacagtcctgttcacaaagaaaaacgagaagcggcgaagaaaaaac

SEQ ID NO: 5956 - DNA, 573 bp, Homo sapiens
  source 1..573: mol_type = unassigned DNA
gcgaatcctccgctgaggtgatttggatatccctagaacgttgagggcacgagtcgggtcctgagaccaggtgctgtgggtcggccctggggctgttcaggcactcagggcaggggagaggagagactaccgtcctggagataacggttccacggaggcccaaggcgaaacggaaggatcctcatgtacaaaactgagcggaatggagctgtgagcacgcatcaggtgctgtttcaggcctggcacgtagtagaggtcctcagccagcagagccacgttccttatgagcaccgtgggtttatttcattttcctacaccactgacccgaatatgcccggcgccatggggactccggctttgggagaagctgacgttgttatccccaggaatagctgtcactccggtccagatggcaggcaagaaggactaccctgcactgctttccttggatgagaatgaactcgaagagcagtttgtgaaaggacacggtccagggggccaggcaaccaacaaaaccagcaactgcgtggtgctgaagcacatcccctcaggcatcgttgtaaaggtagatca

SEQ ID NO: 5957 - DNA, 2633 bp, Homo sapiens
  source 1..2633: mol_type = unassigned DNA
cgtcaccgccgcgcagcgcgggcgcagagccctgccctcagctgaagggagtcttcttttttttttttttttccgctgtttttttctccgcccctaagaggttgactccaaacccggagttccgctaggtccaacaggagggcttacggcgtgagcggcgtacctggggagaggcttaggcagcggcaaccgctgattggcagtaaaggggttcactccccatctcctgctcgggcgaaaccgggacagccaatcagagagagtactgacggaaacggcccaatcctggagcagggctgagggagggggcggggacaaatggctcaggtggactccgggctggagctgtcctgggggagcttgtttgcggcagcggctgctgctgccactgctgtgctgggggcccggtcgccaggcaaaaagccctcccacgtttgaggggagtcatgagccgtttcctgaatgtgttaagaagttggctggttatggtgtccatcatagccatggggaacacgctgcagagcttccgagaccacacttttctctatgaaaagctctacactggcaagccaaaccttgtgaatggcctccaagctcggacctttgggatctggacgctgctctcatcagtgattcgctgcctctgtgccattgacattcacaacaagacgctctatcacatcacactctggaccttcctccttgccctggggcatttcctctctgagttgtttgtctatggaactgcagctcccacgattggcgtcctggcacccctgatggtggcaagtttctccatcctgggtatgctggtcgggctccggtatctagaagtagaaccagtatccagacagaagaagagaaactgaggccagcattatcacctccaggactttctcgttttccaccttggccatcttcttccttcgtcgtctctcctctttaatttcttttctattccatcatctgcccttttattcacttttagcctctttttttaatttttaaaatttaaagatatgcatactgaaaagtatataacatgtacgtacaatttaaagaataattttaaagtgaatactacgtaactccatccaagtcaagaaattgccagcttctcggaagcccactgtgtctccttcccctacctgcaacctcttccaggctcccttttccagccttcccctttttcccttttattttcatgccttgatttgacttgtgtggtgggaacatgtgaactatgaaacttaaacctgctgcccacccagagcagctgtgaccaagggctgcctcaaggggttgtccacgcaggttgggctcctctctgctgctggacccaagactctgaaccttccaagggacaggcagttcttctaagaagggctcccctgtgtgtgagcaagaccacagctctccttctatctacagatgcatgagggttggaagagtctgggctgtttttagaccttctggtcagctgtatttgtgtaacaacttttgtaataaatagaaaaaccctctgctctgatcagttcttgtactttgacctctgctaagacaagagcatggctgcctcctctgagccctaggagaatcacagctttatgcctgattgaatacaccatagtgagtaggacagctcatgacacaggtcagcctggctgcctccggctccttactgtcatttgctcattcctcttgtattcttgaagtcaaatcttcttttttctcaccttcaagagtctgcgttcacaactaaacactaagtgccctttcttatttcctcctaaagaagaaacagattcttgagagagcagagacaaaaaaatagaactaggcagcatagatgaaacaactgcatgacatgggaagaagacaactaaaccccgaggagaatgcactggaatggacagttgctcttaaaccctacccagagggcctcccccagctggaccctcatacacagtgtgtgtatccaaaaggccattgctatttcagcaaatatttgttgagtacttctccatgccggacacttgggaaagagaaatgaacgacacaggcaatgcccctgccctgtgggccttatattatagtcaaggtaacagaatcaacaagccaacacaaaaataaagaacttcaaatagggataagaactctaacaaacacaaggtattttggtcaagaaggaatgtggggtgggcagtggggaacgtaacttaaattagatcatcagaaagtcctccctgaggagatgggatttttttgttttttagagacagggtttcactctgtcacccaggctggagtgcagtggcacaatcacacctcactgcagcctcaacttcctgggctcaagtgatcctcctgcatcagcttcccaagtagctgggactacaagtgtgtaccaccacatccagctaacatttttgggggtgggaagagatggggtcttactatgttgtccaggctaagaggtgggatttgagctgagacttgaatgcccaggagttaaatgtcttaagatatggagcaggccgttagaaaggagggagcagcaactggaaggtagaatagtcttattcaaggaataagaactatgtaatcacagcatggtgaagagttaggaagtg

SEQ ID NO: 5958 - DNA, 2722 bp, Homo sapiens
  source 1..2722: mol_type = unassigned DNA
agaagggctggtccagcggcggcggaggctggcgctgtcctgagagggagggctctgtgcggaagagtcagggcgacccttgggcgctggagtacgcttgggactggggctgcgagtgagcaccagcgattggttcggaagcggacatttggttcagaacgagcatttaactctgccagggatccgctgggctctgacgactgcggtagatccatggcttcctggacgttcacccgtagagtcatcctagcttaactcttgttccctggtctcagttcacaagcctcacctgtatcttcctggctcggaagataattgaaaccaagtctgacttctcaatgaatcggacaaagggtgatgaggaggagtattggaacagctccaagttcaaggcttttacctttgacgatgaagacgatgagctttcacagttaaaggagtccaagcgggcggtgaacagcctccgagacttcgtggatgatgatgacgatgatgacctggagcgagtcagctggagtggggaacctgtgggaagtatctcatggtccatcagagagactgctggtaatagcggctcaacccacgaggggcgtgaacagctaaagagccgaaacagcttctcctcctatgcacaactacccaagcctacttctacctactccctgagcagcttttttagagctctgtcagacacacctgccaaaagctatgctccagagctggggagacccaaaggggagtatagggattacagcaatgactggagccccagtgatacagtgcgacgtctccggaagggcaaggtttgctcactagagagattccgctccttacaggacaaactacaactcctagaagaggcagtaagcatgcatgatggaaacgtcattactgcagttctgattttcctgaagaggacactgagcaaagagatcctcttccgagagctggaggtgcgacaggttgccctgagacatcttattcacttccttaaggaaataggggatcaaaagttgcttttagacctcttcaggttcctagatagaacagaagagcttgcgctatctcattatcgagagcatttgaacattcaggaccctgacaaacgaaaagaatttcttaaaacctgtgttggtttgccattttcagcagaagattccgcacacatacaggaccattacacgctcctggaacgtcagatcattattgaggcaaatgatcgccatctagaatcagcaggacagactgagatcttccgaaagcacccccgcaaagcctccatcctcaacatgccactagtgacaacacttttctactcctgcttctatcactacacagaggctgaggggacattcagcagtcccgtcaacctgaagaagacatttaagatcccagataaacagtatgtgctgacagccctggctgctcgtgccaagcttcgagcctggaatgatgtagatgccctattcaccacaaagaactggctgggctataccaagaagagagcacccattggcttccatcgggttgtcgaaattttgcacaagaacaatgcccctgtgcagatattacaggagtatgtcaatctggtggaagatgtggacacgaagttgaacttagccactaagttcaagtgccatgatgtcgtcattgatacctaccgggacctgaaggatcgtcaacagttgctagcatacaggagtaaggtagataaaggatcagcagaggaggagaagattgatgctcttctcagcagctcgcaaattcgatggaagaattaagtggcattgactaccttgaagcctgcctcatttcctcctctcctgcctgtgaaagcagagagagctcttctttgggagagctgcggcatcacatcgcttgggcccattacccatgggcagtgccagctactcttgacacagataacttcagactgatcttctgtccaaggaacatcatctgaggatcgagatctaaagctttgagtcatgagaatgattctctccacctggtgctcatatgaaggtgggagtgatttctagattgggcccctactgggtaagatctcacttggtctgagaaaagtgactgctccagaaaggaagaggtatgggagtcatagggtggctactgcattccactcagctaattatgatccaggacttggcgctggacattggcagttctgctctgaatgaagtcagaacagaaccaaaatggcctcaggaaggaatgccagtgtttcccaagacctcctggagatgcactcacaccagactgcacagacccctccacattatgccacacatggcctagacgttgtgtttcctcagccattttccctctgctgccccagtttactctgtccaaaaccctaaggttcttctctcacttgaacacagacgaccttgcttgggtgatgagacatcccctttatctcttcctctactgctggccaagacccgtcactttataagaagctcagatgcagcagtgctggagagctctctctttatgcaaaaatctcatttcaccaggagctttcagaagtttcacctgggctaaattcagcagcatttctgttaggatatttagatggaggttttattttcacacttggattcttgctctgtaccaatatttgcctccttttctgtgactgaactgggtttttctgacatgcctagactcctaataaaggtatttcttccttggtgccttc

SEQ ID NO: 5959 - DNA, 2761 bp, Homo sapiens
  source 1..2761: mol_type = unassigned DNA
agaagggctggtccagcggcggcggaggctggcgctgtcctgagagggagggctctgtgcggaagagtcagggcgacccttgggcgctggagtacgcttgggactggggctgcgagtgagcaccagcgattggttcggaagcggacatttggttcagaacgagcatttaactctgccagggatccgctgggctctgacgactgcggtagatccatggcttcctggacgttcacccgtagagtcatcctagcttaactcttgttccctggtctcagttcacaagcctcacctgtatcttcctggctcggaagataattgaaaccaagtctgacttctcaatgaatcggacaaagggtgatgaggaggagtattggaacagctccaagttcaaggcttttacctttgacgatgaagacgatgagctttcacagttaaaggagtccaagcgggcggtgaacagcctccgagacttcgtggatgatgatgacgatgatgacctggagcgagtcagctggagtggggaacctgtgggaagtatctcatggtccatcagagagactgctggtaatagcggctcaacccacgaggggcgtgaacagctaaagagccgaaacagcttctcctcctatgcacaactacccaagcctacttctacctactccctgagcagcttttttagaggtagaactagacctggaagtttccagtccctttctgatgctctgtcagacacacctgccaaaagctatgctccagagctggggagacccaaaggggagtatagggattacagcaatgactggagccccagtgatacagtgcgacgtctccggaagggcaaggtttgctcactagagagattccgctccttacaggacaaactacaactcctagaagaggcagtaagcatgcatgatggaaacgtcattactgcagttctgattttcctgaagaggacactgagcaaagagatcctcttccgagagctggaggtgcgacaggttgccctgagacatcttattcacttccttaaggaaataggggatcaaaagttgcttttagacctcttcaggttcctagatagaacagaagagcttgcgctatctcattatcgagagcatttgaacattcaggaccctgacaaacgaaaagaatttcttaaaacctgtgttggtttgccattttcagcagaagattccgcacacatacaggaccattacacgctcctggaacgtcagatcattattgaggcaaatgatcgccatctagaatcagcaggacagactgagatcttccgaaagcacccccgcaaagcctccatcctcaacatgccactagtgacaacacttttctactcctgcttctatcactacacagaggctgaggggacattcagcagtcccgtcaacctgaagaagacatttaagatcccagataaacagtatgtgctgacagccctggctgctcgtgccaagcttcgagcctggaatgatgtagatgccctattcaccacaaagaactggctgggctataccaagaagagagcacccattggcttccatcgggttgtcgaaattttgcacaagaacaatgcccctgtgcagatattacaggagtatgtcaatctggtggaagatgtggacacgaagttgaacttagccactaagttcaagtgccatgatgtcgtcattgatacctaccgggacctgaaggatcgtcaacagttgctagcatacaggagtaaggtagataaaggatcagcagaggaggagaagattgatgctcttctcagcagctcgcaaattcgatggaagaattaagtggcattgactaccttgaagcctgcctcatttcctcctctcctgcctgtgaaagcagagagagctcttctttgggagagctgcggcatcacatcgcttgggcccattacccatgggcagtgccagctactcttgacacagataacttcagactgatcttctgtccaaggaacatcatctgaggatcgagatctaaagctttgagtcatgagaatgattctctccacctggtgctcatatgaaggtgggagtgatttctagattgggcccctactgggtaagatctcacttggtctgagaaaagtgactgctccagaaaggaagaggtatgggagtcatagggtggctactgcattccactcagctaattatgatccaggacttggcgctggacattggcagttctgctctgaatgaagtcagaacagaaccaaaatggcctcaggaaggaatgccagtgtttcccaagacctcctggagatgcactcacaccagactgcacagacccctccacattatgccacacatggcctagacgttgtgtttcctcagccattttccctctgctgccccagtttactctgtccaaaaccctaaggttcttctctcacttgaacacagacgaccttgcttgggtgatgagacatcccctttatctcttcctctactgctggccaagacccgtcactttataagaagctcagatgcagcagtgctggagagctctctctttatgcaaaaatctcatttcaccaggagctttcagaagtttcacctgggctaaattcagcagcatttctgttaggatatttagatggaggttttattttcacacttggattcttgctctgtaccaatatttgcctccttttctgtgactgaactgggtttttctgacatgcctagactcctaataaaggtatttcttccttggtgccttc

SEQ ID NO: 5960 - DNA, 1623 bp, Homo sapiens
  source 1..1623: mol_type = unassigned DNA
cttctctaagctgcacagcctgaatagaagggctggtccagcggcggcggaggctggcgctgtcctgagagggagggctctgtgcggaagagatgaatcggacaaagggtgatgaggaggagtattggaacagctccaagttcaaggcttttacctttgacgatgaagacgatgagctttcacagttaaaggagtccaagcgggcggtgaacagcctccgagacttcgtggatgatgatgacgatgatgacctggagcgagtcagctggagtggggaacctgtgggaagtagaactagacctggaagtttccagtccctttctgatgctctgtcagacacacctgccaaaagctatgctccagagctggggagacccaaaggggagtatagggattacagcaatgactggagccccagtgatacagtgcgacgtctccggaagggcaaggtttgctcactagagagattccgctccttacaggacaaactacaactcctagaagaggcagtaagcatgcatgatggaaacgtcattactgcagttctgattttcctgaagaggacactgagcaaagagatcctcttccgagagctggaggtgcgacaggttgccctgagacatcttattcacttccttaaggaaataggggatcaaaagttgcttttagacctcttcaggttcctagatagaacagaagagcttgcgctatctcattatcgagagcatttgaacattcaggaccctgacaaacgaaaagaatttcttaaaacctgtgttggtttgccattttcagcagaagattccgcacacatacaggaccattacacgctcctggaacgtcagatcattattgaggcaaatgatcgccatctagaatcagcaggacagactgagatcttccgaaagcacccccgcaaagcctccatcctcaacatgccactagtgacaacacttttctactcctgcttctatcactacacagaggctgaggggacattcagcagtcccgtcaacctgaagaagacatttaagatcccagataaacagtatgtgctgacagccctggctgctcgtgccaagcttcgagcctggaatgatgtagatgccctattcaccacaaagaactggctgggctataccaagaagagagcacccattggcttccatcgggttgtcgaaattttgcacaagaacaatgcccctgtgcagatattacaggagtatgtcaatctggtggaagatgtggacacgaagttgaacttagccactaagttcaagtgccatgatgtcgtcattgatacctaccgggacctgaaggatcgtcaacagttgctagcatacaggagtaaggtagataaaggatcagcagaggaggagaagattgatgctcttctcagcagctcgcaaattcgatggaagaattaagtggcattgactaccttgaagcctgcctcatttcctcctctcctgcctgtgaaagcagagagagctcttctttgggagagctgcggcatcacatcgcttgggcccattacccatgggcagtgccagctactcttgacacagataacttcagactgatcttctgtccaaggaacatcatctgaggatcgagatctaa

SEQ ID NO: 5961 - DNA, 2934 bp, Homo sapiens
  source 1..2934: mol_type = unassigned DNA
gattattcccttccgcccccttctctaagctgcacagcctgaatagaagggctggtccagcggcggcggaggctggcgctgtcctgagagggagggctctgtgcggaagaggtgagggtgtcccaagccccttgggtcgcgtatctggctggatccagcctctccgcatcttgatcttttcccctcttctaggaggcatccctacaccctatgactacaggcctgattctcttctttcagtcagggcgacccttgggcgctggagtacgcttgggactggggctgcgagtgagcaccagcgattggttcggaagcggacatttggttcagaacgagcatttaactctgccagggatccgctgggctctgacgactgcggtagatccatggcttcctggacgttcacccgtagagtcatcctagcttaactcttgttccctggtctcagttcacaagcctcacctgtatcttcctggctcggaagataattgaaaccaagtctgacttctcaatgaatcggacaaagggtgatgaggaggagtattggaacagctccaagttcaaggcttttacctttgacgatgaagacgatgagctttcacagttaaaggagtccaagcgggcggtgaacagcctccgagacttcgtggatgatgatgacgatgatgacctggagcgagtcagctggagtggggaacctgtgggaagtatctcatggtccatcagagagactgctggtaatagcggctcaacccacgaggggcgtgaacagctaaagagccgaaacagcttctcctcctatgcacaactacccaagcctacttctacctactccctgagcagcttttttagaggtagaactagacctggaagtttccagtccctttctgatgctctgtcagacacacctgccaaaagctatgctccagagctggggagacccaaaggggagtatagggattacagcaatgactggagccccagtgatacagtgcgacgtctccggaagggcaaggtttgctcactagagagattccgctccttacaggacaaactacaactcctagaagaggcagtaagcatgcatgatggaaacgtcattactgcagttctgattttcctgaagaggacactgagcaaagagatcctcttccgagagctggaggtgcgacaggttgccctgagacatcttattcacttccttaaggaaataggggatcaaaagttgcttttagacctcttcaggttcctagatagaacagaagagcttgcgctatctcattatcgagagcatttgaacattcaggaccctgacaaacgaaaagaatttcttaaaacctgtgttggtttgccattttcagcagaagattccgcacacatacaggaccattacacgctcctggaacgtcagatcattattgaggcaaatgatcgccatctagaatcagcaggacagactgagatcttccgaaagcacccccgcaaagcctccatcctcaacatgccactagtgacaacacttttctactcctgcttctatcactacacagaggctgaggggacattcagcagtcccgtcaacctgaagaagacatttaagatcccagataaacagtatgtgctgacagccctggctgctcgtgccaagcttcgagcctggaatgatgtagatgccctattcaccacaaagaactggctgggctataccaagaagagagcacccattggcttccatcgggttgtcgaaattttgcacaagaacaatgcccctgtgcagatattacaggagtatgtcaatctggtggaagatgtggacacgaagttgaacttagccactaagttcaagtgccatgatgtcgtcattgatacctaccgggacctgaaggatcgtcaacagttgctagcatacaggagtaaggtagataaaggatcagcagaggaggagaagattgatgctcttctcagcagctcgcaaattcgatggaagaattaagtggcattgactaccttgaagcctgcctcatttcctcctctcctgcctgtgaaagcagagagagctcttctttgggagagctgcggcatcacatcgcttgggcccattacccatgggcagtgccagctactcttgacacagataacttcagactgatcttctgtccaaggaacatcatctgaggatcgagatctaaagctttgagtcatgagaatgattctctccacctggtgctcatatgaaggtgggagtgatttctagattgggcccctactgggtaagatctcacttggtctgagaaaagtgactgctccagaaaggaagaggtatgggagtcatagggtggctactgcattccactcagctaattatgatccaggacttggcgctggacattggcagttctgctctgaatgaagtcagaacagaaccaaaatggcctcaggaaggaatgccagtgtttcccaagacctcctggagatgcactcacaccagactgcacagacccctccacattatgccacacatggcctagacgttgtgtttcctcagccattttccctctgctgccccagtttactctgtccaaaaccctaaggttcttctctcacttgaacacagacgaccttgcttgggtgatgagacatcccctttatctcttcctctactgctggccaagacccgtcactttataagaagctcagatgcagcagtgctggagagctctctctttatgcaaaaatctcatttcaccaggagctttcagaagtttcacctgggctaaattcagcagcatttctgttaggatatttagatggaggttttattttcacacttggattcttgctctgtaccaatatttgcctccttttctgtgactgaactgggtttttctgacatgcctagactcctaataaaggtatttcttccttggtgccttc

SEQ ID NO: 5962 - DNA, 1832 bp, Homo sapiens
  source 1..1832: mol_type = unassigned DNA
gaatagaagggctggtccagcggcggcggaggctggcgctgtcctgagagggagggctctgtgcggaagaggtgagggtgtcccaagccccttgggtcgcgtatctggctggatccagcctctccgcatcttgatcttttcccctcttctaggaggcatccctacaccctatgactacaggcctgattctcttctttcagtcagggcgacccttgggcgctggagtacgcttgggactggggctgcgaatgaatcggacaaagggtgatgaggaggagtattggaacagctccaagttcaaggcttttacctttgacgatgaagacgatgagctttcacagttaaaggagtccaagcgggcggtgaacagcctccgagacttcgtggatgatgatgacgatgatgacctggagcgagtcagctggagtggggaacctgtgggaagtatctcatggtccatcagagagactgctggtaatagcggctcaacccacgaggggcgtgaacagctaaagagccgaaacagcttctcctcctatgcacaactacccaagcctacttctacctactccctgagcagcttttttagaggtagaactagacctggaagtttccagtccctttctgatgctctgtcagacacacctgccaaaagctatgctccagagctggggagacccaaaggggagtatagggattacagcaatgactggagccccagtgatacagtgcgacgtctccggaagggcaaggtttgctcactagagagattccgctccttacaggacaaactacaactcctagaagaggcagtaagcatgcatgatggaaacgtcattactgcagttctgattttcctgaagaggacactgagcaaagagatcctcttccgagagctggaggtgcgacaggttgccctgagacatcttattcacttccttaaggaaataggggatcaaaagttgcttttagacctcttcaggttcctagatagaacagaagagcttgcgctatctcattatcgagagcatttgaacattcaggaccctgacaaacgaaaagaatttcttaaaacctgtgttggtttgccattttcagcagaagattccgcacacatacaggaccattacacgctcctggaacgtcagatcattattgaggcaaatgatcgccatctagaatcagcaggacagactgagatcttccgaaagcacccccgcaaagcctccatcctcaacatgccactagtgacaacacttttctactcctgcttctatcactacacagaggctgaggggacattcagcagtcccgtcaacctgaagaagacatttaagatcccagataaacagtatgtgctgacagccctggctgctcgtgccaagcttcgagcctggaatgatgtagatgccctattcaccacaaagaactggctgggctataccaagaagagagcacccattggcttccatcgggttgtcgaaattttgcacaagaacaatgcccctgtgcagatattacaggagtatgtcaatctggtggaagatgtggacacgaagttgaacttagccactaagttcaagtgccatgatgtcgtcattgatacctaccgggacctgaaggatcgtcaacagttgctagcatacaggagtaaggtagataaaggatcagcagaggaggagaagattgatgctcttctcagcagctcgcaaattcgatggaagaattaagtggcattgactaccttgaagcctgcctcatttcctcctctcctgcctgtgaaagcagagagagctcttctttgggagagctgcggcatcacatcgcttggg

SEQ ID NO: 5963 - DNA, 533 bp, Homo sapiens
  source 1..533: mol_type = unassigned DNA
acagcctgaatagaagggctggtccagcggcggcggaggctggcgctgtcctgagagggagggctctgtgcggaagaggaggcatccctacaccctatgactacaggcctgattctcttctttcagtcagggcgacccttgggcgctggagtacgcttgggactggggctgcgagtgagcaccagcgattggttcggaagcggacatttggttcagaacgagcatttaactctgccagggatccgctgggctctgacgactgcggtagatccatggcttcctggacgttcacccgtagagtcatcctagcttaactcttgttccctggtctcagttcacaagcctcacctgtatcttcctggctcggaagataattgaaaccaagtctgacttctcaatgaatcggacaaagggtgatgaggaggagtattggaacagctccaagttcaaggcttttacctttgacgatgaagacgatgagctttcacagttaaaggagtccaagcgggcggtgaacagcctccgagacttcg

SEQ ID NO: 5964 - DNA, 2562 bp, Homo sapiens
  source 1..2562: mol_type = unassigned DNA
gcggtctcgttattcgtgttttctctccgccctacgattattcccttccgcccccttctctaagctgcacagcctgaatagaagggctggtccagcggcggcggaggctggcgctgtcctgagagggagggctctgtgcggaagagatgaatcggacaaagggtgatgaggaggagtattggaacagctccaagttcaaggcttttacctttgacgatgaagacgatgagctttcacagttaaaggagtccaagcgggcggtgaacagcctccgagacttcgtggatgatgatgacgatgatgacctggagcgagtcagctggagtggggaacctgtgggaagtatctcatggtccatcagagagactgctggtaatagcggctcaacccacgaggggcgtgaacagctaaagagccgaaacagcttctcctcctatgcacaactacccaagcctacttctacctactccctgagcagcttttttagaggtagaactagacctggaagtttccagtccctttctgatgctctgtcagacacacctgccaaaagctatgctccagagctggggagacccaaaggggagtatagggattacagcaatgactggagccccagtgatacagtgcgacgtctccggaagggcaaggtttgctcactagagagattccgctccttacaggacaaactacaactcctagaagaggcagtaagcatgcatgatggaaacgtcattactgcagttctgattttcctgaagaggacactgagcaaagagatcctcttccgagagctggaggtgcgacaggttgccctgagacatcttattcacttccttaaggaaataggggatcaaaagttgcttttagacctcttcaggttcctagatagaacagaagagcttgcgctatctcattatcgagagcatttgaacattcaggaccctgacaaacgaaaagaatttcttaaaacctgtgttggtttgccattttcagcagaagattccgcacacatacaggaccattacacgctcctggaacgtcagatcattattgaggcaaatgatcgccatctagaatcagcaggacagactgagatcttccgaaagcacccccgcaaagcctccatcctcaacatgccactagtgacaacacttttctactcctgcttctatcactacacagaggctgaggggacattcagcagtcccgtcaacctgaagaagacatttaagatcccagataaacagtatgtgctgacagccctggctgctcgtgccaagcttcgagcctggaatgatgtagatgccctattcaccacaaagaactggctgggctataccaagaagagagcacccattggcttccatcgggttgtcgaaattttgcacaagaacaatgcccctgtgcagatattacaggagtatgtcaatctggtggaagatgtggacacgaagttgaacttagccactaagttcaagtgccatgatgtcgtcattgatacctaccgggacctgaaggatcgtcaacagttgctagcatacaggagtaaggtagataaaggatcagcagaggaggagaagattgatgctcttctcagcagctcgcaaattcgatggaagaattaagtggcattgactaccttgaagcctgcctcatttcctcctctcctgcctgtgaaagcagagagagctcttctttgggagagctgcggcatcacatcgcttgggcccattacccatgggcagtgccagctactcttgacacagataacttcagactgatcttctgtccaaggaacatcatctgaggatcgagatctaaagctttgagtcatgagaatgattctctccacctggtgctcatatgaaggtgggagtgatttctagattgggcccctactgggtaagatctcacttggtctgagaaaagtgactgctccagaaaggaagaggtatgggagtcatagggtggctactgcattccactcagctaattatgatccaggacttggcgctggacattggcagttctgctctgaatgaagtcagaacagaaccaaaatggcctcaggaaggaatgccagtgtttcccaagacctcctggagatgcactcacaccagactgcacagacccctccacattatgccacacatggcctagacgttgtgtttcctcagccattttccctctgctgccccagtttactctgtccaaaaccctaaggttcttctctcacttgaacacagacgaccttgcttgggtgatgagacatcccctttatctcttcctctactgctggccaagacccgtcactttataagaagctcagatgcagcagtgctggagagctctctctttatgcaaaaatctcatttcaccaggagctttcagaagtttcacctgggctaaattcagcagcatttctgttaggatatttagatggaggttttattttcacacttggattcttgctctgtaccaatatttgcctccttttctgtgactgaactgggtttttctgacatgcctagactcctaataaaggtatttcttccttgg

SEQ ID NO: 5965 - DNA, 1080 bp, Homo sapiens
  source 1..1080: mol_type = unassigned DNA
gcggccaccgcttttaagccacgattggcgaaggccgccgtcatttcggagcgactcagcgcctgcccgccctctcgccgcgtcgccggtgcctgcgcctcccgctccacctcgcttcttctctcccggccgaggcccgggggaccagagcgagaagcggggaccatgttccgacgcaagttgacggctctcgactaccacaaccccgccggcttcaactgcaaagatgaaacagaatttagaaacttcatcgtttggcttgaagaccagaaaatcaggcactacaagattgaagacagagggaatttaagaaacatccacagcagcgactggcccaagttctttgaaaagtatctcagagatgttaactgtcctttcaagattcaagatcgacaagaagctattgactggcttcttggtttagctgttagacttgaatatggagataatgctgaaaaatacaaggatttagtacctgataattcaaaaactgctgacaatgcaactaaaaatgcagaaccattgatcaatttggatgtaaataatcctgattttaaggctggtgtgatggctttggctaacctgcttcagattcagcgtcatgatgattacctggtaatgcttaaggcaattcggattttggttcaggagcgcctgacacaggatgcagttgctaaggcaaatcaaacaaaagagggcttacctgttgctttagacaaacatattcttggttttgacacaggagatgcagttcttaatgaagctgctcaaattctgcgattgctgcacatagaggagctcagagagctacagacaaaaatcaacgaagccatagtagctgttcaggcaattattgctgatccaaagacagaccacagactgggaaaagttggaagatgaacacttgaggacttcagcttctcacctacttagtacagttgggaaccatacacttctggcatgtttggaaatcaaaatgtcacattctcgggggaggaagcccagaaaattgggtatgttctagagatttaccaccattgcttattgcttttttctttaataaagtttaggaaagtagaa

SEQ ID NO: 5966 - DNA, 643 bp, Homo sapiens
  source 1..643: mol_type = unassigned DNA
atcccctgcgcgcgcctgcgcgctcggtgacctttccgagttggctgcagatttgtggtgcgttctgagccgtctgtcctgcgccaagatgcttcaaagtattattaaaaacatatggatccccatgaagccctactacaccaaagtttaccaggagatttggataggaatggggctgatgggcttcatcgtttataaaatccgggctgctgataaaagaagtaaggctttgaaagcttcagcgcctgctcctggtcatcactaaccagatttacttggagtacatgtgaaagaaaacgtcagtctgcctgtaaatttcagcaagccgtgttagatggggagcgtggaacgtcactgtacacttgtataagtaccgtttacttcatggcatgaataaatggatctgtgagatgcactgctacctggtactgctttcagtgtgttccccctcagcccctccggcgtgtcaggcatactctgagtagataatttgtcatgcagcgcatgcaatcagaatctcactgagccacccatcattgtgaaataattacctcagttgtacaggacttggtgatcaggatccaggcactcacttgtattctactgctcaataaacgtttattaaacttgatcctgctactta

SEQ ID NO: 5967 - DNA, 842 bp, Homo sapiens
  source 1..842: mol_type = unassigned DNA
ggtgcgttctgagccgtctgtcctgcgccaagggagcgtaccttggccttgagaggttcagctgcctaacccagaggctacgcagagttagagaagccagagtccaagccaagaactctgactccacatccagtcccttctctcctttataactcaagtttccttgcgccacactgccctccacgttatgctgtacatgacaacttgggtgaggcaacagggaagctgaaaagagatcatacggtgctgaatgaaattgtatggaactcgcgggtcagacatttcccatttccagtgtcagatgcttcaaagtattattaaaaacatatggatccccatgaagccctactacaccaaagtttaccaggagatttggataggaatggggctgatgggcttcatcgtttataaaatccgggctgctgataaaagaagtaaggctttgaaagcttcagcgcctgctcctggtcatcactaaccagatttacttggagtacatgtgaaagaaaacgtcagtctgcctgtaaatttcagcaagccgtgttagatggggagcgtggaacgtcactgtacacttgtataagtaccgtttacttcatggcatgaataaatggatctgtgagatgcactgctacctggtactgctttcagtgtgttccccctcagcccctccggcgtgtcaggcatactctgagtagataatttgtcatgcagcgcatgcaatcagaatctcactgagccacccatcattgtgaaataattacctcagttgtacaggacttggtgatcaggatccaggcactcacttgtattctactgctcaataaacgtttattaaactt

SEQ ID NO: 5968 - DNA, 707 bp, Homo sapiens
  source 1..707: mol_type = unassigned DNA
agggtgagcctttctaggacctcaggggaagcttgagcgccgcggctggcccgggagtctgtttcacgggagttccgtggcaacccctgtgtgtacaagaaaatgccctccggtcactccctggcctctctatttagaggctgctgcctcggagatgcttcaaagtattattaaaaacatatggatccccatgaagccctactacaccaaagtttaccaggagatttggataggaatggggctgatgggcttcatcgtttataaaatccgggctgctgataaaagaagtaaggctttgaaagcttcagcgcctgctcctggtcatcactaaccagatttacttggagtacatgtgaaagaaaacgtcagtctgcctgtaaatttcagcaagccgtgttagatggggagcgtggaacgtcactgtacacttgtataagtaccgtttacttcatggcatgaataaatggatctgtgagatgcactgctacctggtactgctttcagtgtgttccccctcagcccctccggcgtgtcaggcatactctgagtagataatttgtcatgcagcgcatgcaatcagaatctcactgagccacccatcattgtgaaataattacctcagttgtacaggacttggtgatcaggatccaggcactcacttgtattctactgctcaataaacgtttattaaacttgatcctgctact

SEQ ID NO: 5969 - DNA, 472 bp, Homo sapiens
  source 1..472: mol_type = unassigned DNA
tctgagccgtctgtcctgcgccaagggctgttcgtttcttggaacctcacactgtcagagcattcgagtagcttgaggacaggaaatttgagggcggactatctgcaaggtgttccaggagaaggacacagtcgcatcctgcaagatgcttcaaagtattattaaaaacatatggatccccatgaagccctactacaccaaagtttaccaggagatttggataggaatggggctgatgggcttcatcgtttataaaatccgggctgctgataaaagaagtaaggctttgaaagcttcagcgcctgctcctggtcatcactaaccagatttacttggagtacatgtgaaagaaaacgtcagtctgcctgtaaatttcagcaagccgtgttagatggggagcgtggaacgtcactgtacacttgtataagtaccgtttacttcatggcatgaataaatggatctgtgagatgca

SEQ ID NO: 5970 - DNA, 3275 bp, Homo sapiens
  source 1..3275: mol_type = unassigned DNA
gcccctgcaggtgccatgactcagcagccccaggacgactttgacaggagcgtggaggatgcccaggcatggatgaaggctgtgcaggaccagctgcaggtcaatgacaacacgcagggaccccgcgcggccctggaggccaggctgtgggagaccgagaaaatatgccagctggagcccgaggggcgtgtgagggtggacctcgtgctacggatggctgaagccctcttggcatgctgccctggggaccagaagcccgggatcctggcccggctgaaggacatcaaggcccaatgggaggagacagtcacctacatgactcactgtcacagccgcatcgagtgggtgtggctgcactggagcgagtacctgctggcccgagatgagttctaccgctggttccagaagatgatggtcacactggagccccacatcgagctccagctgggcctgaaggagaagcagtggcagctgagccacgcccaggtgctgctgcacaacgtggacaaccaggcggtgctcctggaccggctgctggaggaggcagcctccctgttcaacaggatcggggaccccagcgtggacgaagatgcccagaagagaatgaaggctgagtacgatgcagtgaaggccaaggcccagaagcgtgtagatctgctggagcaggtggcccgggagcatgaggagtaccaggcaggtgtggacgagttccaactgtggctgaaggcggtggtggagaaggtgaatggctgcctggggcggaactgcaagctgcccatcacgcagcgcctctccacactgcaggacattgccaaagattttcccaggggcgaggagtctctggagacgctggaggagcagtctgcgggtgtcattcggaacacctctcctttgggtgcagagaagatcaccggagaactggaagagatgaggaaagttctggagaagctgcgcgccctctgggaggaggaggaggagcggctgcggggcctgctccggtccaggggagcctgggagcagcagattaagcagctggaggctgagctcagtgagttcaggatggtcctgcagaggctggcccaggagggcctgcagcctgcggcgaaagcggggaccgaggacgagctggtggcacactggagacgctactcggcaacacgggcggcgctggcctcggaggagccccgggtggaccggctgcaagcccagctgaaggagctcatcgtcttccctcacaacctgaagccactctctgatagtgtcatcgctaccatccaggagtatcagagcctgaaggtgaagagcgcgaggctgcgcaatgccgcggcggtggagctgtggcagcatttccagcggcctctgcaggatctgcagctgtggaaggccctggcccagcggctcttggaggtcactgccagcctgccggacctgccttcccttcacaccttcctgccccagatcgaggcagccctgatggaaagctcccgcctgaaagagctgctgacgatgctgcagctgaagaaagacctcctgattggcatctttggccaggagagagccacggcactcctggagcaggtggcaggttccatgagggacagagacctgctgcataacagcctcctgcagaggaaaagcaaactgcagagcctgctcgctcagcacaaagactttggagcagcttttgagcccctgcagaggaagctcttggacctccaggtcagggtccaagccgagaaggggcttcagcgggaccttcctggaaaacaggcccagctctcaaggttgcaggggctgcaggaagaggggctggacttgggggcacagatggaggctgcaaggcctctggtccaggagaaccccaaccaccagcacaaaatggaccagctttcctccgacttccaggccctgcagaggtctctggaggaccttgtggacaggtgtcggcagagtgtgcaggagcactgcaccttcagccaccagctgctggagctgcggcagtggatcgttgtgaccacgcaaaagctggaggcacaccggggagaggcgggcccgggggatgccgagtcccaagaggccgagtttgagaggctggtggcagaattcccggagaaggaggcccagctgtccctggtggaagcgcagggctggctggtgatggagaagtcttctccggagggtgctgccgtggtgcaggaggagctcagggagctggcagagtcgtggcgggccttgaggctgctggaagaaagtctgctgagcctcatcagaaactggcatctgcagaggatggaagtggattcggggaagaaaatggttttcaccaacaacatcccaaagtcaggatttctcatcaatcccatggatcctattcccaggcatcgtcgacgcgcaaatcttctacaggaagaagaagggagccatgaagatttctcccagctcctgaggaactttgggcagtggttgcaggtggaaaactccaagctggttagaatcatcgcaatgagaacttctacagctgaggacttgaggaccagaaaatcgaagctgcaggagctggaggctcgggtgccagaaggtcagcatctctttgagaacctccttcgtctcgggccagcaagggggacctcggatgagctggaagatctgcgctaccagtggatgctgtacaagtccaagctgaaggactctggccacctgctgacacaaagttctccaggggagccgactggattccaaaagactcggcggtggcgaggactgggctccctcttccggagggcgtgctgtgtggcgctcccactgcagctgcttctgctgctgttcctcctcctgctgttcctgctcccaatcagggaagaggaccgcagctgcaccctggccaacaacttcgcccgctccttcacgctcatgctgcgctacaatggcccaccacccacctaacccactggggcacacaggtgactttctcctccaacctccatcagtcccagggcccctcctgaggatgctcgccagggaaactggaaacaggggcagggcaaagactgcagagctgcatccatatcagtgctgtgtcagcgttcccagaagacacttactttttatacagtgttgtcttagtctatttatactaaatgtgtactacatgtgactagggaataatgtctagaatttttatatgatctgtatgtaaatgctcagtatgtataatttcatatacgagttctatttggagttgggaaaattcctagcaatggctccctccaatggga

SEQ ID NO: 5971 - DNA, 2615 bp, Homo sapiens
  source 1..2615: mol_type = unassigned DNA
gcccctgcaggtgccatgactcagcagccccaggacgactttgacaggagcgtggaggatgcccaggcatggatgaaggctgtgcaggaccagctgcaggtcaatgacaacacgcagggaccccgcgcggccctggaggccaggctgtgggagaccgagaaaatatgccagctggagcccgaggggcgtgtgagggtggacctcgtgctacggatggctgaagccctcttggcatgctgccctggggaccagaagcccgggatcctggcccggctgaaggacatcaaggcccaatgggaggagacagtcacctacatgactcactgtcacagccgcatcgagtgggtgtggctgcactggagcgagtacctgctggcccgagatgagttctaccgctggttccagaagatgatggtcacactggagccccacatcgagctccagctgggcctgaaggagaagcagtggcagctgagccacgcccaggtgctgctgcacaacgtggacaaccaggcggtgctcctggaccggctgctggaggaggcagcctccctgttcaacaggatcggggaccccagcgtggacgaagatgcccagaagagaatgaaggctgagtacgatgcagtgaaggccaaggcccagaagcgtgtagatctgctggagcaggtggcccgggagcatgaggagtaccaggcaggtgtggacgagttccaactgtggctgaaggcggtggtggagaaggtgaatggctgcctggggcggaactgcaagctgcccatcacgcagcgcctctccacactgcaggacattgccaaagattttcccaggggcgaggagtctctggagacgctggaggagcagtctgcgggtgtcattcggaacacctctcctttgggtgcagagaagatcaccggagaactggaagagatgaggaaagttctggagaagctgcgcgccctctgggaggaggaggaggagcggctgcggggcctgctccggtccaggggagcctgggagcagcagattaagcagctggaggctgagctcagtgagttcaggatggtcctgcagaggctggcccaggagggcctgcagcctgcggcgaaagcggggaccgaggacgagctggtggcacactggagacgctactcggcaacacgggcggcgctggcctcggaggagccccgggtggaccggctgcaagcccagctgaaggagctcatcgtcttccctcacaacctgaagccactctctgatagtgtcatcgctaccatccaggagtatcagagcctgaaggtgaagagcgcgaggctgcgcaatgccgcggcggtggagctgtggcagcatttccagcggcctctgcaggatctgcagctgtggaaggccctggcccagcggctcttggaggtcactgccagcctgccggacctgccttcccttcacaccttcctgccccagatcgaggcagccctgatggaaagctcccgcctgaaagagctgctgacgatgctgcagctgaagaaagacctcctgattggcatctttggccaggagagagccacggcactcctggagcaggtggcaggttccatgagggacagagacctgctgcataacagcctcctgcagaggaaaagcaaactgcagagcctgctcgctcagcacaaagactttggagcagcttttgagcccctgcagaggaagctcttggacctccaggtcagggtccaagccgagaaggggcttcagcgggaccttcctggaaaacaggcccagctctcaaggttgcaggtgaggggtctgtgaggcctgaatcactcctgcccaggtgctcagctgcacctggaagcagcgtctccctctagcagtaaccagcaaagcaacagctgccgtgagccagaaatttagacccttagttgagatctgacctttcacctcaacagaacctctgcttatttatctgatggttcctgacctcaaacaactgagtcttgagctcagcaaaatgacaaactgtctttctgtttactcctcagttccaaagtctaacattggtatttgtttttagaattgctttgctaagtattcttaatgagtccagaggtgttcagttaaaccaactttgggattaagaataaatgttctgaaacgtggactgtaagtaggctgaccgttgatcattgttggctggataaggaacttgatggttttttaaaatgcgcgtgatacaatagttctctctttaaaacccaagcacagctcatacataaattgagagtgttctctagaagacattaaaaatagtgcattttaggccgggagcggtggctcacgcctgtaatcccagcactttgggaggtgagcagattgcctgactttaggattttgagatcagcctgggcaacatggtgaaaccctgtctctacttaaaataaaaaattttttttaaaaaagcaaaaaatttagccaggcgtggtggcgggaatctgtaaccccagctacttgggaggccgaggcaccagaatcacttgaacccaggaggcagaggttgcagtgagcccacattgtgccactgtgctccagcctgggcgacagagtgagactctgtctccaaa

SEQ ID NO: 5972 - DNA, 3138 bp, Homo sapiens
  source 1..3138: mol_type = unassigned DNA
gcccctgcaggtgccatgactcagcagccccaggacgactttgacaggagcgtggaggatgcccaggcatggatgaaggctgtgcaggaccagctgcaggtcaatgacaacacgcagggaccccgcgcggccctggaggccaggctgtgggagaccgagaaaatatgccagctggagcccgaggggcgtgtgagggtggacctcgtgctacggatggctgaagccctcttggcatgctgccctggggaccagaagcccgggatcctggcccggctgaaggacatcaaggcccaatgggaggagacagtcacctacatgactcactgtcacagccgcatcgagtgggtgtggctgcactggagcgagtacctgctggcccgagatgagttctaccgctggttccagaagatgatggtcacactggagccccacatcgagctccagctgggcctgaaggagaagcagtggcagctgagccacgcccaggtgctgctgcacaacgtggacaaccaggcggtgctcctggaccggctgctggaggaggcagcctccctgttcaacaggatcggggaccccagcgtggacgaagatgcccagaagagaatgaaggctgagtacgatgcagtgaaggccaaggcccagaagcgtgtagatctgctggagcaggtggcccgggagcatgaggagtaccaggcaggtgtggacgagttccaactgtggctgaaggcggtggtggagaaggtgaatggctgcctggggcggaactgcaagctgcccatcacgcagcgcctctccacactgcaggacattgccaaagattttcccaggggcgaggagtctctggagacgctggaggagcagtctgcgggtgtcattcggaacacctctcctttgggtgcagagaagatcaccggagaactggaagagatgaggaaagttctggagaagctgcgcgccctctgggaggaggaggaggagcggctgcggggcctgctccggtccaggggagcctgggagcagcagattaagcagctggaggctgagctcagtgagttcaggatggtcctgcagaggctggcccaggagggcctgcagcctgcggcgaaagcggggaccgaggacgagctggtggcacactggagacgctactcggcaacacgggcggcgctggcctcggaggagccccgggtggaccggctgcaagcccagctgaaggagctcatcgtcttccctcacaacctgaagccactctctgatagtgtcatcgctaccatccaggagtatcagagcctgaaggtgaagagcgcgaggctgcgcaatgccgcggcggtggagctgtggcagcatttccagcggcctctgcaggatctgcagctgtggaaggccctggcccagcggctcttggaggtcactgccagcctgccggacctgccttcccttcacaccttcctgccccagatcgaggcagccctgatggaaagctcccgcctgaaagagctgctgacgatgctgcagctgaagaaagacctcctgattggcatctttggccaggagagagccacggcactcctggagcaggtggcaggttccatgagggacagagacctgctgcataacagcctcctgcagaggaaaagcaaactgcagagcctgctcgctcagcacaaagactttggagcagcttttgagcccctgcagaggaagctcttggacctccaggtcagggtccaagccgagaaggggcttcagcgggaccttcctggaaaacaggcccagctctcaaggttgcaggggctgcaggaagaggggctggacttgggggcacagatggaggctgcaaggcctctggtccaggagaaccccaaccaccagcacaaaatggaccagctttcctccgacttccaggccctgcagaggtctctggaggaccttgtggacaggtgtcggcagagtgtgcaggagcactgcaccttcagccaccagctgctggagctgcggcagtggatcgttgtgaccacgcaaaagctggaggcacaccggggagaggcgggcccgggggatgccgagtcccaagaggccgagtttgagaggctggtggcagaattcccggagaaggaggcccagctgtccctggtggaagcgcagggctggctggtgatggagaagtcttctccggagggtgctgccgtggtgcaggaggagctcagggagctggcagagtcgtggcgggccttgaggctgctggaagaaagtctgctgagcctcatcagaaactggcatctgcagaggatggaagtggattcggggaagaaaatggttttcaccaacaacatcccaaagtcaggatttctcatcaatcccatggatcctattcccaggcatcgtcgacgcgaagaagaagggagccatgaagatttctcccagctcctgaggaactttgggcagtggttgcaggtggaaaactccaagctggttagaatcatcgcaatgagaacttctacagctgaggacttgaggaccagaaaatcgaagctgcaggagctggaggctcgggtgccagaaggtcagcatctctttgagaacctccttcgtctcgggccagcaagggggacctcggatgagctggaagatctgcgctaccagtggatgctgtacaagtccaagctgaaggactctggccacctgctgacacaaagttctccaggggagccgactggattccaaaagactcggcggtggcgaggactgggctccctcttccggagggcgtgctgtgtggcgctcccactgcagctgcttctgctgctgttcctcctcctgctgttcctgctcccaatcagggaagaggaccgcagctgcaccctggccaacaacttcgcccgctccttcacgctcatgctgcgctacaatggcccaccacccacctaacccactggggcacacaggtgactttctcctccaacctccatcagtcccagggcccctcctgaggatgctcgccagggaaactggaaacaggggcagggcaaagactgcagagctgcatccatatcagtgctgtgtcagcgttcccagaagacacttactttttatacagtgttgtcttagtctatttatactaaatgtgtactacatgtg

SEQ ID NO: 5973 - DNA, 8053 bp, Homo sapiens
  source 1..8053: mol_type = unassigned DNA
aaggtcctagaggaggctggcaggatataggttgtcctgtgcttaacttgaagcagatgtgccctctgtgaaccggggaatggggacggccgacacagggccactgcgtgcaacagcgccgggccagggctaaggaacaggcagagccggcgcccaggtgacaagagctctggcgatgggcccgcaggccccagcagttccctcatagaggccacgcggtgcaacacctgccaccggcagcggggcttccgggggtcctggggcagctggggccgacggggcgtcgccctttgccctctgacccctgccttttgcgcccccgctggcgctccctggttctgtgaggaacctcgcggcggcgtcgcaggcgtagagccagtcagtttgtgcttggtcgccagaggaggcggtggctgaggagagttgagtccactgctgaccctgttttacggtaggaggcacggctagctctaaatgggcaatttacttagtaaatttagacccgggtgccgccgccggcccctgccagggccagggcgtggcgcccccgctcccctgtcccgggacgcctccccgcccggtcgggctcactctgtacccaccccgcgccctttccgcggcctgttccgccggaacgcccgtcgcaggccttcagcagccagcatcttcgtcgcccctaagaggccgtgtcctctccctcgggctgcggccgcccctctgggggtcctgccggctgtgggttgggggctggccatcaggaagacacccatgctgcctgctcggaaccccccgaggtttggacaccccagttccgtaaggatccctcctcccagccgcatgttcactctcctgctgccttcaccacgtgagccggcggtcaaggccaggaagcccatcccagccactctcctggaggagaccgaggtgtgggcccaagaagggcccagaagagtgaagaaggatgaggatccggtgcagatcgaaggggaggatgacgagaaaaggaccccccttagcagcggagaagcatcgtccacatccaggtcccagggcacccagggagacgtggcctccttcagatgcagccctgggcctctggagggaaatgtctaccacaagttctcagaaaacagcatgagtgagaaggcccaggcgtctccagcgagctcctgcttggaaggccctgccatgcccagcacacacagccaggccggatgtgcccggcatcttggaaagcctgatccggatgcaacagcgccccctgagccagccgttggctgctccctgctgcagcagaagttggctgcggaagtgctgaatgaagagccaccgcccagctccctaggcttgccgattccgctgatgtccggaaagaggatgcctgatgagaagcctttctgtattcctccaaggagcgctgctcctcccagagctgcccgcaacaggccctgcaaaaggaaaatgtcgattccattgctgctgccgctgcccccttcactgccattgctgtgggatcgaggtgagcttcccccacctgctaagctcccctgcctgtctgttgagggagacctacacaccttggagaagagccctgagtataaaaggaatagcagaatcttggaggataaaacagagaccatgacaaacagcagcatcacccagcctgccccttctttctcccaacctgtgcagaccacagactccctgcccctgaccacttacacttcccaggtctcagctcctttgcccatccctgacttggctgacctggctactggacccctcatcctgcctatccctccactttccaccacaccaaaaatggatgagaaaatagcattcacaatccctaactctcctctggctcttcctgctgaccttgttcccattttgggtgatcagtctaatgagaaaggaggctcttataattcagtcgtaggagcagcgcctctcacttctgaccccccaacacctcctagctccacaccctccttcaagcctcccgtcacaagggagtccccaatatctatgtgtgtggattcccctcctcctctttccttcctgactcttcttccagtcccttccaccgggacctcagttatcaccagcaagcctatgaattccacgtcagtcatttccactgtcacaacaaacgcatctgcccacctaacctcacagactgcggtagaccctgaagtagttaatatggatactactgccccatctcaggttgttattttcacatcttccctaagctccagagtgagctctctcccaaattcccaaatacattgcagtgcagagcagaggcacccgggaaagacatcagtctacacatccccacttccatttatattccacaataccaccccaagttttaaccaactctttggaaaagaagccacccctcagcccaaatttgaggctcctgatgggcagccgcagaaagcttctctccccagtgcctgtgttttcctgagccttcccatcattcctcctccagacacctccactttagtgaacagtgcctctacagcatcatcatccaaacctcccattgaaaccaatgctatgcataccactcctccttccaaggctgtcatcttgcagtctgcctctgtctccaagaagtacctcccattttacctggggcttcctggttctgggaacacacaacccagcggcaacactgcctcagtccaaggctccaccagtttgcctgcacagtcagtcagggcaccagctacagcttccaaccatcctttaaatccaggagccacccctcaacccaaatttggggcccctgatgggccgcagcagaaaacctctctccccagtgcccatgatttcctgagccttcctatcatggttcctccagacacctccactttagtgagcagtgcctctgcagcatcgttatccaagcctgccattgacaccagtgacatgaataccacccctccttccaaaactgtcatcttgcagtctacctttgtctccaggaaggaggagtacatccgattttatatggggcttcctggttctgggaacacactacacagtgacagcattgcctcagcccaagtctccaccagttttcctgcacaggcagataggagaccaaccacaacttccagccatcctttaaatacaggatccatctctcattccacacttggggccactgatgggcagcagaagtctgacagttcttttattctggggaatccagcaaccccagcaccagttataggcttaacatctccttcagtccagccactgagtggcagcataattccaccaggttttgcagagttaacatcaccatatactgcattgggcacacctgttaatgctgagccagtcgagggtcacaatgcaagtgctttccccaatggcacagcaaagacttctggatttagaattgccactgggatgcctggcactggagacagtaccttactggttggaaatactattccaggcccacaagtgattatgggacctggaacccctatggatggtgggagcattgggttcagcatgtctgccccaggccccagttccacatcaggagaactcaacattggacaaggacagagtgggacacccagcaccacttctgttttcccatttggtcaggcagcctgggacccaactggccacagcatggctgctgcaccacaaggggctagcaacattcctgtatttggatatacttctgctgccgcctacattcctggtttagacccacctacccagaattcatgcagtggtatgggaggggatggcaccagatccatagttggaggcccttgtgttcctgcttttcaacagtgcatcctgcagcacacatggacagagagaaaattctacacttcaagcacccactactatggacaagaaacatatgttaggagacatgtctgtttccaacttccgtaagagcacctgtggttcacctgatcacaccacatcagttgtggttgtaaataccagcattatccttttgtatggtcatgcttctagtttcatcttcatgccaagcacctgccatgtacctctccagaactcaggttgtgcaccaggaggggacaacaacatccctgtgctccctttctctgtcagtacacatgggtcccacctggacaaaacacaggtggtgcatctgcagtgaatggcaacatatctttaattagaggcccttgtgtatccacctaccaacaaagtacctagggcccacctggacaaaacacagatggtacctcttccaggagtgtcaacattcatttgatagaaggccctcatgtgcccatgtatcagcaaagcacctggggcccacctggacaaagcacaaaccatgcaatgagggacagcaacacaacggctgtgactggttgtacttttggtcccccatttacacaaagcacctgaggcccacctggctaaatgcaggtggtgcaataggagatagccccagatatttgtagggagaaacctctagtctccctttcagtaaaaatactatggacctgcccaaccaaggtgctccttttgactttagaggaaccagcattgtttttgttttggtttgtttgtttgtttgtttgtttgtttgtttgtttttgagacggagccttagcccaggctggagtgtagtagcacaatctcggctcactgcaacctccacctcctgggttcaagcaattctcctgtcttagcctcctgagtagctgggactacaggcatatgccaccacacctggctattttttataattttagcagagacagagttccaccttattggccaggctggtctcaaactcctgacctcaggtgatccacccacctcggcctcccaaagtgctaggatgacaggtgtgagccaccatgcccagcctagaggagccagcattgttagttaaatacttgtgtttggatggtcctggtcagagcacctgtgcctgtgatggaaagcagccactagtgacacttgtacctgccaaggccttcataggagccaccaactcattttttactcctatcaatggtcttaagaaataagcactctccctgcacatacagttctcataaattgacattgttccaggaggaatgggctcagttccctcaaggttaaacttaacctgctctcttcctacagaagctggaggcccaaaaccacagacagagagagagagagtgtgtgtgtttgtgtgtgtgtgtgtgtgtttattggtgagtgtggagcagatgagcccagtcagaaccgcactgtattttagtggtcttctgcactgtggagggtagaggaaacctggcttgactgttaacttggctgaccctacctctgggccagttctctctagtcatggacagaaaggcaaaattcccgactttgtggaccctatattctagttgaaggggagaaaagaagcaaaaacatggaaattatctggtaaattagccagtaacgaatgctatgaaaaataaagaagtacatggaggattgagattgtagatagaagcaggtgtttcagtttacactgtgaacaagcctcactgggaaggtaaatttaaacgaagcctagagagaagcagttgagccagatatatgagcaaagacctttccagataataggagtggtcattgcagaggctcaaaggaaggatccctggtgtcctcatggagcagttagtaaggaaatgtggctggaatggagtcagcaagtgggagggagggatagagaagaggacagaggagagatgtgagtggaattccttcctccactttttactaattgtgtaataacagttgactcaaacttcaaaagtctcaatgaaatcagtacttttactatggcctgtttatctcataagatttttgaaaggataaaatgaaataatatggagaaatgacttataagcttttgttgtaatttgttatatacatagggatggatagacggatggatagattagatgatagatagatagatagatagatgataacgttatggactgaatgtttgtgtacccccaaaaattgatattttgaagcctaacttccagtgtgatggtattaggaggtgaggctttggggaggtgattaggtttagatgaagtcatgaaaatgaaacccccatgatgggatttgcgcctttatgagaagaaataccagtgctttctctaattgccatgtgaaggtataccaacaaggtaacagtctgtaagccaggaaaagagtcctcacaagaaacagaatttgtctttatcttggacttcctaacctttagaattgtagaaaataattgaatgttgtttaagctaccagtctgtggcattttttgtagcaatcagaactgactaataaagatagatagatgatagatagatacatagatagatgatagagatagatgatagatagatagatagatagatagataatatacatatatatgtatggtcaatgactgagttccttaggcaatggtgccctgattgcctttattaggcaattcaaatagaagaatagaagaacccccttttttttttgagatggagtcttgctctgtcacccaggctggagtgcagtggcgtgatcttggctcactgcacgctccacctctcggaagaacccctttttattagcataaaagcacttacttttatgaagcaaacacatgtaaaaatatgataacagagactaaaacatttatgagattaggcctgaaagaaaacaatcacagagaaattactgaattcctcttggcaccctggggcctgattcattcgctctaaattgtttagtacagttccagaggatcaaagctcctgtttcctggccagataatcacctaacttttgtaatcagaactgcctttcagaagtagagtggaaatccagttttcttctaatagccctatacccttgcagtattaccagggacaaattttttaaaattcatacttcttgacattttttaaaaggcttcaagctaaatattatgatcctggtaagacaaactttgaataaatgtgtgagagatacaaagataatttttgttttcatgttttgatgcacttacacaactgaaactatttctaaatattcttttattttttattaagataaaaagcaaacataatatcaatttaaataatactgaaagtcaaccttcctaccacagttccctcctccagagatagtgtttagctactttgatgtcactcccatagttctgagtttgcttttttacttcaactattatgttatcttacagatgtcattgtttttcctaaaacttgaagtgccttcctttttttctccttgaactcttttcccataaaaaaaaaatgtttttggtttctagaattttcaaatagtattgtttacttgactgaatcccttccttttccagaaaccttgagcctcctccactggtttgggagtggtaagaccaaagtaaatgtaaaaagtaaagtagaggttcctcttcaaagactttcctccctatctaattagaaataagtagtaacttcttttagaagcaaaatgtattcacagacctgtactaacattcttaaatatctgctagtcataataaagaaatcaatgtactttatgttcttagctcccacaatttagcctaagtatttgccctggcatgcttatactggtccaagcattaggtcatagcctgttcctcttccttatttagaagtgtttttacctttctcagcattccacaagttacttcctcattcctttgttctcctctacctttgcctcttttaaaagttctaaattgctagccaatcgggacaaatacagaatgtgaggtcctgttccagccaatggaaaccggacacagcagtagggtggacgcgtcaggttataaatgaccctgtctcctttgttcggtgtactcttgtggcaaaactgctggcaagtgtaccctttctgcaggaagtaaaaatggccttactaaataaatttatgttcaagtgctatttctttacgacaccgaggaacaagcatttcaaaca

SEQ ID NO: 5974 - DNA, 6771 bp, Homo sapiens
  source 1..6771: mol_type = unassigned DNA
gggtcccaaaggaaagcagtgagtggtgctgtttccctgaaggaagggactaagggacggtggcgcgggcccggaccggggccccggggcggcggcacggccgatatggcatgctgtcacaaagtaatgctgctgctggacaccgcgggcggcgccgcccgccacagccgggtccggcgggccgccctgcgcctcctcacctatctgagttgccgattcggcctggccagggtccactgggccttcaagttctttgactcgcagggggcgcggagccggccgtcccgcgtgtctgacttccgcgagctggggtcccgctcgtgggaggactttgaggaggagctggaggccaggctcgaggatcgcgcccacctgcccggcccggcgcccagggccacccacacgcacggcgccctgatggagacgctgctagactaccagtgggaccggcccgagatcacgtcgcccacgaagccgatcctgcggagcagcgggaggagactgctggacgtggagagcgaggccaaggaggccgaggccgcgctcgggggcttggtgaacgccgtcttcctcctggccccctgtccgcactcgcagagggagctgctgcagttcgtgtctgggtgcgaggcccaggcccagcgcctgccgcccacccctaagcaggtgatggagaagttgttgcccaagagagtccgggaagtcatggtcgcccgaaaaatcaccttctactgggtggataccaccgaatggtctaagttgtgggaatccccagaccaccttggatactggactgtttgtgaactgctccaccacggaggtggcactgtcttgccatctgaatctttcagctgggattttgctcaagctggggaaatgctgctcaggagtggaataaagctgtcaagtgaacctcatctttctccgtggatttcaatgctgccaactgatgccactttaaaccgtttgctctacaattctcctgagtatgaggcctcgtttccacgaatggaaggaatgttatttctccctgttgaagcaggcaaagagattcaagaaacatggacagtcaccctagagcccttggccatgcatcagagacattttcagaaaccagtcagaatttttctaaaaggctcagtggcccagtggtctctcccaacgagcagcactttgggcactgacagctggatgctaggaagtccagaggagagcacagcaactcaaaggctgttatttcagcagttggtaagcaggctgactgctgaagagttacacctggttgctgatgtggaccctggtgaaggccggccccccatcactggagttatttccccactctctgccagtgctatgatcctcactgtgtgccgcaccaaggaggctgaatttcaacgacatgttctccaaacagctgtggctgacagcccccgggacacagcttcccttttctcagatgttgtggatagtatattgaatcagactcatgattcgcttgcagatactgcttctgctgcttctcctgttccagagtgggcccagcaggagcttggccacaccactccctggagtccagctgttgtggaaaagtggtttcctttctgtaacatcagtggtgccagttccgatttgatggagtcatttgggttactacaggctgcctcagctaataaggaagagtcttccaaaactgaaggcgaattaatacattgccttgccgagctctaccagagaaaatctcgtgaagaatccactatagctcatcaagaagacagcaaaaagaaacgaggggtccctcgtactccagtgagacagaagatgaataccatgtgccgttccttaaagatgttgaatgtcgcaaggctgaatgtgaaggcccagaagttacatccagatggcagtccggatgtggctggggagaaaggaatccaaaagatacctagtgggagaacagtggataaattggaagacagaggaagaacactaagaagttctaaacctaaagattttaaaactgaggaagagctgctatcatatatacgtgaaaattaccaaaagactgtggccacaggagaaatcatgttgtatgcatgtgctcgaaacatgatctcaaccgttaaaatgttcctaaaatcaaaaggcaccaaggaattagaagtgaactgcctgaatcaagtaaaaagtagtctcttaaaaactagtaaaagtcttcgacagaatctaggaaaaaaactggataaggaagacaaagttagagagtgccagcttcaggtatttcttcgtttggagatgtgtctgcaatgcccttcaataaatgaaagtacagatgatatggaacaagtagtggaggaggtgacagatttgctgcgcatggtgtgtttaactgaggattcagcgtacctagcagagtttctggaggaaattttgagattgtatattgactctatcccaaagacacttggaaatctttacaacagcctagggtttgtgattcctcagaagctggctggtgtccttcctacagattttttcagtgatgactccatgacacaagagaacaaatcaccacttctttctgtgccttttttgtcaagtgctcgtagatcagtgtcaggcagccctgaatctgatgaactgcaggaacttcgtaccagatcagccaagaagagaaggaaaaatgcattaataagacataaaagcattgctgaggtttcacagaatcttcgacaaattgaaattcctaaagtgtcaaagagagctacgaaaaaagagaactctcaccctgctcctcagcagccttcccagccagtgaaagatacagtgcaagaagtgaccaaagttcgaagaaatcttttcaaccaggaattgctttccccttcaaagagatcactaaagcgggggttgcctagaagccattctgtgtcagctgtggatggtctagaggataaacttgacaacttcaagaagaacaaaggttatcacaaactgctgactaagagtgtggccgagactccagtgcataagcagatctccaaaaggctgctgcacagacaaatcaagggcaggtcctctgatcctggtcctgatattggtgttgttgaagagtcccctgaaaaaggagatgaaataagtctgagacgaagtcctcgaatcaagcagttgtcatttagcaggacacattctgcctccttctattctgtgtctcagccgaagtctcgaagtgtgcaaagagtccactctttccagcaagataagtcagaccaaagagaaaattctccagtccaaagtattcggtctcccaagagtcttctttttggggcaatgtctgagatgatcagcccctcagaaaagggttcagctcgaatgaaaaagcgttcaagaaacactttggattcggaggtacctgcagcttaccagactcccaagaagagtcaccagaaatctctgagcttttctaaaactacaccaagaaggatctctcatacaccacaaactccgttgtatactccagaaaggctgcagaagtcccctgcaaaaatgacccctacaaagcaggcagcttttaaggagtccttaaaagactcctcctcacccggccatgactcaccattggattcaaaaatcactcctcaaaaacgacatacccaggcaggagaaggtacctctcttgaaacgaagacaccaagaactcctaagaggcaaggtactcagccgcctgggtttttgccaaactgtacttggccacattcagtgaattccagtccagaaagcccctcctgtccagcccctccaacttcatcgactgcccagcccaggagagagtgtctcactcccatcagagaccctctcagaacacctccgagagcagcagccttcatgggcacgcctcagaatcaaacacaccaacagccccatgtcctcagagctgctcgggcagaggaaccagcccagaaactaaaggataaagctatcaaaactccaaaaagaccagggaattcaactgtgacttcttccccacctgttacgccaaagaaactgtttacctctcctttatgtgatgtctccaagaagagtccatttaggaaatctaaaatagagtgtccttccccaggagaactggatcagaaagagccccagatgtcacccagcgtagctgcatctctctcctgccctgttccctcaactccccctgaactctcacagagagctacattggacaccgtccctcctccacccccttctaaagttgggaaacggtgtagaaagacctctgatcccagaaggagcatcgtggagtgtcagcctgatgcctccgctactcctggggttggcacagctgacagcccagctgcccccacagactctagagatgaccagaagggactgagcctctctcctcagtctcctcctgaaagacggggctacccaggccctggtctcaggagtgattggcatgcatcctctcctctgctcattacaagtgacacagagcatgtcactctcctcagtgaagccgaacaccatggcattggtgacttgaaaagtaacgtcttatcagtggaagagggtgaggggctaaggacagcagatgctgagaagtcttctctgtctcaccctgggattcccccatctcctccttcctgtgggcctggctctcctctgatgccttcccgtgacgtgcactgtaccacagatgggagacagtgccaggcttcggcacaactagacaacctgccagcatcagcttggcattccacagactctgccagcccacagacctatgaggttgagctggagatgcaagcttctggccttcccaaacttcgaattaagaagatagaccccagctcttcattagaggctgagcccctcagcaaggaggagagctctctgggagaagagagcttcctccctgctctcagcatgcccagggccagcaggtccttaagcaaacctgaacccacctatgtgtcacccccctgcccccgcctctcccacagcacacctggcaagagcagggggcaaacctacatctgccaggcctgtacccccacccacggcccttctagtaccccctctccatttcaaacagatggggttccttggacaccatcccccaagcacagtgggaagacaactccagacataattaaagactggcccaggaggaagagggcggtgggctgtggcgccggctcctcttccgggaggggcgaggtcggtgcagaccttcctgggagcctgtcactgcttgagtcagagggcaaggaccacggccttgaactcagcatccacaggacgcccatcttggaggattttgagctcgagggagtgtgccagctcccagaccagtcgcctcccaggaacagcatgcctaaggccgaggaagcctcttcctggggacagtttgggttgagttccaggaagagagtcctgttggccaaggaagaagctgaccgtggagccaaaaggatctgtgacctgagagaagattcagaagttagtaagagtaaagaggggtctccaagttggagtgcatggcagctaccctccacgggagacgaagaggtgtttgtttccggctccaccccacctcccagctgtgccgtgcggagctgcctctctgccagtgccctccaggctctgacccagtctccgctgctgttccaggggaaaacaccttcctctcagagcaaagaccccagagatgaggatgtggatgttcttccctccactgtagaagactctcctttcagtcgcgctttctccaggaggcgccccatcagcagaacttatacacggaagaagctcatgggaacctggctggaggacttatagccacaaacattactgagcccaaaagatcaaggagtcagccaggaccctgtggacataaagaagttggatgcctggtcccaagcctcttttgccatggtcagtgttcagattgccattagaatgccttagggttttctaattccccttatggatccaatccatctcctggccctgccccttgttggggaagttgcaggaggagaggtggatggcaatgtgattggtgctataactcaggcagcctgggagtcaggaacccagacaaggaatcccattccagcctcaccccaaccatgaccttggcaagtcagggggccactctgcctcatttatgcaaatggagaaaggcgccctccctggggtcccttgagctgctgtaaggctgggctgctgcgacacaggcagcgctttgtaaactgtgaagccatatacgtgaaactgaagagtgcattgggcagtggaagctattttttgccttccctgtgtaacagtaaaatcatctctagtgactgagcactcagtacatttttgtttaatgttgggcctgaggttaactgtgaccatggtccagcttgagtggcttctggagcagccacattttcaaggactgtccaagagccagccagttcagggctcaggcctcacccattgcccactcctggggagaccatcacctggctcatcgtttccaccaagagtgccccacaggagtgccccacagacccgctggaccagcctgctgcgggtcctggccaggggtctggctaacggtgagggctgactctgaactgtctctcagtctccagaaagtgttcaagcctgttgtgttcccaaatctgattcctcctattgtcttgtaaatcaaactctaagtgaaaacttcccatttgtcccttcaaagatttttttttattaaatggttttttaagatcc

SEQ ID NO: 5975 - DNA, 994 bp, Homo sapiens
  source 1..994: mol_type = unassigned DNA
acctgcagtcccagctactgggcagcctgaagcagcaggatggtgtgaacccaggaggtggagcttgcagtgagccgaggtcgcgccaccgcactccagcctgggccacacagcgagattccgtcagaatcagttacttttcgggcacagccccaggccacttactgtgagcctttttctttctcaacaccacattccccacagggaaaacacatttctcacctcaaaagaagacaagacaacgagcaaacaagaaggagcagcaggaggggttctgagccgaggatgccgggcagacatgagggagacacgcacccccgaatccaaccagtgcctcggcacaacgacaaatgtcttcacgtcacagacctttagaggctcctgggcagagcctgaaccagggctcctgactggtctgtttggctcacatggtgttgagattttgccatcactcaatattcagatttcttataaatatccagatttccagcttctcttggaaaatcagaaaaaaacagcactgaactcctaggcccacaaggcactccccagtgaacagatgaaactgtcctctgctgcggggcaggagtctccaggtcacccccatccctccccacctgcctggaccctgaagaagccttctgagtctgtggctcaacgtgcgatgtgcagtgcaagggcctgccccgtagcctgccccgtaggctgccccatagcctgccccgtaagctgccccgtagcctgccccgtaggctgccccgtaggctccatggccactgccccacaaggcctgtctccacaggaatgggaagcggacagggagacgggcagcagctcacatgctgggacaacgcagtgttcaatccattctccatccagcagctccagacatctttccagaacacaaacctgaccccatcacctctctgcttagccactggcttaaactgccaatggtttgcctgcatgtaaaataaagccattctttaccatt

SEQ ID NO: 5976 - DNA, 2742 bp, Homo sapiens
  source 1..2742: mol_type = unassigned DNA
gggcctcggccctggtccaaagtctacccgcctccttgtgacagaagtgcgactgccagctgccgaggcgttcggtcctgctgttgcggccgctgccccagggctgcggggacgctcccggagccctgcctgttccctgtccatccaggccagcagctgaaggagcctcacctgcctcccttctctgagtagcacggatttgaggagaagcagcgaagatgtccagcgagcctccccctccttatcctgggggccccacagccccacttctggaagagaaaagtggagccccgcccaccccaggccgttcctccccagctgtgatgcagccccctccaggcatgccactgccccctgcggacattggccccccaccctatgagccgccgggtcacccaatgccccagcctggcttcatcccaccacacatgagtgcagatggcacctacatgcctccgggtttctaccctcctccaggcccccacccacccatgggctactaccccccagggccctacacgccagggccctaccctggccctgggggccacacagccacagtcctggtcccttcaggagctgccaccacggtgacagtgctgcagggagagatctttgagggagcgcctgtgcagacggtgtgtccccactgccagcaggccatcaccaccaagatctcctacgagattggcttgatgaatttcgtgctgggtttcttctgttgcttcatgggatgtgatctgggctgctgcctgatcccctgcctcatcaatgacttcaaggatgtgacgcacacatgccccagctgcaaagcctacatctacacgtacaagcgcctgtgctaacggagctgggactcgggactcccccgcctgtcagtctggccccctgtgctttgctccctgtgctcagtggtcactttcccgctcccacttggggctgggagccgtgccaccatcccctagaagtcctgtcctcttcaccctgccctacctgagccgctgactcttctggcaaaaattctgttgggatttaaggccaagggtcagtgggtggcagggggctgacaatgagcttgtgtgttgttggtctgcttggtgtgtgtgatcgggaagataagctgggaggggtctcctgctggggtcctgatgcctctgtttccaaacaaggtacaggttcagtccagactctttccccctgggaccaacagcagccagagcagttagccagttagtccccaggcctgtggccacaggcgtttctgacctgctgggccgagaatgggtaagttgtctggagtcaggtgggcccacgtaggacagggtcacaaagcctgggtttgtttctgggtactttgcgcctctggggtgctagaggtggggcatggtggctggaagtaaaactgccaactctggccctcagaactctcaggtatagaagcccaggatgtctaataccctgtcccagtgcccgagagctgcctggtgtcaggtagagaggacactgtacctgggtgaatgatcagaccctggtagctaagaaggaacttgtccctttgagtcagtgtgcagaccccctttcaggccatgcctctgtgaaccctgtattgctggggccggaaggagcccctgagcctagccccttcccgtctgccctgtgtcctcactgcgtgtgggtatgacctctgcctggtggctggtgtatcccaactgggcaagagatggcagagggtcccccttgtgggtgcgcttggatgtgcagagccttctccatggattttcttccctgtaagtgccgggcccctcaccccagctgacaggctgttgctgtgcctgctcacacctgctcctgcaggcacactgggctagggacgaggaaggagcagccacaagtggtagaactgccttggtggacaccagcctcgccctgtctttatttcctgaatggtttgtgaacttgctcacctggaccactgtatcctgccactgtccttcctggtctcgcactgccactgcatggcctcctgtcactgtgaatcgtggcccagtctcagtttgtagtttctcattaaattggccctttcactcccccgccctgggcctctgctctcttgcctggcttccttcttttttgagggaaagagggtggggctgcaggcagtctactggcaggacgggaggctgagtcctcagggtctcacaccctcagtgctgatgccatgccaactgcctgggacaacaccaacacgtaaggacctaattaaaccaaaccagagtcgggtgtagaccagccctgggatttccagctgtgactgggccagggcacacgttggtctcggcagtggctgtaaggtcaccttccttcctctgatgctggtttcaaccatctatatatggcatccacgcatgggatctgcaagctggagccctcctacccgcaggcttgagcacagcatcatccagccctggggaggcgcacccttaagcaacacagactgggctgaggctgacaggcagaagactaacagagcgcagtctgcacacgcaggttctgggcgacctctggccctggccatctctgcactaactcatctgaattatgaaggtggcagtcttggtcagtagtttaaagagtttccctactttttaaccctttttgaaataaaacttttacaggtagtagattcctattaataaaattatttaagttcatgtttctcttttagagaatgaattgtttaaa

SEQ ID NO: 5977 - DNA, 2011 bp, Homo sapiens
  source 1..2011: mol_type = unassigned DNA
tatacgcatgcgacttcccggtggccatctttactgtgggctgaagcctgtgcgcttactcgcgcatgtgcaagccttccctcgctttcctcttccaagtagccttgcctagagcggagcctcccgcgccatttctgtgcgcctgcgtagcgtgaccctgcgcagcctgggaggcgggtcttagctccaggtgcgtacggcatctgacttgacgtggcccacaactgaaaggtctggggagaaggcgccgtgtccgggtgtggagaggggcgtcgtggaagcgagaagagtggcccgtccctctcctccccctttccctctttcggaaagtggtttctgcggggcccgggagcctcggagtaccgaacctcgatctccggggcggggtccttggtggggactgagcgccccctcccggggacgggcggtctggccgcggagtcccctgcgggagcgtgattggctggaaacggtcccgaacccccaggggagcccgatccctgggggaccctggcttcggactccagtatctgtcgtcgcagggtccctgccctagtggcctatgtcccttgctcggggccatggagacactgcggccagtacggcggcgcctctgtctgaagaaggggaagtgacctccggcctccaggctctggccgtggaggataccggaggcccctctgcctcggccggtaaggccgaggacgagggggaaggaggccgagaggagaccgagcgtgaggggtccgggggcgaggaggcgcagggagaagtccccagcgctgggggagaagagcctgccgaggaggactccgaggactggtgcgtgccctgcagcgacgaggaggtggagctgcctgcggatgggcagccctggatgcccccgccctccgaaatccagcggctctatgaactgctggctgcccacggtactctggagctgcaagccgagatcctgccccgccggcctcccacgccggaggcccagagcgaagaggagagatccgatgaggagccggaggccaaagaagaggaagaggaaaaaccacacatgcccacggaatttgattttgatgatgagccagtgacaccaaaggactccctgattgaccggagacgcaccccaggaagctcagcccggagccagaaacgggaggcccgcctggacaaggtgctgtcggacatgaagagacacaagaagctggaggagcagatccttcgtaccgggagggacctcttcagcctggactcggaggaccccagccccgccagccccccactccgatcctccgggagtagtctcttccctcggcagcggaaatactgattcccactgctcctgcctctagggtgcagtgtccgtacctgctggagcctgggccctccttccccagcccagacattgagaaacttgggaagaagagagaaacctcaagctcccaaacagcacgttgcgggaaagaggaagagagagtgtgagtgtgtgtgtgtgttttttctattgaacacctgtagagtgtgtgtgtgtgttttctattgaacacctatagagagagtgtgtgtgttttctattgaacatctatatagagagagtgtgtgagtgtgtgttttctattgaacacctattcagagacctggactgaattttctgagtctgaaataaaagatgcagagctatcatctcttaaaaggaggggctgtagctgtagctcaacagttaggccccacttgaagggagaggcagaattgtactcacccagattggaaaatgaaagccagatgggtagaggtgccctcagttagcacctgtcccatctcgggccctccaactcctcccagtcccactccagtgcagccagctggctccaaggtagaaacccatgagcactcagggagcagtgtgccttcagctgcagcagaagcagcccggaggataaaatgagaaccagctgcacacgggccctttaactcccaagccccacccctgggcttggcctgccttgccctgccg

SEQ ID NO: 5978 - DNA, 2254 bp, Homo sapiens
  source 1..2254: mol_type = unassigned DNA
gagggcgcttccggcacagcggaactccgggtgccggttgaggttgctggtggacctgctctggtggtcttggatgaggccccatgagcgcggcgcccctggtgggctacagcagcagcggctccgaggatgagtccgaggacgggatgcggaccaggccgggggatgggagccaccgtcgtggccagagcccccttcccaggcagagatttccagtacctgacagtgtgctgaacatgttcccgggcaccgaggaggggcctgaagatgacagcacaaaacacgggggacgggtgcgcaccttcccccacgagcgaggcaactgggccacccacgtctatgtaccatatgaagccaaggaggagttcctggatctgcttgatgtgttgctgccccatgcccagacatatgtcccccggctggtaaggatgaaggtgttccacctcagcctgtcccagagtgtggttctgcgccaccactggatcctccccttcgtgcaggctctgaaagcccgtatgacctccttccacagattcttctttactgccaaccaggtaaagatttacaccaatcaagagaaaaccaggacctttattgggcttgaggtcacttcagggcatgcccagttcctggacctggtttcagaggtggacagagtcatggaggaattcaacctcaccactttctaccaggatccttctttccacctcagcctggcctggtgtgtgggtgatgcacgtctccagctggaggggcagtgcctgcaggaactacaggcaatcgtggatgggtttgaagatgctgaggtgctgctgcgcgtgcacactgagcaagtccgctgcaagtctgggaacaagttcttctcgatgcctttgaagtgagcaccagaggccttcctcctccagggccctctgcagaccaggctgagatggaggaacctgctaaaatcgatggagatgcttctagcctcccagtaggaggccccagccatgccttcaacctggcaggaggtgtagccactcctcatcctccctgagtgctgatattctctctctctctttctcttcctcttctttctctctcttctcctctctttctctcctctgtctctcttcctctcctctcttcctctcttctctcttcctctcctctctctcttcctcttctctctcttcccctcctgtctctcctcccctcctctcttcctctcctctctcttcctctcctctctctacccctcctgtctctcctcccctcctctctcttcctctcctctctctcttcctctcctctctcttcccttcctgtctctcttcccctcctctctctcttcctgtcctctatctcttcccctcctctatctcttcctctcctctctctcttcctctcctctctctctcttgctttcttctctctctcctgtctcggctgttgtgggttgcaggttgggtgctgctgttgtggtccttcccagaaactgccagtagagggcagcctgggcatcctaatgcttactctggttgttacacaaagaaaatattggggtcactggcgagcccacccacactcaccagaatctccactgtagtccccctaacaaacagcccttcacttcctctcccacttcagcaatttgtattttgatgccattggcctcagatcagagtgttttaaatcatcacgccctggcttatccctggtcgagccaggacacggggtgcttcagtgggtctgtcaccctctctccttgaagcatgttgcttttatttatttacttttactctcaccctgctcctgtaccagcaggggccacttcaaagccaaggtacagggtgataacttgtggtccagcatcagttttctccacttctttctcccactcacccccagcaaggtgcctggggagacttgagcagatgtttcattttggcctggccagtggctgaaagccaggcctccaatgcactgtgacctctggcttccccagcagctttcccagagaggcagaggggccttccacagcccgggttctcctgctgcctcctgcctgctgcagctgcaggcattctgaggggcaacgtggaggaagggccagggatgcatgggattttaattgtttcatcacaccttccccgtggcaaagaaacagtcagtcctcttcaggtgtcttctggatttctggtgatggacagagaaatctttttacagtttcaaattatgttcaacaaataaaaattgcattttttattttgga

SEQ ID NO: 5979 - DNA, 1201 bp, Homo sapiens
  source 1..1201: mol_type = unassigned DNA
aactccgggtgccggttgaggttgctggtggacctgctctggtggtcttggatgaggccccatgagcgcggcgcccctggtgggctacagcagcagcggctccgaggatgagtccgaggacgggatgcggaccaggccgggggatgggagccaccgtcgtggccagagcccccttcccaggcagagatttccagtacctgacagtgtgctgaacatgttcccgggcaccgaggaggggcctgaagatgacagcacaaaacacgggggacgggtgcgcaccttcccccacgagcgaggcaactgggccacccacgtctatgtaccatatgaagccaaggaggagttcctggatctgcttgatgtgttgctgccccatgcccagacatatgtcccccggctggtaaggatgaaggtgttccacctcagcctgtcccagagtgtggttctgcgccaccactggatcctccccttcgtgcaggctctgaaagcccgtatgacctccttccacagcccccatccaggacctcattgcctcattggaaccaaagatgcccctgtcacccaggaaattccaaaggatttaggagctctgcgtcaggagccaggatcacagaccagataatagaacaaaagatgctcctagcacccctgctgcttaggaaatgacacaggttttaggatctctgtgtcaggaactggaggctgagaccaacacatatgttatcatttcacagtgataggtcaaacaggtcatggtaatggtgggagctacctcactgggggcctatgggggtgaaaggagatcatgggtgccctcagcacaccacttgggtgaagggttagtaccagaccccacttctggttttgtctgccagcctggggctttttttttccccttacctattagattatttcataactcttttcctaccagaaatgcatctcctgctagactggtccagatcaaaaccctgctctttcactgaggctctcccggttggcatatcctgcagaatccctccgtccagagatcagtcggtcctgtggttgtttcacaggtgactcctctgtccagagatcagtcggtcctgtggttgtttcacaggtgacacctccgtccagagatcagttggccctgtggttgtttcacaggtgacccctccatccagagatcagttggtcctgtggttctttacccctg

SEQ ID NO: 5980 - DNA, 1199 bp, Homo sapiens
  source 1..1199: mol_type = unassigned DNA
agcggaactccgggtgccggttgaggttgctggtggacctgctctggtggtcttggatgaggccccatgagcgcggcgcccctggtgggctacagcagcagcggctccgaggatgagtccgaggacgggatgcggaccaggccgggggatgggagccaccgtcgtggccagagcccccttcccaggcagagatttccagtacctgacagtgtgctgaacatgttcccgggcaccgaggaggggcctgaagatgacagcacaaaacacgggggacgggtgcgcaccttcccccacgagcgaggcaactgggccacccacgtctatgtaccatatgaagccaaggaggagttcctggatctgcttgatgtgttgctgccccatgcccagacatatgtcccccggctggtaaggatgaaggtgttccacctcagcctgtcccagagtgtggttctgcgccaccactggatcctccccttcgtgcaggctctgaaagcccgtatgacctccttccacaggacctttattgggcttgaggtcacttcagggcatgcccagttcctggacctggtttcagaggtggacagagtcatggaggaattcaacctcaccactttctaccaggatccttctttccacctcagcctggcctggtgtgtgggtgatgcacgtctccagctggaggggcagtgcctgcaggaactacaggcaatcgtggatgggtttgaagatgctgaggtgctgctgcgcgtgcacactgagcaagtccgctgcaagtctgggaacaagttcttctcgatgcctttgaagtgagcaccagaggccttcctcctccagggccctctgcagaccaggctgagatggaggaacctgctaaaatcgatggagatgcttctagcctcccagtaggaggccccagccatgccttcaacctggcaggaggtgtagccactcctcatcctccctgagtgctgatattctctctctctctttctcttcctcttctttctctctcttctcctctctttctctcctctgtctctcttcctctcctctcttcctctcttctctcttcctctcctctctctcttcctcttctctctcttcccctcctgtctctcctcccctcctctcttcctctcctctctcttcctctcctctctctacccctcctgtctctcctcccctcctctctcttcctc

SEQ ID NO: 5981 - DNA, 976 bp, Homo sapiens
  source 1..976: mol_type = unassigned DNA
acagcggaactccgggtgccggttgaggttgctggtggacctgctctggtggtcttggatgaggccccatgagcgcggcgcccctggtgggctacagcagcagcggctccgaggatgagcccccttcccaggcagagatttccagtacctgacagtgtgctgaacatgttcccgggcaccgaggaggggcctgaagatgacagcacaaaacacgggggacgggtgcgcaccttcccccacgagcgaggcaactgggccacccacgtctatgtaccatatgaagccaaggaggagttcctggatctgcttgatgtgttgctgccccatgcccagagtgtggttctgcgccaccactggatcctccccttcgtgcaggctctgaaagcccgtatgacctccttccacagattcttctttactgccaaccaggtaaagatttacaccaatcaagagaaaaccaggacctttattgggcttgaggtcacttcagggcatgcccagttcctggacctggtttcagaggtggacagagtcatggaggaattcaacctcaccactttctaccaggatccttctttccacctcagcctggcctggtgtgtgggtgatgcacgtctccagctggaggggcagtgcctgcaggaactacaggcaatcgtggatgggtttgaagatgctgaggtgctgctgcgcgtgcacactgagcaagtccgctgcaagtctgggaacaagttcttctcgatgcctttgaagtgagcaccagaggccttcctcctccagggccctctgcagaccaggctgagatggaggaacctgctaaaatcgatggagatgcttctagcctcccagtaggaggccccagccatgccttcaacctggcaggaggtgtagccactcctcatcctccctgagtgctgatattctctctctctctttctcttcctcttctttctctctcttctcctctctttctctc

SEQ ID NO: 5982 - DNA, 2586 bp, Homo sapiens
  source 1..2586: mol_type = unassigned DNA
gcggagctggagccggagctgaagccggagccgggttggagtctgggcgggggccgggccggagcgggctccagagacatggggtcgaccgactccaagctgaacttccggaaggcggtgatccagctcaccaccaagacgcagcccgtggaagccaccgatgatgcctatgaccctgtgggctacgggatcccctacaaccacctgctcttctctgactaccgggaacccctggtggaggaggctgcccaggtgctcattgtcactttggaccacgacagtgccagcagtgccagccccactgtggacggcaccaccactggcaccgccatggatgatgccgatcctccaggccctgagaacctgtttgtgaactacctgtcccgcatccatcgtgaggaggacttccagttcatcctcaagggtatagcccggctgctgtccaaccccctgctccagacctacctgcctaactccaccaagaagatccagttccaccaggagctgctagttctcttctggaagctctgcgacttcaacaagaaattcctcttcttcgtgctgaagagcagcgacgtcctagacatccttgtccccatcctcttcttcctcaacgatgcccgggccgatcagtctcgggtgggcctgatgcacattggtgtcttcatcttgctgcttctgagcggggagcggaacttcggggtgcggctgaacaaaccctactcaatccgcgtgcccatggacatcccagtcttcacagggacccacgccgacctgctcattgtggtgttccacaagatcatcaccagcgggcaccagcggttgcagcccctcttcgactgcctgctcaccatcgtggtcaacgtgtccccctacctcaagagcctgtccatggtgactgccaacaagttgctgcacctgctggaggccttctccaccacctggttcctcttctctgccgcccagaaccaccacctggtcttcttcctcctggaggtcttcaacaacatcatccagtaccagtttgatggcaactccaacctggtctacgccatcatccgcaagcgcagcatcttccaccagctggccaacctgcccacggacccgcccaccattcacaaggccctgcagcggcgccggcggacacctgagcccttgtctcgcaccggctcccaggagggcacctccatggagggctcccgccccgctgcccctgcagagccaggcaccctcaagaccagtctggtggctactccaggcattgacaagctgaccgagaagtcccaggtgtcagaggatggcaccttgcggtccctggaacctgagccccagcagagcttggaggatggcagcccggctaagggggagcccagccaggcatggagggagcagcggcgaccgtccacctcatcagccagtgggcagtggagcccaacgccagagtgggtcctctcctggaagtcgaagctgccgctgcagaccatcatgaggctgctgcaggtgctggttccgcaggtggagaagatctgcattgacaagggcctgacggatgagtctgagatcctgcggttcctgcagcatggcaccctggtggggctgctgcccgtgccccaccccatcctcatccgcaagtaccaggccaactcgggcactgccatgtggttccgcacctacatgtggggcgtcatctatctgaggaatgtggacccccctgtctggtacgacaccgacgtgaagctgtttgagatacagcgggtgtgaggatgaagccgacgaggggctcagtctaggggaaggcagggccttggtccctgaggcttcccccatccaccattctgagctttaaattaccacgatcagggcctggaacaggcagagtggccctgagtgtcatgccctagagacccctgtggccaggacaatgtgaactggctcagatccccctcaacccctaggctggactcacaggagccccatctctggggctatgcccccaccagagaccactgcccccaacactcggactccctctttaagacctggctcagtgctggcccctcagtgcccacccactcctgtgctacccagccccagaggcagaagccaatgggtcactgtgccctaaggggtttgaccagggaaccacgggctgtcccttgaggtgcctggacagggtaagggggtgcttccagcctcctaacccaaagccagctgttccaggctccaggggaaaaaggtgtggccaggctgctcctcgaggaggctgggagctggccgactgcaaaagccagactggggcacctcccgtatccttggggcatggtgtggggtggtgagggtctcctgctatattctcctggatccatggaaatagcctggctccctcttacccagtaatgaggggcagggaagggaactgggaggcagccgtttagtcctccctgccctgcccactgcctggatggggcgatgccacccctcatccttcacccagctctggcctctgggtcccaccacccagccccccgtgtcagaacaatctttgctctgtacaatcggcctctttacaataaaacctcctgctcc

SEQ ID NO: 5983 - DNA, 3271 bp, Homo sapiens
  source 1..3271: mol_type = unassigned DNA
gcggagctggagccggagctgaagccggagccgggttggagtctgggcgggggccgggccggagcgggctccagagacatggggtcgaccgactccaagctgaacttccggaaggcggtgatccagctcaccaccaagacgcagcccgtggaagccaccgatgatgccttttgggaccagttctgggcagacacagccacctcggtgcaggatgtgtttgcactggtgccggcagcagagatccgggccgtgcgggaagagtcaccctccaacttggccaccctgtgctacaaggccgttgagaagctggtgcagggagctgagagtggctgccactcggagaaggagaagcagatcgtcctgaactgcagccggctgctcacccgcgtgctgccctacatctttgaggaccccgactggaggggcttcttctggtccacagtgcccggggcagggcgaggagggcagggagaagaggatgatgagcatgccaggcccctggccgagtccctgctcctggccattgctgacctgctcttctgcccggacttcacggttcagagccaccggaggagcactgtggactcggcagaggacgtccactccctggacagctgtgaatacatctgggaggctggtgtgggcttcgctcactccccccagcctaactacatccacgatatgaaccggatggagctgctgaaactgctgctgacatgcttctccgaggccatgtacctgcccccagctccggaaagtggcagcaccaacccatgggttcagttcttttgttccacggagaacagacatgccctgcccctcttcacctccctcctcaacaccgtgtgtgcctatgaccctgtgggctacgggatcccctacaaccacctgctcttctctgactaccgggaacccctggtggaggaggctgcccaggtgctcattgtcactttggaccacgacagtgccagcagtgccagccccactgtggacggcaccaccactggcaccgccatggatgatgccgatcctccaggccctgagaacctgtttgtgaactacctgtcccgcatccatcgtgaggaggacttccagttcatcctcaagggtatagcccggctgctgtccaaccccctgctccagacctacctgcctaactccaccaagaagatccagttccaccaggagctgctagttctcttctggaagctctgcgacttcaacaagaaattcctcttcttcgtgctgaagagcagcgacgtcctagacatccttgtccccatcctcttcttcctcaacgatgcccgggccgatcagtctcgggtgggcctgatgcacattggtgtcttcatcttgctgcttctgagcggggagcggaacttcggggtgcggctgaacaaaccctactcaatccgcgtgcccatggacatcccagtcttcacagggacccacgccgacctgctcattgtggtgttccacaagatcatcaccagcgggcaccagcggttgcagcccctcttcgactgcctgctcaccatcgtggtcaacgtgtccccctacctcaagagcctgtccatggtgactgccaacaagttgctgcacctgctggaggccttctccaccacctggttcctcttctctgccgcccagaaccaccacctggtcttcttcctcctggaggtcttcaacaacatcatccagtaccagtttgatggcaactccaacctggtctacgccatcatccgcaagcgcagcatcttccaccagctggccaacctgcccacggacccgcccaccattcacaaggccctgcagcggcgccggcggacacctgagcccttgtctcgcaccggctcccaggagggcacctccatggagggctcccgccccgctgcccctgcagagccaggcaccctcaagaccagtctggtggctactccaggcattgacaagctgaccgagaagtcccaggtgtcagaggatggcaccttgcggtccctggaacctgagccccagcagagcttggaggatggcagcccggctaagggggagcccagccaggcatggagggagcagcggcgaccgtccacctcatcagccagtgggcagtggagcccaacgccagagtgggtcctctcctggaagtcgaagctgccgctgcagaccatcatgaggctgctgcaggtgctggttccgcaggtggagaagatctgcattgacaagggcctgacggatgagtctgagatcctgcggttcctgcagcatggcaccctggtggggctgctgcccgtgccccaccccatcctcatccgcaagtaccaggccaactcgggcactgccatgtggttccgcacctacatgtggggcgtcatctatctgaggaatgtggacccccctgtctggtacgacaccgacgtgaagctgtttgagatacagcgggtgtgaggatgaagccgacgaggggctcagtctaggggaaggcagggccttggtccctgaggcttcccccatccaccattctgagctttaaattaccacgatcagggcctggaacaggcagagtggccctgagtgtcatgccctagagacccctgtggccaggacaatgtgaactggctcagatccccctcaacccctaggctggactcacaggagccccatctctggggctatgcccccaccagagaccactgcccccaacactcggactccctctttaagacctggctcagtgctggcccctcagtgcccacccactcctgtgctacccagccccagaggcagaagccaatgggtcactgtgccctaaggggtttgaccagggaaccacgggctgtcccttgaggtgcctggacagggtaagggggtgcttccagcctcctaacccaaagccagctgttccaggctccaggggaaaaaggtgtggccaggctgctcctcgaggaggctgggagctggccgactgcaaaagccagactggggcacctcccgtatccttggggcatggtgtggggtggtgagggtctcctgctatattctcctggatccatggaaatagcctggctccctcttacccagtaatgaggggcagggaagggaactgggaggcagccgtttagtcctccctgccctgcccactgcctggatggggcgatgccacccctcatccttcacccagctctggcctctgggtcccaccacccagccccccgtgtcagaacaatctttgctctgtacaatcggcctctttacaataaaacctcctgctcca

SEQ ID NO: 5984 - DNA, 8946 bp, Homo sapiens
  source 1..8946: mol_type = unassigned DNA
aggaacattgagcatcctgactttgaaggagtctctgtggtgtttttgtgctaccatacatggggaataatgatgtgaggcagagggagagggaatgaatgggagagccaagagggaagagcgagccggggggaaaggagcgcgcagtgtttcctgctgcggttaggacctcacgccttgccagtacagagctcggtggcaagagccgctgggagctgctcccatcagttagaggatgtggagagggagcaccagaagaggacagcccgcagcctggctcgcagcctgagggacgctgtgggtgctcccagccgggcgagcacgctctgggagcggatctgcaggggagaagcacgcgagcctaacgtgagcgtcccgcctgtcgcgtgtcctgccttggtaagcgccctctccggtccttccacactgaaagcttccagcagagatcaagggaaggagtattgtgtgagacttgcagatttcctcctttctgtctggactggtttgatatttgcctgttgaaaagattactgaacgcagtgtgacaagatgagccgtctagctgcgttctgcttgcctgtgtgtgtgacacgtccaggtgtgaggccaaacctgagaagtgcagactgctcactgatagacgttgctgtaaacagtagtgccctgggtgtacagctggtctcaggatcggagaccccggacttattctctgctcggtgacacggccggcttcctgccgcagagctcctggtttctgttgatggcagttgataattggtagccacagtctgcggtcggagccacagcatttgagtctagcacctggggtgggccctgctgatacagtagagagagagtgaacgaggcagacagaaacacaccccccccccctccacgctcacacactctcccacaccccatgccagctataactgcagctctgagctgcctggagaggagattgccggaagctgaagggatgctttgaacgtgggggggctgcgtcacagttggactcccacttgcagaggacctgattatgtccagtgaccacctgaacaacagcacactgaaggaggctcagttcaaagacctgttcttaaaaaaagcggagctggagttcgcccaaatcatcatcatcgtcgtggtggtcacggtgatggtggtggtcatcgtctgcctgctgaaccactacaaagtctccacgcggtccttcatcaaccgcccgaaccagagccggaggcgggaggacgggctgccgcaggaagggtgcctgtggccttcagacagcgccgcaccgcggctgggcgcctcggagatcatgcatgccccgcggtccagggacaggttcacagcgccgtccttcatccagagggatcgcttcagccgcttccagcccacctacccctatgtgcagcacgagattgatcttcctcccaccatctccctgtccgacggtgaagagccacctccttaccaggggccctgcaccctgcagctccgggaccctgaacagcagatggaactcaaccgagagtccgtgagggccccacccaaccgaaccatatttgacagtgatttaatagacattgctatgtatagcgggggtccatgcccacccagcagcaactcgggcatcagtgcaagcacctgcagcagtaacgggaggatggaggggccaccccccacatacagcgaggtgatgggccaccacccaggcgcctctttcctccatcaccagcgcagcaacgcacacaggggcagcagactgcagtttcagcagaacaatgcagagagcacaatagtacccatcaaaggcaaagataggaagcctgggaacctggtctgattccttccaacgtgcacttcagctggagaaagaaaccaagaagggaagcggccgctgggcccctcctgcgcacagtgttgttcagtttcacatggtacaaataagtaaaaccaaatgagcaaacacggtctttgtttctgattccttttaggggaattgcatgcaaactagactgaaatgatacaaacttccatctggtctgaccgcaaacagtgtttatttggggacaggggttgggatgggggtgtgggcaggggaaaacagagaacgggatgctttgaagataccatgaaataaaacccacagaggtatttgatgtatttaattgtgaaaggagactttgcagataaatgaggccagaatggcatgttttataattaactgaataaagaaggaagcattattatatattattgtggggaagaaccagccagttcgctttttctcctaaggtgtggaacttttattttgttttaaaaatatgaatcaaaattcctgtgttgtgtgccaaggtataaagtggagaagttagatgagtgcaaggagctcctttgtgttgtgatgatgtgttttaaaagttgcactatcttaatgttgaaaatatttacaagggaactgttttacgtgaagttctgtatgttgtcttttcacctgtggattgtaatcaggcccaaggaatatcctggagtggtccccagaagcatccaagaaaagatatttggggacgtagcctaacattttaccaacttacgtaaatcaaaaaagtcattattgttgcaggagtttgcatcaaatagcagtgcatcgctgaagcttttggagacttttggatggaagataagatagggaagattaagttccagcatttctgacttgttattttgagttactctgctactcttaggctgcatagtttatgagaaaatgaacacatgcatttatggatccagtatcatgcagtgctgccctcatcctccagcagtgcaatttcttcagtaatttagatttttttcactatagcatgaaatatattcaaatacataccttattttatgcaataaattgtttaaaatgcaaggtggttattctgcatactgttgaaatatgtgactcctcagtatattcccattgcctctccccctttcctcgacagcttagttcagttctgcagggctgctcagttcacaggaggctcccagcagccaccccacatccagcctacacagaacttcgtgtgggagtggtgtgggtggtggtttcttatgctttggaagcccctagaaataatgacggaagaatgccatgttgctgatcgtggtaataagccattgtgggttattgtatgtcactagtattagcatagcattcttaaaggaatgcagtgctcaaaacctacccaaattcccgcaggattctaccaaacccttccccaggccagcttttgtactgaaggcaagaactggacagtcagagaacagtggagggggcaagtgactgaagagcaccgggtaaaaagcacaacatgcagttaaaatgcaactagaaaactaattttaaatattgttagttttaatattcctgatatttacaaatattcattcttatatacaatgaaaaaaataactttcttctgcagatgtaagcactggcttttataagagcagcagccaacacgtttagcagacactgcgcgtggagaagggcttatctgcagtacactctgccatgtggagggtgggcctctgtggcctcttcacataacaagatgagctggaatgatgattccatgactcccacctatgcagccttaaagccaaatccgcgtgtgtgtgtttgtgtctgtctgtgggtctcgaaggtgatccgtcggtgcggtggctctgtgctgtaactggagagactgttccaaaccccaagagttgtctgatcctagtctgttcccttctgcttcttacctctgtagataggtcactggtttttgtttgtttgttttgaggattggaatttccattacattcatcctttgcacacagtaacatccacagaactagtccaactcttaaaaggagagaggaaaaacacaggcaccagttgtcagctcatgcttacaacctgtgtggaagtatatacagttgagagtcacagtggaggttctgagactggattcagtcttgttccagtgacagttggaaggcctctgctggagagacaccagctctcagggcagagattggcttggggccagaaggaccctccccaaccctggagacaccctgaaggttcactggctctccagattagcctctcttcctctgtcaggcaaagatgaggagcccgtgttcccatcgggccctgctggcagggacttgcagtggattcttggtcaggtgtgcccacagatgcggaggcgaggtgagtgattccatcatttcagttctcacctgcagttttggtgaagcaggagatgcaccccacagctctagctctcaaatggcttcacagtccttacttctctacctgcctcaagaaggggctcagagcagagacttgtgaattccttagtaactgtgagtatatgaatgtgttgcacatgtccacagtattggcgagataattacataattcagatacctttaatcatctttcaagaaagaggctcctcccattcaaccaccctagagaactgcctttgttaaatagttatttaaagactcatacatatcaaaccatgactttgaaaggtcttcgaggctggggctctgtaatgaattagtttaaaagccaaggtcataacatgaattgatggtcaatttcccttcagcagaaggaaaaggtgatttagatcagtagctcttttgaaggttgtggctgacctgttcataccgtgtcgcctcatggctagtgtggcgttgaaagagtagcgactgggaagatacaacttacacagtggggcctattgttctttcaagaaccctttttttagcttatagaacccatgggtccagtttagtaacgagtgatttaggcaatcaatgataggtttataatcttagattattccagcaaagtgtggattgcattgttaggaagaacatttggtgggaatgaacactcctgggcataccgctgacttttgtcccttgttcccggtgtaggagacccaaggcatcttgaatcccatctataagaacacaatcttccagcatacgtttgctttttcagaaactctagcattctctttaaatactgacgcaatccttaatggaaaagagatttcatgaagcaaattatgtatttcaatagttcttctatttttagtgtccaaaatttactaatacagaagcttgacaagcatgtcctcaccctccccaccacataaacacatggacacacacccaagccacaagaaatcccaagagagcagaagcgaatttttaaaagatttatcgtgaggactgcatttccattcactaattttggctcaaacttatgaggcaggaaataggggccaacagtaaatgggggaggcctcctgacaccagcagaggaattttgtacccaggcgaggacttcttgaacttctgcgtatctccgtttgatctctttcacctttatttcatcttcataagaatgagaaaggctcaaaaggaagcacttttagaaatcttctctgacctagaagaatccatccaaatccctgccttcctctctgaaccaacagttcccttctctgacaggggccatcctctatcttccatccagcggctcttctttttaggaaggctctggtgcagagcacttcaaatatgtcctcaggccagatactgattgctagtagagagacacccggcacccagtccgaagccctccctcaaaggaccggctcatggcgttggtcactggcaggctcagagacattctgctgtgggcgcagggagcccggccccccatgcagccatgactggatgcgcccccatctcgggggcttgctgcactgcttgtttattgaattttgctacttagaatggcaacattaactttgtgtaccattcattttttaaaaattttccaaagctcggcagtgtatgaaagaaaaaactgggaaagatacttggtttctgttaacttttgtgttgcttgcttaagtgattaaagccagtgcttggagccaagccttcatgccacgaacatgctccacagcctgccctttgctctcctgctcacactgaccaagaatgccgcgtgcttggcctactgaggtgaaaggacaattgaatgacaggtgggcaaagggagaacttccccttcttggtgcgaggaaagtcacaaatttaaaaatgttgcttccagcccagatcctaaatgctagttctcagcagctgcgtggcttaccgttcgccatttccaccaccgccagctgccagcaccgctacagatcacagagatgtgaacagacaatggaaagcactcttagccttgcagtggtctacattttttaggaaccaatatttcagcattctttattacccggcacgctgtgtcctttgcagagttcaagtttatgttactgccagggtcagacagtcatttgctgctgctgctgctgctgctgcttctcgaactggatgcattaggaagctgctgtctgagtgtaggaatgtcttgctaagaaagcaatgtcttccttcatccttttctttcttccctctgcgtgtccttgtttttgtgtaatgcgggagagggttagagctatagagattatatatacactatccgtgcacattatatatatgtagatatacccctatcatgtcagagatctgcatgtcagtttttcagcaactaaggtgcctcatgttctgagttcagcagatataggaaccaagccgccccctcctgcacttgatgctcccacctttgttgtgcctcacttaaaatggtgcttttttcagttgtctgtcttttcttatgtttttatttgtaaggtgctgtatataagttgaatatattatgcacatatcctacccaatgggtagaacaaaaagttgttaatactgtaatataatgtatagatgataccaattttaacagaaatggcatagaatttgtgaatgcctatgtgctttgtcctcttttgtaaggaaatttgcaaatggatgcatacagattaaagtctatgtagtttattttcctattaaatatcaatattataacacaagagaaagaagtgtgaacaaacaagcaacagtttatgaccagcgtatatatagcaatggaaagttgcatctttgctgtgaaaacactttaaagaaaatactttttaaaaaatcccacagctttttggttgccactagacgcttcttattttaatcattttagtaatgctcagctggaccagtgttagttatatttgagtcagaaaaatgttgtttttcaacttgctttataatctcctgcatctatctcctgctgtagcatcacgaaggtgtcaggcaacagtgaaaagtgcacatttttgttgttgcagaaactgtgtcagaggaataagtaaatcagcctgcagcagaagactttgttcagctccagaggcatctgtgaccgtctgtgtccaagtctctctgtgcctttttcttttacaaactgaagctgtggagccaatgaagtaacagtagagattgtagggaaagaatacctcaggaaaaacaaatacacttacaagaagaccctgttcttagaaaatgtgtttagttatgggttagcactagaagagacttggctgtcagccagccaagtgaaggacctctcatccattcccattcatgtcccatcataatacggacccaaaaagcaaactcggttttgccatcagttagaaattacgttttggattgtatattgttacatctctcttccggcttagtttttagtgtctgattgtgacctctgcatttatcttcaaataccctaattttaaaacaaaagaacaagaaaagtttataacaccatgttcactaaaaccacggttgaatcttgggtgtgggcatcctttcgagtgttgtccataagagcagttcgtggaattttgcccatctgacccatattatcagcttattctgccaccagagtagagtctaataaattccaaagtttttatttgctccatggtgtatgttctgactttgaaaatgtcagattctataatcatacccctaacatccaggaaacaaatgacagattatctttaaactgaaattgactctacaatgcaacccttaatgctgaatggattaaaaaagtcagcccttttagtatctgtttgaaagggccgtaaaaagttgacacttttgttgttgtggatcctgcgtgtctagacccacgtgttgtttccatcgtatactgtagggtgcaccccttgggattcatcattaagaactgaggctcactgttgtcagaaacaaagctcccaccccccaggttcaaccttgtgggagaactgttgagcatgagaatgttctagactcagaggtactaaaatttgttaccacatcattgcttcctttctacaggacgaattgaggcttaaactttactgttaatgatactggttcattttaatgtgcttgttggtatgttgctatttttcatttcatagctttcaaaaatcatgctaattgtatacttgtctagtttaaggctattttaaaatatgtacaatactattcacagcatttagttcgtttaatttttattataaagcaatctactaaaaaagtacaactgtatttgaacttttcaatagttgtttgtgagctatgataatcaaaagtcattaaagtcttttttaacaaacattcgtgcttacttttcaacataattcccagttatatacagaaaaagatttccacctgtcacgtatctgcctcttttacctgagcaatggtgtagttcttagacctaaggtctgtaattgcaatacttttaaagaaagatgttgctctaagtgctgtttgttagttatgaaatcagatttttctgcttgttcttaatgctgtggtcaaaccatagcacaaaatcattaaaaataatcagcggcatac

SEQ ID NO: 5985 - DNA, 8686 bp, Homo sapiens
  source 1..8686: mol_type = unassigned DNA
gctgggtctccgagccccggaggaagcaggcgtgtgttgaatttctctctgcccctcaccttggaataaacaggaagcgacaagcacccagcccggcccggcacttgcctttgtgaaggggtctgccctgcacagcctttaggaagcttcctcgggaccccttcccggtgcgccgccccgggtgggcctgggggcgcgccctcggttcaagctctacgttcgtgacatcaaacctcctgttgggccatttccgagaactcccatcagtttctgtatagtgtaaaagtttcagaggcggagcacagagagctgcggctgggacaaggagcacccgcgtgcaggtgcgaccctgcaggatgctggcagcggcgtggccaggggcgcccgtgttctgagggcctgagggccagcccctccacccgcgccatggcctccgcgccctggctggacggctgacgggagcagggaccgccgccgcccaggtgccacacccaggtaccgcccgcccgcgcgagagccgggcaggtgggccgcggatgctcccagaggccggcccagcagagcgatggacttggacaggctaagatggaagtgacctgagcctcgcccggcggcttcctcgacgggacagcgcaagagttggagcacaggcttgtccggggagcagtatgccggaagctggttttcaggccacaaatgctttcacagagtgcaaattcacctgcaccagtggtaaatgcttgtatcttggttcgctggtctgtaaccaacagaacgactgtggggacaacagtgacgaagagaactgtctcctggtgaccgagcacccgcctccgggcatcttcaactcggagctggagttcgcccaaatcatcatcatcgtcgtggtggtcacggtgatggtggtggtcatcgtctgcctgctgaaccactacaaagtctccacgcggtccttcatcaaccgcccgaaccagagccggaggcgggaggacgggctgccgcaggaagggtgcctgtggccttcagacagcgccgcaccgcggctgggcgcctcggagatcatgcatgccccgcggtccagggacaggttcacagcgccgtccttcatccagagggatcgcttcagccgcttccagcccacctacccctatgtgcagcacgagattgatcttcctcccaccatctccctgtccgacggtgaagagccacctccttaccaggggccctgcaccctgcagctccgggaccctgaacagcagatggaactcaaccgagagtccgtgagggccccacccaaccgaaccatatttgacagtgatttaatagacattgctatgtatagcgggggtccatgcccacccagcagcaactcgggcatcagtgcaagcacctgcagcagtaacgggaggatggaggggccaccccccacatacagcgaggtgatgggccaccacccaggcgcctctttcctccatcaccagcgcagcaacgcacacaggggcagcagactgcagtttcagcagaacaatgcagagagcacaatagtacccatcaaaggcaaagataggaagcctgggaacctggtctgattccttccaacgtgcacttcagctggagaaagaaaccaagaagggaagcggccgctgggcccctcctgcgcacagtgttgttcagtttcacatggtacaaataagtaaaaccaaatgagcaaacacggtctttgtttctgattccttttaggggaattgcatgcaaactagactgaaatgatacaaacttccatctggtctgaccgcaaacagtgtttatttggggacaggggttgggatgggggtgtgggcaggggaaaacagagaacgggatgctttgaagataccatgaaataaaacccacagaggtatttgatgtatttaattgtgaaaggagactttgcagataaatgaggccagaatggcatgttttataattaactgaataaagaaggaagcattattatatattattgtggggaagaaccagccagttcgctttttctcctaaggtgtggaacttttattttgttttaaaaatatgaatcaaaattcctgtgttgtgtgccaaggtataaagtggagaagttagatgagtgcaaggagctcctttgtgttgtgatgatgtgttttaaaagttgcactatcttaatgttgaaaatatttacaagggaactgttttacgtgaagttctgtatgttgtcttttcacctgtggattgtaatcaggcccaaggaatatcctggagtggtccccagaagcatccaagaaaagatatttggggacgtagcctaacattttaccaacttacgtaaatcaaaaaagtcattattgttgcaggagtttgcatcaaatagcagtgcatcgctgaagcttttggagacttttggatggaagataagatagggaagattaagttccagcatttctgacttgttattttgagttactctgctactcttaggctgcatagtttatgagaaaatgaacacatgcatttatggatccagtatcatgcagtgctgccctcatcctccagcagtgcaatttcttcagtaatttagatttttttcactatagcatgaaatatattcaaatacataccttattttatgcaataaattgtttaaaatgcaaggtggttattctgcatactgttgaaatatgtgactcctcagtatattcccattgcctctccccctttcctcgacagcttagttcagttctgcagggctgctcagttcacaggaggctcccagcagccaccccacatccagcctacacagaacttcgtgtgggagtggtgtgggtggtggtttcttatgctttggaagcccctagaaataatgacggaagaatgccatgttgctgatcgtggtaataagccattgtgggttattgtatgtcactagtattagcatagcattcttaaaggaatgcagtgctcaaaacctacccaaattcccgcaggattctaccaaacccttccccaggccagcttttgtactgaaggcaagaactggacagtcagagaacagtggagggggcaagtgactgaagagcaccgggtaaaaagcacaacatgcagttaaaatgcaactagaaaactaattttaaatattgttagttttaatattcctgatatttacaaatattcattcttatatacaatgaaaaaaataactttcttctgcagatgtaagcactggcttttataagagcagcagccaacacgtttagcagacactgcgcgtggagaagggcttatctgcagtacactctgccatgtggagggtgggcctctgtggcctcttcacataacaagatgagctggaatgatgattccatgactcccacctatgcagccttaaagccaaatccgcgtgtgtgtgtttgtgtctgtctgtgggtctcgaaggtgatccgtcggtgcggtggctctgtgctgtaactggagagactgttccaaaccccaagagttgtctgatcctagtctgttcccttctgcttcttacctctgtagataggtcactggtttttgtttgtttgttttgaggattggaatttccattacattcatcctttgcacacagtaacatccacagaactagtccaactcttaaaaggagagaggaaaaacacaggcaccagttgtcagctcatgcttacaacctgtgtggaagtatatacagttgagagtcacagtggaggttctgagactggattcagtcttgttccagtgacagttggaaggcctctgctggagagacaccagctctcagggcagagattggcttggggccagaaggaccctccccaaccctggagacaccctgaaggttcactggctctccagattagcctctcttcctctgtcaggcaaagatgaggagcccgtgttcccatcgggccctgctggcagggacttgcagtggattcttggtcaggtgtgcccacagatgcggaggcgaggtgagtgattccatcatttcagttctcacctgcagttttggtgaagcaggagatgcaccccacagctctagctctcaaatggcttcacagtccttacttctctacctgcctcaagaaggggctcagagcagagacttgtgaattccttagtaactgtgagtatatgaatgtgttgcacatgtccacagtattggcgagataattacataattcagatacctttaatcatctttcaagaaagaggctcctcccattcaaccaccctagagaactgcctttgttaaatagttatttaaagactcatacatatcaaaccatgactttgaaaggtcttcgaggctggggctctgtaatgaattagtttaaaagccaaggtcataacatgaattgatggtcaatttcccttcagcagaaggaaaaggtgatttagatcagtagctcttttgaaggttgtggctgacctgttcataccgtgtcgcctcatggctagtgtggcgttgaaagagtagcgactgggaagatacaacttacacagtggggcctattgttctttcaagaaccctttttttagcttatagaacccatgggtccagtttagtaacgagtgatttaggcaatcaatgataggtttataatcttagattattccagcaaagtgtggattgcattgttaggaagaacatttggtgggaatgaacactcctgggcataccgctgacttttgtcccttgttcccggtgtaggagacccaaggcatcttgaatcccatctataagaacacaatcttccagcatacgtttgctttttcagaaactctagcattctctttaaatactgacgcaatccttaatggaaaagagatttcatgaagcaaattatgtatttcaatagttcttctatttttagtgtccaaaatttactaatacagaagcttgacaagcatgtcctcaccctccccaccacataaacacatggacacacacccaagccacaagaaatcccaagagagcagaagcgaatttttaaaagatttatcgtgaggactgcatttccattcactaattttggctcaaacttatgaggcaggaaataggggccaacagtaaatgggggaggcctcctgacaccagcagaggaattttgtacccaggcgaggacttcttgaacttctgcgtatctccgtttgatctctttcacctttatttcatcttcataagaatgagaaaggctcaaaaggaagcacttttagaaatcttctctgacctagaagaatccatccaaatccctgccttcctctctgaaccaacagttcccttctctgacaggggccatcctctatcttccatccagcggctcttctttttaggaaggctctggtgcagagcacttcaaatatgtcctcaggccagatactgattgctagtagagagacacccggcacccagtccgaagccctccctcaaaggaccggctcatggcgttggtcactggcaggctcagagacattctgctgtgggcgcagggagcccggccccccatgcagccatgactggatgcgcccccatctcgggggcttgctgcactgcttgtttattgaattttgctacttagaatggcaacattaactttgtgtaccattcattttttaaaaattttccaaagctcggcagtgtatgaaagaaaaaactgggaaagatacttggtttctgttaacttttgtgttgcttgcttaagtgattaaagccagtgcttggagccaagccttcatgccacgaacatgctccacagcctgccctttgctctcctgctcacactgaccaagaatgccgcgtgcttggcctactgaggtgaaaggacaattgaatgacaggtgggcaaagggagaacttccccttcttggtgcgaggaaagtcacaaatttaaaaatgttgcttccagcccagatcctaaatgctagttctcagcagctgcgtggcttaccgttcgccatttccaccaccgccagctgccagcaccgctacagatcacagagatgtgaacagacaatggaaagcactcttagccttgcagtggtctacattttttaggaaccaatatttcagcattctttattacccggcacgctgtgtcctttgcagagttcaagtttatgttactgccagggtcagacagtcatttgctgctgctgctgctgctgctgcttctcgaactggatgcattaggaagctgctgtctgagtgtaggaatgtcttgctaagaaagcaatgtcttccttcatccttttctttcttccctctgcgtgtccttgtttttgtgtaatgcgggagagggttagagctatagagattatatatacactatccgtgcacattatatatatgtagatatacccctatcatgtcagagatctgcatgtcagtttttcagcaactaaggtgcctcatgttctgagttcagcagatataggaaccaagccgccccctcctgcacttgatgctcccacctttgttgtgcctcacttaaaatggtgcttttttcagttgtctgtcttttcttatgtttttatttgtaaggtgctgtatataagttgaatatattatgcacatatcctacccaatgggtagaacaaaaagttgttaatactgtaatataatgtatagatgataccaattttaacagaaatggcatagaatttgtgaatgcctatgtgctttgtcctcttttgtaaggaaatttgcaaatggatgcatacagattaaagtctatgtagtttattttcctattaaatatcaatattataacacaagagaaagaagtgtgaacaaacaagcaacagtttatgaccagcgtatatatagcaatggaaagttgcatctttgctgtgaaaacactttaaagaaaatactttttaaaaaatcccacagctttttggttgccactagacgcttcttattttaatcattttagtaatgctcagctggaccagtgttagttatatttgagtcagaaaaatgttgtttttcaacttgctttataatctcctgcatctatctcctgctgtagcatcacgaaggtgtcaggcaacagtgaaaagtgcacatttttgttgttgcagaaactgtgtcagaggaataagtaaatcagcctgcagcagaagactttgttcagctccagaggcatctgtgaccgtctgtgtccaagtctctctgtgcctttttcttttacaaactgaagctgtggagccaatgaagtaacagtagagattgtagggaaagaatacctcaggaaaaacaaatacacttacaagaagaccctgttcttagaaaatgtgtttagttatgggttagcactagaagagacttggctgtcagccagccaagtgaaggacctctcatccattcccattcatgtcccatcataatacggacccaaaaagcaaactcggttttgccatcagttagaaattacgttttggattgtatattgttacatctctcttccggcttagtttttagtgtctgattgtgacctctgcatttatcttcaaataccctaattttaaaacaaaagaacaagaaaagtttataacaccatgttcactaaaaccacggttgaatcttgggtgtgggcatcctttcgagtgttgtccataagagcagttcgtggaattttgcccatctgacccatattatcagcttattctgccaccagagtagagtctaataaattccaaagtttttatttgctccatggtgtatgttctgactttgaaaatgtcagattctataatcatacccctaacatccaggaaacaaatgacagattatctttaaactgaaattgactctacaatgcaacccttaatgctgaatggattaaaaaagtcagcccttttagtatctgtttgaaagggccgtaaaaagttgacacttttgttgttgtggatcctgcgtgtctagacccacgtgttgtttccatcgtatactgtagggtgcaccccttgggattcatcattaagaactgaggctcactgttgtcagaaacaaagctcccaccccccaggttcaaccttgtgggagaactgttgagcatgagaatgttctagactcagaggtactaaaatttgttaccacatcattgcttcctttctacaggacgaattgaggcttaaactttactgttaatgatactggttcattttaatgtgcttgttggtatgttgctatttttcatttcatagctttcaaaaatcatgctaattgtatacttgtctagtttaaggctattttaaaatatgtacaatactattcacagcatttagttcgtttaatttttattataaagcaatctactaaaaaagtacaactgtatttgaacttttcaatagttgtttgtgagctatgataatcaaaagtcattaaagtcttttttaacaaacattcgtgcttacttttcaacataattcccagttatatacagaaaaagatttccacctgtcacgtatctgcctcttttacctgagcaatggtgtagttcttagacctaaggtctgtaattgcaatacttttaaagaaagatgttgctctaagtgctgtttgttagttatgaaatcagatttttctgcttgttcttaatgctgtggtcaaaccatagcacaaaatcattaaaaataatcagcggcatac

SEQ ID NO: 5986 - DNA, 8086 bp, Homo sapiens
  source 1..8086: mol_type = unassigned DNA
ctcagctccctgtggtgggggatggcagaggcttcccgctccccgcagctggtttgcacagcctcccgactgtgccgtggtgtctccttccctaaagtgggacagtcgtttctgtgtcctgctggcctctgaggaacagacgtgtgtgagaggccttcagggcctgatggctggggtggtgacagtgcctggagaatgggtggggactggaggggccaggtggctaaccactctcctcttccatggcagcggagctggagttcgcccaaatcatcatcatcgtcgtggtggtcacggtgatggtggtggtcatcgtctgcctgctgaaccactacaaagtctccacgcggtccttcatcaaccgcccgaaccagagccggaggcgggaggacgggctgccgcaggaagggtgcctgtggccttcagacagcgccgcaccgcggctgggcgcctcggagatcatgcatgccccgcggtccagggacaggttcacagcgccgtccttcatccagagggatcgcttcagccgcttccagcccacctacccctatgtgcagcacgagattgatcttcctcccaccatctccctgtccgacggtgaagagccacctccttaccaggggccctgcaccctgcagctccgggaccctgaacagcagatggaactcaaccgagagtccgtgagggccccacccaaccgaaccatatttgacagtgatttaatagacattgctatgtatagcgggggtccatgcccacccagcagcaactcgggcatcagtgcaagcacctgcagcagtaacgggaggatggaggggccaccccccacatacagcgaggtgatgggccaccacccaggcgcctctttcctccatcaccagcgcagcaacgcacacaggggcagcagactgcagtttcagcagaacaatgcagagagcacaatagtacccatcaaaggcaaagataggaagcctgggaacctggtctgattccttccaacgtgcacttcagctggagaaagaaaccaagaagggaagcggccgctgggcccctcctgcgcacagtgttgttcagtttcacatggtacaaataagtaaaaccaaatgagcaaacacggtctttgtttctgattccttttaggggaattgcatgcaaactagactgaaatgatacaaacttccatctggtctgaccgcaaacagtgtttatttggggacaggggttgggatgggggtgtgggcaggggaaaacagagaacgggatgctttgaagataccatgaaataaaacccacagaggtatttgatgtatttaattgtgaaaggagactttgcagataaatgaggccagaatggcatgttttataattaactgaataaagaaggaagcattattatatattattgtggggaagaaccagccagttcgctttttctcctaaggtgtggaacttttattttgttttaaaaatatgaatcaaaattcctgtgttgtgtgccaaggtataaagtggagaagttagatgagtgcaaggagctcctttgtgttgtgatgatgtgttttaaaagttgcactatcttaatgttgaaaatatttacaagggaactgttttacgtgaagttctgtatgttgtcttttcacctgtggattgtaatcaggcccaaggaatatcctggagtggtccccagaagcatccaagaaaagatatttggggacgtagcctaacattttaccaacttacgtaaatcaaaaaagtcattattgttgcaggagtttgcatcaaatagcagtgcatcgctgaagcttttggagacttttggatggaagataagatagggaagattaagttccagcatttctgacttgttattttgagttactctgctactcttaggctgcatagtttatgagaaaatgaacacatgcatttatggatccagtatcatgcagtgctgccctcatcctccagcagtgcaatttcttcagtaatttagatttttttcactatagcatgaaatatattcaaatacataccttattttatgcaataaattgtttaaaatgcaaggtggttattctgcatactgttgaaatatgtgactcctcagtatattcccattgcctctccccctttcctcgacagcttagttcagttctgcagggctgctcagttcacaggaggctcccagcagccaccccacatccagcctacacagaacttcgtgtgggagtggtgtgggtggtggtttcttatgctttggaagcccctagaaataatgacggaagaatgccatgttgctgatcgtggtaataagccattgtgggttattgtatgtcactagtattagcatagcattcttaaaggaatgcagtgctcaaaacctacccaaattcccgcaggattctaccaaacccttccccaggccagcttttgtactgaaggcaagaactggacagtcagagaacagtggagggggcaagtgactgaagagcaccgggtaaaaagcacaacatgcagttaaaatgcaactagaaaactaattttaaatattgttagttttaatattcctgatatttacaaatattcattcttatatacaatgaaaaaaataactttcttctgcagatgtaagcactggcttttataagagcagcagccaacacgtttagcagacactgcgcgtggagaagggcttatctgcagtacactctgccatgtggagggtgggcctctgtggcctcttcacataacaagatgagctggaatgatgattccatgactcccacctatgcagccttaaagccaaatccgcgtgtgtgtgtttgtgtctgtctgtgggtctcgaaggtgatccgtcggtgcggtggctctgtgctgtaactggagagactgttccaaaccccaagagttgtctgatcctagtctgttcccttctgcttcttacctctgtagataggtcactggtttttgtttgtttgttttgaggattggaatttccattacattcatcctttgcacacagtaacatccacagaactagtccaactcttaaaaggagagaggaaaaacacaggcaccagttgtcagctcatgcttacaacctgtgtggaagtatatacagttgagagtcacagtggaggttctgagactggattcagtcttgttccagtgacagttggaaggcctctgctggagagacaccagctctcagggcagagattggcttggggccagaaggaccctccccaaccctggagacaccctgaaggttcactggctctccagattagcctctcttcctctgtcaggcaaagatgaggagcccgtgttcccatcgggccctgctggcagggacttgcagtggattcttggtcaggtgtgcccacagatgcggaggcgaggtgagtgattccatcatttcagttctcacctgcagttttggtgaagcaggagatgcaccccacagctctagctctcaaatggcttcacagtccttacttctctacctgcctcaagaaggggctcagagcagagacttgtgaattccttagtaactgtgagtatatgaatgtgttgcacatgtccacagtattggcgagataattacataattcagatacctttaatcatctttcaagaaagaggctcctcccattcaaccaccctagagaactgcctttgttaaatagttatttaaagactcatacatatcaaaccatgactttgaaaggtcttcgaggctggggctctgtaatgaattagtttaaaagccaaggtcataacatgaattgatggtcaatttcccttcagcagaaggaaaaggtgatttagatcagtagctcttttgaaggttgtggctgacctgttcataccgtgtcgcctcatggctagtgtggcgttgaaagagtagcgactgggaagatacaacttacacagtggggcctattgttctttcaagaaccctttttttagcttatagaacccatgggtccagtttagtaacgagtgatttaggcaatcaatgataggtttataatcttagattattccagcaaagtgtggattgcattgttaggaagaacatttggtgggaatgaacactcctgggcataccgctgacttttgtcccttgttcccggtgtaggagacccaaggcatcttgaatcccatctataagaacacaatcttccagcatacgtttgctttttcagaaactctagcattctctttaaatactgacgcaatccttaatggaaaagagatttcatgaagcaaattatgtatttcaatagttcttctatttttagtgtccaaaatttactaatacagaagcttgacaagcatgtcctcaccctccccaccacataaacacatggacacacacccaagccacaagaaatcccaagagagcagaagcgaatttttaaaagatttatcgtgaggactgcatttccattcactaattttggctcaaacttatgaggcaggaaataggggccaacagtaaatgggggaggcctcctgacaccagcagaggaattttgtacccaggcgaggacttcttgaacttctgcgtatctccgtttgatctctttcacctttatttcatcttcataagaatgagaaaggctcaaaaggaagcacttttagaaatcttctctgacctagaagaatccatccaaatccctgccttcctctctgaaccaacagttcccttctctgacaggggccatcctctatcttccatccagcggctcttctttttaggaaggctctggtgcagagcacttcaaatatgtcctcaggccagatactgattgctagtagagagacacccggcacccagtccgaagccctccctcaaaggaccggctcatggcgttggtcactggcaggctcagagacattctgctgtgggcgcagggagcccggccccccatgcagccatgactggatgcgcccccatctcgggggcttgctgcactgcttgtttattgaattttgctacttagaatggcaacattaactttgtgtaccattcattttttaaaaattttccaaagctcggcagtgtatgaaagaaaaaactgggaaagatacttggtttctgttaacttttgtgttgcttgcttaagtgattaaagccagtgcttggagccaagccttcatgccacgaacatgctccacagcctgccctttgctctcctgctcacactgaccaagaatgccgcgtgcttggcctactgaggtgaaaggacaattgaatgacaggtgggcaaagggagaacttccccttcttggtgcgaggaaagtcacaaatttaaaaatgttgcttccagcccagatcctaaatgctagttctcagcagctgcgtggcttaccgttcgccatttccaccaccgccagctgccagcaccgctacagatcacagagatgtgaacagacaatggaaagcactcttagccttgcagtggtctacattttttaggaaccaatatttcagcattctttattacccggcacgctgtgtcctttgcagagttcaagtttatgttactgccagggtcagacagtcatttgctgctgctgctgctgctgctgcttctcgaactggatgcattaggaagctgctgtctgagtgtaggaatgtcttgctaagaaagcaatgtcttccttcatccttttctttcttccctctgcgtgtccttgtttttgtgtaatgcgggagagggttagagctatagagattatatatacactatccgtgcacattatatatatgtagatatacccctatcatgtcagagatctgcatgtcagtttttcagcaactaaggtgcctcatgttctgagttcagcagatataggaaccaagccgccccctcctgcacttgatgctcccacctttgttgtgcctcacttaaaatggtgcttttttcagttgtctgtcttttcttatgtttttatttgtaaggtgctgtatataagttgaatatattatgcacatatcctacccaatgggtagaacaaaaagttgttaatactgtaatataatgtatagatgataccaattttaacagaaatggcatagaatttgtgaatgcctatgtgctttgtcctcttttgtaaggaaatttgcaaatggatgcatacagattaaagtctatgtagtttattttcctattaaatatcaatattataacacaagagaaagaagtgtgaacaaacaagcaacagtttatgaccagcgtatatatagcaatggaaagttgcatctttgctgtgaaaacactttaaagaaaatactttttaaaaaatcccacagctttttggttgccactagacgcttcttattttaatcattttagtaatgctcagctggaccagtgttagttatatttgagtcagaaaaatgttgtttttcaacttgctttataatctcctgcatctatctcctgctgtagcatcacgaaggtgtcaggcaacagtgaaaagtgcacatttttgttgttgcagaaactgtgtcagaggaataagtaaatcagcctgcagcagaagactttgttcagctccagaggcatctgtgaccgtctgtgtccaagtctctctgtgcctttttcttttacaaactgaagctgtggagccaatgaagtaacagtagagattgtagggaaagaatacctcaggaaaaacaaatacacttacaagaagaccctgttcttagaaaatgtgtttagttatgggttagcactagaagagacttggctgtcagccagccaagtgaaggacctctcatccattcccattcatgtcccatcataatacggacccaaaaagcaaactcggttttgccatcagttagaaattacgttttggattgtatattgttacatctctcttccggcttagtttttagtgtctgattgtgacctctgcatttatcttcaaataccctaattttaaaacaaaagaacaagaaaagtttataacaccatgttcactaaaaccacggttgaatcttgggtgtgggcatcctttcgagtgttgtccataagagcagttcgtggaattttgcccatctgacccatattatcagcttattctgccaccagagtagagtctaataaattccaaagtttttatttgctccatggtgtatgttctgactttgaaaatgtcagattctataatcatacccctaacatccaggaaacaaatgacagattatctttaaactgaaattgactctacaatgcaacccttaatgctgaatggattaaaaaagtcagcccttttagtatctgtttgaaagggccgtaaaaagttgacacttttgttgttgtggatcctgcgtgtctagacccacgtgttgtttccatcgtatactgtagggtgcaccccttgggattcatcattaagaactgaggctcactgttgtcagaaacaaagctcccaccccccaggttcaaccttgtgggagaactgttgagcatgagaatgttctagactcagaggtactaaaatttgttaccacatcattgcttcctttctacaggacgaattgaggcttaaactttactgttaatgatactggttcattttaatgtgcttgttggtatgttgctatttttcatttcatagctttcaaaaatcatgctaattgtatacttgtctagtttaaggctattttaaaatatgtacaatactattcacagcatttagttcgtttaatttttattataaagcaatctactaaaaaagtacaactgtatttgaacttttcaatagttgtttgtgagctatgataatcaaaagtcattaaagtcttttttaacaaacattcgtgcttacttttcaacataattcccagttatatacagaaaaagatttccacctgtcacgtatctgcctcttttacctgagcaatggtgtagttcttagacctaaggtctgtaattgcaatacttttaaagaaagatgttgctctaagtgctgtttgttagttatgaaatcagatttttctgcttgttcttaatgctgtggtcaaaccatagcacaaaatcattaaaaataatcagcggcatac

SEQ ID NO: 5987 - DNA, 8892 bp, Homo sapiens
  source 1..8892: mol_type = unassigned DNA
aggaacattgagcatcctgactttgaaggagtctctgtggtgtttttgtgctaccatacatggggaataatgatgtgaggcagagggagagggaatgaatgggagagccaagagggaagagcgagccggggggaaaggagcgcgcagtgtttcctgctgcggttaggacctcacgccttgccagtacagagctcggtggcaagagccgctgggagctgctcccatcagttagaggatgtggagagggagcaccagaagaggacagcccgcagcctggctcgcagcctgagggacgctgtgggtgctcccagccgggcgagcacgctctgggagcggatctgcaggggagaagcacgcgagcctaacgtgagcgtcccgcctgtcgcgtgtcctgccttggtaagcgccctctccggtccttccacactgaaagcttccagcagagatcaagggaaggagtattgtgtgagacttgcagatttcctcctttctgtctggactggtttgatatttgcctgttgaaaagattactgaacgcagtgtgacaagatgagccgtctagctgcgttctgcttgcctgtgtgtgtgacacgtccaggtgtgaggccaaacctgagaagtgcagactgctcactgatagacgttgctgtaaacagtagtgccctgggtgtacagctggtctcaggatcggagaccccggacttattctctgctcggtgacacggccggcttcctgccgcagagctcctggtttctgttgatggcagttgataattggtagccacagtctgcggtcggagccacagcatttgagtctagcacctggggtgggccctgctgatacagtagagagagagtgaacgaggcagacagaaacacaccccccccccctccacgctcacacactctcccacaccccatgccagctataactgcagctctgagctgcctggagaggagattgccggaagctgaagggatgctttgaacgtgggggggctgcgtcacagttggactcccacttgcagaggacctgattatgtccagtgaccacctgaacaacagcacactgaaggaggctcagttcaaagacctgttcttaaaaaaagcggagctggagttcgcccaaatcatcatcatcgtcgtggtggtcacggtgatggtggtggtcatcgtctgcctgctgaaccactacaaagtctccacgcggtccttcatcaaccgcccgaaccagagccggaggcgggaggacgggctgccgcagatcatgcatgccccgcggtccagggacaggttcacagcgccgtccttcatccagagggatcgcttcagccgcttccagcccacctacccctatgtgcagcacgagattgatcttcctcccaccatctccctgtccgacggtgaagagccacctccttaccaggggccctgcaccctgcagctccgggaccctgaacagcagatggaactcaaccgagagtccgtgagggccccacccaaccgaaccatatttgacagtgatttaatagacattgctatgtatagcgggggtccatgcccacccagcagcaactcgggcatcagtgcaagcacctgcagcagtaacgggaggatggaggggccaccccccacatacagcgaggtgatgggccaccacccaggcgcctctttcctccatcaccagcgcagcaacgcacacaggggcagcagactgcagtttcagcagaacaatgcagagagcacaatagtacccatcaaaggcaaagataggaagcctgggaacctggtctgattccttccaacgtgcacttcagctggagaaagaaaccaagaagggaagcggccgctgggcccctcctgcgcacagtgttgttcagtttcacatggtacaaataagtaaaaccaaatgagcaaacacggtctttgtttctgattccttttaggggaattgcatgcaaactagactgaaatgatacaaacttccatctggtctgaccgcaaacagtgtttatttggggacaggggttgggatgggggtgtgggcaggggaaaacagagaacgggatgctttgaagataccatgaaataaaacccacagaggtatttgatgtatttaattgtgaaaggagactttgcagataaatgaggccagaatggcatgttttataattaactgaataaagaaggaagcattattatatattattgtggggaagaaccagccagttcgctttttctcctaaggtgtggaacttttattttgttttaaaaatatgaatcaaaattcctgtgttgtgtgccaaggtataaagtggagaagttagatgagtgcaaggagctcctttgtgttgtgatgatgtgttttaaaagttgcactatcttaatgttgaaaatatttacaagggaactgttttacgtgaagttctgtatgttgtcttttcacctgtggattgtaatcaggcccaaggaatatcctggagtggtccccagaagcatccaagaaaagatatttggggacgtagcctaacattttaccaacttacgtaaatcaaaaaagtcattattgttgcaggagtttgcatcaaatagcagtgcatcgctgaagcttttggagacttttggatggaagataagatagggaagattaagttccagcatttctgacttgttattttgagttactctgctactcttaggctgcatagtttatgagaaaatgaacacatgcatttatggatccagtatcatgcagtgctgccctcatcctccagcagtgcaatttcttcagtaatttagatttttttcactatagcatgaaatatattcaaatacataccttattttatgcaataaattgtttaaaatgcaaggtggttattctgcatactgttgaaatatgtgactcctcagtatattcccattgcctctccccctttcctcgacagcttagttcagttctgcagggctgctcagttcacaggaggctcccagcagccaccccacatccagcctacacagaacttcgtgtgggagtggtgtgggtggtggtttcttatgctttggaagcccctagaaataatgacggaagaatgccatgttgctgatcgtggtaataagccattgtgggttattgtatgtcactagtattagcatagcattcttaaaggaatgcagtgctcaaaacctacccaaattcccgcaggattctaccaaacccttccccaggccagcttttgtactgaaggcaagaactggacagtcagagaacagtggagggggcaagtgactgaagagcaccgggtaaaaagcacaacatgcagttaaaatgcaactagaaaactaattttaaatattgttagttttaatattcctgatatttacaaatattcattcttatatacaatgaaaaaaataactttcttctgcagatgtaagcactggcttttataagagcagcagccaacacgtttagcagacactgcgcgtggagaagggcttatctgcagtacactctgccatgtggagggtgggcctctgtggcctcttcacataacaagatgagctggaatgatgattccatgactcccacctatgcagccttaaagccaaatccgcgtgtgtgtgtttgtgtctgtctgtgggtctcgaaggtgatccgtcggtgcggtggctctgtgctgtaactggagagactgttccaaaccccaagagttgtctgatcctagtctgttcccttctgcttcttacctctgtagataggtcactggtttttgtttgtttgttttgaggattggaatttccattacattcatcctttgcacacagtaacatccacagaactagtccaactcttaaaaggagagaggaaaaacacaggcaccagttgtcagctcatgcttacaacctgtgtggaagtatatacagttgagagtcacagtggaggttctgagactggattcagtcttgttccagtgacagttggaaggcctctgctggagagacaccagctctcagggcagagattggcttggggccagaaggaccctccccaaccctggagacaccctgaaggttcactggctctccagattagcctctcttcctctgtcaggcaaagatgaggagcccgtgttcccatcgggccctgctggcagggacttgcagtggattcttggtcaggtgtgcccacagatgcggaggcgaggtgagtgattccatcatttcagttctcacctgcagttttggtgaagcaggagatgcaccccacagctctagctctcaaatggcttcacagtccttacttctctacctgcctcaagaaggggctcagagcagagacttgtgaattccttagtaactgtgagtatatgaatgtgttgcacatgtccacagtattggcgagataattacataattcagatacctttaatcatctttcaagaaagaggctcctcccattcaaccaccctagagaactgcctttgttaaatagttatttaaagactcatacatatcaaaccatgactttgaaaggtcttcgaggctggggctctgtaatgaattagtttaaaagccaaggtcataacatgaattgatggtcaatttcccttcagcagaaggaaaaggtgatttagatcagtagctcttttgaaggttgtggctgacctgttcataccgtgtcgcctcatggctagtgtggcgttgaaagagtagcgactgggaagatacaacttacacagtggggcctattgttctttcaagaaccctttttttagcttatagaacccatgggtccagtttagtaacgagtgatttaggcaatcaatgataggtttataatcttagattattccagcaaagtgtggattgcattgttaggaagaacatttggtgggaatgaacactcctgggcataccgctgacttttgtcccttgttcccggtgtaggagacccaaggcatcttgaatcccatctataagaacacaatcttccagcatacgtttgctttttcagaaactctagcattctctttaaatactgacgcaatccttaatggaaaagagatttcatgaagcaaattatgtatttcaatagttcttctatttttagtgtccaaaatttactaatacagaagcttgacaagcatgtcctcaccctccccaccacataaacacatggacacacacccaagccacaagaaatcccaagagagcagaagcgaatttttaaaagatttatcgtgaggactgcatttccattcactaattttggctcaaacttatgaggcaggaaataggggccaacagtaaatgggggaggcctcctgacaccagcagaggaattttgtacccaggcgaggacttcttgaacttctgcgtatctccgtttgatctctttcacctttatttcatcttcataagaatgagaaaggctcaaaaggaagcacttttagaaatcttctctgacctagaagaatccatccaaatccctgccttcctctctgaaccaacagttcccttctctgacaggggccatcctctatcttccatccagcggctcttctttttaggaaggctctggtgcagagcacttcaaatatgtcctcaggccagatactgattgctagtagagagacacccggcacccagtccgaagccctccctcaaaggaccggctcatggcgttggtcactggcaggctcagagacattctgctgtgggcgcagggagcccggccccccatgcagccatgactggatgcgcccccatctcgggggcttgctgcactgcttgtttattgaattttgctacttagaatggcaacattaactttgtgtaccattcattttttaaaaattttccaaagctcggcagtgtatgaaagaaaaaactgggaaagatacttggtttctgttaacttttgtgttgcttgcttaagtgattaaagccagtgcttggagccaagccttcatgccacgaacatgctccacagcctgccctttgctctcctgctcacactgaccaagaatgccgcgtgcttggcctactgaggtgaaaggacaattgaatgacaggtgggcaaagggagaacttccccttcttggtgcgaggaaagtcacaaatttaaaaatgttgcttccagcccagatcctaaatgctagttctcagcagctgcgtggcttaccgttcgccatttccaccaccgccagctgccagcaccgctacagatcacagagatgtgaacagacaatggaaagcactcttagccttgcagtggtctacattttttaggaaccaatatttcagcattctttattacccggcacgctgtgtcctttgcagagttcaagtttatgttactgccagggtcagacagtcatttgctgctgctgctgctgctgctgcttctcgaactggatgcattaggaagctgctgtctgagtgtaggaatgtcttgctaagaaagcaatgtcttccttcatccttttctttcttccctctgcgtgtccttgtttttgtgtaatgcgggagagggttagagctatagagattatatatacactatccgtgcacattatatatatgtagatatacccctatcatgtcagagatctgcatgtcagtttttcagcaactaaggtgcctcatgttctgagttcagcagatataggaaccaagccgccccctcctgcacttgatgctcccacctttgttgtgcctcacttaaaatggtgcttttttcagttgtctgtcttttcttatgtttttatttgtaaggtgctgtatataagttgaatatattatgcacatatcctacccaatgggtagaacaaaaagttgttaatactgtaatataatgtatagatgataccaattttaacagaaatggcatagaatttgtgaatgcctatgtgctttgtcctcttttgtaaggaaatttgcaaatggatgcatacagattaaagtctatgtagtttattttcctattaaatatcaatattataacacaagagaaagaagtgtgaacaaacaagcaacagtttatgaccagcgtatatatagcaatggaaagttgcatctttgctgtgaaaacactttaaagaaaatactttttaaaaaatcccacagctttttggttgccactagacgcttcttattttaatcattttagtaatgctcagctggaccagtgttagttatatttgagtcagaaaaatgttgtttttcaacttgctttataatctcctgcatctatctcctgctgtagcatcacgaaggtgtcaggcaacagtgaaaagtgcacatttttgttgttgcagaaactgtgtcagaggaataagtaaatcagcctgcagcagaagactttgttcagctccagaggcatctgtgaccgtctgtgtccaagtctctctgtgcctttttcttttacaaactgaagctgtggagccaatgaagtaacagtagagattgtagggaaagaatacctcaggaaaaacaaatacacttacaagaagaccctgttcttagaaaatgtgtttagttatgggttagcactagaagagacttggctgtcagccagccaagtgaaggacctctcatccattcccattcatgtcccatcataatacggacccaaaaagcaaactcggttttgccatcagttagaaattacgttttggattgtatattgttacatctctcttccggcttagtttttagtgtctgattgtgacctctgcatttatcttcaaataccctaattttaaaacaaaagaacaagaaaagtttataacaccatgttcactaaaaccacggttgaatcttgggtgtgggcatcctttcgagtgttgtccataagagcagttcgtggaattttgcccatctgacccatattatcagcttattctgccaccagagtagagtctaataaattccaaagtttttatttgctccatggtgtatgttctgactttgaaaatgtcagattctataatcatacccctaacatccaggaaacaaatgacagattatctttaaactgaaattgactctacaatgcaacccttaatgctgaatggattaaaaaagtcagcccttttagtatctgtttgaaagggccgtaaaaagttgacacttttgttgttgtggatcctgcgtgtctagacccacgtgttgtttccatcgtatactgtagggtgcaccccttgggattcatcattaagaactgaggctcactgttgtcagaaacaaagctcccaccccccaggttcaaccttgtgggagaactgttgagcatgagaatgttctagactcagaggtactaaaatttgttaccacatcattgcttcctttctacaggacgaattgaggcttaaactttactgttaatgatactggttcattttaatgtgcttgttggtatgttgctatttttcatttcatagctttcaaaaatcatgctaattgtatacttgtctagtttaaggctattttaaaatatgtacaatactattcacagcatttagttcgtttaatttttattataaagcaatctactaaaaaagtacaactgtatttgaacttttcaatagttgtttgtgagctatgataatcaaaagtcattaaagtcttttttaacaaacattcgtgcttacttttcaacataattcccagttatatacagaaaaagatttccacctgtcacgtatctgcctcttttacctgagcaatggtgtagttcttagacctaaggtctgtaattgcaatacttttaaagaaagatgttgctctaagtgctgtttgttagttatgaaatcagatttttctgcttgttcttaatgctgtggtcaaaccatagcacaaaatcattaaaaataatcagcggcatac

SEQ ID NO: 5988 - DNA, 8632 bp, Homo sapiens
  source 1..8632: mol_type = unassigned DNA
gctgggtctccgagccccggaggaagcaggcgtgtgttgaatttctctctgcccctcaccttggaataaacaggaagcgacaagcacccagcccggcccggcacttgcctttgtgaaggggtctgccctgcacagcctttaggaagcttcctcgggaccccttcccggtgcgccgccccgggtgggcctgggggcgcgccctcggttcaagctctacgttcgtgacatcaaacctcctgttgggccatttccgagaactcccatcagtttctgtatagtgtaaaagtttcagaggcggagcacagagagctgcggctgggacaaggagcacccgcgtgcaggtgcgaccctgcaggatgctggcagcggcgtggccaggggcgcccgtgttctgagggcctgagggccagcccctccacccgcgccatggcctccgcgccctggctggacggctgacgggagcagggaccgccgccgcccaggtgccacacccaggtaccgcccgcccgcgcgagagccgggcaggtgggccgcggatgctcccagaggccggcccagcagagcgatggacttggacaggctaagatggaagtgacctgagcctcgcccggcggcttcctcgacgggacagcgcaagagttggagcacaggcttgtccggggagcagtatgccggaagctggttttcaggccacaaatgctttcacagagtgcaaattcacctgcaccagtggtaaatgcttgtatcttggttcgctggtctgtaaccaacagaacgactgtggggacaacagtgacgaagagaactgtctcctggtgaccgagcacccgcctccgggcatcttcaactcggagctggagttcgcccaaatcatcatcatcgtcgtggtggtcacggtgatggtggtggtcatcgtctgcctgctgaaccactacaaagtctccacgcggtccttcatcaaccgcccgaaccagagccggaggcgggaggacgggctgccgcagatcatgcatgccccgcggtccagggacaggttcacagcgccgtccttcatccagagggatcgcttcagccgcttccagcccacctacccctatgtgcagcacgagattgatcttcctcccaccatctccctgtccgacggtgaagagccacctccttaccaggggccctgcaccctgcagctccgggaccctgaacagcagatggaactcaaccgagagtccgtgagggccccacccaaccgaaccatatttgacagtgatttaatagacattgctatgtatagcgggggtccatgcccacccagcagcaactcgggcatcagtgcaagcacctgcagcagtaacgggaggatggaggggccaccccccacatacagcgaggtgatgggccaccacccaggcgcctctttcctccatcaccagcgcagcaacgcacacaggggcagcagactgcagtttcagcagaacaatgcagagagcacaatagtacccatcaaaggcaaagataggaagcctgggaacctggtctgattccttccaacgtgcacttcagctggagaaagaaaccaagaagggaagcggccgctgggcccctcctgcgcacagtgttgttcagtttcacatggtacaaataagtaaaaccaaatgagcaaacacggtctttgtttctgattccttttaggggaattgcatgcaaactagactgaaatgatacaaacttccatctggtctgaccgcaaacagtgtttatttggggacaggggttgggatgggggtgtgggcaggggaaaacagagaacgggatgctttgaagataccatgaaataaaacccacagaggtatttgatgtatttaattgtgaaaggagactttgcagataaatgaggccagaatggcatgttttataattaactgaataaagaaggaagcattattatatattattgtggggaagaaccagccagttcgctttttctcctaaggtgtggaacttttattttgttttaaaaatatgaatcaaaattcctgtgttgtgtgccaaggtataaagtggagaagttagatgagtgcaaggagctcctttgtgttgtgatgatgtgttttaaaagttgcactatcttaatgttgaaaatatttacaagggaactgttttacgtgaagttctgtatgttgtcttttcacctgtggattgtaatcaggcccaaggaatatcctggagtggtccccagaagcatccaagaaaagatatttggggacgtagcctaacattttaccaacttacgtaaatcaaaaaagtcattattgttgcaggagtttgcatcaaatagcagtgcatcgctgaagcttttggagacttttggatggaagataagatagggaagattaagttccagcatttctgacttgttattttgagttactctgctactcttaggctgcatagtttatgagaaaatgaacacatgcatttatggatccagtatcatgcagtgctgccctcatcctccagcagtgcaatttcttcagtaatttagatttttttcactatagcatgaaatatattcaaatacataccttattttatgcaataaattgtttaaaatgcaaggtggttattctgcatactgttgaaatatgtgactcctcagtatattcccattgcctctccccctttcctcgacagcttagttcagttctgcagggctgctcagttcacaggaggctcccagcagccaccccacatccagcctacacagaacttcgtgtgggagtggtgtgggtggtggtttcttatgctttggaagcccctagaaataatgacggaagaatgccatgttgctgatcgtggtaataagccattgtgggttattgtatgtcactagtattagcatagcattcttaaaggaatgcagtgctcaaaacctacccaaattcccgcaggattctaccaaacccttccccaggccagcttttgtactgaaggcaagaactggacagtcagagaacagtggagggggcaagtgactgaagagcaccgggtaaaaagcacaacatgcagttaaaatgcaactagaaaactaattttaaatattgttagttttaatattcctgatatttacaaatattcattcttatatacaatgaaaaaaataactttcttctgcagatgtaagcactggcttttataagagcagcagccaacacgtttagcagacactgcgcgtggagaagggcttatctgcagtacactctgccatgtggagggtgggcctctgtggcctcttcacataacaagatgagctggaatgatgattccatgactcccacctatgcagccttaaagccaaatccgcgtgtgtgtgtttgtgtctgtctgtgggtctcgaaggtgatccgtcggtgcggtggctctgtgctgtaactggagagactgttccaaaccccaagagttgtctgatcctagtctgttcccttctgcttcttacctctgtagataggtcactggtttttgtttgtttgttttgaggattggaatttccattacattcatcctttgcacacagtaacatccacagaactagtccaactcttaaaaggagagaggaaaaacacaggcaccagttgtcagctcatgcttacaacctgtgtggaagtatatacagttgagagtcacagtggaggttctgagactggattcagtcttgttccagtgacagttggaaggcctctgctggagagacaccagctctcagggcagagattggcttggggccagaaggaccctccccaaccctggagacaccctgaaggttcactggctctccagattagcctctcttcctctgtcaggcaaagatgaggagcccgtgttcccatcgggccctgctggcagggacttgcagtggattcttggtcaggtgtgcccacagatgcggaggcgaggtgagtgattccatcatttcagttctcacctgcagttttggtgaagcaggagatgcaccccacagctctagctctcaaatggcttcacagtccttacttctctacctgcctcaagaaggggctcagagcagagacttgtgaattccttagtaactgtgagtatatgaatgtgttgcacatgtccacagtattggcgagataattacataattcagatacctttaatcatctttcaagaaagaggctcctcccattcaaccaccctagagaactgcctttgttaaatagttatttaaagactcatacatatcaaaccatgactttgaaaggtcttcgaggctggggctctgtaatgaattagtttaaaagccaaggtcataacatgaattgatggtcaatttcccttcagcagaaggaaaaggtgatttagatcagtagctcttttgaaggttgtggctgacctgttcataccgtgtcgcctcatggctagtgtggcgttgaaagagtagcgactgggaagatacaacttacacagtggggcctattgttctttcaagaaccctttttttagcttatagaacccatgggtccagtttagtaacgagtgatttaggcaatcaatgataggtttataatcttagattattccagcaaagtgtggattgcattgttaggaagaacatttggtgggaatgaacactcctgggcataccgctgacttttgtcccttgttcccggtgtaggagacccaaggcatcttgaatcccatctataagaacacaatcttccagcatacgtttgctttttcagaaactctagcattctctttaaatactgacgcaatccttaatggaaaagagatttcatgaagcaaattatgtatttcaatagttcttctatttttagtgtccaaaatttactaatacagaagcttgacaagcatgtcctcaccctccccaccacataaacacatggacacacacccaagccacaagaaatcccaagagagcagaagcgaatttttaaaagatttatcgtgaggactgcatttccattcactaattttggctcaaacttatgaggcaggaaataggggccaacagtaaatgggggaggcctcctgacaccagcagaggaattttgtacccaggcgaggacttcttgaacttctgcgtatctccgtttgatctctttcacctttatttcatcttcataagaatgagaaaggctcaaaaggaagcacttttagaaatcttctctgacctagaagaatccatccaaatccctgccttcctctctgaaccaacagttcccttctctgacaggggccatcctctatcttccatccagcggctcttctttttaggaaggctctggtgcagagcacttcaaatatgtcctcaggccagatactgattgctagtagagagacacccggcacccagtccgaagccctccctcaaaggaccggctcatggcgttggtcactggcaggctcagagacattctgctgtgggcgcagggagcccggccccccatgcagccatgactggatgcgcccccatctcgggggcttgctgcactgcttgtttattgaattttgctacttagaatggcaacattaactttgtgtaccattcattttttaaaaattttccaaagctcggcagtgtatgaaagaaaaaactgggaaagatacttggtttctgttaacttttgtgttgcttgcttaagtgattaaagccagtgcttggagccaagccttcatgccacgaacatgctccacagcctgccctttgctctcctgctcacactgaccaagaatgccgcgtgcttggcctactgaggtgaaaggacaattgaatgacaggtgggcaaagggagaacttccccttcttggtgcgaggaaagtcacaaatttaaaaatgttgcttccagcccagatcctaaatgctagttctcagcagctgcgtggcttaccgttcgccatttccaccaccgccagctgccagcaccgctacagatcacagagatgtgaacagacaatggaaagcactcttagccttgcagtggtctacattttttaggaaccaatatttcagcattctttattacccggcacgctgtgtcctttgcagagttcaagtttatgttactgccagggtcagacagtcatttgctgctgctgctgctgctgctgcttctcgaactggatgcattaggaagctgctgtctgagtgtaggaatgtcttgctaagaaagcaatgtcttccttcatccttttctttcttccctctgcgtgtccttgtttttgtgtaatgcgggagagggttagagctatagagattatatatacactatccgtgcacattatatatatgtagatatacccctatcatgtcagagatctgcatgtcagtttttcagcaactaaggtgcctcatgttctgagttcagcagatataggaaccaagccgccccctcctgcacttgatgctcccacctttgttgtgcctcacttaaaatggtgcttttttcagttgtctgtcttttcttatgtttttatttgtaaggtgctgtatataagttgaatatattatgcacatatcctacccaatgggtagaacaaaaagttgttaatactgtaatataatgtatagatgataccaattttaacagaaatggcatagaatttgtgaatgcctatgtgctttgtcctcttttgtaaggaaatttgcaaatggatgcatacagattaaagtctatgtagtttattttcctattaaatatcaatattataacacaagagaaagaagtgtgaacaaacaagcaacagtttatgaccagcgtatatatagcaatggaaagttgcatctttgctgtgaaaacactttaaagaaaatactttttaaaaaatcccacagctttttggttgccactagacgcttcttattttaatcattttagtaatgctcagctggaccagtgttagttatatttgagtcagaaaaatgttgtttttcaacttgctttataatctcctgcatctatctcctgctgtagcatcacgaaggtgtcaggcaacagtgaaaagtgcacatttttgttgttgcagaaactgtgtcagaggaataagtaaatcagcctgcagcagaagactttgttcagctccagaggcatctgtgaccgtctgtgtccaagtctctctgtgcctttttcttttacaaactgaagctgtggagccaatgaagtaacagtagagattgtagggaaagaatacctcaggaaaaacaaatacacttacaagaagaccctgttcttagaaaatgtgtttagttatgggttagcactagaagagacttggctgtcagccagccaagtgaaggacctctcatccattcccattcatgtcccatcataatacggacccaaaaagcaaactcggttttgccatcagttagaaattacgttttggattgtatattgttacatctctcttccggcttagtttttagtgtctgattgtgacctctgcatttatcttcaaataccctaattttaaaacaaaagaacaagaaaagtttataacaccatgttcactaaaaccacggttgaatcttgggtgtgggcatcctttcgagtgttgtccataagagcagttcgtggaattttgcccatctgacccatattatcagcttattctgccaccagagtagagtctaataaattccaaagtttttatttgctccatggtgtatgttctgactttgaaaatgtcagattctataatcatacccctaacatccaggaaacaaatgacagattatctttaaactgaaattgactctacaatgcaacccttaatgctgaatggattaaaaaagtcagcccttttagtatctgtttgaaagggccgtaaaaagttgacacttttgttgttgtggatcctgcgtgtctagacccacgtgttgtttccatcgtatactgtagggtgcaccccttgggattcatcattaagaactgaggctcactgttgtcagaaacaaagctcccaccccccaggttcaaccttgtgggagaactgttgagcatgagaatgttctagactcagaggtactaaaatttgttaccacatcattgcttcctttctacaggacgaattgaggcttaaactttactgttaatgatactggttcattttaatgtgcttgttggtatgttgctatttttcatttcatagctttcaaaaatcatgctaattgtatacttgtctagtttaaggctattttaaaatatgtacaatactattcacagcatttagttcgtttaatttttattataaagcaatctactaaaaaagtacaactgtatttgaacttttcaatagttgtttgtgagctatgataatcaaaagtcattaaagtcttttttaacaaacattcgtgcttacttttcaacataattcccagttatatacagaaaaagatttccacctgtcacgtatctgcctcttttacctgagcaatggtgtagttcttagacctaaggtctgtaattgcaatacttttaaagaaagatgttgctctaagtgctgtttgttagttatgaaatcagatttttctgcttgttcttaatgctgtggtcaaaccatagcacaaaatcattaaaaataatcagcggcatac

SEQ ID NO: 5989 - DNA, 8032 bp, Homo sapiens
  source 1..8032: mol_type = unassigned DNA
ctcagctccctgtggtgggggatggcagaggcttcccgctccccgcagctggtttgcacagcctcccgactgtgccgtggtgtctccttccctaaagtgggacagtcgtttctgtgtcctgctggcctctgaggaacagacgtgtgtgagaggccttcagggcctgatggctggggtggtgacagtgcctggagaatgggtggggactggaggggccaggtggctaaccactctcctcttccatggcagcggagctggagttcgcccaaatcatcatcatcgtcgtggtggtcacggtgatggtggtggtcatcgtctgcctgctgaaccactacaaagtctccacgcggtccttcatcaaccgcccgaaccagagccggaggcgggaggacgggctgccgcagatcatgcatgccccgcggtccagggacaggttcacagcgccgtccttcatccagagggatcgcttcagccgcttccagcccacctacccctatgtgcagcacgagattgatcttcctcccaccatctccctgtccgacggtgaagagccacctccttaccaggggccctgcaccctgcagctccgggaccctgaacagcagatggaactcaaccgagagtccgtgagggccccacccaaccgaaccatatttgacagtgatttaatagacattgctatgtatagcgggggtccatgcccacccagcagcaactcgggcatcagtgcaagcacctgcagcagtaacgggaggatggaggggccaccccccacatacagcgaggtgatgggccaccacccaggcgcctctttcctccatcaccagcgcagcaacgcacacaggggcagcagactgcagtttcagcagaacaatgcagagagcacaatagtacccatcaaaggcaaagataggaagcctgggaacctggtctgattccttccaacgtgcacttcagctggagaaagaaaccaagaagggaagcggccgctgggcccctcctgcgcacagtgttgttcagtttcacatggtacaaataagtaaaaccaaatgagcaaacacggtctttgtttctgattccttttaggggaattgcatgcaaactagactgaaatgatacaaacttccatctggtctgaccgcaaacagtgtttatttggggacaggggttgggatgggggtgtgggcaggggaaaacagagaacgggatgctttgaagataccatgaaataaaacccacagaggtatttgatgtatttaattgtgaaaggagactttgcagataaatgaggccagaatggcatgttttataattaactgaataaagaaggaagcattattatatattattgtggggaagaaccagccagttcgctttttctcctaaggtgtggaacttttattttgttttaaaaatatgaatcaaaattcctgtgttgtgtgccaaggtataaagtggagaagttagatgagtgcaaggagctcctttgtgttgtgatgatgtgttttaaaagttgcactatcttaatgttgaaaatatttacaagggaactgttttacgtgaagttctgtatgttgtcttttcacctgtggattgtaatcaggcccaaggaatatcctggagtggtccccagaagcatccaagaaaagatatttggggacgtagcctaacattttaccaacttacgtaaatcaaaaaagtcattattgttgcaggagtttgcatcaaatagcagtgcatcgctgaagcttttggagacttttggatggaagataagatagggaagattaagttccagcatttctgacttgttattttgagttactctgctactcttaggctgcatagtttatgagaaaatgaacacatgcatttatggatccagtatcatgcagtgctgccctcatcctccagcagtgcaatttcttcagtaatttagatttttttcactatagcatgaaatatattcaaatacataccttattttatgcaataaattgtttaaaatgcaaggtggttattctgcatactgttgaaatatgtgactcctcagtatattcccattgcctctccccctttcctcgacagcttagttcagttctgcagggctgctcagttcacaggaggctcccagcagccaccccacatccagcctacacagaacttcgtgtgggagtggtgtgggtggtggtttcttatgctttggaagcccctagaaataatgacggaagaatgccatgttgctgatcgtggtaataagccattgtgggttattgtatgtcactagtattagcatagcattcttaaaggaatgcagtgctcaaaacctacccaaattcccgcaggattctaccaaacccttccccaggccagcttttgtactgaaggcaagaactggacagtcagagaacagtggagggggcaagtgactgaagagcaccgggtaaaaagcacaacatgcagttaaaatgcaactagaaaactaattttaaatattgttagttttaatattcctgatatttacaaatattcattcttatatacaatgaaaaaaataactttcttctgcagatgtaagcactggcttttataagagcagcagccaacacgtttagcagacactgcgcgtggagaagggcttatctgcagtacactctgccatgtggagggtgggcctctgtggcctcttcacataacaagatgagctggaatgatgattccatgactcccacctatgcagccttaaagccaaatccgcgtgtgtgtgtttgtgtctgtctgtgggtctcgaaggtgatccgtcggtgcggtggctctgtgctgtaactggagagactgttccaaaccccaagagttgtctgatcctagtctgttcccttctgcttcttacctctgtagataggtcactggtttttgtttgtttgttttgaggattggaatttccattacattcatcctttgcacacagtaacatccacagaactagtccaactcttaaaaggagagaggaaaaacacaggcaccagttgtcagctcatgcttacaacctgtgtggaagtatatacagttgagagtcacagtggaggttctgagactggattcagtcttgttccagtgacagttggaaggcctctgctggagagacaccagctctcagggcagagattggcttggggccagaaggaccctccccaaccctggagacaccctgaaggttcactggctctccagattagcctctcttcctctgtcaggcaaagatgaggagcccgtgttcccatcgggccctgctggcagggacttgcagtggattcttggtcaggtgtgcccacagatgcggaggcgaggtgagtgattccatcatttcagttctcacctgcagttttggtgaagcaggagatgcaccccacagctctagctctcaaatggcttcacagtccttacttctctacctgcctcaagaaggggctcagagcagagacttgtgaattccttagtaactgtgagtatatgaatgtgttgcacatgtccacagtattggcgagataattacataattcagatacctttaatcatctttcaagaaagaggctcctcccattcaaccaccctagagaactgcctttgttaaatagttatttaaagactcatacatatcaaaccatgactttgaaaggtcttcgaggctggggctctgtaatgaattagtttaaaagccaaggtcataacatgaattgatggtcaatttcccttcagcagaaggaaaaggtgatttagatcagtagctcttttgaaggttgtggctgacctgttcataccgtgtcgcctcatggctagtgtggcgttgaaagagtagcgactgggaagatacaacttacacagtggggcctattgttctttcaagaaccctttttttagcttatagaacccatgggtccagtttagtaacgagtgatttaggcaatcaatgataggtttataatcttagattattccagcaaagtgtggattgcattgttaggaagaacatttggtgggaatgaacactcctgggcataccgctgacttttgtcccttgttcccggtgtaggagacccaaggcatcttgaatcccatctataagaacacaatcttccagcatacgtttgctttttcagaaactctagcattctctttaaatactgacgcaatccttaatggaaaagagatttcatgaagcaaattatgtatttcaatagttcttctatttttagtgtccaaaatttactaatacagaagcttgacaagcatgtcctcaccctccccaccacataaacacatggacacacacccaagccacaagaaatcccaagagagcagaagcgaatttttaaaagatttatcgtgaggactgcatttccattcactaattttggctcaaacttatgaggcaggaaataggggccaacagtaaatgggggaggcctcctgacaccagcagaggaattttgtacccaggcgaggacttcttgaacttctgcgtatctccgtttgatctctttcacctttatttcatcttcataagaatgagaaaggctcaaaaggaagcacttttagaaatcttctctgacctagaagaatccatccaaatccctgccttcctctctgaaccaacagttcccttctctgacaggggccatcctctatcttccatccagcggctcttctttttaggaaggctctggtgcagagcacttcaaatatgtcctcaggccagatactgattgctagtagagagacacccggcacccagtccgaagccctccctcaaaggaccggctcatggcgttggtcactggcaggctcagagacattctgctgtgggcgcagggagcccggccccccatgcagccatgactggatgcgcccccatctcgggggcttgctgcactgcttgtttattgaattttgctacttagaatggcaacattaactttgtgtaccattcattttttaaaaattttccaaagctcggcagtgtatgaaagaaaaaactgggaaagatacttggtttctgttaacttttgtgttgcttgcttaagtgattaaagccagtgcttggagccaagccttcatgccacgaacatgctccacagcctgccctttgctctcctgctcacactgaccaagaatgccgcgtgcttggcctactgaggtgaaaggacaattgaatgacaggtgggcaaagggagaacttccccttcttggtgcgaggaaagtcacaaatttaaaaatgttgcttccagcccagatcctaaatgctagttctcagcagctgcgtggcttaccgttcgccatttccaccaccgccagctgccagcaccgctacagatcacagagatgtgaacagacaatggaaagcactcttagccttgcagtggtctacattttttaggaaccaatatttcagcattctttattacccggcacgctgtgtcctttgcagagttcaagtttatgttactgccagggtcagacagtcatttgctgctgctgctgctgctgctgcttctcgaactggatgcattaggaagctgctgtctgagtgtaggaatgtcttgctaagaaagcaatgtcttccttcatccttttctttcttccctctgcgtgtccttgtttttgtgtaatgcgggagagggttagagctatagagattatatatacactatccgtgcacattatatatatgtagatatacccctatcatgtcagagatctgcatgtcagtttttcagcaactaaggtgcctcatgttctgagttcagcagatataggaaccaagccgccccctcctgcacttgatgctcccacctttgttgtgcctcacttaaaatggtgcttttttcagttgtctgtcttttcttatgtttttatttgtaaggtgctgtatataagttgaatatattatgcacatatcctacccaatgggtagaacaaaaagttgttaatactgtaatataatgtatagatgataccaattttaacagaaatggcatagaatttgtgaatgcctatgtgctttgtcctcttttgtaaggaaatttgcaaatggatgcatacagattaaagtctatgtagtttattttcctattaaatatcaatattataacacaagagaaagaagtgtgaacaaacaagcaacagtttatgaccagcgtatatatagcaatggaaagttgcatctttgctgtgaaaacactttaaagaaaatactttttaaaaaatcccacagctttttggttgccactagacgcttcttattttaatcattttagtaatgctcagctggaccagtgttagttatatttgagtcagaaaaatgttgtttttcaacttgctttataatctcctgcatctatctcctgctgtagcatcacgaaggtgtcaggcaacagtgaaaagtgcacatttttgttgttgcagaaactgtgtcagaggaataagtaaatcagcctgcagcagaagactttgttcagctccagaggcatctgtgaccgtctgtgtccaagtctctctgtgcctttttcttttacaaactgaagctgtggagccaatgaagtaacagtagagattgtagggaaagaatacctcaggaaaaacaaatacacttacaagaagaccctgttcttagaaaatgtgtttagttatgggttagcactagaagagacttggctgtcagccagccaagtgaaggacctctcatccattcccattcatgtcccatcataatacggacccaaaaagcaaactcggttttgccatcagttagaaattacgttttggattgtatattgttacatctctcttccggcttagtttttagtgtctgattgtgacctctgcatttatcttcaaataccctaattttaaaacaaaagaacaagaaaagtttataacaccatgttcactaaaaccacggttgaatcttgggtgtgggcatcctttcgagtgttgtccataagagcagttcgtggaattttgcccatctgacccatattatcagcttattctgccaccagagtagagtctaataaattccaaagtttttatttgctccatggtgtatgttctgactttgaaaatgtcagattctataatcatacccctaacatccaggaaacaaatgacagattatctttaaactgaaattgactctacaatgcaacccttaatgctgaatggattaaaaaagtcagcccttttagtatctgtttgaaagggccgtaaaaagttgacacttttgttgttgtggatcctgcgtgtctagacccacgtgttgtttccatcgtatactgtagggtgcaccccttgggattcatcattaagaactgaggctcactgttgtcagaaacaaagctcccaccccccaggttcaaccttgtgggagaactgttgagcatgagaatgttctagactcagaggtactaaaatttgttaccacatcattgcttcctttctacaggacgaattgaggcttaaactttactgttaatgatactggttcattttaatgtgcttgttggtatgttgctatttttcatttcatagctttcaaaaatcatgctaattgtatacttgtctagtttaaggctattttaaaatatgtacaatactattcacagcatttagttcgtttaatttttattataaagcaatctactaaaaaagtacaactgtatttgaacttttcaatagttgtttgtgagctatgataatcaaaagtcattaaagtcttttttaacaaacattcgtgcttacttttcaacataattcccagttatatacagaaaaagatttccacctgtcacgtatctgcctcttttacctgagcaatggtgtagttcttagacctaaggtctgtaattgcaatacttttaaagaaagatgttgctctaagtgctgtttgttagttatgaaatcagatttttctgcttgttcttaatgctgtggtcaaaccatagcacaaaatcattaaaaataatcagcggcatac

SEQ ID NO: 5990 - DNA, 5237 bp, Homo sapiens
  source 1..5237: mol_type = unassigned DNA
tgcgcactgctggagacgggcgaccttcgctggccggtcggtgggttcctggttttctgctgccgagtaaacaaacgttccctttcctaacttagcagtcacagagctatttccaagagttgttcttaatttcctgtgcgatattcccattggctatttaacactgaacattctgtttttgaatcaaagttagttaaaatttgttgtcaataagtttaacattctgttcttccgcgtgatggattttcttttggagattcgaactgaagcctgtacggaggaaatgttgtttttaagggaaatgaatagaaacaatccactttgaagaagccatggcgaaatcaaagacaaaacatagactttgttctcaggaatcttcagtatctgccctgctggcaagctgcaccctgagtggtagtaattcctctaattctgatggctcgtttcactataaagataagctgtacagatctgcttctcaagctctacaggcttatattgatgattttgatctaggccaaatatatcctggtgcaagcactggaaaaattaacattgatgaggattttactaatatgtcacagttctgcaactatatttacaaaccaaacaatgcttttgaaaaccttgatcacaaaaagcactcaaacttcatatcctgtagaagacacaccgttaatgacatagactccatgagcctaacaactgatgatctattaagactcccagcagatggatcattttcttatacttatgttggaccgagtcaccgaacgagcaagaaaaacaagaaatgccgtggaagactgggttcattggacattgagaagaatccacattttcaaggaccctacacttccatgggcaaggataactttgttactcctgttatacgctcaaatataaatggaaagcaatgtggtgacaaaattgaattgcttatcttgaaggccaagagaaatctagagcagtgtactgaagaattaccaaagtccatgaaaaaggatgacagtccttgctcattagataaacttgaagcagacagatcatgggaaaatattcctgttactttcaaatctcctgttcccgttaactctgatgatagtcctcaacaaacttcaagggcaaagagtgctaaaggggttcttgaagactttctaaataatgataatcagagctgtactctctctggaggcaaacatcatggtcctgttgaagccctgaaacaaatgttatttaaccttcaagcagtacaagaacgttttaatcaaaataagaccacagatccaaaagaagagattaaacaagtttcagaagatgatttctctaaattacagttgaaggaaagtatgattcctattactaggtcacttcagaaggctttgcaccatttatctcgcctgagagacctggttgatgatacgaatggagaacggtcaccgaaaatgtgaagaggaaaatgaaactgtcaccacaatgaatagtcaccacagaacaaataggcattttttctattacttaaactgacaaagtaaatataagccatacattattttgtggttggttcaaggattatatatttctaaaacactaaacttgaaaatacccataggttttgggacctatctttattttgtgccaacatactagaatgtgaactgcaaggacccacaatatatcctgaagtcttactttcgccttctggccagcaaatgtctaatatttaaagatggatgacttctgttcttgaagcttacctggatttaaccttcttcagcatcctcaacattttattacctggttcaggatcattaagaaacttactggtttttatccaaaatcttttacgttaaatagacttttttaaagatatagttagcatcacttttaaacagcttaaaggaatatcaaaattgttattgtgtatctcatctataaggaagtctgttactttgaaattttcataaatttaatatttaagatacattgtatttgaaaattgcattaatagtggggtgatactgtgttaaaaggaatgttgtgttgtgacattcaagagaacctcctcatttaattagtactttgattctgtgtaagataatcttggtagtgcttgacagtttccaaacctttttttggagagatatttaagaatttaatattttgatattagattgtttcccagattttaattttggggttggctcaaactagtgaaaactatgactcaatggccaattgctttatcaaatttgataactaaaacttaaaatgaatatggaaaatcagaaagcaactctattttagagctattttgtaagagttgtgctttctttaacaccatctgtagtcttaagtttgtctctagctagaactgaacaaagctctataatttttaccaagcacttattattaatacttcttataagtagtaagcatctttactaacacaactgagaattaagtcataaaacataactaatacagcacattactgcctgacaaaattaaagagtactgtgtgtatgtataactactacaggttaacacttcacccaaatgatagcgtttttcctcagtagattattgtcaaataggaatttctaagcacattgagtcaaagcattttttccaagttaataaagtgttatttactatctttgttagaggtgacatgtcaaacactacagtgagctctgtggggttttttttttttttttttgcccgtgagttttttaccatgctgctctgaccagtttgagtggcaattaccaatagatttgttttctttattctatggagatgtttttaccactgacactgttttctgattatagtctgcttcatagaaaatagcctgcataatcaaacaaggagttactttgaaattaaagtatgcctggctattaaaaatgcagattttaggtgggtaaacatcaggtaggtctgggtgggtcatgttctaggcctagaaaaatacactattagacaagttctaaagaaggcaaggagataaaggcatcaggtggtaacttctaattgaatattatatgttgatcatacataatatatactatgcctggaaattatgactgaaaagcacctattcggttagtgctcctattcatgagaacatatctccaatactaaatgagataagcctgttctaaaatcttatagccagtattttaagaaacttgattatacttaccaaaggaacattgtttgttttctcttgttttaaatatggagaggtttaatcctttacataacaaaggaattaattttagcaaaatgattcattccaaccttcttataagaaatatctaggagagtcaagtaagaaaaataacgaatctaagtgataaacattcaagaaattctctaaataagagatttatttataattttaatatctcagggttctttttaggtttccaggggaaaagagcaggataacagtgtggagactgctaagttgagaatttaaaacaaatgagaacataagatttttaaaattgcattgtgaatgtaaaatttttatcaatcctttgctctcttttagacatattgagaaaatgttaaatagaaaaaattaagaaattttaataagatgtttcagatctttgagtatgaaaaacataacaaaaaaagcctaatttcaaaaaactatttgagatcaagggacaatggtgtgaccaatatgaagggtcaagactgaaatgtattgtctttactatcaagaactctactttcagttgtttctcagacagttaatttcagcttcatagagatttctgagcaaattaagaaacactgttttcctgggtttgttttgggtatatgtcattatagttatgttatttcttgttgaaatttataattgtaggttttttgtattgttttagtatttaatggtgtataatgtgttattacattatatgtagttataccaaaatattgcctgaagataaatcatgacaaggtcccctgtttattcctgtgttacagacgcatggaattgctcctgtagatttgaatttttgtttcatttttttctgtcccacccttcactctctctgtttcagaacatttttggtagaagtgctatccagaagtgaacttgtcaaaaggcaagtagcatgaaagaagacagaagaagcaaaaggctaatacagtggataatttctgagcacttgaagtttcttcaaatgtgcaagactgtgtgtcttcctattagatgtataaattggatatttcatgcctaattaaatgttgcgttggattgcagtgcctatcatacagtgattggagtaaattgaggcctaatcctgaacacatatagagcatattgttagatatttttcctgtgacatttgaagttattattctcccatttcctttttctttttttgtttataatcatatgtccctaagattgttttccttttttggaccaaaaaaaagaaaaaaaaaatcttagcttttcatcctcccagtgtattctgcattgtccttaccctagatcagccccttctgtgttaacagtttttctcacaatgtagcaacttttatccacccttcaggaccttcactgggactagttcattcattttcaaatagctatttcaacctttaacatctactgtcttagtcttttacacagaagccagagtgactggtcttggcaagactctgttgtgtatcaccactctaaccttactgatttgtttcagcaaatttgctttagttaaattgctttactcagattcccccaaactttatatgtgtattgtcatctttgtgcatattatttctcatgcatgaaatactcaatttttattcttttatctaacgcttactcttacatttctttaaagctctggccaagtattttatttcgtccctaaacattctaactatccaccaaactggtaagttggcttttctttttcctccccctgtcattcatttagctgttatatttcattttaatgttttgggtggtgcctcttatactatgttgtattcctagacaaggaaatgtatatcaaaatatgttagatgattgattgttttatctccttgatgatagcacctcttatactgctttacagaatcaggaaaaagtaaactgcattttacatagtggttttaaatattgattgattgatattctaaacctggtttcctatataaagttgtaagttcaagataaagagaccacattctttact

SEQ ID NO: 5991 - DNA, 5506 bp, Homo sapiens
  source 1..5506: mol_type = unassigned DNA
taacattctgttcttccgcgtgatggattttcttttggagattcgaactgaagcctgtacggaggaaatgttgtttttaagggaaatgaatagaaacaatccactttgaagaagccatggcgaaatcaaagacaaaacatagactttgttctcaggaatcttcagtatctgccctgctggcaagctgcaccctgagtggtagtaattcctctaattctgatggctcgtttcactataaagataagctgtacagatctgcttctcaagctctacaggcttatattgatgattttgatctaggccaaatatatcctggtgcaagcactggaaaaattaacattgatgaggattttactaatatgtcacagttctgcaactatatttacaaaccaaacaatgcttttgaaaaccttgatcacaaaaagcactcaaacttcatatcctgtagaagacacaccgttaatgacatagactccatgagcctaacaactgatgatctattaagactcccagcagatggatcattttcttatacttatgttggaccgagtcaccgaacgagcaagaaaaacaagaaatgccgtggaagactgggttcattggacattgagaagaatccacattttcaaggaccctacacttccatgggcaaggataactttgttactcctgttatacgctcaaatataaatggaaagcaatgtggtaggctgaaaaacccaaaacttatgaataggactaataattgcatttctgaatcatctttgtcttttcccaagaaatcgtctttcaaggacagttcagaacacagtcttgaaaagaattacccaagatggctcactagccagaaatctgaccttaatgtttcagggataactagtatacctgatttcaaatacccagtctggctgcacaatcaagacttgctacctgatgcaaatagtcaaagggtttatcagatatttaaagatgatcagtgttcccctagacatagtcatcaggcacaaggaacttctcggcttatcaataaattagattgttttgaatatgcttttgaaccctcaaacttttcaaattccttgagtgatgataaagaattagttaatgaatacaaatgtgattttgaacatagccagtgtcaatgtgagaatccacttctcccaggacaatccacaaagccattcagtggtgacaaaattgaattgcttatcttgaaggccaagagaaatctagagcagtgtactgaagaattaccaaagtccatgaaaaaggatgacagtccttgctcattagataaacttgaagcagacagatcatgggaaaatattcctgttactttcaaatctcctgttcccgttaactctgatgatagtcctcaacaaacttcaagggcaaagagtgctaaaggggttcttgaagactttctaaataatgataatcagagctgtactctctctggaggcaaacatcatggtcctgttgaagccctgaaacaaatgttatttaaccttcaagcagtacaagaacgttttaatcaaaataagaccacagatccaaaagaagagattaaacaagtttcagaagatgatttctctaaattacagttgaaggaaagtatgattcctattactaggtcacttcagaaggctttgcaccatttatctcgcctgagagacctggttgatgatacgaatggagaacggtcaccgaaaatgtgaagaggaaaatgaaactgtcaccacaatgaatagtcaccacagaacaaataggcattttttctattacttaaactgacaaagtaaatataagccatacattattttgtggttggttcaaggattatatatttctaaaacactaaacttgaaaatacccataggttttgggacctatctttattttgtgccaacatactagaatgtgaactgcaaggacccacaatatatcctgaagtcttactttcgccttctggccagcaaatgtctaatatttaaagatggatgacttctgttcttgaagcttacctggatttaaccttcttcagcatcctcaacattttattacctggttcaggatcattaagaaacttactggtttttatccaaaatcttttacgttaaatagacttttttaaagatatagttagcatcacttttaaacagcttaaaggaatatcaaaattgttattgtgtatctcatctataaggaagtctgttactttgaaattttcataaatttaatatttaagatacattgtatttgaaaattgcattaatagtggggtgatactgtgttaaaaggaatgttgtgttgtgacattcaagagaacctcctcatttaattagtactttgattctgtgtaagataatcttggtagtgcttgacagtttccaaacctttttttggagagatatttaagaatttaatattttgatattagattgtttcccagattttaattttggggttggctcaaactagtgaaaactatgactcaatggccaattgctttatcaaatttgataactaaaacttaaaatgaatatggaaaatcagaaagcaactctattttagagctattttgtaagagttgtgctttctttaacaccatctgtagtcttaagtttgtctctagctagaactgaacaaagctctataatttttaccaagcacttattattaatacttcttataagtagtaagcatctttactaacacaactgagaattaagtcataaaacataactaatacagcacattactgcctgacaaaattaaagagtactgtgtgtatgtataactactacaggttaacacttcacccaaatgatagcgtttttcctcagtagattattgtcaaataggaatttctaagcacattgagtcaaagcattttttccaagttaataaagtgttatttactatctttgttagaggtgacatgtcaaacactacagtgagctctgtggggttttttttttttttttttgcccgtgagttttttaccatgctgctctgaccagtttgagtggcaattaccaatagatttgttttctttattctatggagatgtttttaccactgacactgttttctgattatagtctgcttcatagaaaatagcctgcataatcaaacaaggagttactttgaaattaaagtatgcctggctattaaaaatgcagattttaggtgggtaaacatcaggtaggtctgggtgggtcatgttctaggcctagaaaaatacactattagacaagttctaaagaaggcaaggagataaaggcatcaggtggtaacttctaattgaatattatatgttgatcatacataatatatactatgcctggaaattatgactgaaaagcacctattcggttagtgctcctattcatgagaacatatctccaatactaaatgagataagcctgttctaaaatcttatagccagtattttaagaaacttgattatacttaccaaaggaacattgtttgttttctcttgttttaaatatggagaggtttaatcctttacataacaaaggaattaattttagcaaaatgattcattccaaccttcttataagaaatatctaggagagtcaagtaagaaaaataacgaatctaagtgataaacattcaagaaattctctaaataagagatttatttataattttaatatctcagggttctttttaggtttccaggggaaaagagcaggataacagtgtggagactgctaagttgagaatttaaaacaaatgagaacataagatttttaaaattgcattgtgaatgtaaaatttttatcaatcctttgctctcttttagacatattgagaaaatgttaaatagaaaaaattaagaaattttaataagatgtttcagatctttgagtatgaaaaacataacaaaaaaagcctaatttcaaaaaactatttgagatcaagggacaatggtgtgaccaatatgaagggtcaagactgaaatgtattgtctttactatcaagaactctactttcagttgtttctcagacagttaatttcagcttcatagagatttctgagcaaattaagaaacactgttttcctgggtttgttttgggtatatgtcattatagttatgttatttcttgttgaaatttataattgtaggttttttgtattgttttagtatttaatggtgtataatgtgttattacattatatgtagttataccaaaatattgcctgaagataaatcatgacaaggtcccctgtttattcctgtgttacagacgcatggaattgctcctgtagatttgaatttttgtttcatttttttctgtcccacccttcactctctctgtttcagaacatttttggtagaagtgctatccagaagtgaacttgtcaaaaggcaagtagcatgaaagaagacagaagaagcaaaaggctaatacagtggataatttctgagcacttgaagtttcttcaaatgtgcaagactgtgtgtcttcctattagatgtataaattggatatttcatgcctaattaaatgttgcgttggattgcagtgcctatcatacagtgattggagtaaattgaggcctaatcctgaacacatatagagcatattgttagatatttttcctgtgacatttgaagttattattctcccatttcctttttctttttttgtttataatcatatgtccctaagattgttttccttttttggaccaaaaaaaagaaaaaaaaaatcttagcttttcatcctcccagtgtattctgcattgtccttaccctagatcagccccttctgtgttaacagtttttctcacaatgtagcaacttttatccacccttcaggaccttcactgggactagttcattcattttcaaatagctatttcaacctttaacatctactgtcttagtcttttacacagaagccagagtgactggtcttggcaagactctgttgtgtatcaccactctaaccttactgatttgtttcagcaaatttgctttagttaaattgctttactcagattcccccaaactttatatgtgtattgtcatctttgtgcatattatttctcatgcatgaaatactcaatttttattcttttatctaacgcttactcttacatttctttaaagctctggccaagtattttatttcgtccctaaacattctaactatccaccaaactggtaagttggcttttctttttcctccccctgtcattcatttagctgttatatttcattttaatgttttgggtggtgcctcttatactatgttgtattcctagacaaggaaatgtatatcaaaatatgttagatgattgattgttttatctccttgatgatagcacctcttatactgctttacagaatcaggaaaaagtaaactgcattttacatagtggttttaaatattgattgattgatattctaaacctggtttcctatataaagttgtaagttcaagataaagagaccacattctttactca

SEQ ID NO: 5992 - DNA, 1042 bp, Homo sapiens
  source 1..1042: mol_type = unassigned DNA
ggcggacgctccacgtgtccctcgccgcgccccgtctacccgcccctgccctgaggaccctagtccaacatggcggcgcccagcggagggtggaacggcgtcggcgcgagcttgtgggccgcgctgctcctaggggccgtggcgctgaggccggcggaggcggtgtccgagcccacgacggtggcgtttgacgtgcggcccggcggcgtcgtgcattccttctcccataacgtgggcccgggggacaaatatacgtgtatgttcacttacgcctctcaaggagggaccaatgagcaatggcagatgagtctggggaccagcgaagaccaccagcacttcacctgcaccatctggaggccccaggggaagtcctatctgtacttcacacagttcaaggcagaggtgcggggcgctgagattgagtacgccatggcctactctaaagccgcatttgaaagggaaagtgatgtccctctgaaaactgaggaatttgaagtgaccaaaacagcagtggctcacaggcccggggcattcaaagctgagctgtccaagctggtgattgtggccaaggcatcgcgcactgagctgtgaccagcagccctgttgcgggtggcaccttctcatctccggtgaagctgaaggggcctgtgtccctgaaagggccagcacatcactggttttctaggagggactcttaagttttctacctgggctgacgttgccttgtccggaggggcttgcagggtggctgaagccctggggcagagaacagagggtccagggccctcctggctcccaacagcttctcagttcccacttcctgctgagctcttctggactcaggatcgcagatccggggcacaaagagggtggggaacatgggggctatgctggggaaagcagccatgctccccccgacctccagccgagcatccttcatgagcctgcagaactgctttcctatgtttacccaggggacctcctttcagatgaactgggaagagatgaaatgttttttcatatttaaataaataagaacatt

SEQ ID NO: 5993 - DNA, 3702 bp, Homo sapiens
  source 1..3702: mol_type = unassigned DNA
gggccgccaccaaggcctgcgcgaccctccgcggggctggggagctgggcggggagcccggggcctgccaggcccgggctgcagccgcgtctgatcgccgagcgcgccgcgtagacctccgctcccccaggcccgccacgatgactatcatggtggaggacatcatgaagctgctgtgctccctttctggggagaggaagatgaaggcggctgtcaagcactctgggaagggtgccctggtcacaggggccatggccttcgtcgggggtttggtgggcggcccaccgggactcgccgttgggggggctgtcggggggctgttaggtgcctggatgacaagtggacagtttaagccggttcctcagatcctaatggagctgccccctgccgagcaacagaggctctttaacgaagccgcagccatcatcaggcacctggagtggacggacgccgtgcagctgaccgcgctggtcatgggcagcgaggccctgcagcagcagctgctggccatgctggtgaactacgtcaccaaggagctgcgggccgagatccagtatgatgactaggccgcacctccggggaggtggggggcccctttaaatgactctgtgattctgaagaggtggcttgggagttgggagaagcccagcggatgccccctggggaatctccacatcatcagtgtattactagtaatgtcccgctggagaggccaccgctgtgcagtgtcatgttccagaaattactgatgaagcagcatgtgttggtggcatgtgcactggcctgccatgacagccctctgactggccccccagtgaagagtaaaggcctgcctgccgcaggcttcggaggcgtctgctgagtcctctcacccgcatgggtctggggaagtgatcacgctcagccgacggtctgaccacacttcatcctccccccggggccttctcatcttgggagatgactcctcttcagagcacctgctgcaggactggatcccacccccctgcaggtcctggggtctcagggccttggagcagcccatgctggaatcatgtttacctcctagtgcaaccgtcccctacccagggactgtcgaatggccccacggaggggacgggcggcctgctgagtgaagccacaaataccgagtggacttgaccccggcccccactaggctgcacacctagactcgccctgccagggcctcgctcttcccatctgaaaagtcctggtagttcttgaggtttacttctcaaatgaaatatttttagtaaaaagtacaggtatatctcggagatattgtgggttcagttccagaccacctcggtaaagccaacatcacaataaagcaaggaagcgcattgttttagtttcccagtgcatctaagtcatgtttactgcatattgcagtccactaaatgtgcaatagcattatgtctaacaaatgtacaaaccttaatttaaaaatatttactgttcaaaatgctgacacagaaacgcaaagtgagcacatgctgttggaaaatggtgccaaatagacttgcctgatgccaggctgctacaaaccttcaatttaaaaaaaaaacacagtattcacaaagcatagtagaatgaggtatgcctgtattgctctttctgaagtggtgtgatataaaccatctctaagaaatgtttctaccctaaagatttccccagtacagtcagctctccgtaactgtggtctccacatttagatccaaccagccttggataggaaatatttgaaaaaagaaattgcattggtactgaacacgtacagacctttttttcttgccattattccctaaacaatatggtgtagcatatttacatagcatttatattgtatttggtattataagaaatctagagatgatttaaattatacaggaaggtgtgcgtaggttacgtgcaaacgctatgccattgcccatcagggacttgagcatcctcagatgtcggtgtctgagggttgaggttgcagtcctggaacccatcccccatggatactgaggcatagctgtactgtgtgttttcactttgctttcagaactacgacttgaatgtgatcgattacaataaatgtttttctaaaaagccattttcccacatattatgtgtaaaatatctctaatattcaaagtcttacaaatggaacaagagggaaggtaccagatttgtggctttaaagaatgcaagagtaggtcaggtgaggtggctcatgcttgtaatgtcggcacttttggaggccaaagtgggaggatcgcttgaggccaagagtttgaaactagcctgggcaatatagtgagacctccatctctacaaaaaatgttattccttggtccccaggtcctggggcagggcagggacttggggctctcctctcaggccctggaggctcggagggaggcacttctgctgaggccctgcttataggaaagctcagtatcctggcacctccatgtgtgtaaggacgtcagggtgaattataacccatggtgattaaggaagggccgagcctttctcttgcagagcgattgctcttctgctggcctcgtctagcacaaatcaggtgccctagcacaggccacactcctggagttaatgaagccactttaatcatttatatgccacttaagttgatgggggacagggcaggggtgggaaggaggggttgtctgtctgtgaaaactgagtgtggcttttcttgttgaactgatcattcctgctcttcctgcaaataagtcctgcatacggaccctggaactaaaaatggaaaatcagagcatgccccctcccaattttgtatagctttagtgggctctaaagttgcccgtttttagtgtgaaggaaaaaacgttgatttgcagatatcgtgagaatgaaacctcaacaaagatgtttggttcagtgcttcaaagttgggggacactttttccatgttgaacaaatgccaacttctccggttgcttacagcaaatccttctggaacaatcggggctgaaattgagttgcctttgttaggcgattgggccccattcattcttactcgtgcatcaggtcctggtctgtgtcaggcccaggggacacaggtggtcccagctcagaggcccagtgtccactgcagcccctcccacagcctgcccacccctactgcagggaaaaatgcccagggaggagatggtccaactcctgatcagttttgtgtccgatggagcaggccttgctgagtgaagacactggaactagctgggtcctggggtgacttggaggctttgggcctaaaagggcagcctgaacctggagtcttatctcccccaggagccgaaagcacttttcttgatttcccccaggaaatcaagcgctgcttctcagctcctgtggttttagtatttatatatctgtatcttctttgtagaaatttatttatttttgaataagtaatacctgcctggtacaaaatttaaaaggtacgggagggcgcaagctgcaagggaaggcctgctcctatgccgaccccagaggcagccactgttaccaatttcatgtgtattcctttaactctgttttaaagtaagtctctgaaaactgttcatttccttttgtcagtatttgttgctgaaaacctagaaaaacccagaaaatataatgaaataaaaactacaaatttcacaacccagaaaa

SEQ ID NO: 5994 - DNA, 452 bp, Homo sapiens
  source 1..452: mol_type = unassigned DNA
aggcctgcgcgaccctccgcggggctggggagctgggcggggagcccggggcctgccaggcccgggctgcagccgcgtctgatcgccgagcgcgccgcgtagacctccgctcccccaggcccgccacgatgactatcatggtggaggacatcatgaagctgctgtgctccctttctggggagaggaagatgaaggcggctgtcaagcactctgggaagggtgccctggtcacaggggccatggccttcgtcgggggtttggtgggcggcccaccgggactcgccgttgggggggctgtcggggggctgttaggtgcctggatgacaagtggacagtttaagccggttcctcagatcctaatggagctgccccctgccgagcaacagaggctctttaacgaagccgcagccatcacgaggccctgcagcagcagctgctggccatgctggtga

SEQ ID NO: 5995 - DNA, 895 bp, Homo sapiens
  source 1..895: mol_type = unassigned DNA
caagagcaggcctggagacccgggagtgccttggggagagggtccccgccctgccgggagcccggccctcccggtgccggggtggacactgttagtgtagtcattgtccctatggagaaactgaggcatggagaggctgaagtcacacaagcccgccacgatgactatcatggtggaggacatcatgaagctgctgtgctccctttctggggagaggaagatgaaggcggctgtcaagcactctgggaagggtgccctggtcacaggggccatggccttcgtcgggggtttggtgggcggcccaccgggactcgccgttgggggggctgtcggggggctgttaggtgcctggatgacaagtggacagtttaagccggttcctcagatcctaatggagctgccccctgccgagcaacagaggctctttaacgaagccgcagccatcatcaggcacctggagtggacggacgccgtgcagctgaccgcgctggtcatgggcagcgaggccctgcagcagcagctgctggccatgctggtgaactacgtcaccaaggagctgcgggccgagatccagtatgatgactaggccgcacctccggggaggtggggggcccctttaaatgactctgtgattctgaagaggtggcttgggagttgggagaagcccagcggatgccccctggggaatctccacatcatcagtgtattactagtaatgtcccgctggagaggccaccgctgtgcagtgtcatgttccagaaattactgatgaagcagcatgtgttggtggcatgtgcactggcctgccatgacagccctctgactggccccccagtgaagagtaaaggcctgcctgccgcaggcttcggaggcgtctgctgagtcctctcacccg

SEQ ID NO: 5996 - DNA, 1124 bp, Homo sapiens
  source 1..1124: mol_type = unassigned DNA
gtgaacccggaaggtggcgcggccaccagtaacatgatctctagactgggacggtggggttcctgccggctgtattcgggccttggactggactgagaagctacggtggagaccatccatggaaaagaacccccctgatgatacgggccccgtgcacgtgcctttggggcatattgtggccaatgagaaatggcgcgggtcacagctggcgcaggagatgcaagggaaaattaagctcattttcgaggatggcttgacaccagacttttatctgtcgaacagatgctgcattctttatgtcaccgaagctgatttggtggcaggaaatggctacagaaagaggcttgttcgggttagaaattccaataatcttaaaggaattgtagtcgttgaaaaaacccggatgagtgaacaatacttcccagccctacagaagtttactgtgctggaccttggaatggtgctgcttccagtggccagccagatggaagcatcctgcctcgtcatccagttggttcaagagcaaaccaaagagcccagtaagaaccctcttctcgggaagaaacgggccctgctgctgtctgagccttcgctccttcgaaccgtgcagcagatcccaggagttggaaaagttaaagctccccttctcctccagaagtttccaagcatccagcaactgagtaatgcttccattggggaactggagcaggtggtcggacaagcagtggcacagcagatccatgccttcttcacgcagcccaggtgagggctggcctcagggccacggcatcttctcctgagaccacaaacaccaggatcttgttttcagctttaaaaaccaagagaatgggccgggtgcactggctcacgcctctaatctcagcactttgggaggccgaagacagcggatcatctgaggtcaggagttcaagaccagcctggccaacatggagaaacccctaaaaataggaacaattagccaggcatggtgacaggtgcctgtaatcccagctacttgggaggccgaggcatgagaatcacttgaacccgggaggcggaggttgcagtgagctgagatcgtgccactgcactccagcctgggcaccagagcgagactccgtctc

SEQ ID NO: 5997 - DNA, 2298 bp, Homo sapiens
  source 1..2298: mol_type = unassigned DNA
ggaaggtggcgcggccaccagtaacatgatctctagactgggacggtggggttcctgccggctgtattcgggccttggactggactgagaagctacggtggagaccatccatggaaaagaacccccctgatgatacgggccccgtgcacgtgcctttggggcatattgtggccaatgagaaatggcgcgggtcacagctggcgcaggagatgcaagggaaaattaagctcattttcgaggatggcttgacaccagacttttatctgtcgaacagatgctgcattctttatgtcaccgaagctgatttggtggcaggaaatggctacagaaagaggcttgttcgggttagaaattccaataatcttaaaggaattgtagtcgttgaaaaaacccggatgagtgaacaatacttcccagccctacagaagtttactgtgctggaccttggaatggtgctgcttccagtggccagccagatggaagcatcctgcctcgtcatccagttggttcaagagcaaaccaaagagcccagtaagaaccctcttctcgggaagaaacgggccctgctgctgtctgagccttcgctccttcgaaccgtgcagcagatcccaggagttggaaaagttaaagctccccttctcctccagaagtttccaagcatccagcaactgagtaatgcttccattggggaactggagcaggtggtcggacaagcagtggcacagcagatccatgccttcttcacgcagcccaggtgagggctggcctcagggccacggcatcttctcctgagaccacaaacaccaggatcttgttttcagctttaaaaaccaagagaatgggccgggtgcactggctcacgcctctaatctcagcactttgggaggccgaagacagcggatcatctgaggtcaggagttcaagaccagcctggccaacatggagaaacccctaaaaataggaacaattagccaggcatggtgacaggtgcctgtaatcccagctacttgggaggccgaggcatgagaatcacttgaacccgggaggcggaggttgcagtgagctgagatcgtgccactgcactccagcctgggcaccagagcgagactccgtctcaaagaaaacaacaaaaaaaaaaaaaaaagaaaaaggattttctccagcagcaaccagtgaaagatgaggcgaggcttgaatggagcccgtgggtcgtcctgccttagcgtctgagttcagcttgtgaagttagtgggccgcagagggcactgccttcattctgctaagacgaaaagggctggtgggatcttcgcaagagagtcagggactcacactcagcaaaaagcattagggccgattttaatgtgcgaccttgacctgcatctgtcatggaaagtgccttctaaaaagcttcagtggtggatgtgaccatctgaaggaaacaaatgtacaaggaagcactgtgtatcctaagccctgggttcccagagtttcacctgctgttcatcaggtctggccttcatatacccgtactgcgagggctgtttccaatgtaaataaataactgcgcaacagttccttcctcctttcctttgttcctccctccccccggcctttttttttggcagatgtacagtttgtttataatcactgcatatgtcttctgcacacagaaagtatgaagtctgaagttcccacttaaagttgaaaactcaacggccgggcatagtggctcacacctgtaatcccagcactttgggaggccaaggggggtgaatcacaaggtcaggagatccagaccatcctggccgacatggtgaagccctgtctctactaaaaatacaaaaattagctgggtgtggtggcacacacctgtaatcccaactactcaggagactgaggcacgagaatcgcttgaacccaggaggtggaggttgcaatgggccgagattgcaccactgcactccagcctggatgacagagtgagactccatctcaaaaaaaaaaaaaaaaaatttaaagttgaaaactcaacatgcatgaggcagaacaggctgtgtttgtatatgaaaggcccaacaatggaaggatacaagaaaatgatggcagcagctgcatctagtgagggaagcaggggctggggatcaaaaggtacaaattgcccattcaaaaaatagacacaggccaggcacagtggctcacacctgtagtcccagcactttgggaggctgaggtgggaggattgcttgagtccaggatttcgagatcagcctgggcaacatggcaagaccccatctctac

SEQ ID NO: 5998 - DNA, 2608 bp, Homo sapiens
  source 1..2608: mol_type = unassigned DNA
agcagcgccgcagccggacgagaaagcggaagatggcggcggcggccgggaggccgtgaggagagcggcggctgcgagggcggccgatggcggccgggaggcgccctcggacacttgcgggtcgttagggcgcgacgctgggaggcatgtcggagcacgtggagcccgcagctccggggcccgggcccaacggcggcggcggcggcccggcccccgcgcgcgggcctcgcacccccaatctcaaccccaaccccctcatcaacgtgcgcgaccggctcttccacgcgctgttcttcaagatggctgtcacctattcgcggctcttcccgcccgccttccgccgtctcttcgagttcttcgtgctgctcaaggccctgtttgtgctcttcgtcctggcctacatccacatcgtcttctcccgctcgcccatcaactgcctggagcatgtgcgtgacaagtggccgcgtgagggcatcctgcgtgtggaagtgcggcacaactcgagccgcgcgcccgtcttcctacagttctgtgacagcggcggccgcgggagcttcccgggcctggccgtggaaccaggcagcaacctggacatggaagatgaggaggaggaagagctgaccatggagatgtttgggaacagctccatcaagtttgagctggacatcgagcccaaggtgttcaagccgccgagtagcacagaggccctgaatgacagccaggagttccccttccccgagacgcccaccaaagtgtggccgcaggacgagtacatcgtggagtactcactagagtatggcttccttcgcctgtcgcaggccacccgccagcgcctgagcatccccgtcatggtggtcaccctggaccccacgcgggaccagtgcttcggggaccgcttcagccgcctgctgctggatgagttcctgggctacgatgacatcctcatgtccagcgtgaagggcctggccgagaacgaggagaacaagggcttcctgcggaatgtggtgtcgggcgagcactaccgctttgtgagcatgtggatggcgcggacgtcctacctggccgccttcgccatcatggtcatcttcacgctgagcgtgtccatgctgctgcggtactcacaccaccagatcttcgtcttcatcgtggacctgctgcagatgctggagatgaacatggccatcgccttccccgcagcgcccctgctgaccgtcatcctggccctcgtcgggatggaggccatcatgtcggagttcttcaacgacaccaccaccgccttctacatcatcctcatcgtgtggctcgcggaccagtatgacgccatctgctgccacaccagcaccagcaagcggcattggctgcgcattccatgatctacttcttccaccactacgagctgcctgccatcctgcagcaggtccgcatccaggagatgctgcttcaggcgccgccactgggccccgggacccccacggcgctgcccgatgacatgaacaacaactcgggcgccccggctacagcccctgactctgccggccagccccccgccctgggccccgtctcgcctggggccagcgggagtcccgggcctgtggcagcggcgcccagctccctggtggccgcggcagcctcagtggcagcagctgccggtggtgacctgggttggatggcagagaccgctgccatcatcacagacgcctccttcctgtccggcctgagcgcctccctcctggagcggcgtccagccagcccgctgggccctgctgggggcctcccccacgccccccaggacagtgtccccccgagtgactccgcagcttctgacacaactcccctgggggctgcggtaggcgggcctagcccggcctccatggccccaacggaggcgccctcggaggtggggtcctgagccgcacagctgagccgcctctgacccctgctggctgggcctgaccttcccgagcccgtgggggtgggggaggccagccacctccttcctctgggactgcccagcctgtgtcgggggctttcagggtttcgtggggtttgcccggaaggcggctttcctccccctggtgtgaggtcgcgcccgaggcttgtacccgctagtgaggtgtttgagctggtcagcaaggagagggggtggggttccgcggaaggttctggaggggtcttggtaggtctgcagtgaaccgtcctgaggatggagtggggtcccatggtgcaggtctctgagcaaggcggaggtgtggaggagaggccggcttggggtggggcctcgcgccctagtgccggccggcctcagcccggctctgcctggtgctccctgcagtgccttctccatggccccgccctccccgcgtgtgcgccaggcttggggtccccgggagagcagagcttgcgcctcgggcatagggacgtggggtgcaggcgccaacatcagtggcagcagccagggccgtggtccagtcccactcggggatggagtgggccggcggccaaaccagtcactcggggaggaatgcggaggagcgctcattccattctatttaattgcagtgtacaaaattgtgtttgtatatagaataaactgtctgttgacagcggc

SEQ ID NO: 5999 - DNA, 2708 bp, Homo sapiens
  source 1..2708: mol_type = unassigned DNA
agcagcgccgcagccggacgagaaagcggaagatggcggcggcggccgggaggccgtgaggagagcggcggctgcgagggcggccgatggcggccgggaggcgccctcggacacttgcgggtcgttagggcgcgacgctgggaggcatgtcggagcacgtggagcccgcagctccggggcccgggcccaacggcggcggcggcggcccggcccccgcgcgcgggcctcgcacccccaatctcaaccccaaccccctcatcaacgtgcgcgaccggctcttccacgcgctgttcttcaagatggctgtcacctattcgcggctcttcccgcccgccttccgccgtctcttcgagttcttcgtgctgctcaaggccctgtttgtgctcttcgtcctggcctacatccacatcgtcttctcccgctcgcccatcaactgcctggagcatgtgcgtgacaagtggccgcgtgagggcatcctgcgtgtggaagtgcggcacaactcgagccgcgcgcccgtcttcctacagttctgtgacagcggcggccgcgggagcttcccgggcctggccgtggaaccaggcagcaacctggacatggaagatgaggaggaggaagagctgaccatggagatgtttgggaacagctccatcaagtttgagctggacatcgagcccaaggtgttcaagccgccgagtagcacagaggccctgaatgacagccaggagttccccttccccgagacgcccaccaaagtgtggccgcaggacgagtacatcgtggagtactcactagagtatggcttccttcgcctgtcgcaggccacccgccagcgcctgagcatccccgtcatggtggtcaccctggaccccacgcgggaccagtgcttcggggaccgcttcagccgcctgctgctggatgagttcctgggctacgatgacatcctcatgtccagcgtgaagggcctggccgagaacgaggagaacaagggcttcctgcggaatgtggtgtcgggcgagcactaccgctttgtgagcatgtggatggcgcggacgtcctacctggccgccttcgccatcatggtcatcttcacgctgagcgtgtccatgctgctgcggtactcacaccaccagatcttcgtcttcatcgtggacctgctgcagatgctggagatgaacatggccatcgccttccccgcagcgcccctgctgaccgtcatcctggccctcgtcgggatggaggccatcatgtcggagttcttcaacgacaccaccaccgccttctacatcatcctcatcgtgtggctcgcggaccagtatgacgccatctgctgccacaccagcaccagcaagcggcattggctgcggttcttctatctctaccacttcgccttctatgcctatcactaccgcttcaatgggcagtatagcagcctggccctggtcacctcctggctcttcatccagcattccatgatctacttcttccaccactacgagctgcctgccatcctgcagcaggtccgcatccaggagatgctgcttcaggcgccgccactgggccccgggacccccacggcgctgcccgatgacatgaacaacaactcgggcgccccggctacagcccctgactctgccggccagccccccgccctgggccccgtctcgcctggggccagcgggagtcccgggcctgtggcagcggcgcccagctccctggtggccgcggcagcctcagtggcagcagctgccggtggtgacctgggttggatggcagagaccgctgccatcatcacagacgcctccttcctgtccggcctgagcgcctccctcctggagcggcgtccagccagcccgctgggccctgctgggggcctcccccacgccccccaggacagtgtccccccgagtgactccgcagcttctgacacaactcccctgggggctgcggtaggcgggcctagcccggcctccatggccccaacggaggcgccctcggaggtggggtcctgagccgcacagctgagccgcctctgacccctgctggctgggcctgaccttcccgagcccgtgggggtgggggaggccagccacctccttcctctgggactgcccagcctgtgtcgggggctttcagggtttcgtggggtttgcccggaaggcggctttcctccccctggtgtgaggtcgcgcccgaggcttgtacccgctagtgaggtgtttgagctggtcagcaaggagagggggtggggttccgcggaaggttctggaggggtcttggtaggtctgcagtgaaccgtcctgaggatggagtggggtcccatggtgcaggtctctgagcaaggcggaggtgtggaggagaggccggcttggggtggggcctcgcgccctagtgccggccggcctcagcccggctctgcctggtgctccctgcagtgccttctccatggccccgccctccccgcgtgtgcgccaggcttggggtccccgggagagcagagcttgcgcctcgggcatagggacgtggggtgcaggcgccaacatcagtggcagcagccagggccgtggtccagtcccactcggggatggagtgggccggcggccaaaccagtcactcggggaggaatgcggaggagcgctcattccattctatttaattgcagtgtacaaaattgtgtttgtatatagaataaactgtctgttgacagcggc

SEQ ID NO: 6000 - DNA, 789 bp, Homo sapiens
  source 1..789: mol_type = unassigned DNA
gggataacccgcggccgcgcctgcccgctcgcacccctctcccgcgcccggttctccctcgcagcacctcgaagtgcgcccctcgccctcctgctcgcgccccgccgccatggctgcctcccccgcgcggcctgctgtcctggccctgaccgggctggcgctgctcctgctcctgtgctggggcccaggtggcataagtggaaataaactcaagctgatgcttcaaaaacgagaagcacctgttccaactaagactaaagtggccgttgatgagaataaagccaaagaattccttggcagcctgaagcgccagaagcggcagctgtgggaccggactcggcccgaggtgcagcagtggtaccagcagtttctctacatgggctttgacgaagcgaaatttgaagatgacatcacctattggcttaacagagatcgaaatggacatgaatactatggcgattactaccaacgtcactatgatgaagactctgcaattggtccccggagcccctacggctttaggcatggagccagcgtcaactacgatgactactaaccatgacttgccacacgctgtacaagaagcaaatagcgattctcttcatgtatctcctaatgccttacactacttggtttctgatttgctctatttcagcagatcttttctacctactttgtgtgatcaaaaaagaagagttaaaacaacacatgtaaatgccttttgatatttcatgggaatgcctctcatttaaaaatagaaataaagcattttgttaaaaagaaaagtct

SEQ ID NO: 6001 - DNA, 5466 bp, Homo sapiens
  source 1..5466: mol_type = unassigned DNA
gagccgcacggagctgcgggcagcgggcggactgttaaaccgcggcggcggcggcggcggcggcggcggcggcggcggcggcggcggccggggcgggagcggggcgcgctctggagacgagtcagcggcgccccgggtgggggaggcgggcgggcagctagagatcacctcagcagcccccaccacggccggaccgaaggtgcggcggcggaggggagccagggcgccccagcaggtttccaatacttatctacaggaatcgccatgaccccagctctgagggaggcaacagcaaagggtatcagcttttcatctttgccaagtaccatggagtctgacaagatgctctacatggaaagtcccagaactgtagatgaaaagctaaagggagacaccttttctcagatgcttggatttccaactcctgaacctactcttaatactaattttgtgaatttaaaacattttggctcccctcagtcttcaaaacattaccagactgtttttttaatgagatctaattctacattaaataaacacaatgagaattataaacaaaagaaattaggggagcccagttgcaataagctgaaaaacatactgtataatggcagcaacattcagctcagtaaaatctgtctttctcattctgaagagttcatcaaaaaggagcctctatcagataccacgagccagtgcatgaaagatgtacaaattattctggattcaaatataaccaaagacactaatgtagataaagtacaactacaaaactgtaaatggtatcaagagaatgcacttttggataaagttactgatgctgagattaaaaagggtttattgcactgtactcaaaagaaaattgtacctggccactcaaatgtgcctgttagttcttcagctgctgaaaaagaggaggaagtacatgctcgtttacttcattgtgtaagcaaacagaaaattttacttagccaggctagaagaactcagaaacatttgcagatgctcctggcaaagcatgttgttaagcactatggtcagcagatgaaattgtctatgaaacatcaactccccaaaatgaagacatttcatgaacctaccacaattttgggtaatagtttacctaaatgcactgaaattaagccagaagttaacacattgactgcagagaataaattgtgggatgatgcaaaaaatggctttgcacggtgtacagctgcggaaatccaaagatttgcattttctgctacagggctgttgtctcatgttgaagagggtttggattccgatgcaactgatagcagctctgatgacgatttggatgaatatacccttagaaaaaatgtggcagttaactgtagtactgaatggaagtggcttgtagacagagcacgagttggcagccgatggacttggcttcaagctcagatttcagacctagaatgcaaaatccaacaactaacagacattcacaggcaaattcgtgcctccaaggggatagtggtcctagaagaatgtcagcttccaaaagatattttgaaaaaacaaatgcaatttgcagaccaagcagcttcactaaacattctagggaatcctcaggttccccaggagtgtcaagatcctgtaccggaacaagattttgaaatgtcaccaagcagccctactttacttcttcgaaacatcgaaaaacagagtgcacagttgactgagatcatcaacagtttgattgcccctctcaacttgtccccaacttcatcacccctctcttccaaatcctgtagccataaatgtctggctaatggcatttacaggagtgcatcagagaatttagatgagctgtcttcctccagtagctggttacttaaccagaagcacagtaagaaaaagagaaaagacaggacaagactgaaatcttcatccttgactttcatgagtacatcagcccgaacaaggccacttcagagtttccacaaacgaaaactgtacagattgagccctactttttattggactccacagactttgccttcaaaagaaacagcatttttaaacactacacaaatgccttgcctgcaatcagcttcaacttggagtagctatgaacacaattcggagtcttacctattaagagaacatgtatcagagttagattcctctttccattctgttctatcattgccatcagatgtgcctcttcattttcactttgaaacactgttaaaaaagactgaaataaaaggcaatcttgctgaaaataaatttgtagatgaatatatcatatctccatcacctgtacatagtactctgaatcaatggagaaatggatattcacctatatgtaagcctcaaataaggtcagaatcttctgcacaactgttacagggaagaaagaaaagacatttgagtgaaacagcattaggagaaagaactaaacttgaagaatctgattttcaacacacagaatcaggatcccatagcaattttactgctgtttccaatgtcaacgttttatcaagaatccagaattcatcacgaaatactgcacgacggagattgagaagtgagagctcttatgacatagataacattgtgattcccatgtcattagtagccccagctaaattagagaaactccaatataaggaaatacttactccaagctggaggatggttgttcttcagcctttggatgaatataatttaggcaaagaagagatagaagatctttctgatgaagtcttctccctaaggcacaaaaaatatgaagagagagagcaagccaggtggtcactatgggagcaaagcaagtggcacagaagaaacagcagagcttacagtaaaaatgttgaaggacaggacttgcttttgaaagaataccctaataacttcagtagcagtcagcaatgtgctgctgcaagtcctcctgggcttccttcagagaaccaggatctgtgtgcatatggcttaccttctttaaatcaaagtcaagaaaccaagtctttgtggtgggaacgacgggcttttccactgaagggtgaagacatggcagccttattatgtcaagatgaaaaaaaggatcaggttgaaaggtcaagcacagctttccatggtgaaatcttcggtaccagtgtaccagagaatggccaccatccaaaaaagcagtcagatggaatggaagaatacaaaacctttggtctaggacttactaatgttaaaaaaaataggtgacagggaacaggttaagaaaactatgtaaatgtaggaaagatgggaggaaataaagccctgttctggatcccccatcccctccagaataagagcatgttctgcatgtattaatcttttatgctgtttatgaaacaggcaagataagtctgtttttccttctggaaccataagggtaaccagattttcatctacagacaagtggtagtcatttgtgtttatcatgcaacttacttacaaacaccaagatattaattgctgcaacttgatgtcaaatcacattactgggtaatttttaagactatgtacccacaccatacatacatacatatatatatacacatacatacaaacctgtgtgccaagtgacagctatttttttatatacatggtaattcattaaaattgccttagtaatatattagaatatacaaatatgtgtgtataaaataaacatacacacacacacacacccctatgtagtttttaaaacactggcaatgacccactccccttggaaatgcatgtatgaactaccctatgaaatgtaagctgcagaatagataaaacacaggtttccactaataaaagacatctgaacgtcctgaatatagagacagaagttttttgttgttgttgttgttgttttaacatgtttaaccaacagaagttatttacagaaattcatatatccaggcaacacaaaactcctttattcaaaatcactgctatctttgggactaaacacaggctactttctgtttactcctaacaaaataaagcaagcaaatttgagtcaaatattggtgcactttaatactatcacatctttgaaaactcaatttgagttttaccaattaatgtgtctcatgaagagaagacaccagttttaaaatgagccacaaacagtaaagccctatcagtataaaatttgaaaaaaaaaaaaaagatgattgtatttctagattagcaagaaattagttaattctggctgatttctatttctagctaatttggtcattctttgccatagcttactctattcaaataaacatatattcttgcttgcatcctagattggaaattaaaatttttcaaagaacaaagcttcaatattggatactgaagagtatacatgaaagaaaattccttttgaagctattaaaccatttttttcctatgtgaaagttgaggacaatttatataactcactttttgtcatgtaaaaaaggttactcaagttgtactacccacataactgaaaatattggccatttggccttatctgtgagatttgacactaagtttttgttagagattggaaattatactagtccttttaaggggtaaaaaattcaattcaatactgacaaacttttgcttgtagttttactgtacatttatttttaaagaaaaagaaaacaaaagccagacaaacccaagttgtccaggcaaataaactcaaatctttgtcacgtctgatattataatcttctatgtaagttttttaattaaagttatttctatatgccgtgtgttgcttgttattaaatgcgacgtattcatggcacaaagctttcccaagctgaataaaaacaaacattaacaaatttttaccttgtaatgcaggaagaaacccaagcaagctctagtctgtgcttaagtgttagcattcttattttttgaaccttatttctcaaaacttatagtagcctcaagaagtctattgatattggtcatgtttatttcttgccatatttataacacagcaagagtatttacaggaatgaagtagctgacacatatttttagactctgtataattcagaacagttataaatatttagtttatggattgactctgtatcctgtcatcttttcgcctacctgatctttcttggaataaaataatatatccttggggtcaagatccatagttccagaattttctcagccatctggttctgctacagcgtaaaattagactggaaataagacaacgttaagtaaaaagcttcttttacctaacccacctcccaagggctccatttgtaaaagtacagaccagaaattctaccacttcccagatcctttccagggtaccaccctattaagcattaatttcttcattttttaaatggggacaaaaatatctgctttattattaccacttacttatagaggtgatttacagatttaatgagaatatatcaaagtactttataactcacaaaaatataa

SEQ ID NO: 6002 - DNA, 1566 bp, Homo sapiens
  source 1..1566: mol_type = unassigned DNA
ccgcctccgccgcggcccccacctctgcctccttctactcgggcgccccggcggccgccacctctccccagcccaggagaggctgcggagccgcagccgcccagaccgcgcagcgcgggaggcaggttccgcacgaaataaatcagaatgagttatgcagaaaaacccgatgaaatcacgaaagatgagtggatggaaaagctcaataacttgcatgtccagagagcagacatgaaccgcctcatcatgaactacctggtcacagagggctttaaggaagcagcggagaagtttcgaatggaatctggaatcgaacctagtgtggatctggaaacacttgatgaacgaatcaagatccgggagatgatactgaaaggtcagattcaggaggccatcgccttgatcaacagcctccacccagagctcttggacacaaaccggtatctttacttccatttgcagcaacagcatttgatcgagctgatccgccagcgggagacagaggcggcgctggagtttgcacagactcagctggcggagcagggcgaggagagccgagagtgcctcacagagatggagcgtaccctggcactgctggcctttgacagtcccgaggagtcgcccttcggagacctcctccacaccatgcagaggcagaaggtgtggagtgaagttaaccaagctgtgctagattatgaaaatcgcgagtcaacacccaaactggcaaaattactgaaactactactttgggctcagaacgagctggaccagaagaaagtaaaatatcccaaaatgacagacctcagcaagggtgtgattgaggagcccaagtagcgcctgcgcttgcgtggtggatccaacaccagccctgcgtcgtgggacttgcctcagatcagcctgcgactgcaagattcttactgcagtagagaactctttttctcccttgtacttttttttgacctggcatctttttatagggaaaaatggcctttgtaggcagtggaaaacttgcaaggaaagctgccgtctctttggcagtctgatgcagagcctgcactctggcactcgctgaagaatctggaaggttgcggtttgctcttccagtgttcgggggcctctggctgctgaaggattcggtctaccacggagggctgtgctgttaggctgcatcccactcaaaatacaggaaaagcacgaatcatgattctgctttctgttagcttaggcagacattgggccttcacctacaagtttttccttacccctgtggtttttgtgtttttttttttttctttttccataggaaagaatatataaatttgtaaatcctaattcaaagatggctcatgtgtgagggcattgagtttgatttgttttccctttggtctgggttgtgtggcttttgggggatgcgtgtgagggggctatgtgttttttaattttttaaatatatattttggtgctgtgtgtggtaagagacttgttcctagtggatcaatgaaccatctcttctgggcagttttgttgaaaataaaggtttctctttgatttcaagaatgaccaaaa

SEQ ID NO: 6003 - DNA, 1196 bp, Homo sapiens
  source 1..1196: mol_type = unassigned DNA
cttctactcgggcgccccggcggccgccacctctccccagcccaggagaggctgcggagccgcagccgcccagaccgcgcagcgcgggaggcaggttccgcacgaaataaatcagaatgagttatgcagaaaaacccgatgaaatcacgaaagatgagtggatggaaaagctcaataacttgcatgtccagagagcagacatgaaccgcctcatcatgaactacctggtcacagagggctttaaggaagcagcggagaagtttcgaatggaatctggaatcgaacctagtgtggatctggaaacacttgatgaacgaatcaagatccgggagatgatactgaaaggtcagattcagcaggtggtgcacgactgttggcggaaggaacgcgtgttcatcctcagtgatctgccctccagcatctcggcagcatctcatcctccatcgtcagctggctctgccgatgtcctgcttctgttcactcacagaactgtcccctgctccgtggtgggcaggagggaagtggtgcagggctgcgtgcattgcctgcgagtcgggacagttgatgggcacatggccttgtagctctgggcacagatgtgtttggattcattgcagcggaccaccgggcactgttgaccccactgagcagtgctaagtgttggtttagtggatgttcgtggaattgctgacccatccaagggcgtcctttggagccagtggagcctgccggcgcatctgaggggcagaatgctgctagcacttgaatctgggatctcgccttattctcaagtagcaaggcatctcgacaagcatggtctaggtctggtggccagcttgccagtacctgagccggtcgggtcatctgcctctgagggaccgtcctcaccgagctcctgcatcccttgagtgttgatcaggaggcgtccacagcattgttctcgcctctgaatgatgcttctttctgtgttggagcctggcgaagttgtgttttcaagccctctacttctctttccagtgggtaggagcttttggcagtgtttactttacctagatggcttatataatccagtaagagatgcaaagataaaattgctgcggttgttacagaagcatggcggcctccagactgacccattggttgccctttagattttgtaaggatgcggtgctggggaggtggtgcttccctacccc

SEQ ID NO: 6004 - DNA, 6869 bp, Homo sapiens
  source 1..6869: mol_type = unassigned DNA
gccgccctgcgggcaactgagaccctcgcagctgcaccgtcctcctccgccgccagtcgtccgccgccatggacgtgtaccccccgcgccggcaggggctgccccgcgctcggtcccctggcggctccagccgcgggtcaccctccgtcagctgcagtcgacttcggcaggttcagagcatcctgacccagagcagcaagtctcggccggatgggatcctctgcatcctaggaatcgatagcaggtacaatgaaggctgcagagagctggcaaattatcttctatttggtttgtacaatcagaataccagtgattttgagaaaacgggattttctgaagaagtactagatgatgtaattatattgattaaatcggatagcgtccatctgtactgtaatcctgtaaactttcgctatctcttaccttatgtggcacattggagaaatctgcatttccactgcatgaccgaaaatgagtatgaagatgaagaagccgcagaagaatttaaaattaccagctttgtggacatggttcgagactgtagtagaattggcattccttacagctcccaaggtcacttgcagatatttgatatgtttgtggtggagaaatggccaattgtacaggcctttgcacttgagggcattggaggggatggattttttaccatgaaatatgagttgcaggatgtgagtttgaatctatggaatgtctacagcaagatggatcctatgtctctggagagtttgctttcagatgatttggtggcttttgaacatcagtggactagcttcttcgctaattttgacacagaaattcctttcctgctagaactttcagaatctcaggcgggtgagccattcagaagttatttcagtcatggaatgatctctagccatataactgaaaacagccctaaccggcagccatttgttctctttggtaatcactccacacgagaaaacctgaatgctggcaactttaacttcccttctgaaggacatctggtacgaagcactggtcccggcgggagctttgccaagcacatggtagcccagtgtgtctcaccaaagggacctcttgcttgttcgagaacatacttttttggagctactcatgttccttacttgggtggtgacagcaagctgcccaagaaaactgaacaaattaggctattgtcccagatatatgctgctgttattgaggctgttttggctggcattgcatgttatgctaaaacttccagtctaacaaaggccaaggaggtagcagagcaaactctgggatctgggttagattcctttgagttgattccgtttaaggcagccctgcgctccaagatgacttttcatatacatgctgtgaataatcagggaagaattgtaccgctggacagtgaagatagcttatcctttgtgaagacggcttgtatggccgtctatgacattcctgacttactgggaggcaatggttgtttaggatctgtggttttctctgaatcatttttgacttctcagatcttagttaaagaaaaggatggcactgttaccacagaaaccagctccgtagtcctgactgctgctgtacccagattctgctcctggctggtggaagataatgaagtaaaattgtctgagaaaacccagcaagcagtgaggggggatgagtctttcctgggcacttatctaacaggaggagaaggagcatatctttattccagcaatctacagtcctggcctgaggaagggaatgttcatttcttctctagtggccttctgttttctcactgtcgtcatagaagtatcatcatttccaaggatcacatgaattccatttccttctatgatggggattccaccagtactgttgctgctcttctcatagacttcaaaagctcattgcttcctcacctcccagttcatttccatggatcaagcaattttctgatgattgcccttttccccaaatcgaagatataccaagcattttactcagaggtcttctccctctggaaacagcaggataactcagggatctctttaaaagtgatccaggaagatggattatctgtggaacaaaagagattgcactccagtgcacagaagctcttcagtgccctgagccagcctgctggggagaaacggagttccctaaagttactctcagccaaactcccagagctggactggtttctccagcatttcgccatcagcagcattagccaggagcctgtgatgcggacccatcttcctgtgctgctgcagcaagctgaaatcaacactactcacagaatagaaagtgacaaggtaattatcagcattgtaaccggcctcccaggctgtcacgctagcgagctctgtgcttttctggtcactctgcataaggaatgtggcagatggatggtgtatcgccaaatcatggacagctctgaatgttttcatgctgcacacttccagagatacctttccagtgccctagaggcccagcagaaccgctctgcgcgccagtcagcctacatccgcaagaagaccagactgctggtggtgttacaaggctacacagatgttattgatgttgtccaggccctgcagacccacccagactcaaatgtcaaggcctccttcaccattggtgccatcacagcatgtgtggagcccatgagctgctacatggagcacagatttctctttcctaaatgtcttgaccagtgttcacaaggcctggtgagtaacgtggtattcaccagtcacaccacggagcagcggcaccctctccttgttcagctgcagagcctcatcagggctgccaatcctgctgcagccttcattcttgcagaaaatgggattgtcaccaggaatgaagacattgagctgattctctcagaaaacagtttttcaagtcctgagatgctacgatctcgatatttaatgtatcctggctggtatgaaggtaaattgaatgctggatcagtctatcccctaatggttcagatctgcgtatggtttggccgtcccttggagaagactcgctttgtggccaaatgtaaagcaattcagtcctccatcaagccaagtcccttctccggaaacatctaccacatcctgggcaaagtgaagttttcagactctgagaggaccatggaggtctgctacaacacactggccaactccttgagcatcatgccagttttggaaggacccacaccaccaccagactccaaaagcgtatctcaagacagcagcgggcagcaggagtgctaccttgtgttcatcggctgctccctgaaggaagacagcatcaaggactggctgcggcagtcagctaagcagaagcctcagaggaaagccctgaagaccagggggatgctgacgcaacaggagatcaggagcatccacgtaaaacgccacttggaacccctacctgcaggctacttttataatggcacccaatttgttaacttctttggtgacaaaactgattttcacccactcatggaccagttcatgaatgactacgtggaagaagccaaccgggaaattgagaagtataaccaggagctggaacagcaggagtatcatgacctctttgagctgaagccctagaggaaggctgggcccgtacgtcctgcagaatgtccaccttggagatggacgaacgggtgtcttaacctcagctctgctggaggcctctcccttaaggggctgtctttgttctccttggcctgtgtgggctggcttgagtgcatgttgtctttattccctgtatagcgctgaagagcatcacctgcaccattgattttgggggtcgggggaatactcaaggatgagcagatggggcctgcccgtctacgtgtgcaactggcagtccaggagctctgggtttctgataacaggatctcctttgggctcttgaggttggggagaagcattaggattacacagaggagctactgggacttagaaggaaccctggctgcctgaactgtggccgtgtctgggaggcgaggccacgacaggcctcaagcctcagatgctgctccacgagagccatcttccccagtggagtgcctgcctcccctgctaggcccgtttccctgaaggagctggccgtactggccgtgggcccagtcctgggaggagcagcacagccttgcccaggcccagtccacagagccagcagcttgggttgagatgaatgatgtgttcacaaatgaggggatttcccttctggactaaactgaaggagaggcttgttgctttccagaggtgtgtggctcttaagttgacatcagcttttccccttgtgggtggttctttagctctcctgtcacaccattcgggtgtcctaatgtagggacaagagcaagcctgctgctcaggccccctggcgaggcttcacctcactgtggaagggggcgtcctgcagctggttagtcttaggcctggtggctgatcacttgtggggtcagtctccagcacccagcgctcccacaagccttgccaaggaaggcctgcttttcagccacaaacttcaggaaactcatccccccgctccccaaagtgttgttgctggccctgggcttgtgtggctcctgaggattgggaatttcaaataattgcaatacctgagttagaattccttctaatggcatcgttttaagctggaccataaagcagaggggaattacaagtgtgtcccatgcctgaccttcataattggtgtgggggacaggggagtcacagccactgatatttaggtgatgtctcttaggacttcagtgcctcagctgcctgaactgtaaatgttttctgaatttcacatatttttttttgcatgccttaggaagaagcacataggtaaaaccagcagtttccagtaatatagggggtttttgagcaaggcccctggagcagcggagagacaagatggagcacatgtagtctgtgtgcctggtcacacagaggcctgcatgcaagtagcaaagcagctctcaagggcttgtcagtaaaatatattagaaaaaaaaaaaaaacaatttgaagccaaatgaacaaaactccagataccattgataagaaattttgcatcaagaagggcttctgaaaagacccacgtgctccagtcccagctccaaaagccactgatgacaagggccccactgtggaacctaagtctgggagccccctgacttctggctggccagaggctgcggtccgtcaagggcttgcctcgcttcagaatcagtaacatagatcttaagtgcaattgattaataagcagtgagttactgtagcttcctttagctctaccgaactctttttaaaaactcaaacttgagcagccttagaaaaggggttggggggtgggaaccacaggccatttctctaagtgggctgctgtgaagttttaaatgaaagctctagctttaggagcttgagccatttcctgactgcactggcctggcagtctggctgctgcagaagagtttttaaagaggggtcggagcccgcccgtgagagcgggtcttctcaccatgtggggctgtactacgtggtggtctttgtttctcttcacagaaatgctctctcaccaacttgccccactgtcccaactcctctcctcttagagaaaaaactgtgattacctcaacttgaatatgaaactgtgattgaaaaaagtcaaaacgtgaagaagcatcaaagccaaaaaggcaaaactggctgaggcctctgttgatgctcctcagcctactcgggaacgtgaaggggcagctggcgaaagggcattcctggggccacttgctctgccccactgataaggcacacccgcggtgcactgtgagctctttgaggactgaggccaggggatgcctcctggaacctgccaggcctctctgttctgtgaaggtcagtatccacttgattcctccaggcggcgctccaggtgggaggagcagggtcttctgctgtttccaaaggaatggccatgacactgcttttgaccttagaagtggatccagggacccagcaaagagcgggggtgggttcccagggacaggcagtcctcccggggcttacatgctttttgctaactttcctattagcagcttcagtttatatcacccagagtgcgtgggataatgttgaagtcgctgaagttacgggttattttatgtttttacatgggatttttctgtttttgattggaagaaggagacagaaattggaggaaatgggattattatcctagggaagggccgttggcaaggagttgagccggcccctctgagccctgggggctatctgacctgaagcctggacactgggcccttcaggtcgcaagaaaaagttccctcctaaattctattaggattttggagaatttttgcacagtaagaagctctgggttgctccttgggcttctcaaaagggaaaagttcaattcaaagattgtaaactacgaagtattccagccgtgttgctgatctagttggatagttgtacctcaaaaaagtaggtgagaactggcttcctcattgtcccaggatgtcaaatactaatgacataagagctcacttacgtgccaaaattcacttttatactagtttttcagtgctttaatatttgtaacttaaattttaaaactcgtatttacaaacactactgtaacttcagtgaaactgaattgtgcgattgaagctttttgcttatcatagtatttattacactacttaattcagtaaatatataaaagtagccttcaatttatttttatattattttacatgtttttacctgcagttgtgtatgtgaatttaccttggtaatcgagatgtcatgctaaggaccaataaactatcactgaacaag

SEQ ID NO: 6005 - DNA, 3111 bp, Homo sapiens
  source 1..3111: mol_type = unassigned DNA
ataccggagttttgctctatcactgtatcatggacagcaagcttatggaacttattcctcaaaaagtgggacatgctgaaaatacaaacctagcttgagtttagttatgtccctaaatgttaactgatccctgtgggtcagtagggagacagctggcatccgtttccaaccagccaaggatattcggtcgactgtactgactgaccactttgctcaggccgcaagtgtccctcagaaaagcctgaggacttattaaggtcatggaaggttgccttggccaggaactcttttctaatcacatgtttttgacttccctctctagccctaaccggcagccatttgttctctttggtaatcactccacacgagaaaacctgaatgctggcaactttaacttcccttctgaaggacatctggtacgaagcactggtcccggcgggagctttgccaagcacatggtagcccagtgtgtctcaccaaagggacctcttgcttgttcgagaacatacttttttggagctactcatgttccttacttgggtggtgacagcaagctgcccaagaaaactgaacaaatgctattgtcccagatatatgctgctgttattgaggctgttttggctggcattgcatgttatgctaaaacttccagtctaacaaaggccaaggaggtagcagagcaaactctgggatctgggttagattcctttgagttgattccgtttaaggcagccctgcgctccaagatgacttttcatatacatgctgtgaataatcagggaagaattgtaccgctggacagtgaagatagcttatcctttgtgaagacggcttgtatggccgtctatgacattcctgacttactgggaggcaatggttgtttaggatctgtggttttctctgaatcatttttgacttctcagatcttagttaaagaaaaggatggcactgttaccacagaaaccagctccgtagtcctgactgctgctgtacccagattctgctcctggctggtggaagataatgaagtaaaattgtctgagaaaacccagcaagcagtgaggggggatgagtctttcctgggcacttatctaacaggaggagaaggagcatatctttattccagcaatctacagtcctggcctgaggaagggaatgttcatttcttctctagtggccttctgttttctcactgtcgtcatagaagtatcatcatttccaaggatcacatgaattccatttccttctatgatggggattccaccagtactgttgctgctcttctcatagacttcaaaagctcattgcttcctcacctcccagttcatttccatggatcaagcaattttctgatgattgcccttttccccaaatcgaagatataccaagcattttactcagaggtcttctccctctggaaacagcaggataactcagggatctctttaaaagtgatccaggaagatggattatctgtggaacaaaagagattgcactccagtgcacagaagctcttcagtgccctgagccagcctgctggggagaaacggagttccctaaagttactctcagccaaactcccagagctggactggtttctccagcatttcgccatcagcagcattagccaggagcctgtgatgcggacccatcttcctgtgctgctgcagcaagctgaaatcaacactactcacagaatagaaagtgacaagatggatggtgtatcgccaaatcatggacagctctgaatgttttcatgctgcacacttccagagatacctttccagtgccctagaggcccagcagaaccgctctgcgcgccagtcagcctacatccgcaagaagaccagactgctggtggtgttacaaggctacacagatgttattgatgttgtccaggccctgcagacccacccagactcaaatgtcaaggcctccttcaccattggtgccatcacagcatgtgtggagcccatgagctgctacatggagcacagatttctctttcctaaatgtcttgaccagtgttcacaaggcctggtgagtaacgtggtattcaccagtcacaccacggagcagcggcaccctctccttgttcagctgcagagcctcatcagggctgccaatcctgctgcagccttcattcttgcagaaaatgggattgtcaccaggaatgaagacattgagctgattctctcagaaaacagtttttcaagtcctgagatgctacgatctcgatatttaatgtatcctggctggtatgaaggtaaattgaatgctggatcagtctatcccctaatggttcagatctgcgtatggtttggccgtcccttggagaagactcgctttgtggccaaatgtaaagcaattcagtcctccatcaagccaagtcccttctccggaaacatctaccacatcctgggcaaagtgaagttttcagactctgagaggaccatggaggtctgctacaacacactggccaactccttgagcatcatgccagttttggaaggacccacaccaccaccagactccaaaagcgtatctcaagacagcagcgggcagcaggagtgctaccttgtgttcatcggctgctccctgaaggaagacagcatcaaggactggctgcggcagtcagctaagcagaagcctcagaggaaagccctgaagaccagggggatgctgacgcaacaggagatcaggagcatccacgtaaaacgccacttggaacccctacctgcaggctacttttataatggcacccaatttgttaacttctttggtgacaaaactgattttcacccactcatggaccagttcatgaatgactacgtggaagaagccaaccgggaaattgagaagtataaccaggagctggaacagcaggagtatcatgacctctttgagctgaagccctagaggaaggctgggcccgtacgtcctgcagaatgtccaccttggagatggacgaacgggtgtcttaacctcagctctgctggaggcctctcccttaaggggctgtctttgttctccttggcctgtgtgggctggcttgagtgcatgttgtctttattccctgtatagcgctgaagagcatcacctgcaccattg

SEQ ID NO: 6006 - DNA, 1636 bp, Homo sapiens
  source 1..1636: mol_type = unassigned DNA
agtgcgcctgcgcggagctcgtggccgcgcctgctcccgccgggggctccttgctcggccgggccgcggccatgggagaggccgaggtgggcggcgggggcgccgcaggcgacaagggcccgggggaggcggccaccagcccggcggaggagacagtggtgtggagccccgaggtggaggtgtgcctcttccacgccatgctgggccacaagcccgtcggtgtgaaccgacacttccacatgatttgtattcgggacaagttcagccagaacatcgggcggcaggtcccatccaaggtcatctgggaccatctgagcaccatgtacgacatgcaggcgctgcatgagtctgagattcttccattcccgaatccagagaggaacttcgtccttccagaagagatcattcaggaggtccgagaaggaaaagtgatgatagaagaggagatgaaagaggagatgaaggaagacgtggacccccacaatggggctgacgatgttttttcatcttcagggagtttggggaaagcatcagaaaaatccagcaaagacaaagagaagaactcctcagacttggggtgcaaagaaggcgcagacaagcggaagcgcagccgggtcaccgacaaagtcctgaccgcaaacagcaacccttccagtcccagtgctgccaagcggcgccgcacgtagaccctcagccctggtggcggcagagaagcgggcgaggcactgtggtcgctgagggggttggctgggtctgagtgccaccccccaggccacagtgataccatcccagtgccatgagcccacactgcccgccctcaggctctcaggtgaacgtggccgtcagcggggaaacgtgtgtgtcagttggaccatgtgggaccctgatggacctgaaagaccaggatcggtccagctcagatattgagggctctgaagcctagttctgtcttctctggagcagctgtggcttccccgtggctgcttggtgacatggattagcgctacgtgggctgcagcatttgggatccaggctacctagaggggcatcgggccagggaaaacctcggattagcaagcaataaaaacatgacctcactcttcctcaaaggagcccctggtcttccctgtgtgactcagttctttccatctgtttgtcccgctgcaagcctctttctgcgctgactgtgacattggaacgtggccttcctgtcaccccctccgtgccacgcactgaaggccacccccacccacctgggaaactaagaactggatattttgcctcattcacttgtactgtaacaatgtatataatttggttggtatttcactatttaatttttaagaagcctattttactagtgttttatatgaacaaagtactgcagaagttaaacctgtgttgtattttttctgagatgttttgctttaagagatactttttgctcagtttttatatgccagatacagagaatttgtagcggttatttttgtatgatctagtaacttgcaaacagaccaaatggatgagaggcggggaccgtgcagctgtcggctgatgaggaggcggccgccccagtgctgatggagatgccactttcgtgtgactgcgaacattaaagcacaaaaaaatccaa

SEQ ID NO: 6007 - DNA, 2598 bp, Homo sapiens
  source 1..2598: mol_type = unassigned DNA
actagaaggaagaagtatggagttaaagactgcagcgtgaactgaggagtcccggacaggccgcttgctgcagaggatccagtccagatcccaggagagcccctctgccccttcggacctcgtctcccatctacaaaacgtgaagattggcccagttagcgtgtctctacaaaaaggtgcatataccactgccccgctgcaggctgatctgagaaagcctctggcccagggcagataccgccatggccttcctgatgcacctgctggtctgcgtcttcggaatgggctcctgggtgaccatcaatgggctctgggtagagctgcccctgctggtgatggagctgcccgagggctggtacctgccctcctacctcacggtggtcatccagctggccaacatcgggcccctcctggtcaccctgctccatcacttccggcccagctgcctttccgaagtgcccatcatcttcaccctgctgggcgtgggaaccgtcacctgcatcatctttgccttcctctggaatatgacctcctgggtgctggacggccaccacagcatcgccttcttggtcctcaccttcttcctggccctggtggactgcacctcttcagtgaccttcctgccgttcatgagccggctgcccacctactacctcaccaccttctttgtgggtgaaggactcagcggcctcttgcccgccctggtggctcttgcccagggctccggtctcactacctgcgtcaatgtcactgagatatcagacagcgtaccaagccctgtacccacgagggagactgacatcgcacagggagttcccagagctttggtgtccgccctccccggaatggaagcacccttgtcccacctggagagccgctaccttcccgcccacttctcacccctggtcttcttcctcctcctatccatcatgatggcctgctgcctcgtggcgttctttgtcctccagcgtcaacccaggtgctgggaggcttccgtggaagacctcctcaatgaccaggtcaccctccactccatccggccgcgggaagagaatgacttgggccctgcaggcacggtggacagcagccagggccaggggtatctagaggagaaagcagccccctgctgcccggcgcacctggccttcatctataccctggtggccttcgtcaacgcgctcaccaacggcatgctgccctctgtgcagacctactcctgcctgtcctatgggccagttgcctaccacctggctgccaccctcagcattgtggccaaccctcttgcctcgttggtctccatgttcctgcctaacaggtctctgctgttcctgggggtcctctccgtgcttgggacctgctttgggggctacaacatggccatggcggtgatgagcccctgccccctcttgcagggccactggggtggggaagtcctcattgtggcctcgtgggtgcttttcagcggctgcctcagttacgtcaaggtgatgctgggcgtggtcctgcgcgacctcagccgcagcgccctcttgtggtgcggggcggcggtgcagctgggctcgctgctcggagcgctgctcatgttccctctggtcaacgtgctgcggctcttctcgtccgcggacttctgcaatctgcactgtccagcctaggcaggccgccgaccccgcccccatcgctcacggacggaactggggtccagagaggccaggtcacagagcaaggggcaggaacagagagacagagcctgagtaattgaatcatgaacgcaagtgcccactggggactgtggggaagatggcacctggaaatgcaaggtgcggctctatccccaactctgtgtcacactacctgtgacgaccagctcagatctcctttgctttgactctcaagagaggactgatttgcagcatctagctggaggcaggcccaagggtgttagaagggaaacagctgggacagccggctgtcccttcaggctgtgtgaccttgggaaagtcatttggcttctctgtgcctgtttcttcatgcatgcagtggggattccagtaagtaccaactacctcacaggcatggcacggaggcaaaaggaaaaagcagcccgcatcaagcaagccctcctgggccacctgctgatctgacagtccatcgtagtaacaagagtggcagtctgcacaacctagaagtggccagaagggttgagacacgcccctgccctctctcctttgcccctcagtctcacagaggggcttctacaagacaagcagataacgatagaatcttgggcatcttggctttcggattctcagtgtggagggacgtagtaccccacacaccccttcctgtcatccttcctggcccataaagcccactagttggagagtaagtaccctcctggaagccgggagagatgatttgctggtggggctggggaaggcccatccctgagcctctgaaagtgaactccccgaccaggttggggaccagacatgcagagcccctggaagtattctctcaaatggaggcaacagaggtgattgttattttgttttagtttctgtttttcatttttttaaataaaggcattccctgctttta

SEQ ID NO: 6008 - DNA, 3060 bp, Homo sapiens
  source 1..3060: mol_type = unassigned DNA
actagaaggaagaagtatggagttaaagactgcagcgtgaactgaggagtcccggacaggccgcttgctgcagaggatccagtccagatcccaggagagcccctctgccccttcggacctcgtctcccatctacaaaacgtgaagattggcccagttagcgtgtctctacaaaaaggtgcatataccactgccccgctgcaggctgatctgagaaagcctctggcccagggcagataccgccatggccttcctgatgcacctgctggtctgcgtcttcggaatgggctcctgggtgaccatcaatgggctctgggtagagctgcccctgctggtgatggagctgcccgagggctggtacctgccctcctacctcacggtggtcatccagctggccaacatcgggcccctcctggtcaccctgctccatcacttccggcccagctgcctttccgaagtgcccatcatcttcaccctgctgggcgtgggaaccgtcacctgcatcatctttgccttcctctggaatatgacctcctgggtgctggacggccaccacagcatcgccttcttggtcctcaccttcttcctggccctggtggactgcacctcttcagtgaccttcctgccgttcatgagccggctgcccacctactacctcaccaccttctttgtgggtgaaggactcagcggcctcttgcccgccctggtggctcttgcccagggctccggtctcactacctgcgtcaatgtcactgagatatcagacagcgtaccaagccctgtacccacgagggagactgacatcgcacagggagttcccagagctttggtgtccgccctccccggaatggaagcacccttgtcccacctggagagccgctaccttcccgcccacttctcacccctggtcttcttcctcctcctatccatcatgatggcctgctgcctcgtggcgttctttgtcctccagcgtcaacccaggtgctgggaggcttccgtggaagacctcctcaatgaccaggtcaccctccactccatccggccgcgggaagagaatgacttgggccctgcaggcacggtggacagcagccagggccaggggtatctagaggagaaagcagccccctgctgcccggcgcacctggccttcatctataccctggtggccttcgtcaacgcgctcaccaacggcatgctgccctctgtgcagacctactcctgcctgtcctatgggccagttgcctaccacctggctgccaccctcagcattgtggccaaccctcttgcctcgttggtctccatgttcctgcctaacaggtctctgctgttcctgggggtcctctccgtgcttgggacctgctttgggggctacaacatggccatggcggtgatgagcccctgccccctcttgcagggccactggggtggggaagtcctcattgtgagtatccggccggtggggctgctcccgctgcgtacccctcacccctagccaaggcctgggagagcttgggcgcggccctttccagcgagcggggtctgtgggaccctcccgggaagccccaggtgggggaagcgccccttcctcatttgggagtggaggcttagggaatcgaggtgactggtaggcctcttcccaccatgtgtacctcagcaggggccttctctcaagggcccttgccctgatcatgggcacgtgaacccagaaaagccactggattctccttcgcccccgggcggccaactcatgggacccgtcggccccgcaggctcactcccagaaggcgctcctcgcacctagagagtattccgtgggttcccctgagccctgtgagagttctttgctccggcgctcgccccgcaagccccgtgactctgcacctcttccctcccggccccgcaggtggcctcgtgggtgcttttcagcggctgcctcagttacgtcaaggtgatgctgggcgtggtcctgcgcgacctcagccgcagcgccctcttgtggtgcggggcggcggtgcagctgggctcgctgctcggagcgctgctcatgttccctctggtcaacgtgctgcggctcttctcgtccgcggacttctgcaatctgcactgtccagcctaggcaggccgccgaccccgcccccatcgctcacggacggaactggggtccagagaggccaggtcacagagcaaggggcaggaacagagagacagagcctgagtaattgaatcatgaacgcaagtgcccactggggactgtggggaagatggcacctggaaatgcaaggtgcggctctatccccaactctgtgtcacactacctgtgacgaccagctcagatctcctttgctttgactctcaagagaggactgatttgcagcatctagctggaggcaggcccaagggtgttagaagggaaacagctgggacagccggctgtcccttcaggctgtgtgaccttgggaaagtcatttggcttctctgtgcctgtttcttcatgcatgcagtggggattccagtaagtaccaactacctcacaggcatggcacggaggcaaaaggaaaaagcagcccgcatcaagcaagccctcctgggccacctgctgatctgacagtccatcgtagtaacaagagtggcagtctgcacaacctagaagtggccagaagggttgagacacgcccctgccctctctcctttgcccctcagtctcacagaggggcttctacaagacaagcagataacgatagaatcttgggcatcttggctttcggattctcagtgtggagggacgtagtaccccacacaccccttcctgtcatccttcctggcccataaagcccactagttggagagtaagtaccctcctggaagccgggagagatgatttgctggtggggctggggaaggcccatccctgagcctctgaaagtgaactccccgaccaggttggggaccagacatgcagagcccctggaagtattctctcaaatggaggcaacagaggtgattgttattttgttttagtttctgtttttcatttttttaaataaaggcattccctgctttta

SEQ ID NO: 6009 - DNA, 2368 bp, Homo sapiens
  source 1..2368: mol_type = unassigned DNA
ggcaagcgaactaggccaaactacttgcacgttccctcgagaagatctttggagtagacacaaaagccgcgctggcgcatgcgcacaaaaagcgccggcaattggggtcgcagctggagatgctgcggccggcagggctctggcgcttatgtcggcgaccttgggcggcgagggtcccagcggagaatcttggccgtagggaagtcacctctggtgtctctccccgcggtagcacctcgcccagaaccctgaatattttcgaccgggatttgaaaaggaaacagaagaactgggcagcccggcagcccgagccgaccaaatttgactacctgaaggaggaggttggaagtcggatcgcagaccgtgtatatgacatacccagaaatttcccccttgctttggatcttggttgtggaagaggttacattgcacaatatttgaataaggaaactattggaaagtttttccaagctgacattgcagaaaatgctttgaaaaattcctcagaaacagaaatacctactgtcagcgttttagctgatgaagaattccttcccttcaaagaaaatacatttgacctggtggttagcagtttaagtttgcattgggtgaatgaccttcctagagcacttgagcagattcattatattttaaaaccagatggagtgtttatcggtgcaatgtttggaggcgacacactctatgaacttcggtgttccttacagttagcggaaacggaaagggaaggaggattttctccacacatttctcctttcactgctgtcaatgacctgggacatctgcttgggagagctggctttaatactctgactgtggacactgatgaaattcaagttaactatcctggaatgtttgaattgatggaagatttacaaggtatgggtgagagtaactgtgcttggaatagaaaagccctgctgcatcgagacacaatgctggcagctgcggcagtgtacagagaaatgtacagaaatgaagatggttcagtacctgctacataccagatctattacatgataggatggaaatatcatgagtcacaggcaagaccagctgaaagaggttccgcaactgtgtcatttggagagctaggaaaaataaacaaccttatgccaccggggaaaaaatcacaataaatatttattcagtgttaatgtcgtccagaattttcatcagaaatggatagctttaacatctaaaattattatattttgaagcaagaagcactctaagctatttactaataggcttttcatataattaggaaaacctaatatcacatctatagtaaccatttcagtttcatattgtttctgttctcataaggatactgctgagtgtctttgcagattcagcctaaaagcaaagaaaatatttccctaaaatatttgcaaataatgttcacatatgtaaatgccttggaaaatattactcatgctgaccttttacacctttttcatttgtcatactgttttctttgccttgaagaggaacagatgaatatgcaccttctccagagttatgtggttttagaatttagaagagcatgtatctttattaaatccctcctcaactctttttttttaaagcatctgaatttaaccttatttcttttttatctccatggtgtgggtgggaccaccatggttttacaccccaccctaccttagggaagaagaaaacattttaaagaataccagaagtagaatcacatgtaacagtctctgcacagtcatcagtttattgttaagctttcctttgtaatttcagggcttaagcactattatcctaatccaagttcacagtcctgttgttgtcgaggagggttcaaaatcatttggagataatcaagctcagacagcttaggataggtgagaagaacatagaggaagcagggagaaggctgagaagcaagcaggagtgagcgctaagtgttttgtttccagttagctgttcgctgtcttttccatttaacctgggcactgccctagcctcatcttcagccttcagtgatctataatagcatttccttctgtctcctctcagtctctcttctgccttccttccctcctttactgtattagcaacaagctgtccatgggtgggggctgtgtgttagcctgtacgtagcacatgggactttccacatagtagatattcagttacattttgaactaattatataacaaacttgccctttgaaagactaagttatagttaaaaaccaagatttgtaggagaaaaagaaattattgttcccttcagtttgaaaaatcatcgatatttgaaactgggatacgcttggtagcttttttgttttaacacaaagtaaacctgtgaagtagaa

SEQ ID NO: 6010 - DNA, 991 bp, Homo sapiens
  source 1..991: mol_type = unassigned DNA
attggggtcgcagctggagatgctgcggccggcagggctctggcgcttatgtcggcgaccttgggcggcgagggtcccagcggagaatcttggccgtagggaagtcacctctggtgtctctccccgcggtagcacctcgcccagaaccctgaatattttcgaccgggatttgaaaaggaaacagaagaactgggcagcccggcagcccgagccgaccaaatttgactacctgaaggaggaggttggaagtcggatcgcagaccgtgtatatgacatacccagaaatttcccccttgctttggatcttggttgtggaagaggttacattgcacaatatttgaataagcttcagttattccattgcaggaaactattggaaagtttttccaagctgacattgcagaaaatgctttgtttgcattgggtgaatgaccttcctagagcacttgagcagattcattatattttaaaaccagatggagtgtttatcggtgcaatgtttggaggcgacacactctatgaacttcggtgttccttacagttagcggaaacggaaagggaaggaggattttctccacacatttctcctttcactgctgtcaatgacctgggacatctgcttgggagagctggctttaatactctgactgtggacactgatgaaattcaagttaactatcctggaatgtttgaattgatggaagatttacaaggtatgggtgagagtaactgtgcttggaatagaaaagccctgctgcatcgagacacaatgctggcagctgcggcagtgtacagagaaatgtacagaaatgaagatggttcagtacctgctacataccagatctattacatgataggatggaaatatcatgagtcacaggcaagaccagctgaaagaggttccgcaactgtgtcatttggagagctaggaaaaataaacaaccttatgccaccggggaaaaaatcacaataaatatttattcagtgttaa

SEQ ID NO: 6011 - DNA, 2330 bp, Homo sapiens
  source 1..2330: mol_type = unassigned DNA
aattggggtcgcagctggagatgctgcggccggcagggctctggcgcttatgtcggcgaccttgggcggcgagggtcccagcggagaatcttggccgtagggaagtcacctctggtgtctctccccgcggtagcacctcgcccagaaccctgaatattttcgaccgggatttgaaaaggaaacagaagaactgggcagcccggcagcccgagccgaccaaatttgactacctgaaggaggaggttggaagtcggatcgcagaccgtgtatatgacatacccagaaatttcccccttgctttggatcttggttgtggaagaggttacattgcacaatatttgaataaggaaactattggaaagtttttccaagctgacattgcagaaaatgctttgaaaaattcctcagaaacagaaatacctactgtcagcgttttagctgatgaagaattccttcccttcaaagaaaatacatttgacctggtggttagcagtttaagtttgcattgggtgaatgaccttcctagagcacttgagcagattcattatattttaaaaccagatggagtgtttatcggtgcaatgtttggaggcgacacactctatgaacttcggtgttccttacagttagcggaaacggaaagggaaggaggattttctccacacatttctcctttcactgctgtcaatgacctgggacatctgcttgggagagctggctttaatactctgactgtggacactgatgaaattcaagttaactatcctggaatgtttgaattgatggaagatttacaagaacaaaagtccagaatgttgacctaattttacaaaacaagctgcatatcagctgatgaatgcatgagaaattttcaaggctttcacagtggtcttaaggtatgggtgagagtaactgtgcttggaatagaaaagccctgctgcatcgagacacaatgctggcagctgcggcagtgtacagagaaatgtacagaaatgaagatggttcagtacctgctacataccagatctattacatgataggatggaaatatcatgagtcacaggcaagaccagctgaaagaggttccgcaactgtgtcatttggagagctaggaaaaataaacaaccttatgccaccggggaaaaaatcacaataaatatttattcagtgttaatgtcgtccagaattttcatcagaaatggatagctttaacatctaaaattattatattttgaagcaagaagcactctaagctatttactaataggcttttcatataattaggaaaacctaatatcacatctatagtaaccatttcagtttcatattgtttctgttctcataaggatactgctgagtgtctttgcagattcagcctaaaagcaaagaaaatatttccctaaaatatttgcaaataatgttcacatatgtaaatgccttggaaaatattactcatgctgaccttttacacctttttcatttgtcatactgttttctttgccttgaagaggaacagatgaatatgcaccttctccagagttatgtggttttagaatttagaagagcatgtatctttattaaatccctcctcaactctttttttttaaagcatctgaatttaaccttatttcttttttatctccatggtgtgggtgggaccaccatggttttacaccccaccctaccttagggaagaagaaaacattttaaagaataccagaagtagaatcacatgtaacagtctctgcacagtcatcagtttattgttaagctttcctttgtaatttcagggtcctgttgttgtcgaggagggttcaaaatcatttggagataatcaagctcagacagcttaggataggtgagaagaacatagaggaagcagggagaaggctgagaagcaagcaggagtgagcgctaagtgttttgtttccagttagctgttcgctgtcttttccatttaacctgggcactgccctagcctcatcttcagccttcagtgatctataatagcatttccttctgtctcctctcagtctctcttctgccttccttccctcctttactgtattagcaacaagctgtccatgggtgggggctgtgtgttagcctgtacgtagcacatgggactttccacatagtagatattcagttacattttgaactaattatataacaaacttgccctttgaaagactaagttatagttaaaaaccaagatttgtaggagaaaaagaaattattgttcccttcagtttgaaaaatcatcgatatttgaaactgggatacgcttggtagcttttttgttttaacacaaagtaaacctgtgaagt

SEQ ID NO: 6012 - DNA, 2233 bp, Homo sapiens
  source 1..2233: mol_type = unassigned DNA
atgagcaggagcagagccaacgtgtcagcggcgcccaagcggccccagcgggctcgcgtcgccccgctctcctcaccgagccgccaatcggctcaggatccgcccctgacgacgcgggccccgcccctggagacacgcgccgcgcagtcgtcacccgcccgggatcaggaggccgggggcgcccgccggtcgggcctgggcggccgccatgaagctgacgcggaagatggttctgacccgggccaaggcctcggagctgcacagcgtgcgcaagctcaactgctggggcagccgcctcacagatatctccatttgccaggagatgcccagcctggaggtgatcacgctcagtgtcaacagcatctccaccctggagcctgtgagccggtgccagcgcctgagtgagctgtacctgcggaggaaccgcatccccagcctggctgagctcttctacctgaaggggctgccgcgtctgcgggtgctgtggctggccgagaacccgtgctgcggcaccagcccccaccgctaccgcatgaccgtgctgcgcaccctgccgcgcctacagaagctggacaaccaggctgtgacggaggaggagctgtcccgtgcactgagtgagggagaggagatcactgcggccccagagagagagggcacaggccacggcggccccaagctatgctgcacactgagctccctcagctccgctgctgagactggccgggacccgctggacagcgaggaggaggcaaccagcggcgcccaggatgaacgtggcctgaagccgccttcccggggccagtttccttccctctcagccagggatgcctcgagcagccacaggggcaggaacgtcctgactgccatcctgctgctgctgcgggagctggatgcagaggggctggaggccgtgcagcagactgtgggcagccggctgcaggccctgcgtggggaagaggtgcaggagcacgccgagtgaccgcaggacctgaacgccgctccagcctccacggggaccccagcgtcttccccagcccccgggagctggagggtggctgccatggccgcagccccggccccacacaaaagcctccccggtttgccacatcggccgagggcaggagtgggtgttaggtactggctaaccggggcggtggagatgcctgtctacaccagtcctgtccccaggactccccttctgtggtctggaggttctaggctggcctgggctcttaaagggaggattttgcaggctgtcctccctaataaaagattttcccaaggttgatctggaggtgacgtttcccaaggcatggttgtgacagtcttcctgaaagcaagggccgtttctccacagaatgaggaggtcttcacggatggctttgccgattccagcccttggtccttggatagatttctgttgggcaagggagacttcgagaatgctggcacccatagcgacatctgccctgagctgctcagcaggcaggcagcagcctcccgcacccatgggagagagttttgttttcttggccgggctgggcaggtgcgccttcctttctctctcctgtgaagaactgcaggagggccctcagctgtgaggttgtggatgaacaggcctgttcgccctggggtccgggcctggcacaggaagcagctagactaggggagtccttggagcatctgagaggggttttctttcctctgggaagagtcgcaagtcttatgaggatgccacaatctgggcagtgacccgtggccctggggaccttcctagtgccccccaaaaccaaggaagcattcacgtgagatggggagtcagccttccagctggtgtgtaggaaagccaggtccctgggcccttgtcccatgtggggttgagatccagatctccatgagatattcccatcctccgccgagcggtgatgcgtgaccgtgtgtgcaggccgctgttctcccaagctcggggccatgccgtgccaccgtcaccagagccagctgcagcactggggcagccactgtcgccggacttggggaagcccagggtgaagacagtcactcatccgtgcaagctctccagaagggatgcaagctctccagaaggggtgtgatctctgagcagtggggagtggagtcaccactcgggacatagagggtggacagttcaggcctgtgtctgcctccttgggactgtggagtgggtgccctcagtaaagcgctttgttggaatggt

SEQ ID NO: 6013 - DNA, 1187 bp, Homo sapiens
  source 1..1187: mol_type = unassigned DNA
gtcacccaggggccacagggcctccgagcatcaggccgctcgtgtgtggggccatttctgtcacatctcgggagggacaggaccccaggggtgttgaccgagctcaggtgcgtggtgcctgcacgcctgactgcactggagcggagcaggaagcctcgaggccgcggacgcggtcggtacatcacgctgctgcctgtgcctgaggcagaccccatcctggaaagagtcccacagccggagttttgctcttgtgtcaacagcatctccaccctggagcctgtgagccggtgccagcgcctgagtgagctgtacctgcggaggaaccgcatccccagcctggctgagctcttctacctgaaggggctgccgcgtctgcgggtgctgtggctggccgagaacccgtgctgcggcaccagcccccaccgctaccgcatgaccgtgctgcgcaccctgccgcgcctacagaagctggacaaccaggctgtgacggaggaggagctgtcccgtgcactgagtgagggagaggagatcactgcggccccagagagagagggcacaggccacggcggccccaagctatgctgcacactgagctccctcagctccgctgctgagactggccgggacccgctggacagcgaggaggaggcaaccagcggcgcccaggatgaacgtggcctgaagccgccttcccggggccagtttccttccctctcagccagggatgcctcgagcagccacaggggcaggaacgtcctgactgccatcctgctgctgctgcgggagctggatgcagaggggctggaggccgtgcagcagactgtgggcagccggctgcaggccctgcgtggggaagaggtgcaggagcacgccgagtgaccgcaggacctgaacgccgctccagcctccacggggaccccagcgtcttccccagcccccgggagctggagggtggctgccatggccgcagccccggccccacacaaaagcctccccggtttgccacatcggccgagggcaggagtgggtgttaggtactggctaaccggggcggtggagatgcctgtctacaccagtcctgtccccaggactccccttctgtggtctggaggttctaggctggcctgggctcttaaagggaggattttgcaggctgtcctccctaataaaagattttcccaaggttg

SEQ ID NO: 6014 - DNA, 1634 bp, Homo sapiens
  source 1..1634: mol_type = unassigned DNA
agcagagccaacgtgtcagcggcgcccaagcggccccagcgggctcgcgtcgccccgctctcctcaccgagccgccaatcggctcaggatccgcccctgacgacgcgggccccgcccctggagacacgcgccgcgcagtcgtcacccgcccgggatcaggaggccgggggcgcccgccggtcgggcctgggcggccgccatgaagctgacgcggaagatggttctgacccgggccaaggcctcggagctgcacagcgtgcgcaagctcaactgctggggcagccgcctcacagatatctccatttgccaggagatgcccagcctggaggtgatcacgctcagtgtcaacagcatctccaccctggagcctgtgagccggtgccagcgcctgagtgagctgtacctgcggaggaaccgcatccccagcctggctgagctcttctacctgaaggggctgccgcgtctgcgggtgctgtggctggccgagaacccgtgctgcggcaccagcccccaccgctaccgcatgaccgtgctgcgcaccctgccgcgcctacagaagctggacaaccaggctgtgacggaggaggagctgtcccgtgcactgagtgagggagaggagatcactgcggccccagagagagagggcacaggccacggcggccccaagctatgctgcacactgagctccctcagctccgctgctgagactggccgggacccgctggacagcgaggaggaggcaaccggcgcccaggatgaacgtggcctgaagccgccttcccggggccagtttccttccctctcagccagggatgcctcgagcagccacaggggcagggtgagtggcgggccgctaggggccgcggctgcctctgcccactgcacccactgcacagaaaccgtggggagggagcatggagcctcacagggccccgtggggagggagcatggagcctcacagggccttgaagagctgtgccccagggggagctgcgtgtgcgggtctgtgaatgcgcacacacgtgtaacacgtgccccgcacggagccgtcctggcccctcagcctctcctgctgtcctggtctgtggaatgtgggcccgggccctgctgggctgagggcaacaggagtcacgtggaagaggtgccacacacgcgtccacaggcggggctcctctgctcagattctccgagtgtgccgaacgtcctgactgccatcctgctgctgctgcgggagctggatgcagaggggctggaggccgtgcagcagactgtgggcagccggctgcaggccctgcgtggggaagaggtgcaggagcacgccgagtgaccgcaggacctgaacgccgctccagcctccacggggaccccagcgtcttccccagcccccgggagctggagggtggctgccatggccgcagccccggccccacacaaaagcctccccggtttgccacatcggccgagggcaggagtgggtgttaggtactggctaaccggggcggtggagatgcctgtctacaccagtcctgtccccaggactccccttctgtggtctggaggttctaggctggcctgggctcttaaagggaggattttgcaggctgtcctccctaataaaagattttcccaaggtt

SEQ ID NO: 6015 - DNA, 1674 bp, Homo sapiens
  source 1..1674: mol_type = unassigned DNA
caggcgcagtcccgacgagcaacgcgtttgtagaggggtgggtgcgcacgctctgtccctgcgtgaccttccgaccccgctgtcctcaccgcaatggcggctgtgagggtcctggtggcctcgaggctcgctgcggcatctgcattcacgtccctgtcccccggcggtcggacgccttcccagcgcgcagcccttcacctctccgtgccgcgccccgcggccagggtcgcgctggtgctgtctggatgcggagtctacgatgggaccgagatccacgaggcctcggcgatcctggtgcacctgagccgtggaggggctgaagtccagatctttgctcctgacgtccctcagatgcacgtgattgaccacaccaaggggcagccgtccgaaggcgagagcaggaatgttttgaccgagtctgcgaggatcgcccgtggcaaaatcacagacctggccaacctcagtgcagccaaccatgatgctgccatctttccaggaggctttggagcggctaaaaacctgagcacgtttgccgtggacgggaaagattgcaaggtgaataaagaagtggagcgtgtcctgaaggagttccaccaggccgggaagcccatcggcttgtgctgcattgcacctgtcctcgcggccaaggtgctcagaggcgtcgaggtgactgtgggccacgagcaggaggaaggtggcaagtggccttatgccgggaccgcagaggccatcaaggccctgggtgccaagcactgcgtgaaggaagtggtcgaagctcacgtggaccagaaaaacaaggtggtcacgaccccagccttcatgtgcgagacggcactccactacatccatgatgggatcggagccatggtgaggaaggtgctggaactcactggaaagtgacgcgcatggacggggcccagctaggcgccaggacttggcctcaccctctggctgaggagctgtcggctgctttccatccagctgggagtctggcaggcccttttttttttttctttgccgaaacctgcaggcgttctctctctaaggaggatgtgctgcagtgcatgggggatgtttcttcctgggtgtggctgggctgctctcacatacagaggccgaggggccaattcgttctctgccacagggacttgcctcactgtgtcccaaaaacaaatcgcagccagcttttccagaaatagaaaattctgccgtctgaggttttatacttcaggttagttagtttttggaaggaagaacatttttaggtttgcaagcctcctgatcaggaaaccagaaataccacatttatggaccatgaaaggttggttcttgactctgaagggacttttgagttaatcagcgtaaggggatttctaaagcaggcaatccctgtagccgcagagaataaacgccttcccaaaatggcaacttcccacagccacatttcagacctgctgagactgctgagtgaggaatggcagtgaggtttcttcaattagtctcagttctcttaattttcaggaagaaagggaaattgcagcccctcagcccccaggattgacctctggggagtgatggtagcgttggtgccaggccgtgggttcaggtgtggcagaagcttgcagatgcgtccgaagggaaataaagtgtgttggcgttagactttgtgctgca

SEQ ID NO: 6016 - DNA, 1506 bp, Homo sapiens
  source 1..1506: mol_type = unassigned DNA
cccgctgtcctcaccgcaatggcggctgtgagggtcctggtggcctcgaggctcgctgcggcatctgcattcacgtccctgtcccccggcggtcggacgccttcccagcgcgcagcccttcacctctccgtgccgcgccccgcggccagggtcgcgctggtgctgtctggatgcggagtctacgatgggaccgagatccacgaggcctcggcgatcctggtgcacctgagccgtggaggggctgaagtccagatctttgctcctgacgtccctcagatgcacgtgattgaccacaccaaggggcagccgtccgaaggcgagagcaggaatgttttgaccgagtctgcgaggatcgcccgtggcaaaatcacagacctggccaacctcagtgcagccaaccatgatgctgccatctttccaggaggctttggagcggctaaaaacctcttgtgctgcattgcacctgtcctcgcggccaaggtgctcagaggcgtcgaggtgactgtgggccacgagcaggaggaaggtggcaagtggccttatgccgggaccgcagaggccatcaaggccctgggtgccaagcactgcgtgaaggaagtggtcgaagctcacgtggaccagaaaaacaaggtggtcacgaccccagccttcatgtgcgagacggcactccactacatccatgatgggatcggagccatggtgaggaaggtgctggaactcactggaaagtgacgcgcatggacggggcccagctaggcgccaggacttggcctcaccctctggctgaggagctgtcggctgctttccatccagctgggagtctggcaggcccttttttttttttctttgccgaaacctgcaggcgttctctctctaaggaggatgtgctgcagtgcatgggggatgtttcttcctgggtgtggctgggctgctctcacatacagaggccgaggggccaattcgttctctgccacagggacttgcctcactgtgtcccaaaaacaaatcgcagccagcttttccagaaatagaaaattctgccgtctgaggttttatacttcaggttagttagtttttggaaggaagaacatttttaggtttgcaagcctcctgatcaggaaaccagaaataccacatttatggaccatgaaaggttggttcttgactctgaagggacttttgagttaatcagcgtaaggggatttctaaagcaggcaatccctgtagccgcagagaataaacgccttcccaaaatggcaacttcccacagccacatttcagacctgctgagactgctgagtgaggaatggcagtgaggtttcttcaattagtctcagttctcttaattttcaggaagaaagggaaattgcagcccctcagcccccaggattgacctctggggagtgatggtagcgttggtgccaggccgtgggttcaggtgtggcagaagcttgcagatgcgtccgaagggaaataaagtgtgttggcgttagactttgtgctgca

SEQ ID NO: 6017 - DNA, 2303 bp, Homo sapiens
  source 1..2303: mol_type = unassigned DNA
gtgctttctgccgtacgtcccttcccatgaggatgagatgacccatctgttgcatcccggctgctgataaaacaagaccctcggagccaagaaacaacactgaggctgatctccccgcccaggctggtctcccccgcaggctggtctcccccgcaagctggtctcctcccccaggctggtctcctcaccaggctggtctcctcccccaggctgatctccccgcccaggctggtctcccccgcaggctggtctcccccacaaggctggtctcctcccccaggctggtctcctcaccaggctggtctcctcccccaggctgatctccccgcccaggctggtctcccccgcaggctggtctcccccgcaagctggtctcccctgcaggctggtctcctccccaggctggtctcccccgcagactggtctcccccacaagctggtctccccaccaggctggtctcccccacatgctggtctcctcccactgcccttgccagtccctccctcctcaagtgtgggtgccaaggacggaccctgatgaacacctgcacatcagttgctgccctgggtgccagggtccacaggaagctgcactgggaaccctgtgtcctgggcaggtcctatgggaagtgcagcccacatgttactcgggtgaaggcagcgtccccacccagcttgaggacaccacacagggtggacacccgaccctggctgggccgctcaatggggagtggcttggacgcccctcttggagtacagtcgctacatcccgtagctgcctaatgtccttggcattctcgggccctggtcataatgtgggagtggctgcctgtgcacgccacgggcctccagcttcactgcctcaacggggccatgagccatcgcgggggcaggcagggtgctgggcacctcatcactagggcagtgacatcacaaggcgtggaaggcggtggtggctacggaactccgtgcctgggctgtttctgtggtgcctgcgggctctgggctcccacctccatggggctgcaggagccgtgagggacaaggagggacgcacccgccatggctgaaggcggcgagctgatgagccggctcctgagcgagaacgcggacctgaagaagcaggtgcgcctcctgaaggagaatcagatgctgcggcggctgctcagccagagctgccaggagggcggcggccacgacctgctcccacccagggcgcatgcctaccctgaggccggctcccccgggagcggagttccagatttcggaaggttcacgagtgttgccgacacgccctcccaactgcagacatcctccctggaggacctgctgtgctcacatgcccccctgtccagcgaggacgacacctccccgggctgtgcagccccctcccaggcacccttcaaggccttcctcagtcccccagagccacatagccaccgaggcaccgacaggaagctgtccccgctcctgagccccttgcaagactcactggtggacaagaccctgctggagcccagggagatggtccggcctaagaaggtgtgtttctcggagagcagcctgcccaccggggacaggaccaggaggagctactacctcaatgagatccagagcttcgcgggcgccgagaaggacgcgcgcgtggtgggcgagatcgccttccagctggaccgccgcatcctggcctacgtgttcccgggcgtgacgcggctctacggcttcacggtggccaacatccccgagaagatcgagcagacctccaccaagtctctggacggctccgtggacgagaggaagctgcgcgagctgacgcagcgctacctggccctgagcgcgcgcctggagaagctgggctacagccgcgacgtgcacccggcgttcagcgagttcctcatcaacacctacggaatcctgaagcagcggcccgacctgcgcgccaaccccctgcacagcagcccggccgcgctgcgcaagctggtcatcgacgtggtgccccccaagttcctgggcgactcgctgctgctgctcaactgcctgtgcgagctctccaaggaggacggcaagcccctcttcgcctggtgagccgccccgcgcccgccgccttgcctgcagtaaacgcgtttgttccaacccggggccgcggtgcctcctgcgcgtccccccggaggggaaagggccgcgtcccccgcgcgcgaggccagagaaggccccgctcccaccggtgctgggccccgaccgcagcccgccgctgcccgcacctgcggagtgcttctcacccctcattaaaatcatccgtttgc

SEQ ID NO: 6018 - DNA, 1182 bp, Homo sapiens
  source 1..1182: mol_type = unassigned DNA
ggccggcccactgggttgtgctttctgccgtacgtcccttcccatgaggatgagatgacccatctgttgcatcccggctgctgataaaacaagaccctcggagccaagaaacaacactgagttccagatttcggaaggttcacgagtgttgccgacacgccctcccaactgcagacatcctccctggaggacctgctgtgctcacatgcccccctgtccagcgaggacgacacctccccgggctgtgcagccccctcccaggcacccttcaaggccttcctcagtcccccagagccacatagccaccgaggcaccgacaggaagctgtccccgctcctgagccccttgcaagactcactggtggacaagaccctgctggagcccagggagatggtccggcctaagaaggtgtgtttctcggagagcagcctgcccaccggggacaggaccaggaggagctactacctcaatgagatccagagcttcgcgggcgccgagaaggacgcgcgcgtggtgggcgagatcgccttccagctggaccgccgcatcctggcctacgtgttcccgggcgtgacgcggctctacggcttcacggtggccaacatccccgagaagatcgagcagacctccaccaagtctctggacggctccgtggacgagaggaagctgcgcgagctgacgcagcgctacctggccctgagcgcgcgcctggagaagctgggctacagccgcgacgtgcacccggcgttcagcgagttcctcatcaacacctacggaatcctgaagcagcggcccgacctgcgcgccaaccccctgcacagcagcccggccgcgctgcgcaagctggtcatcgacgtggtgccccccaagttcctgggcgactcgctgctgctgctcaactgcctgtgcgagctctccaaggaggacggcaagcccctcttcgcctggtgagccgccccgcgcccgccgccttgcctgcagtaaacgcgtttgttccaacccggggccgcggtgcctcctgcgcgtccccccggaggggaaagggccgcgtcccccgcgcgcgaggccagagaaggccccgctcccaccggtgctgggccccgaccgcagcccgccgctgcccgcacctgcggagtgcttctcacccctcattaaaatcatccgtttgcatgtctgccttta

SEQ ID NO: 6019 - DNA, 1962 bp, Homo sapiens
  source 1..1962: mol_type = unassigned DNA
ccgagagcgagggagggctgtgaggactgccagcacgctgtcacctctcaatagcagcccaaacagattaagacatgggaggtgaaagacaacttgagtggttaaattactgtcatgcaaagcgactagatggttcagctgattgcacctttagaagttatgtggaacgaggcagcagatcttaagccccttgctctgtcacgcaggctggaatgcagtggtggaatcatggctcactacagccctgacctcctgggcccagagatggagtctcgctattttgcccaggttggtcttgaacacctggcttcaagcagtcctcctgcttttggcttcttgaagtgcttggattacagtatttcagttttatgctctgcaacaagtttggccatgttggaggacaatccaaaggtcagcaagttggctactggcgattggatgctcactctgaagccaaagtctattactgtgcccgtggaaatccccagctcccctctggctggaagacccaggagaaggcggaggctcaggtgcccacatgatcagcacagccagggtacctgctgacaagcctgtacgcatcgcctttagcctcaatgacgcctcagatgatacaccccctgaagactccattcctttggtctttccagaattagaccagcagctacagcccctgccgccttgtcatgactccgaggaatccatggaggtgttcaaacagcactgccaaatagcagaagaataccatgaggtcaaaaaggaaatcaccctgcttgagcaaaggaagaaggagctcattgccaagttagatcaggcagaaaaggagaaggtggatgctgctgagctggttcgggaattcgaggctctgacggaggagaatcggacgttgaggttggcccagtctcaatgtgtggaacaactggagaaacttcgaatacagtatcagaagaggcagggctcgtcctaactttaaatttttcagtgtgagcatacgaggctgatgactgccctgtgctggccaaaagatttttattttaaatgaatagtgagtcagatctattgcttctctgtattacccacatgacaactgtctataatgagtttactgcttgccagcttctagcttgagagaagggatattttaaatgagatcattaacgtgaaactattactagtatatgtttttggagatcagaattcttttccaaagatatatgtttttttcttttttaggaagatatgatcatgctgtacaacagggtagaaaatgataaaaatagactattgactgacccagctaagaatcgtgggctgagcagagttaaaccatgggacaaacccataacatgttcaccatagtttcacgtatgtgtatttttaaatttcatgcctttaatatttcaaatatgctcaaatttaaactgtcagaaacttctgtgcatgtatttatatttgccagagtataaacttttatactctgatttttatccttcaatgattgattatactaagaataaatggtcacatatcctaaaagcttcttcatgaaattattagcagaaaccatgtttgtaaccaaagcacatttgccaatgctaactggctgttgtaataataaacagataaggctgcatttgcttcatgccatgtgacctcacagtaaacatctctgcctttgcctgtgtgtgttctgggggaggggggacatggaaaaatattgtttggacattacttgggtgagtgcccatgaaaacatcagtgaacttgtaactattgttttgttttggatttaaggagatgttttagatcagtaacagctaataggaatatgcgagtaaattcagaattgaaacaatttctccttgttctacctatcaccacattttctcaaattgaactctttgttatatgtccatttctattcatgtaacttctttttcattaaacatggatcaaaactga

SEQ ID NO: 6020 - DNA, 2066 bp, Homo sapiens
  source 1..2066: mol_type = unassigned DNA
gtccaagcccagtgctctttcccctgatgagaaacctttccagatttaaaccattaacaaccctctctaaagaggaggcaagaggtttcaatttcttctcagggaaaaaaagaactgacatcaaaaggtctgtgcggggtcatttgtctcatcatgactttgatttggccttgatctttatttagtatttcagttttatgctctgcaacaagtttggccatgttggaggacaatccaaaggtcagcaagttggctactggcgattggatgctcactctgaagccaaagtctattactgtgcccgtggaaatccccagctcccctctgggttgacattcgtaaccttcctggatcctatcagagaaaccttgttcatcatttcatttccaaattatgaagaccacctgggcctgactgaagatgcttgtttcttcctcttccctaacgccctttccaccagtgcggactgcagattgtcagtggctgctatgcagcaggtgcagcctggtctctcactgagtctctactccacaaaggcaacgactggccaaggcagtggctggctctgggttacacaagtgcagacactcaactaagtgagctggaagacccaggagaaggcggaggctcaggtgcccacatgatcagcacagccagggtacctgctgacaagcctgtacgcatcgcctttagcctcaatgacgcctcagatgatacaccccctgaagactccattcctttggtctttccagaattagaccagcagctacagcccctgccgccttgtcatgactccgaggaatccatggaggtgttcaaacagcactgccaaatagcagaagaataccatgaggtcaaaaaggaaatcaccctgcttgagcaaaggaagaaggagctcattgccaagttagatcaggcagaaaaggagaaggtggatgctgctgagctggttcgggaattcgaggctctgacggaggagaatcggacgttgaggttggcccagtctcaatgtgtggaacaactggagaaacttcgaatacagtatcagaagaggcagggctcgtcctaactttaaatttttcagtgtgagcatacgaggctgatgactgccctgtgctggccaaaagatttttattttaaatgaatagtgagtcagatctattgcttctctgtattacccacatgacaactgtctataatgagtttactgcttgccagcttctagcttgagagaagggatattttaaatgagatcattaacgtgaaactattactagtatatgtttttggagatcagaattcttttccaaagatatatgtttttttcttttttaggaagatatgatcatgctgtacaacagggtagaaaatgataaaaatagactattgactgacccagctaagaatcgtgggctgagcagagttaaaccatgggacaaacccataacatgttcaccatagtttcacgtatgtgtatttttaaatttcatgcctttaatatttcaaatatgctcaaatttaaactgtcagaaacttctgtgcatgtatttatatttgccagagtataaacttttatactctgatttttatccttcaatgattgattatactaagaataaatggtcacatatcctaaaagcttcttcatgaaattattagcagaaaccatgtttgtaaccaaagcacatttgccaatgctaactggctgttgtaataataaacagataaggctgcatttgcttcatgccatgtgacctcacagtaaacatctctgcctttgcctgtgtgtgttctgggggaggggggacatggaaaaatattgtttggacattacttgggtgagtgcccatgaaaacatcagtgaacttgtaactattgttttgttttggatttaaggagatgttttagatcagtaacagctaataggaatatgcgagtaaattcagaattgaaacaatttctccttgttctacctatcaccacattttctcaaattgaactctttgttatatgtccatttctattcatgtaacttctttttcattaaacatggatcaaaactgaca

SEQ ID NO: 6021 - DNA, 1855 bp, Homo sapiens
  source 1..1855: mol_type = unassigned DNA
ccgagagcgagggagggctgtgaggactgccagcacgctgtcacctctcaatagcagcccaaacagattaagacatgggaggtgaaagacaacttgagtggttaaattactgtcatgcaaagcgactagatggttcagctgattgcacctttagaagttatgtggaacgaggcagcagatcttaagccccttgctctgtcacgcaggctggaatgcagtggtggaatcatggctcactacagccctgacctcctgggcccagagatggagtctcgctattttgcccaggttggtcttgaacacctggcttcaagcagtcctcctgcttttggcttcttgaagtgcttggattacagtatttcagttttatgctctgcaacaagtttggccatgttggaggacaatccaaaggtcagcaagttggctactggcgattggatgctcactctgaagccaaagtctattactgtgcccgtggaaatccccagctcccctctggatgatacaccccctgaagactccattcctttggtctttccagaattagaccagcagctacagcccctgccgccttgtcatgactccgaggaatccatggaggtgttcaaacagcactgccaaatagcagaagaataccatgaggtcaaaaaggaaatcaccctgcttgagcaaaggaagaaggagctcattgccaagttagatcaggcagaaaaggagaaggtggatgctgctgagctggttcgggaattcgaggctctgacggaggagaatcggacgttgaggttggcccagtctcaatgtgtggaacaactggagaaacttcgaatacagtatcagaagaggcagggctcgtcctaactttaaatttttcagtgtgagcatacgaggctgatgactgccctgtgctggccaaaagatttttattttaaatgaatagtgagtcagatctattgcttctctgtattacccacatgacaactgtctataatgagtttactgcttgccagcttctagcttgagagaagggatattttaaatgagatcattaacgtgaaactattactagtatatgtttttggagatcagaattcttttccaaagatatatgtttttttcttttttaggaagatatgatcatgctgtacaacagggtagaaaatgataaaaatagactattgactgacccagctaagaatcgtgggctgagcagagttaaaccatgggacaaacccataacatgttcaccatagtttcacgtatgtgtatttttaaatttcatgcctttaatatttcaaatatgctcaaatttaaactgtcagaaacttctgtgcatgtatttatatttgccagagtataaacttttatactctgatttttatccttcaatgattgattatactaagaataaatggtcacatatcctaaaagcttcttcatgaaattattagcagaaaccatgtttgtaaccaaagcacatttgccaatgctaactggctgttgtaataataaacagataaggctgcatttgcttcatgccatgtgacctcacagtaaacatctctgcctttgcctgtgtgtgttctgggggaggggggacatggaaaaatattgtttggacattacttgggtgagtgcccatgaaaacatcagtgaacttgtaactattgttttgttttggatttaaggagatgttttagatcagtaacagctaataggaatatgcgagtaaattcagaattgaaacaatttctccttgttctacctatcaccacattttctcaaattgaactctttgttatatgtccatttctattcatgtaacttctttttcattaaacatggatcaaaactgaca

SEQ ID NO: 6022 - DNA, 692 bp, Homo sapiens
  source 1..692: mol_type = unassigned DNA
gatcagcagcaacttaaccaaagctctgttacagcctgtagccaagagaaggaacctgtggttcgtttccccagacggtgtgatgaaaagctggaagacccaggagaaggcggaggctcaggtgcccacatgatcagcacagccagggtacctgctgacaagcctgtacgcatcgcctttagcctcaatgacgcctcagatgatacaccccctgaagactccattcctttggtctttccagaattagaccagcagctacagcccctgccgccttgtcatgactccgaggaatccatggaggtgttcaaacagcactgccaaatagcagaagaataccatgaggtcaaaaaggaaatcaccctgcttgagcaaaggaagaaggagctcattgccaagttagatcaggcagaaaaggagaaggtggatgctgctgagctggttcgggaattcgaggctctgacggaggagaatcggacgttgaggttggcccagtctcaatgtgtggaacaactggagaaacttcgaatacagtatcagaagaggcagggctcgtcctaactttaaatttttcagtgtgagcatacgaggctgatgactgccctgtgctggccaaaagatttttattttaaatgaatagtgagtcagatctattgcttctctgtattacccacatgacaactgtctataatgag

SEQ ID NO: 6023 - DNA, 749 bp, Homo sapiens
  source 1..749: mol_type = unassigned DNA
aaagatgacaacatcctggctgttagagagattgtcagtggctgctatgcagcaggtgcagcctggtctctcactgagtctctactccacaaaggcaacgactggccaaggcagtggctggctctgggttacacaagtgcagacactcaactaagtgagctggaagacccaggagaaggcggaggctcaggtgcccacatgatcagcacagccagggtacctgctgacaagcctgtacgcatcgcctttagcctcaatgacgcctcagatgatacaccccctgaagactccattcctttggtctttccagaattagaccagcagctacagcccctgccgccttgtcatgactccgaggaatccatggaggtgttcaaacagcactgccaaatagcagaagaataccatgaggtcaaaaaggaaatcaccctgcttgagcaaaggaagaaggagctcattgccaagttagatcaggcagaaaaggagaaggtggatgctgctgagctggttcgggaattcgaggctctgacggaggagaatcggacgttgaggttggcccagtctcaatgtgtggaacaactggagaaacttcgaatacagtatcagaagaggcagggctcgtcctaactttaaatttttcagtgtgagcatacgaggctgatgactgccctgtgctggccaaaagatttttattttaaatgaatagtgagtcagatctattgcttctctgtattacccacatgacaact

SEQ ID NO: 6024 - DNA, 1904 bp, Homo sapiens
  source 1..1904: mol_type = unassigned DNA
cacgctgaagacattcctgtcttgtgaagcaagtctgtttgtattttaagtttgccaggactaatgaattaaaacatttggactccccacaacttgctgtttatcaatgcctctgacaggaggagggttttcttttgctcttgctttttctagaaagatgacaacatcctggctgttagagaggcaaggaaaggagagaggggttgtgaagggaagcggaagggaagggaagggaggtcccgtgggacgctggggtctggggcagagcaggtagcagcgtgctgccctgacagctgtctccgctcctcagattgtcagtggctgctatgcagcaggtgcagcctggtctctcactgagtctctactccacaaaggcaacgactggccaaggcagtggctggctctgggttacacaagtgcagacactcaactaagtgagctggaagacccaggagaaggcggaggctcaggtgcccacatgatcagcacagccagggtacctgctgacaagcctgtacgcatcgcctttagcctcaatgacgcctcagatgatacaccccctgaagactccattcctttggtctttccagaattagaccagcagctacagcccctgccgccttgtcatgactccgaggaatccatggaggtgttcaaacagcactgccaaatagcagaagaataccatgaggtcaaaaaggaaatcaccctgcttgagcaaaggaagaaggagctcattgccaagttagatcaggcagaaaaggagaaggtggatgctgctgagctggttcgggaattcgaggctctgacggaggagaatcggacgttgaggttggcccagtctcaatgtgtggaacaactggagaaacttcgaatacagtatcagaagaggcagggctcgtcctaactttaaatttttcagtgtgagcatacgaggctgatgactgccctgtgctggccaaaagatttttattttaaatgaatagtgagtcagatctattgcttctctgtattacccacatgacaactgtctataatgagtttactgcttgccagcttctagcttgagagaagggatattttaaatgagatcattaacgtgaaactattactagtatatgtttttggagatcagaattcttttccaaagatatatgtttttttcttttttaggaagatatgatcatgctgtacaacagggtagaaaatgataaaaatagactattgactgacccagctaagaatcgtgggctgagcagagttaaaccatgggacaaacccataacatgttcaccatagtttcacgtatgtgtatttttaaatttcatgcctttaatatttcaaatatgctcaaatttaaactgtcagaaacttctgtgcatgtatttatatttgccagagtataaacttttatactctgatttttatccttcaatgattgattatactaagaataaatggtcacatatcctaaaagcttcttcatgaaattattagcagaaaccatgtttgtaaccaaagcacatttgccaatgctaactggctgttgtaataataaacagataaggctgcatttgcttcatgccatgtgacctcacagtaaacatctctgcctttgcctgtgtgtgttctgggggaggggggacatggaaaaatattgtttggacattacttgggtgagtgcccatgaaaacatcagtgaacttgtaactattgttttgttttggatttaaggagatgttttagatcagtaacagctaataggaatatgcgagtaaattcagaattgaaacaatttctccttgttctacctatcaccacattttctcaaattgaactctttgttatatgtccatttctattcatgtaacttctttttcattaaacatggatcaaaactgaca

SEQ ID NO: 6025 - DNA, 1964 bp, Homo sapiens
  source 1..1964: mol_type = unassigned DNA
ccgagagcgagggagggctgtgaggactgccagcacgctgtcacctctcaatagcagcccaaacagattaagacatgggaggtgaaagacaacttgagtggttaaattactgtcatgcaaagcgactagatggttcagctgattgcacctttagaagttatgtggaacgaggcagcagatcttaagccccttgctctgtcacgcaggctggaatgcagtggtggaatcatggctcactacagccctgacctcctgggcccagagatggagtctcgctattttgcccaggttggtcttgaacacctggcttcaagcagtcctcctgcttttggcttcttgaagtgcttggattacagtatttcagttttatgctctgcaacaagtttggccatgttggaggacaatccaaaggtcagcaagttggctactggcgattggatgctcactctgaagccaaagtctattactgtgcccgtggaaatccccagctcccctctggctggaagacccaggagaaggcggaggctcaggtgcccacatgatcagcacagccagggtacctgctgacaagcctgtacgcatcgcctttagcctcaatgacgcctcagatgatacaccccctgaagactccattcctttggtctttccagaattagaccagcagctacagcccctgccgccttgtcatgactccgaggaatccatggaggtgttcaaacagcactgccaaatagcagaagaataccatgaggtcaaaaaggaaatcaccctgcttgagcaaaggaagaaggagctcattgccaagttagatcaggcagaaaaggagaaggtggatgctgctgagctggttcgggaattcgaggctctgacggaggagaatcggacgttgaggttggcccagtctcaatgtgtggaacaactggagaaacttcgaatacagtatcagaagaggcagggctcgtcctaactttaaatttttcagtgtgagcatacgaggctgatgactgccctgtgctggccaaaagatttttattttaaatgaatagtgagtcagatctattgcttctctgtattacccacatgacaactgtctataatgagtttactgcttgccagcttctagcttgagagaagggatattttaaatgagatcattaacgtgaaactattactagtatatgtttttggagatcagaattcttttccaaagatatatgtttttttcttttttaggaagatatgatcatgctgtacaacagggtagaaaatgataaaaatagactattgactgacccagctaagaatcgtgggctgagcagagttaaaccatgggacaaacccataacatgttcaccatagtttcacgtatgtgtatttttaaatttcatgcctttaatatttcaaatatgctcaaatttaaactgtcagaaacttctgtgcatgtatttatatttgccagagtataaacttttatactctgatttttatccttcaatgattgattatactaagaataaatggtcacatatcctaaaagcttcttcatgaaattattagcagaaaccatgtttgtaaccaaagcacatttgccaatgctaactggctgttgtaataataaacagataaggctgcatttgcttcatgccatgtgacctcacagtaaacatctctgcctttgcctgtgtgtgttctgggggaggggggacatggaaaaatattgtttggacattacttgggtgagtgcccatgaaaacatcagtgaacttgtaactattgttttgttttggatttaaggagatgttttagatcagtaacagctaataggaatatgcgagtaaattcagaattgaaacaatttctccttgttctacctatcaccacattttctcaaattgaactctttgttatatgtccatttctattcatgtaacttctttttcattaaacatggatcaaaactgaca

SEQ ID NO: 6026 - DNA, 2093 bp, Homo sapiens
  source 1..2093: mol_type = unassigned DNA
ccgagagcgagggagggctgtgaggactgccagcacgctgtcacctctcaatagcagcccaaacagattaagacatgggaggtgaaagacaacttgagtggttaaattactgtcatgcaaagcgactagatggttcagctgattgcacctttagaagttatgtggaacgaggcagcagatcttaagccccttgctctgtcacgcaggctggaatgcagtggtggaatcatggctcactacagccctgacctcctgggcccagagatggagtctcgctattttgcccaggttggtcttgaacacctggcttcaagcagtcctcctgcttttggcttcttgaagtgcttggattacagtatttcagttttatgctctgcaacaagtttggccatgttggaggacaatccaaaggtcagcaagttggctactggcgattggatgctcactctgaagccaaagtctattactgtgcccgtggaaatccccagctcccctctggattgtcagtggctgctatgcagcaggtgcagcctggtctctcactgagtctctactccacaaaggcaacgactggccaaggcagtggctggctctgggttacacaagtgcagacactcaactaagtgagctggaagacccaggagaaggcggaggctcaggtgcccacatgatcagcacagccagggtacctgctgacaagcctgtacgcatcgcctttagcctcaatgacgcctcagatgatacaccccctgaagactccattcctttggtctttccagaattagaccagcagctacagcccctgccgccttgtcatgactccgaggaatccatggaggtgttcaaacagcactgccaaatagcagaagaataccatgaggtcaaaaaggaaatcaccctgcttgagcaaaggaagaaggagctcattgccaagttagatcaggcagaaaaggagaaggtggatgctgctgagctggttcgggaattcgaggctctgacggaggagaatcggacgttgaggttggcccagtctcaatgtgtggaacaactggagaaacttcgaatacagtatcagaagaggcagggctcgtcctaactttaaatttttcagtgtgagcatacgaggctgatgactgccctgtgctggccaaaagatttttattttaaatgaatagtgagtcagatctattgcttctctgtattacccacatgacaactgtctataatgagtttactgcttgccagcttctagcttgagagaagggatattttaaatgagatcattaacgtgaaactattactagtatatgtttttggagatcagaattcttttccaaagatatatgtttttttcttttttaggaagatatgatcatgctgtacaacagggtagaaaatgataaaaatagactattgactgacccagctaagaatcgtgggctgagcagagttaaaccatgggacaaacccataacatgttcaccatagtttcacgtatgtgtatttttaaatttcatgcctttaatatttcaaatatgctcaaatttaaactgtcagaaacttctgtgcatgtatttatatttgccagagtataaacttttatactctgatttttatccttcaatgattgattatactaagaataaatggtcacatatcctaaaagcttcttcatgaaattattagcagaaaccatgtttgtaaccaaagcacatttgccaatgctaactggctgttgtaataataaacagataaggctgcatttgcttcatgccatgtgacctcacagtaaacatctctgcctttgcctgtgtgtgttctgggggaggggggacatggaaaaatattgtttggacattacttgggtgagtgcccatgaaaacatcagtgaacttgtaactattgttttgttttggatttaaggagatgttttagatcagtaacagctaataggaatatgcgagtaaattcagaattgaaacaatttctccttgttctacctatcaccacattttctcaaattgaactctttgttatatgtccatttctattcatgtaacttctttttcattaaacatggatcaaaactgaca

SEQ ID NO: 6027 - DNA, 2003 bp, Homo sapiens
  source 1..2003: mol_type = unassigned DNA
atgtacaagggcagccgtggggctggcaacagcttcgtaatcctggcttcctgctttctgggtcaaagccctggtggtgtgttcttgatatcggtccatctagtggcgttgtttgattcctcccaccttgctgatcattcgtagtgtagcccccaaggtgtggaataacccttaagcccttaccggggtccttctggactgagaattgttgtaaagtaatactgctcaggtgaaagacaacttgagtggttaaattactgtcatgcaaagcgactagatggttcagctgattgcacctttagaagttatgtggaacgaggcagcagatcttaagccccttgctctgtcacgcaggctggaatgcagtggtggaatcatggctcactacagccctgacctcctgggcccagagatggagtctcgctattttgcccaggttggtcttgaacacctggcttcaagcagtcctcctgcttttggcttcttgaagtgcttggattacagtatttcagttttatgctctgcaacaagtttggccatgttggaggacaatccaaaggtcagcaagttggctactggcgattggatgctcactctgaagccaaagtctattactgtgcccgtggaaatccccagctcccctctggatgatacaccccctgaagactccattcctttggtctttccagaattagaccagcagctacagcccctgccgccttgtcatgactccgaggaatccatggaggtgttcaaacagcactgccaaatagcagaagaataccatgaggtcaaaaaggaaatcaccctgcttgagcaaaggaagaaggagctcattgccaagttagatcaggcagaaaaggagaaggtggatgctgctgagctggttcgggaattcgaggctctgacggaggagaatcggacgttgaggttggcccagtctcaatgtgtggaacaactggagaaacttcgaatacagtatcagaagaggcagggctcgtcctaactttaaatttttcagtgtgagcatacgaggctgatgactgccctgtgctggccaaaagatttttattttaaatgaatagtgagtcagatctattgcttctctgtattacccacatgacaactgtctataatgagtttactgcttgccagcttctagcttgagagaagggatattttaaatgagatcattaacgtgaaactattactagtatatgtttttggagatcagaattcttttccaaagatatatgtttttttcttttttaggaagatatgatcatgctgtacaacagggtagaaaatgataaaaatagactattgactgacccagctaagaatcgtgggctgagcagagttaaaccatgggacaaacccataacatgttcaccatagtttcacgtatgtgtatttttaaatttcatgcctttaatatttcaaatatgctcaaatttaaactgtcagaaacttctgtgcatgtatttatatttgccagagtataaacttttatactctgatttttatccttcaatgattgattatactaagaataaatggtcacatatcctaaaagcttcttcatgaaattattagcagaaaccatgtttgtaaccaaagcacatttgccaatgctaactggctgttgtaataataaacagataaggctgcatttgcttcatgccatgtgacctcacagtaaacatctctgcctttgcctgtgtgtgttctgggggaggggggacatggaaaaatattgtttggacattacttgggtgagtgcccatgaaaacatcagtgaacttgtaactattgttttgttttggatttaaggagatgttttagatcagtaacagctaataggaatatgcgagtaaattcagaattgaaacaatttctccttgttctacctatcaccacattttctcaaattgaactctttgttatatgtccatttctattcatgtaacttctttttcattaaacatggatcaaaactgaca

SEQ ID NO: 6028 - DNA, 577 bp, Homo sapiens
  source 1..577: mol_type = unassigned DNA
gccccggttcctgcccgcacctctccctccacacctccccgcaagctgagggagccggctccggcctcggccagcccaggaaggcgctcccacagcgcagtggtgggctgaagggctcctcaagtgccgccaaagtgggagcccaggcagaggaggcgccgagagcgagggagggctgtgaggactgccagcacgctgtcacctctcaatagcagcccaaacagattaagacatgggagatgtacaagggcagccgtggggctggcaacagcttcgtaatcctggcttcctgctttctgggtcaaagccctggtggtgtgttcttgatatcggtccatctagtggcgttgtttgattcctcccaccttgctgatcattcgtagtgtagcccccaaggtgaaagacaacttgagtggttaaattactgtcatgcaaagcgactagatggttcagctgattgcacctttagaagttatgtggaacgaggcagcagatcttaagccccttgctctgtcacgcaggctggaatgcagtggtggaatcatggctcactacagccctgacctcctgggcccag

SEQ ID NO: 6029 - DNA, 556 bp, Homo sapiens
  source 1..556: mol_type = unassigned DNA
ctcttgtacttgatttcttggtgcgggaaagtgttgggggatttagccaaaagaggagtgcaactttccatccttagatgttatgctaaagtgattcggtgattgtacaatgcataacagtaaaacttttctttttagctaaaatgttaagggaattttaatggtttcttctgttgaatttgagacaatccatgccattccctaggtggctaacaaaatgcttgattctgagcagctggaagacccaggagaaggcggaggctcaggtgcccacatgatcagcacagccagggtacctgctgacaagcctgtacgcatcgcctttagcctcaatgacgcctcagatgatacaccccctgaagactccattcctttggtctttccagaattagaccagcagctacagcccctgccgccttgtcatgactccgaggaatccatggaggtgttcaaacagcactgccaaatagcagaagaataccatgaggtcaaaaaggaaatcaccctgcttgagcaaaggaagaaggagctcattgccaagttagatcaggcagaa

SEQ ID NO: 6030 - DNA, 1682 bp, Homo sapiens
  source 1..1682: mol_type = unassigned DNA
gcacctctccctccacacctccccgcaagctgagggagccggctccggcctcggccagcccaggaaggcgctcccacagcgcagtggtgggctgaagggctcctcaagtgccgccaaagtgggagcccaggcagaggaggcgccgagagcgagggagggctgtgaggactgccagcacgctgtcacctctcaatagcagcccaaacagattaagacatgggaggtgaaagacaacttgagtggttaaattactgtcatgcaaagcgactagatggttcagctgattgcacctttagaagttatgtggaacgaggcagcagatcttaagccccttgctctgtcacgcaggctggaatgcagtggtggaatcatggctcactacagccctgacctcctgggcccagagatggagtctcgctattttgcccaggttggtcttgaacacctggcttcaagcagtcctcctgcttttggcttcttgaagtgcttggattacagtatttcagttttatgctctgcaacaagtttggccatgttggaggacaatccaaaggtcagcaagttggctactggcgattggatgctcactctgaagccaaagtctattactgtgcccgtggaaatccccagctcccctctgggttgacattcgtaaccttcctggatcctatcagagaaaccttgttcatcatttcatttccaaattatgaagaccacctgggcctgactgaagatgcttgtttcttcctcttccctaacgccctttccaccagtgcggactgcagatgatacaccccctgaagactccattcctttggtctttccagaattagaccagcagctacagcccctgccgccttgtcatgactccgaggaatccatggaggtgttcaaacagcactgccaaatagcagaagaataccatgaggtcaaaaaggaaatcaccctgcttgagcaaaggaagaaggagctcattgccaagttagatcaggcagaaaaggagaaggtggatgctgctgagctggttcgggaattcgaggctctgacggaggagaatcggacgttgaggttggcccagtctcaatgtgtggaacaactggagaaacttcgaatacagtatcagaagaggcagggctcgtcctaactttaaatttttcagtgtgagcatacgaggctgatgactgccctgtgctggccaaaagatttttattttaaatgaatagtgagtcagatctattgcttctctgtattacccacatgacaactgtctataatgagtttactgcttgccagcttctagcttgagagaagggatattttaaatgagatcattaacgtgaaactattactagtatatgtttttggagatcagaattcttttccaaagatatatgtttttttcttttttaggaagatatgatcatgctgtacaacagggtagaaaatgataaaaatagactattgactgacccagctaagaatcgtgggctgagcagagttaaaccatgggacaaacccataacatgttcaccatagtttcacgtatgtgtatttttaaatttcatgcctttaatatttcaaatatgctcaaatttaaactgtcagaaacttctgtgcatgtatttatatttgccagagtataaacttttatactctgatttttatccttcaatgattgatta

SEQ ID NO: 6031 - DNA, 2027 bp, Homo sapiens
  source 1..2027: mol_type = unassigned DNA
gcgctttggttcttggaaggcggtgctctgagaagccggactacgcggcagcggctcttcaaagcggagccgggagtttttgctacagttttcgccaccatgagtcgcagctataatgatgagctgcagttcttggagaagatcaataaaaactgctggaggatcaagaagggcttcgtgcccaacatgcaggttgaaggtgttttctatgtgaatgatgctctggagaaattgatgtttgaggaattaaggaatgcctgtcgaggtggtggtgttggtggcttcctgccagccatgaaacagattggcaatgtggcagccctgcctggaattgttcatcgatctattgggcttcctgatgtccattcaggatatgggtttgctattgggaacatggcagcctttgatatgaatgaccctgaagcagtagtatccccaggtggtgtcgggtttgacatcaactgtggtgtccgcttgctaagaaccaatttagatgaaagtgatgtccagcctgtgaaggagcaacttgcccaagctatgtttgaccacattcctgttggggtggggtcaaaaggtgtcatcccaatgaatgccaaagacttggaggaggccttggagatgggggtggactggtccttaagagaagggtatgcctgggctgaagacaaggagcactgcgaggagtacggaaggatgctgcaggctgaccccaataaagtttctgcaagggcgaagaaaagaggccttcctcagttggggaccctgggagcaggcaaccattatgcagaaatccaggttgtggatgagattttcaatgagtatgctgctaaaaaaatgggcatcgaccataagggacaggtgtgtgtgatgatccacagtggaagcagaggcttgggccaccaagtagccacagatgcgctggtagctatggagaaggccatgaagagagacaagattatagtcaatgatcggcagttggcttgtgctcgaatcgcttccccagagggtcaagactatctgaagggaatggcagctgctgggaactatgcctgggtcaaccgctcttccatgaccttcttaacccgtcaggctttcgccaaggtcttcaacacaacccctgatgacttggacctacatgtgatctatgatgtttctcacaacattgccaaagtggagcagcatgtggtggacggaaaggaacggacactgttagtacacaggaagggatccacccgcgctttccctcctcaccatcccctcattgctgttgattaccaactcactggacagccagtgctcattggtggcaccatgggaacctgtagttatgttcttactggcactgaacagggcatgactgagacctttggaacaacctgtcatggagcgggccgtgcattgtcccgagcaaaatctcgacgtaatttagatttccaggatgtcttagacaaattggcagatatgggaattgcgatccgtgttgcctcacccaaactggttatggaagaggctcctgagtcctataagaatgtgacagatgtggtaaatacctgccatgatgctggaatcagcaagaaagccattaaactgagaccaattgctgtgatcaaaggatagaaccttggacagcagggctgcctgacaccaccaaccctctctgaagtggaagtggactgacatgctcttctgacatcagactcaaggcgggacaagttgcaaagtgtgcagctgtaactgctcacgccaaaatggctgatggggaggctgctgctttcaggggcccgtgcttgtaaaataaccttccaggaagaggcacattgcccacctttggaaagggaggaatatgccttctccttggttgttccacagagttttaggaaaatctgttagggatgggtagatgtcaaactgccttacgcagtcatactgatctttagccatcagattgatcttcttcacaccaagctctgtttacattccgagaggtgtcatgaagaaagttctgttcaataaggttttggaatgtt

SEQ ID NO: 6032 - DNA, 1188 bp, Homo sapiens
  source 1..1188: mol_type = unassigned DNA
ggcggtgctctgagaagccggactacgcggcagcggctcttcaaagcggagccgggagtttttgctacagttttcgccaccatgagtcgcagctataatgatgagctgcagttcttggagaagatcaataaaaactgctggaggatcaagaagggcttcgtgcccaacatgcaggttgaaggtgttttctatgtgaatgatgctctggagaaattgatgtttgaggaattaaggaatgcctgtcgaggtggtggtgttggtggcttcctgccagccatgaaacagattggcaatgtggcagccctgcctggaattgttcatcgatctattgggcttcctgatgtccattcaggatatgggtttgctattgggaacatggcagcctttgatatgaatgaccctgaagcagtagtatccccaggtggtgtcgggtttgacatcaactgtggtgtccgcttgctaagaaccaatttagatgaaagtgatgtccagcctgtgaaggagcaacttgcccaagctatgtttgaccacattcctgttggggtggggtcaaaaggtgatatgatgagggccgtgcattgtcccgagcaaaatctcgacgtaatttagatttccaggatgtcttagacaaattggcagatatgggaattgcgatccgtgttgcctcacccaaactggttatggaagaggctcctgagtcctataagaatgtgacagatgtggtaaatacctgccatgatgctggaatcagcaagaaagccattaaactgagaccaattgctgtgatcaaaggatagaaccttggacagcagggctgcctgacaccaccaaccctctctgaagtggaagtggactgacatgctcttctgacatcagactcaaggcgggacaagttgcaaagtgtgcagctgtaactgctcacgccaaaatggctgatggggaggctgctgctttcaggggcccgtgcttgtaaaataaccttccaggaagaggcacattgcccacctttggaaagggaggaatatgccttctccttggttgttccacagagttttaggaaaatctgttagggatgggtagatgtcaaactgccttacgcagtcatactgatctttagccatcagattgatcttcttcacaccaagctctgtttacattccgagaggtgtcatgaagaaagttctgttc

SEQ ID NO: 6033 - DNA, 4433 bp, Homo sapiens
  source 1..4433: mol_type = unassigned DNA
gttaccatagcgacgtgcacgcagtagccaggcctgacccgctggtcccttgctggcgggaggaaagaggcggcaccatgagccacgcagtaaccatcgaggagccccaggcccagccgcaggtgtctcaaactcggtaccgggagaggtcgcgggctgggagccacatctcctccaatcgagcgtatgattttctgtacgatccattgtttattgtgtcaagtgagaaagaccatacacaggcaaatatccaagctaccctgattcgcagcagactgagaaaagttcccaggtttaaaaccatgttcagtaacctgatccattatccaagatattctctatattggagcaagtcagatcctgtcccaccatttatcagtcgggaatggaagggacataaggagaaacacagagaagccctccggcagctcaccacaactgacgcttcttttcagatgcctaaagaagtttatgaagatcctgaagttactggaaagaatcgctataaatactttgaaaggccttttctcccattttttcagcagatgccattcaatgttgtttatgccgtatccaaggcagaaccatacacttttcctcctacttctactaagcacctatccatcccttcaaagtctactgtgggcactcagactgattatcgggatgctgacgttcaaacagatccatactctgcagaatatgtagtatgtcaggactcaatccctgagctcttgaccctggctacgcttacttggggtcggggtctcccagcaggacaagctgaggtggagatgatagaaagagcccgcgagaagcgtgcttgggaagcctctctccccgctctgagtgacacctcccagtttgagaagaggaggaaaatgatgaatgaaatggagaggaaggagtgggccttcagagagcaggagattgaaaaactgcaggagattcgcctggaagttctaaaagagctgttgaggaagcgtgaagagaatcagaatgaagtgaatatgaagcacttgaatgcccggtggtctaaactgcaggagggaaaagaggcaaaaatggcaaaaattcagcgcacgcatgtatcaacaatcagaaaacttgtaggaaagagaaagaatatagaagggaagttggagagaagaaatatcatcaaggattattctgattatgcatcacaggtctatggacctctgtctcgtcttgggtgtttcccagacaacaactcagaggactttgtagtaaaaaactactatctcaacacctatgaaggattagtggaacttgagtcatgtctcccagattttgtgacacaaccccaaatcagagctccaaaacctaaagtcattaccaccaaagctggttttctgaagagggcagcaaggttggactatgagttggcagaggttcataaggcactgttggataagaagaataaagttcttgaagtaaagaaaccccctcgcttccttcaaagaaacccaatacctcaacctcggcttccaactccaaccttggaaatgacgtccaatgaagaagaagaaatggaaatggctgtgatctaccttcaaaagttactccggggcagagtcgttcagaacatgatgtttgaagggaaagaaaagcgactggagttgatccaggagttgcgcacctgccacgcactacaagaagatgaaaagctggtgaaaaaagccgagaagcaagtgaccctggccttacagcggcagaggaacttgcatgagcacaaggtgtcactggttgaaaaccatttggccggactggaaggaagggcactagcagacatgtttgacttcctgtccaaagagctggtgagactgcaggaggagaggaggatccatgcctttgtcatgctggctgagcgccagcggcgggtacgagaggctgaagagagtggtcggcgccaggtggaaaaacagcgcctgcgggaggaggacgagatatttaaggaggtggttaaagttcaccatagtactataagctcctacctagaagacataatactgaataccgaagcgaatactgcagaagaacaagccagggcagaaatagagaagatggctgagaaaatcaatgacattgcttatgaaatggaaagccgccgaacctatcttcagtcagaggagattgttgctgagttggtttatagttttctgatcccagaggtgcaaaaatactttgtcaaagaaaaagtgaggaacgcacagcggaaacatattcttgcagcccatcagatcatccacagttacacggaaagcatggttcaaaagaaattaactgagggagagcaagatgaggcctcaaatgctgccatgttacttgagaaagaaactcaaaatgagaacaacagctaagattgtgatttttttgtaaaagaagctgtacgaatcatcataaataattccaatagtctgcacttctcccaaggtgtgcactgctcataaacttgccagtgtgtgattcatgagaaaggagatttattttccttaaacatccaataatttaaaatgattttcaataataataatcaaatgaaaaagcttcattctcttcagtgtcttctagatgccctacttaaagagaacattttcttatgtctcatttcaatattttgttaactatgaggatgtgctggtttgttgaatcaaacaaaaggaaatgttgtggaatatttttccaagtagttttggttcactattcacaggacattggcattatctactaaggctgaaaatgtgcatattccatgactcaggattttatctcctagatatatattcaacagaaatgcatgagtatgtgcaccaacaggcatgacaaaaatatttatagtagtggtgttcacaatagtcccaaactggaaacccaagtgtccatctccatcggaacagaaaactatactttggtctgcttctacagtggcacatcaacccacctttgagctttagatctaagaagtgtgttcatgcaacagccatagagatggtgctattgaaaggcaatctgcccatcctgtgtattgacaagcatcaggattccaggaggattcttcctgattcaaagactgtcaaataggaaaaaagaaaacagtaaatgaacaaaaacatcaacatggagtccaagtaatgaatttatagaggaaaatgtatgctactctgaaaacaaagcttatgttagagaatatcttactgtaagaaacaaggaaaattgcagaaacatttgctgagtgtttttaataggagtcaaaaagaaagggtcttttcagaaactgaagtaggaaataataacagacaaggtcaaaaaatagatgcaggctgaaaagaaaaggaagtgggctaagatgggaaaaatataaaaagatttaaaatccagcaacaaaatttacacattcatttggatgcagtgaaaagggcagaaataccacagcagagaataaaattgataatgttggcaacacatttattaagtgatccaacatgggatgggaaggaatgggcaaagagattaaaatgacagaagttagctgtagatgacctatcccacagcaatcggagttcttgaagaagaaaccagaacaaataaaatagaaacaataatcagagtttaataattaattttctgagtttttttttaaaaaaactaattatacaaacttgaaagggttcaccttgccctagcaaaactaggattgggacacctttttttccccctgaggatcactgacaaaaaacactgcaccagtaaggaagcaactaaattttgttttgttctttgaaaaaggctaacctgagctaggtaaaggttatatcattcacttttgaaataaaccatcgagaacacaaaatgacaagtgagttaggttgggctgatgggatagaaggtgggaggggaatgctatacagctgggaacagcagactttctctgaagggccagatggtaactacattagggtttgcgggtctgatggtcgccatcataactgcatactcaactctgccgttgtagggtaagagcagcactcgatgacacagaaatgaatgcacatgactgtgttccagtaaaattttattttaattaaaatcaattcatgtttgaaaaaggatttaaagtagcttctaataaaggacatgtgtaatgaaacttaaaatatgatattttctttaaaaatctttatccttatgtagacttctaaaactatgttttgcatttagacagtcaaggaaaatacaagttgttatacaattctcattgactaattgaagtttactaggagaggaaaactttttcttgataccggcaatcttttacttataatggcttgagttaaaatgctccaacttttctaatttttgcttttgaaaataaaacacctatagtgacaataaaaacacacatttaaagccaa

SEQ ID NO: 6034 - DNA, 4364 bp, Homo sapiens
  source 1..4364: mol_type = unassigned DNA
gttaccatagcgacgtgcacgcagtagccaggcctgacccgctggtcccttgctggcgggaggaaagaggcggcaccatgagccacgcagtaaccatcgaggagccccaggcccagccgcaggtgtctcaaactcggtaccgggagaggtcgcgggctgggagccacatctcctccaatcgagcgtatgattttctgtacgatccattgtttattgtgtcaagtgagaaagaccatacacaggcaaatatccaagctaccctgattcgcagcagactgagaaaagttcccaggtttaaaaccatgttcagtaacctgatccattatccaagatattctctatattggagcaagtcagatcctgtcccaccatttatcagtcgggaatggaagggacataaggagaaacacagagaagccctccggcagctcaccacaactgacgcttcttttcagatgcctaaagaagtttatgaagatcctgaagttactggaaagaatcgctataaagggcagaaccatacacttttcctcctacttctactaagcacctatccatcccttcaaagtctactgtgggcactcagactgattatcgggatgctgacgttcaaacagatccatactctgcagaatatgtagtatgtcaggactcaatccctgagctcttgaccctggctacgcttacttggggtcggggtctcccagcaggacaagctgaggtggagatgatagaaagagcccgcgagaagcgtgcttgggaagcctctctccccgctctgagtgacacctcccagtttgagaagaggaggaaaatgatgaatgaaatggagaggaaggagtgggccttcagagagcaggagattgaaaaactgcaggagattcgcctggaagttctaaaagagctgttgaggaagcgtgaagagaatcagaatgaagtgaatatgaagcacttgaatgcccggtggtctaaactgcaggagggaaaagaggcaaaaatggcaaaaattcagcgcacgcatgtatcaacaatcagaaaacttgtaggaaagagaaagaatatagaagggaagttggagagaagaaatatcatcaaggattattctgattatgcatcacaggtctatggacctctgtctcgtcttgggtgtttcccagacaacaactcagaggactttgtagtaaaaaactactatctcaacacctatgaaggattagtggaacttgagtcatgtctcccagattttgtgacacaaccccaaatcagagctccaaaacctaaagtcattaccaccaaagctggttttctgaagagggcagcaaggttggactatgagttggcagaggttcataaggcactgttggataagaagaataaagttcttgaagtaaagaaaccccctcgcttccttcaaagaaacccaatacctcaacctcggcttccaactccaaccttggaaatgacgtccaatgaagaagaagaaatggaaatggctgtgatctaccttcaaaagttactccggggcagagtcgttcagaacatgatgtttgaagggaaagaaaagcgactggagttgatccaggagttgcgcacctgccacgcactacaagaagatgaaaagctggtgaaaaaagccgagaagcaagtgaccctggccttacagcggcagaggaacttgcatgagcacaaggtgtcactggttgaaaaccatttggccggactggaaggaagggcactagcagacatgtttgacttcctgtccaaagagctggtgagactgcaggaggagaggaggatccatgcctttgtcatgctggctgagcgccagcggcgggtacgagaggctgaagagagtggtcggcgccaggtggaaaaacagcgcctgcgggaggaggacgagatatttaaggaggtggttaaagttcaccatagtactataagctcctacctagaagacataatactgaataccgaagcgaatactgcagaagaacaagccagggcagaaatagagaagatggctgagaaaatcaatgacattgcttatgaaatggaaagccgccgaacctatcttcagtcagaggagattgttgctgagttggtttatagttttctgatcccagaggtgcaaaaatactttgtcaaagaaaaagtgaggaacgcacagcggaaacatattcttgcagcccatcagatcatccacagttacacggaaagcatggttcaaaagaaattaactgagggagagcaagatgaggcctcaaatgctgccatgttacttgagaaagaaactcaaaatgagaacaacagctaagattgtgatttttttgtaaaagaagctgtacgaatcatcataaataattccaatagtctgcacttctcccaaggtgtgcactgctcataaacttgccagtgtgtgattcatgagaaaggagatttattttccttaaacatccaataatttaaaatgattttcaataataataatcaaatgaaaaagcttcattctcttcagtgtcttctagatgccctacttaaagagaacattttcttatgtctcatttcaatattttgttaactatgaggatgtgctggtttgttgaatcaaacaaaaggaaatgttgtggaatatttttccaagtagttttggttcactattcacaggacattggcattatctactaaggctgaaaatgtgcatattccatgactcaggattttatctcctagatatatattcaacagaaatgcatgagtatgtgcaccaacaggcatgacaaaaatatttatagtagtggtgttcacaatagtcccaaactggaaacccaagtgtccatctccatcggaacagaaaactatactttggtctgcttctacagtggcacatcaacccacctttgagctttagatctaagaagtgtgttcatgcaacagccatagagatggtgctattgaaaggcaatctgcccatcctgtgtattgacaagcatcaggattccaggaggattcttcctgattcaaagactgtcaaataggaaaaaagaaaacagtaaatgaacaaaaacatcaacatggagtccaagtaatgaatttatagaggaaaatgtatgctactctgaaaacaaagcttatgttagagaatatcttactgtaagaaacaaggaaaattgcagaaacatttgctgagtgtttttaataggagtcaaaaagaaagggtcttttcagaaactgaagtaggaaataataacagacaaggtcaaaaaatagatgcaggctgaaaagaaaaggaagtgggctaagatgggaaaaatataaaaagatttaaaatccagcaacaaaatttacacattcatttggatgcagtgaaaagggcagaaataccacagcagagaataaaattgataatgttggcaacacatttattaagtgatccaacatgggatgggaaggaatgggcaaagagattaaaatgacagaagttagctgtagatgacctatcccacagcaatcggagttcttgaagaagaaaccagaacaaataaaatagaaacaataatcagagtttaataattaattttctgagtttttttttaaaaaaactaattatacaaacttgaaagggttcaccttgccctagcaaaactaggattgggacacctttttttccccctgaggatcactgacaaaaaacactgcaccagtaaggaagcaactaaattttgttttgttctttgaaaaaggctaacctgagctaggtaaaggttatatcattcacttttgaaataaaccatcgagaacacaaaatgacaagtgagttaggttgggctgatgggatagaaggtgggaggggaatgctatacagctgggaacagcagactttctctgaagggccagatggtaactacattagggtttgcgggtctgatggtcgccatcataactgcatactcaactctgccgttgtagggtaagagcagcactcgatgacacagaaatgaatgcacatgactgtgttccagtaaaattttattttaattaaaatcaattcatgtttgaaaaaggatttaaagtagcttctaataaaggacatgtgtaatgaaacttaaaatatgatattttctttaaaaatctttatccttatgtagacttctaaaactatgttttgcatttagacagtcaaggaaaatacaagttgttatacaattctcattgactaattgaagtttactaggagaggaaaactttttcttgataccggcaatcttttacttataatggcttgagttaaaatgctccaacttttctaatttttgcttttgaaaataaaacacctatagtgacaataaaaacacacatttaaagcc

SEQ ID NO: 6035 - DNA, 939 bp, Homo sapiens
  source 1..939: mol_type = unassigned DNA
gacgtgcacgcagtagccaggcctgacccgctggtcccttgctggcgggaggaaagaggcggcaccatgagccacgcagtaaccatcgaggagccccaggcccagccgcaggtgtctcaaactcggtaccgggagaggtcgcgggctgggagccacatctcctccaatcgagcgtatgattttctgtacgatccattgtttattgtgtcaagtgagaaagaccatacacaggcaaatatccaagctaccctgattcgcagcagactgagaaaagttcccaggtttaaaaccatgttcagtaacctgatccattatccaagatattctctatattggagcaagtcagatcctgtcccaccatttatcagtcgggaatggaagggacataaggagaaacacagagaagccctccggcagctcaccacaactgacgcttcttttcagatgcctaaagaagtttatgaagatcctgaagttactggaaagaatcgctataaatactttgaaaggccttttctcccattttttcagcagatgccattcaatgttgtttatgccgtatccaaggcagaaccatacacttttcctcctacttctactaagcacctatccatcccttcaaagtctactgtgggcactcagactgattatcgggatgctgacgttcaaacagatccatactctgcagaatatgtagtatgtcaggactcaatccctgagctcttgaccctggctacgcttacttggggtgagttggtaaatctcctgactattggcagatgacgatgctgataaccacgcatgctgttcaaatggcccatgtacaggcaattgtggtttacagtgttgctatataaagtgtcttagtacagcaacttcatagactcataatttttctgatacttctggtcaaataaagatactatctttttattgtga

SEQ ID NO: 6036 - DNA, 2277 bp, Homo sapiens
  source 1..2277: mol_type = unassigned DNA
gctcgactcgccggcgctgtggcctcccgcggagccgctcagactttccctgccggcacatggacctggcccaaccctcacagccagtagacgagctggagctctcggtgctcgagcggcagccagaagagaacacgcctctcaatggtgccgacaaggtcttcccttctttggacgaggaggtccccccggccgaggctaacaaggaaagcccctggagctcctgtaataagaatgtggttggaagatgcaaactgtggatgatcatcacctccattttcctaggtgtcattacagtgatcatcataggcttatgtcttgctgcagtaacttatgttgatgaagatgaaaatgaaatacttgaattatcatcaaacaaaacattcttcatcatgctgaagattccagaggagtgtgttgctgaagaggaattgcctcacctgctcaccgaaaggctcacagatgtgtacagtacatcgccctctctgggtcgttattttacttcagttgaaatagtggacttcagtggtgaaaatgccacagtaacgtatgacctgcaatttggggttccatcagatgatgaaaattttatgaagtatatgatgagtgaggagttggtgctgggcattttgctacaggatttccgtgatcagaatatacctggttgtgagagtctggggcttgatccaacatccctcttgctctatgaatgaagtgatggaggctggtctctgtctgaaagcagtgctctaccaagtcctggagatgaagggaattcactctgttttgcagaaaagattctgtggattaatacagaagcaccagcaacaccagaggggtggagactcctttctctcccgattctacagtctggctctaagcccagtaaaacagctcccgagcactgcttcagctgggtccagtcttgacaaaggcaggaagccagctagggtgggggcgatagggtcagcgggtatgtcccactgttggaggtcactggtattctgtttgtttttgttttgtttcgttttgttttttgagacagggtctcgttctgtcgcttagctggagtgcggtggcgtgatcatggcactgctattcttgaagcactccacccacctgggctactttttctttagtgcagaggtgcactgtcttcttttaggtgggatcgcgtaagcatgagctggtagagcacggagaggcaggcagccaggttacgaagactaagccaattattcactgaagtcatcctcctcccccccaccattcgatttgatctacctctaagccaggctgtgaagaaaaggaaggcactttagaagacctcagcagtgtggttctgtgtctacttccatgacctgtacctgagtatcttagccagccagccttaggaacaccaccaaggttactttgaaatctatgtatatagctagttacagacgggagctatgtgtttcttcattattttgcagctcctcgttgttcctgtgattcctgaacacctttttggaaatatgggtctctgtgagttttgagcacactactatcactttggatagtcactccatttatatttttataaacttccattagagaatcattaaggctgtttaatatctgctctggatattacgcattggctttttgttgcctagtgctacaaaccttcctgtgggactcagtgtcttcaggcaatgattgtgtatcctgttacagatggttgtgatacaagaagaaccactcttctttgaaaataaactcttggaagcttttgccagctatttggggggtaggaggaatattagcaactgtattggttgtctacagatacagaattgcctgttgtgagggaactgattgttttgttgggaaaagaaatttaccaggagaaagagttttgtgctgtattgtgagagatctcgcctctcagttaaatgagccctgggttaaagtcagtgtgaagggcagctgtgtgcgggcacgagccagagtgtctgcctcagactagatttgacttgagttctttatgacccaggactctggataatgtgaatttgctttcctatttaactagaagatacatgtactatagatcattgtctcattttagtgattgttccttaaactagtgaaactagtggatttctcttcttcctctttattttctgcatgttaaatgtgaaccttagtgtatttgtattttgtagaaaataatgaaaaattttaatggagaatgatttaaaaacatttacaatacattatttttgcatctgt

SEQ ID NO: 6037 - DNA, 517 bp, Homo sapiens
  source 1..517: mol_type = unassigned DNA
gaggcggggaggtcgctcgactcgccggcgctgtggcctcccgcggagccgctcagactttccctgccggcacatggacctggcccaaccctcacagccagtagacgagctggagctctcggtgctcgagcggcagccagaagagaacacgcctctcaatggtgccgacaaggtcttcccttctttggacgaggaggtccccccggccgaggctaacaaggaaagcccctggagctcctgtaataagaatgtggttggaagatgcaaactgtggatgatcatcacctccattttcctaggtgtcattacagtgatcatcataggcttatgtcttgctgcagtaacttatgttgatgaagatgaaaatgaaatacttgaattatcatcaaacaaaacattcttcatcatgctgaagattccagaggagtgtgttgctgaagaggaattgcctcacctgctcaccgaaagggaagtaggactgaagccgaatcctgaagcactggtgggatttgaataa

SEQ ID NO: 6038 - DNA, 2054 bp, Homo sapiens
  source 1..2054: mol_type = unassigned DNA
gaggcggggaggtcgctcgactcgccggcgctgtggcctcccgcggagccgctcagactttccctgccggcacatggacctggcccaaccctcacagccagtagacgagctggagctctcggtgctcgagcggcagccagaagagaacacgcctctcaatggtgccgacaaggtcttcccttctttggacgaggaggtccccccggccgaggctaacaaggaaagcccctggagctcctgtaataagaatgtggttggaagatgcaaactgtggatgatcatcacctccattttcctaggtgtcattacagtgatcatcataggcttatgtcttgctgcagtaacttatgttgatgaagatgaaaatgaaatacttgaattatcatcaaacaaaacattcttcatcatgctgaagattccagaggagtgtgttgctgaagaggaattgcctcacctgctcaccgaaaggaatgaagtgatggaggctggtctctgtctgaaagcagtgctctaccaagtcctggagatgaagggaattcactctgttttgcagaaaagattctgtggattaatacagaagcaccagcaacaccagaggggtggagactcctttctctcccgattctacagtctggctctaagcccagtaaaacagctcccgagcactgcttcagctgggtccagtcttgacaaaggcaggaagccagctagggtgggggcgatagggtcagcgggtatgtcccactgttggaggtcactggtattctgtttgtttttgttttgtttcgttttgttttttgagacagggtctcgttctgtcgcttagctggagtgcggtggcgtgatcatggcactgctattcttgaagcactccacccacctgggctactttttctttagtgcagaggtgcactgtcttcttttaggtgggatcgcgtaagcatgagctggtagagcacggagaggcaggcagccaggttacgaagactaagccaattattcactgaagtcatcctcctcccccccaccattcgatttgatctacctctaagccaggctgtgaagaaaaggaaggcactttagaagacctcagcagtgtggttctgtgtctacttccatgacctgtacctgagtatcttagccagccagccttaggaacaccaccaaggttactttgaaatctatgtatatagctagttacagacgggagctatgtgtttcttcattattttgcagctcctcgttgttcctgtgattcctgaacacctttttggaaatatgggtctctgtgagttttgagcacactactatcactttggatagtcactccatttatatttttataaacttccattagagaatcattaaggctgtttaatatctgctctggatattacgcattggctttttgttgcctagtgctacaaaccttcctgtgggactcagtgtcttcaggcaatgattgtgtatcctgttacagatggttgtgatacaagaagaaccactcttctttgaaaataaactcttggaagcttttgccagctatttggggggtaggaggaatattagcaactgtattggttgtctacagatacagaattgcctgttgtgagggaactgattgttttgttgggaaaagaaatttaccaggagaaagagttttgtgctgtattgtgagagatctcgcctctcagttaaatgagccctgggttaaagtcagtgtgaagggcagctgtgtgcgggcacgagccagagtgtctgcctcagactagatttgacttgagttctttatgacccaggactctggataatgtgaatttgctttcctatttaactagaagatacatgtactatagatcattgtctcattttagtgattgttccttaaactagtgaaactagtggatttctcttcttcctctttattttctgcatgttaaatgtgaaccttagtgtatttgtattttgtagaaaataatgaaaaattttaatggagaatgatttaaaaacatttacaatacattatttttgcatctgtgttgttgcattcccat

SEQ ID NO: 6039 - DNA, 4346 bp, Homo sapiens
  source 1..4346: mol_type = unassigned DNA
cttggtctcaggagagccagcgcgcacaagcaagggtgtgcggctctgagacgtgcgttgctgcttgtgggtgtgagacatcctagctcctcttccccttccgtgagtccctcctttcctcgcagaccccacttgtcgtggctggctgccgccgcagctcttgtgcgaagccagcagtgcgcgtgcgcgcgggcacgggcgcgcgaccgtcgggtccccgcgctccctccccctcccgctcctctataacttggctggcgtggaggaggcgccgccggagtcggagggcggggagctaggaggagggagctcgagagttgtggagactagtgactgggagaagtcgcagcccgctcaggcccgcgccttcccgctccccgtcttcctctctcacacacctactccgccctccgccccagcccgcgcgctagctccttctctcgcccggggttcctgccggtagctctccgggtcttggcgcggcgggggcgccccgggggtgccctcgccctcccgttgcgggcgggcgggcggtatgtggcgcctggtgcccccgaagctgggccgcctgtcccgctcgctgaagctggcggcgctgggcagcctgttggtgctgatggtgctgcactcgccgtcgctgctcgcctcttggcagcgcaacgaactgaccgaccggcgcttcctgcagctcaataagtgcccggcgtgcttcggcacgagctggtgccgccgcttcctcaacgggcaggtggtattcgaggcgtggggccgcttgcgcctgctggacttcctcaacgtgaagaacgtgtacttcgcgcagtacggcgagccccgcgagggcggccgccgccgagtggtgctcaagcgcctcggctcgcagcgcgagctggcgcagctcgaccagagcatctgcaagcgggccaccggccggccccgctgcgacctgctgcaggccatgccccggaccgagttcgcgcgcctcaacggcgacgtgcgtctgctcacgcccgaggcggtggagggctggtcggacctggtgcactgcccctcgcagcgccttctcgaccgcctggtgcgccgctacgcggagaccaaggactcgggcagcttcctgcttcgcaacctcaaggactcggagcgcatgcagctgctgctgaccctggccttcaaccccgagccgctggtgctacagagttttccgtctgatgaaggttggccatttgcaaagtatcttggagcttgtggaagaatggtggctgtaaattatgttggagaagaactgtggagttactttaatgcgccatgggaaaaacgagttgacctcgcttggcaattaatggaaatagcagaacagcttacaaacaatgactttgaatttgcactctacctcctggacgtcagctttgacaattttgcagttggtcctagagatgggaaggtaatcattgtggatgctgaaaatgttttggttgctgacaaaagattaattagacaaaataaacctgaaaattgggatgtatggtatgaaagcaagtttgatgactgtgataaggaggcttgcttatcattttcaaaagaaattctttgtgctcgtgccactgtggaccacaattactatgctgtttgtcagaacctcttatccagacatgccacctggcgtggcacttctggaggactccttcatgatccaccaagtgaaattgccaaagatggccggctcgaggccttgctggatgagtgtgccaacccaaagaagcgctatggcagattccaggctgcaaaagaactgcgtgaatacctagcacaattaagtaacaacgtgaggtagtctatggtgaacttttctttttttctccatttaaacagcactggctaaaactaaaccaccaaaaaacgatctgaaaaaatgaaatttggaagtgttacattcagaggatgataaacttgcactgatagatcttaatgttaacatccatcaaaataagacattacttcaaaaatcacatgatgcttctgcaaataagtatgttcttatactttggaggcttgagctgtcatcagctgctccccactaccccggaatgcttgagtggattaatgaatattgttaagctattggaaatgagtctgatagtacattggcttgtgtatcaaagggtacttggtacttagtttgcatttactatcatgattttgtgaatctcttgcatttactttgaatgtcaagtcagattggtctgttttataggccgctttttccttctgatgtgtagggttttttccccctttttttttttaattaaattttgaaaattcaggttactgtaggtgttcatttaaatttttaatagttgtcattcagtgctatttggtacatatttactgttagggcaggattcccaggtttactgtgttttttttttttttttttaaagaaagctaaatattacattatgtaaatacttcttttcaccaacttctgtagtttcaccattgcatggtgtcatttcaggttatttaacagttatatccctctatgccaataattagaagtgtacactaaacatgaagtttggcatatgttgcaaaatgtcattttatcttttctaaaggctttaagaagaatatactagaatctatatattgatgttaattttgattcagaaaaaaaatacaacccagtatctaaaaagtgttaactagtccaagatagtaatgcatatgccaaagaaatattacacctaatctcatgtttagaatttaaaatagaattggtcagctacttattcttaccaccctacttccagtattttagctctgtcattattaaattcagatcttcctgattattttttctgttgaaagttaaactactgctttcaagtaatttaaagttatcctaccttttattcatgggtagttttgcaaaattaacatggtagccattgtttgaatttaatcgggcatcataacttttcatttattgaggaactaatcattattactataaagcatacaaattagccagtcagcacactttggtcttctttacctaagggttaaacatcagaacatcaaatttaattatttgcatagaaatgtgtgggctctttatataagttgactatcactaacaggtaatatttttctgtttgaagttgttacttttgtttacagcaaagtttgatgtagtgtgcagtagtgagctctagactgatctttttctaaatcagaaagtgattaaagtatgcacaaccaaaggcaggtttttctttttcatttattcagcaactatttattaagcatcaactctgtgccaggcacgttactagctgctacatactgtctgaacatgacatacggttaagtaactttacaattattatcaaatacttcaatgtagatatttcttaagttgaaatagcattaactaggataatgctttcatgttattttattgtcttgtgatagaaattcaacttgtaccatctaaaactaggttgctataaaaataggaggatgaagtcaataaagtttatgccagtttaaaaactggaaggaaaaggtaagagctctccattataaaatagttgcattcggttaatttttacacattagtgcattgcgtatatcaactggccctcaatgaagcatttaagtgcttggaattttactaaactgacttttttgcaactttgggagatttttgaggggagtgttgaaaattgccaaacactcacctcttactcaaaacttcaaataaaatacacattttcaagagggagcaccttttatatttgataagttttcattataaaccttataataccagtcacaaagaggttgtctgtctatggtttagcaaacatttgcttttctttttggaagtgtgattgcaattgcagaacagaaagtgagaaaacactgccagcggtgattgctacttgaggtagttttttacaactaccatttcccctccatgaaattatgtgaaatttattttatctttgggaaaagttgagaagatagtaaaagaattaggaatttaaaattacagggaaaaatatgtaagtgaaaagcaataaatattttgttcactttgctatcaagatgttcactatcagatatttattatatggcagcaatttatatttttaatcattgcccattaatagacgcagtaaaatatttttgaatcagacatttggggtttgtatgtgcattaaaattgtcttttgtactgtaagttactgttaatttgaatattttattgaactgtctccctgtgcctttataatataaagttgtttctacaacttttaatgatcttaataaagaatacttta

SEQ ID NO: 6040 - DNA, 1876 bp, Homo sapiens
  source 1..1876: mol_type = unassigned DNA
agttcggactcggccgggctgggccaggctgcaggcgtgggaaggggcgtctccgggggagccccggggctgtgcagggaggccgagggcgaccccgctgatggagagtctgctcttgttacctagattcgggcgcatttcggatttgactgtggatctttcaacgccagagggagtgcgtctcttaacactccccaaaatgtctctactgcgagtttccttccgctctctaccctgcctttctgcttttatctgccggggcttgcaggtccgcggcgcagactgttcacgagcccttggacctttcctagttcttctgaagtgttctacaccgcgttcgctcttccttttctggcgctggtggctggcctaacttcggtctcagagtctttgttttcgctcatttacctggcagtcatttggacacctaattcgaggacaagttggggaggatgaagtcggagaacgggacagtggtcgggagttttccgtctgatgaaggttggccatttgcaaagtatcttggagcttgtggaagaatggtggctgtaaattatgttggagaagaactgtggagttactttaatgcgccatgggaaaaacgagttgacctcgcttggcaattaatggaaatagcagaacagcttacaaacaatgactttgaatttgcactctacctcctggacgtcagctttgacaattttgcagttggtcctagagatgggaaggtaatcattgtggatgctgaaaatgttttggttgctgacaaaagattaattagacaaaataaacctgaaaattgggatgtatggtatgaaagcaagtttgatgactgtgataaggaggcttgcttatcattttcaaaagaaattctttgtgctcgtgccactgtggaccacaattactatgctgtttgtcagaacctcttatccagacatgccacctggcgtggcacttctggaggactccttcatgatccaccaagtgaaattgccaaagatggccggctcgaggccttgctggatgagtgtgccaacccaaagaagcgctatggcagattccaggctgcaaaagaactgcgtgaatacctagcacaattaagtaacaacgtgaggtagtctatggtgaacttttctttttttctccatttaaacagcactggctaaaactaaaccaccaaaaaacgatctgaaaaaatgaaatttggaagtgttacattcagaggatgataaacttgcactgatagatcttaatgttaacatccatcaaaataagacattacttcaaaaatcacatgatgcttctgcaaataagtatgttcttatactttggaggcttgagctgtcatcagctgctccccactaccccggaatgcttgagtggattaatgaatattgttaagctattggaaatgagtctgatagtacattggcttgtgtatcaaagggtacttggtacttagtttgcatttactatcatgattttgtgaatctcttgcatttactttgaatgtcaagtcagattggtctgttttataggccgctttttccttctgatgtgtagggttttttccccctttttttttttaattaaattttgaaaattcaggttactgtaggtgttcatttaaatttttaatagttgtcattcagtgctatttggtacatatttactgttagggcaggattcccaggtttactgtgttttttttttttttttttaaagaaagctaaatattacattatgtaaatacttcttttcaccaacttctgtagtttcaccattgcatggtgtcatttcaggttatttaacagttatatccctctatgccaataattagaagtgtacactaaacatgaagtttggcatatgttgc

SEQ ID NO: 6041 - DNA, 5334 bp, Homo sapiens
  source 1..5334: mol_type = unassigned DNA
acttccgcttacgcgccccacttccgcttccggccccgggctgtggtgactggcggtgtggggtgggtcagagggcagtaggtacctccaggcgggagcagcgtttgcaccgcggtgggttcctgcgagctggtgcagaggggccccagcgggccggccccggggcacatgcgacgacctccacccctgggccccacgacggcctcagggcctgaaggcaatgtgcgaaacctgcagaagcggcaggcgccagggccaggcgcggcgggaggctgtggccctgaggccggggggtgccgggaaaataagcaaaagaggagaatggtggcccgggccacccctgggagaggcgaggtggaaagtgataagtcggttgcagcatcaggggctggaaaggccgcaaggcgtcaggtggaggggcgcaggggcccggtgagcccgtcagactcgtcagacccgcgaggcctagaagcagcaaaggaggctgaactccccttgcaaacggaaagacacaccaaggaaaaaagaaaagttactgaagcctcaagtgatgatccacagccagggcttgacttggtaagaaaggaatcattaaccagttcggaatctttccaaacagtggaatgcttgcagtctttgggtaaggaaagtataatagaaggtattaaaagaagaattcgaaataaaaaacttaaaagcttagaaaacccacctctcaaaataaccgaaaatgaggctacacaaaatattaaggttgaattccaagatgaactgtacaagaatactccaaaatattcttgtaatatcttgtcacctgaagtagaaaataattccgttttaaaattacgtgattgcaattgtttcccccattccaagggttgtaatgatgaaaacaacctgccatataaacctgatggtggatgtatgcatgtagcagaaaatttctcaaagaaagaaaaccttaggagtcttgcagagaagagtgacacaaatagtattcctcagctcttacaaacagaagaaaatgtaatgggagtaaataagttactaccagaagagagtgatttataccaaagtaaaaccaatggcttgctttcctgccttcaacatgaaaaaaataaatattcaatagaggagagcagtgttgggcgaaaacccaggaaaaggatgaagttgtctgaaaaagcagatgaaacagttactgagatgaacttctctaatgagtataacaagtctgagttgatgttgcaagaaaatcaaatgattgctgatggtaaagaagcagagactaaaagtcctttaaatgttttgagaaaagtaagccataatacagtctctttgatggatcatttattaagtgtcccagaaacagtagaaaaagaaacaagttctgaacatcatgtaaatgctgtgtttcagaaaaccattgaaccacttttgaaagaagaaacagagaatgcttcagagccgttaggttatgaaagcatggcatcgaaagaggattttaaatcgatgaaaagcttcatagggaaatcacctaatgagtaccatattgaaaggagatcttcacgggaagacttaagaagtgcatctgaagaattgaagttaagctgtcagagaacaatacctatgactggtaaaagaacttggccctattattcatgtgctagaatatctgcctggtgttggaaaaaggcttccttgccagaatcaagttactttcttcgtgggtctcaggaaagttgtaggcaagttgatgtccctaaacaccaaacaaaccagacccatttaactgactccaaattattattacaaagttccttaacagaaacaaacactgaatcttcaagtaaagaaaaattagattctaattctaattgtttgtcttcagtttctgcagtagaacctactttaatggttataaaggaacctataatcaaggatgataaaaagataaaatcagaggaactgagcagaagagggtcagaggtaatttctaacactactgaagatactcaattaaccagtgagactcaaagcttaacgggaaataaaaaaaaagctagaggaaatttaacgaaacttaatttgacagcgacttccaaagatggtcaggaagcaaataactctgcaggcaaaactattcatcgaaaagcatgcattgctcaacaaacatttatagttccagacttggttaaaatattgaacacaggacggctgactaattttaaaattcctttacttaagaataaatcagaaaaaagaaaagaagtaaatgccaagtcatcagagagagaagcttacagtcctctagaacttctggacaatttatctggagcagacgtaagacagaacaggagtaaagaaaatgtctccatgatgatgttaggacctcaaactttgagcatacgaaatagtgtaactccagtgcaagctagttctgactcattctacaataagaaatcctatagtatttctccaagctttacaaagcaaggtaacaatagcaaaccatctaatcacgtctctgaaccaggcaatattgtttctaataaagaagttgcttctctcacagttgaaaataatgctttttcttgtgatcctgggtatgtagagaaaagtccttccttctgctgtaatgaacaagaaacattccgaccagtgtccagtgaagttaggggtagaaaaataactaagaatttttcagaggtagggtttccagatattcttaaagcatatgaagatgacgtcctcttaattgatgtaattcaagatgacccagacctctttggagtctccaatgaaggggagctctcatttacttctgaggtcccaaagataagccaggagcccaatgttgctggagagcaccaatcaacagactccaagtacatggaaactccagtaaaaaaagaaccaagtgatgacttaagagaacttcctgtactggactgtggatggataaagccagacatctgtgcttccaactcagcagaaagtgaaataaaacgtgatcccaaagatgtaaacacttccttaggagaagttgctaatgagacctctgaaaatgaaacactgggagacttcagtgaacaaataaaaggttcagacttggatgaaaagcatagatttacagacaaagtgattaccaaagaagaaaaagaaaatatttatgaagtttgcaaaagcaaagattctagaaatgcagactttatggtcggcgaatgtcaatttgcagtaccagtcccgaaacctctgtgtttattagtacctcctttgaatctaagtggtcgtcaagaagacacaatactgaatacctggatgaatgatttcagatttctgggaaaacattctgtcctaaagctgcagaatcctgaaacttgtgaaatattcaagagggaaaaaaatgtgggggtgttccagaagtccctagggttgatgataccctataaatattgcaaatttcattttaatacattacgtggctgtgagcgaccactgtgcaagtttgctcatgtgcctgaacaaggggatgaaaaggtttgcatggatgtgtttaagaaatatataaatatcaatgaactgtgtttgctacagcgtgcagtaaacatatttatggagtactacagaaagtttcccccaggtgtatactttgatttacaagtgctaaatgaccttctaaattctttactcaaacattgtttgttgaaagaagtatttcagatagtgaacctcagcataatggttaaaatgctgccttctctgaaaatattactaaacatatttgagtatgtggcaactatgaaattaaggaatgctgtacctgctttaattgatatcttttgcaagcttgttgaagccgggatggtgcttgacccagagcactttaactatattgttaagcttttataccaagtacaagcttccaaacaagaaataactgcagttctggaaatgaaatcgaggttacagatgagacgatttaaaaagaactggaagtgtgatttagattcagccttgaataaattagagcattgtaaagaaaaaggtgactggaccaaattgggaaaattatacattaacgtaaaaatgggctgtgaaaaatttgcagatttccagacattttgtgcttgcattgctgaaacactcacaaaaaactatgaagatgaaagaccagatattcccttttgtgaatttgctgaaacagttagcaaagatccacaaaacagtaaagtagataaaggtgtactgggaagaattggaatcagtgctatgtacttctatcacaagctgttgcagtggtccaagggaaggaaggtcttagagaaactatatgaattaaaaatacactttacaagtttaaaaggacttatagggcctgagaagttagcatcaagatgtcaaattgtgaatgttgcagcagaaatttttctaaaaagtggaagcctagatggtgccatttgggtaatgagggagtcagagtggataatcaatacgcctctgtggccttgtgatagactggatgtgcttaatcgacataatttactctgtacaattgcacatgaaatcttagccaagagcctttatagacagacatttgaagttttgcagaatctaccaggttttcaaaattcccaagaaactgtggaagtctcacaatatagccttctttttaataagcttctaggttcctgtatagaaagcagtagtcttggtatgtcatcctctgtggcagaattcatgatttcaaagagcatccctattgatttttcctttctcagaagattaattacttctttaggaaggagtcgtttatggctcaaagccagagcccactacaaaagtgctctttccttgggttgctacccaccattggaaggaaatttataccgaaaacttcttctaattccatcttatttatctgagattgaaatgctcttagctattgaaatcttcatggtatctaatgctagtagtattcagagtcctggaacttctacacagatactgcagatagttttgaaaaggtgtgaagacaaccagtctcggagcaatgatgattatcaagctgcagtagaaaggttaattatggctgctcgtatatcagatccaaagcttttcgttaaacacatgactgtcaatgttaataaggaacaggtttatagtttggaacattgttctgccctgaaatggttaaaagagaatatgaagtgggctggaaaggtttggcttttcagtaaccattagctaataaagtctgctttttttttttttttagttcaagtaatcattgttgaaaataaaaggcaataaaaatagacagttttcactata

SEQ ID NO: 6042 - DNA, 2013 bp, Homo sapiens
  source 1..2013: mol_type = unassigned DNA
ctccctcccccaatcccccctccccccccaatctgtctttctagcatgttgccctttttcaaccacatttgtgtttcaggtgtagagaggagagagagtgaacagggagcggggcttttgtctgttggtctccctggactgaagagagggagaatagaagcccaagactaagattctcaaaatggtttattacccagaactctttgtctgggtcagtcaagaaccatttccaaacaaggacatggagggaaggcttcctaagggaagacttcctgtcccaaaggaagtgaaccgcaagaagaacgatgagacaaacgctgcctccctgactccactgggcagcagtgaactccgctccccaagaatcagttacctccactttttttaatcgtaacacctccatttgtattacatatggtgtatgggtattgatgaggtcatggtatcatatatgggatttttttctgtgtaaatcatcaagtataagaagaaactatgggactctgagccttgctttagagaatttacagtggacaaataggtgtcatcaaaccagtttttaatcattctgactcaagtgaaaacgctcagaatttcacactgtgaatccacgtttacaacccttacaggtgggccttcaggcctggttcgctacaacaatgtcttccacaactcaaactcccaccgcgctcacacaaccggtccactcctgccttttcactcacacagctcccgactgcttcttgcagaggctgagagtcccccccccaccttttttttcatttagatgtaacaaacctagtagtttatgttcatcaattgtctgtatatctctatattttatccatgtactcttttgatgtatagaagtagtttgaaactcattgtttccttgtggtaagtgaccgagatgctgccacaggacctgagacactgatgaatggtgctattttggactttcaacatgctccttggcgaggtagctctgatggagttattttttatttccatgttctaagaaggtgttggtactctgtttccctgaatgttgttctctagactggattgacttgttttccttgtgtcttcagtgtggctttcttcctcagtgttgtaggttgagcgaatgctaccagagtgtgagagaccattgtctcgttggctggcgctcacggacatgcagtcacggtagcgggagcaatcacaaaactgtaatttacttaccaaatctcttcctttccgtagcctcgcctgcctgacttagagaaagaaaagcaataattttacaggcattttgaggtgtctctttgggttctttctgtttgaaaggatatttgtcgaaaaaaagagcaaaaccgttttaaataaactccccctggaaaaaaacccaaaacactggcatctgagtgggaatatgaaaatgacaccttttccaaatattaaattggaaaacaaggtctacaaaatcatgatacttttttaaaaggcagagcattcttttttcggcaattttgataagcaaggtgtagatttacatttttgtccttgctcccaacgaaatggataaacaaaaataaattaccatctactcatggaatgttgttgtgttagccagtctgaaagcccaccttaatttttatataactgtctttagctcttcttttgacagggcaggccttgttctgaactgtttcgcttctgactgttaaacaccgatgacgcatgcactgcacttcttcgttttcttcttgctcccccattggcctgagtttcttgtgcattactcctctccctccttcgttagaataggtatatcagctgtgtaaatagagcaagaaaacagtattctgcatctgtggcatttatgtagagttgcagttgtgtactgctgaaaatgcaggcttttgtaacagtgtgatctttactgatgcactcatgacaagtacccaatgtattttagctattttagtagtatttgttcaataaatacgcaagctgtaaggtaactgtctg

SEQ ID NO: 6043 - DNA, 2581 bp, Homo sapiens
  source 1..2581: mol_type = unassigned DNA
cggggcgcagagctgcgggtccgctttgtctccccggggcgccgcgcggtgcagtggggacggcgcggcgagcggggcgcccggggcgcgggtgcggggtgtcggggcgcgcgcgcctgttggccgctcgccgacggggcccagagccgccgattcctgccgagtgtagagaggagagagagtgaacagggagcggggcttttgtctgttggtctccctggactgaagagagggagaatagaagcccaagactaagattctcaaaatggtttattacccagaactctttgtctgggtcagtcaagaaccatttccaaacaaggacatggagggaaggcttcctaagggaagacttcctgtcccaaaggaagtgaaccgcaagaagaacgatgagacaaacgctgcctccctgactccactgggcagcagtgaactccgctccccaagaatcagttacctccactttttttaatcgtaacacctccatttgtattacatatggtgtatgggtattgatgaggtcatggtatcatatatgggatttttttctgtgtaaatcatcaagtataagaagaaactatgggactctgagccttgctttagagaatttacagtggacaaataggtgtcatcaaaccagtttttaatcattctgactcaagtgaaaacgctcagaatttcacactgtgaatccacgtttacaacccttacaggtgggccttcaggcctggttcgctacaacaatgtcttccacaactcaaactcccaccgcgctcacacaaccggtccactcctgccttttcactcacacagctcccgactgcttcttgcagaggctgagagtcccccccccaccttttttttcatttagatgtaacaaacctagtagtttatgttcatcaattgtctgtatatctctatattttatccatgtactcttttgatgtatagaagtagtttgaaactcattgtttccttgtggtaagtgaccgagatgctgccacaggacctgagacactgatgaatggtgctattttggactttcaacatgctccttggcgaggtagctctgatggagttattttttatttccatgttctaagaaggtgttggtactctgtttccctgaatgttgttctctagactggattgacttgttttccttgtgtcttcagtgtggctttcttcctcagtgttgtaggttgagcgaatgctaccagagtgtgagagaccattgtctcgttggctggcgctcacggacatgcagtcacggtagcgggagcaatcacaaaactgtaatttacttaccaaatctcttcctttccgtagcctcgcctgcctgacttagagaaagaaaagcaataattttacaggcattttgaggtgtctctttgggttctttctgtttgaaaggatatttgtcgaaaaaaagagcaaaaccgttttaaataaactccccctggaaaaaaacccaaaacactggcatctgagtgggaatatgaaaatgacaccttttccaaatattaaattggaaaacaaggtctacaaaatcatgatacttttttaaaaggcagagcattcttttttcggcaattttgataagcaaggtgtagatttacatttttgtccttgctcccaacgaaatggataaacaaaaataaattaccatctactcatggaatgttgttgtgttagccagtctgaaagcccaccttaatttttatataactgtctttagctcttcttttgacagggcaggccttgttctgaactgtttcgcttctgactgttaaacaccgatgacgcatgcactgcacttcttcgttttcttcttgctcccccattggcctgagtttcttgtgcattactcctctccctccttcgttagaataggtatatcagctgtgtaaatagagcaagaaaacagtattctgcatctgtggcatttatgtagagttgcagttgtgtactgctgaaaatgcaggcttttgtaacagtgtgatctttactgatgcactcatgacaagtacccaatgtattttagctattttagtagtatttgttcaataaatacgcaagctgtaaggtaactgtctgatttggctcatcattgaagaggcctagttttgaatgtcttctctggttcttgctaattcatgtgtttccagagccccagaagtcaggccagcaaacccaagggcaaatatcaaaagagagagaatcagctctgcctttcatgcgttttcccttttgaggattttatgagattaggggctaggcagtggctcattaagatggtatttgcagagctgcctctggacacaaagcagaattagaccaagatccttttatttctacactttttctcccttccaaggcattcccatacgcttcaaaacttactctttctcactccttgccattaagacccactctgtggtattctttaagacccactctgtggtattctttctttttccctgccaaaagagatctgacctcccttcttcatggaatatgtgcacttttcctcagacaaaaagcttaaacttttgtaagaggataaaaatttgagacagaa

SEQ ID NO: 6044 - DNA, 1468 bp, Homo sapiens
  source 1..1468: mol_type = unassigned DNA
agaatgactgttgccagcatctagaaggaattacttttccaggcagtgcaatcatgctatttatcaaaagaaacattggacaatcagaatgggctgcagagctgtgtcctgagctgtctggccaactcccggcaagaagcttctttgtcctttaaagactgaactttatcctcaagcagtaacaggactggaatgaaaggagtttggaattattctgctttgagccgaagagaagatgaaacacgaacccagaggagcaggatgacagacagagtcccttgttccaaatgtttccaggttcactgccagatttctgttctgaattgtgtttattacccagaactctttgtctgggtcagtcaagaaccatttccaaacaaggacatggagggaaggcttcctaagggaagacttcctgtcccaaaggaagtgaaccgcaagaagaacgatgagacaaacgctgcctccctgactccactgggcagcagtgaactccgctccccaagaatcagttacctccactttttttaatcgtaacacctccatttgtattacatatggtgtatgggtattgatgaggtcatggtatcatatatgggatttttttctgtgtaaatcatcaagtataagaagaaactatgggactctgagccttgctttagagaatttacagtggacaaataggtgtcatcaaaccagtttttaatcattctgactcaagtgaaaacgctcagaatttcacactgtgaatccacgtttacaacccttacaggtgggccttcaggcctggttcgctacaacaatgtcttccacaactcaaactcccaccgcgctcacacaaccggtccactcctgccttttcactcacacagctcccgactgcttcttgcagaggctgagagtcccccccccaccttttttttcatttagatgtaacaaacctagtagtttatgttcatcaattgtctgtatatctctatattttatccatgtactcttttgatgtatagaagtagtttgaaactcattgtttccttgtggtaagtgaccgagatgctgccacaggacctgagacactgatgaatggtgctattttggactttcaacatgctccttggcgaggtagctctgatggagttattttttatttccatgttctaagaaggtgttggtactctgtttccctgaatgttgttctctagactggattgacttgttttccttgtgtcttcagtgtggctttcttcctcagtgttgtaggttgagcgaatgctaccagagtgtgagagaccattgtctcgttggctggcgctcacggacatgcagtcacggtagcgggagcaatcacaaaactgtaatttacttaccaaatctcttcctttccgtagcctcgcctgcctgacttagagaaagaaaagcaataattttacaggcattttgaggtgtctctttgggttctttctgtttg

SEQ ID NO: 6045 - DNA, 704 bp, Homo sapiens
  source 1..704: mol_type = unassigned DNA
agtctggctcctaggcggctgcacagtggcagcaaggctggggcgctggctccgcgccagctccatcagaattagctcattgttcactagcaccctagcgggagagagagggaaagggagagagagagactcttagagaaagagagagacacacacactcttggagagagagcgcgaggtgtagagaggagagagagtgaacagggagcggggcttttgtctgttggtctccctggactgaagagagggagaatagaagcccaagactaagattctcaaaatggtttattacccagaactctttgtctgggtcagtcaagaaccatttccaaacaaggacatggagggaaggcttcctaagggaagacttcctgtcccaaaggaagtgaaccgcaagaagaacgatgagacaaacgctgcctccctgactccactgggcagcagtgaactccgctccccaagaatcagttacctccactttttttaatcgtaacacctccatttgtattacatatggtgtatgggtattgatgaggtcatggtatcatatatgggatttttttctgtgtaaatcatcaagtataagaagaaactatgggactctgagccttgctttagagaatttacagtggacaaataggtgtcatcaaaccagtttttaatcattctgactcaagtgaaaacgctcagaatttcacactgtg

SEQ ID NO: 6046 - DNA, 2065 bp, Homo sapiens
  source 1..2065: mol_type = unassigned DNA
actagcaccctagcgggagagagagggaaagggagagagagagactcttagagaaagagagagacacacacactcttggagagagagcgcgaggcagggagatgatctcctcctcctttttccaaggctgcacttcttggaagtgaagccggtgtagagaggagagagagtgaacagggagcggggcttttgtctgttggtctccctggactgaagagagggagaatagaagcccaagactaagattctcaaaatggtttattacccagaactctttgtctgggtcagtcaagaaccatttccaaacaaggacatggagggaaggcttcctaagggaagacttcctgtcccaaaggaagtgaaccgcaagaagaacgatgagacaaacgctgcctccctgactccactgggcagcagtgaactccgctccccaagaatcagttacctccactttttttaatcgtaacacctccatttgtattacatatggtgtatgggtattgatgaggtcatggtatcatatatgggatttttttctgtgtaaatcatcaagtataagaagaaactatgggactctgagccttgctttagagaatttacagtggacaaataggtgtcatcaaaccagtttttaatcattctgactcaagtgaaaacgctcagaatttcacactgtgaatccacgtttacaacccttacaggtgggccttcaggcctggttcgctacaacaatgtcttccacaactcaaactcccaccgcgctcacacaaccggtccactcctgccttttcactcacacagctcccgactgcttcttgcagaggctgagagtcccccccccaccttttttttcatttagatgtaacaaacctagtagtttatgttcatcaattgtctgtatatctctatattttatccatgtactcttttgatgtatagaagtagtttgaaactcattgtttccttgtggtaagtgaccgagatgctgccacaggacctgagacactgatgaatggtgctattttggactttcaacatgctccttggcgaggtagctctgatggagttattttttatttccatgttctaagaaggtgttggtactctgtttccctgaatgttgttctctagactggattgacttgttttccttgtgtcttcagtgtggctttcttcctcagtgttgtaggttgagcgaatgctaccagagtgtgagagaccattgtctcgttggctggcgctcacggacatgcagtcacggtagcgggagcaatcacaaaactgtaatttacttaccaaatctcttcctttccgtagcctcgcctgcctgacttagagaaagaaaagcaataattttacaggcattttgaggtgtctctttgggttctttctgtttgaaaggatatttgtcgaaaaaaagagcaaaaccgttttaaataaactccccctggaaaaaaacccaaaacactggcatctgagtgggaatatgaaaatgacaccttttccaaatattaaattggaaaacaaggtctacaaaatcatgatacttttttaaaaggcagagcattcttttttcggcaattttgataagcaaggtgtagatttacatttttgtccttgctcccaacgaaatggataaacaaaaataaattaccatctactcatggaatgttgttgtgttagccagtctgaaagcccaccttaatttttatataactgtctttagctcttcttttgacagggcaggccttgttctgaactgtttcgcttctgactgttaaacaccgatgacgcatgcactgcacttcttcgttttcttcttgctcccccattggcctgagtttcttgtgcattactcctctccctccttcgttagaataggtatatcagctgtgtaaatagagcaagaaaacagtattctgcatctgtggcatttatgtagagttgcagttgtgtactgctgaaaatgcaggcttttgtaacagtgtgatctttactgatgcactcatgacaagtacccaatgtattttagctattttagtagtatttgttcaataaatacgca

SEQ ID NO: 6047 - DNA, 2304 bp, Homo sapiens
  source 1..2304: mol_type = unassigned DNA
actctgaggcattacactacacggtggaaggctgattcctattctgtcgtcttgattgcaaatatactgccagtagtatgtctgggaacaaagagcagccagaaaacaatctatttttatcacttggttctacttttaagttgctaaaccttttgaactcatgcaatttaaagatgaaccaaacactaagaatagcccaggactctgcaaagccaagtaccagggattcctttgtcccttagttaagcctataggccacttggaaagctctttcagaaatcccagtagttaacaataatttgcatgtaacttatcttaaccacagaaaatggttattcgtctgtaacctctaaagaggcatttttcgtttgctgacctgtggtgaggcgatgtgtctactgtatttaaacatattttgcaggttggtctccctggactgaagagagggagaatagaagcccaagactaagattctcaaaatggtttattacccagaactctttgtctgggtcagtcaagaaccatttccaaacaaggacatggagggaaggcttcctaagggaagacttcctgtcccaaaggaagtgaaccgcaagaagaacgatgagacaaacgctgcctccctgactccactgggcagcagtgaactccgctccccaagaatcagttacctccactttttttaatcgtaacacctccatttgtattacatatggtgtatgggtattgatgaggtcatggtatcatatatgggatttttttctgtgtaaatcatcaagtataagaagaaactatgggactctgagccttgctttagagaatttacagtggacaaataggtgtcatcaaaccagtttttaatcattctgactcaagtgaaaacgctcagaatttcacactgtgaatccacgtttacaacccttacaggtgggccttcaggcctggttcgctacaacaatgtcttccacaactcaaactcccaccgcgctcacacaaccggtccactcctgccttttcactcacacagctcccgactgcttcttgcagaggctgagagtcccccccccaccttttttttcatttagatgtaacaaacctagtagtttatgttcatcaattgtctgtatatctctatattttatccatgtactcttttgatgtatagaagtagtttgaaactcattgtttccttgtggtaagtgaccgagatgctgccacaggacctgagacactgatgaatggtgctattttggactttcaacatgctccttggcgaggtagctctgatggagttattttttatttccatgttctaagaaggtgttggtactctgtttccctgaatgttgttctctagactggattgacttgttttccttgtgtcttcagtgtggctttcttcctcagtgttgtaggttgagcgaatgctaccagagtgtgagagaccattgtctcgttggctggcgctcacggacatgcagtcacggtagcgggagcaatcacaaaactgtaatttacttaccaaatctcttcctttccgtagcctcgcctgcctgacttagagaaagaaaagcaataattttacaggcattttgaggtgtctctttgggttctttctgtttgaaaggatatttgtcgaaaaaaagagcaaaaccgttttaaataaactccccctggaaaaaaacccaaaacactggcatctgagtgggaatatgaaaatgacaccttttccaaatattaaattggaaaacaaggtctacaaaatcatgatacttttttaaaaggcagagcattcttttttcggcaattttgataagcaaggtgtagatttacatttttgtccttgctcccaacgaaatggataaacaaaaataaattaccatctactcatggaatgttgttgtgttagccagtctgaaagcccaccttaatttttatataactgtctttagctcttcttttgacagggcaggccttgttctgaactgtttcgcttctgactgttaaacaccgatgacgcatgcactgcacttcttcgttttcttcttgctcccccattggcctgagtttcttgtgcattactcctctccctccttcgttagaataggtatatcagctgtgtaaatagagcaagaaaacagtattctgcatctgtggcatttatgtagagttgcagttgtgtactgctgaaaatgcaggcttttgtaacagtgtgatctttactgatgcactcatgacaagtacccaatgtattttagctattttagtagtatttgttcaataaatacgcaagctgtaaggtaa

SEQ ID NO: 6048 - DNA, 636 bp, Homo sapiens
  source 1..636: mol_type = unassigned DNA
aggaagtcaactatccaccatcttgtcggatccatgcagtcttagcagactttcttcacaccatggatgattgaatccactactctttgcatgtttaaagacagagaaggcagattctctgcagagagacgtgaagagaaggttggtctccctggactgaagagagggagaatagaagcccaagactaagattctcaaaatggtttattacccagaactctttgtctgggtcagtcaagaaccatttccaaacaaggacatggagggaaggcttcctaagggaagacttcctgtcccaaaggaagtgaaccgcaagaagaacgatgagacaaacgctgcctccctgactccactgggcagcagtgaactccgctccccaagaatcagttacctccactttttttaatcgtaacacctccatttgtattacatatggtgtatgggtattgatgaggtcatggtatcatatatgggatttttttctgtgtaaatcatcaagtataagaagaaactatgggactctgagccttgctttagagaatttacagtggacaaataggtgtcatcaaaccagtttttaatcattctgactcaagtgaaaacgctcagaatttcacactgtgaatccacgtttac

SEQ ID NO: 6049 - DNA, 559 bp, Homo sapiens
  source 1..559: mol_type = unassigned DNA
acactcttggagagagagcgcgaggcagggagatgatctcctcctcctttttccaaggctgcacttcttggaagtgaagccgagaggagagagagtgaacagggagcggggcttttgtctgttggtctccctggactgaagagagggagaatagaagcccaagactaagattctcaaaatggtttattacccagaactctttgtctgggtcagtcaagaaccatttccaaacaaggacatggagggaaggcttcctaagggaagacttcctgtcccaaaggaagtgaaccgcaagaagaacgatgagacaaacgctgcctccctgactccactgggcagcagtgaactccgctccccaagaatcagttacctccactttttttaatcgtaacacctccatttgtattacatatggtgtatgggtattgatgaggtcatggtatcatatatgggatttttttctgtgtaaatcatcaagtataagaagaaactatgggactctgagccttgctttagagaatttacagtggacaaataggtgtcatcaaaccagttttta

SEQ ID NO: 6050 - DNA, 698 bp, Homo sapiens
  source 1..698: mol_type = unassigned DNA
acgcgcagccacaggacctctgggcccggccttcaggggcgctccccgccccgggcttccccgcggaagggagtggggcgcgcgtacccagctgaggggcagggtccgacccgaggccgtgtgcaaatgcatccttcgcggactctttgtgtgtctgagcgcggctccgcgccgccgcaggcaccattttctgcttcgctcaggacaggcacataaaaggaaggcggctgccgcccgtcgccgtcctcttttcctcagatgccctctgctgcaggtgtagagaggagagagagtgaacagggagcggggcttttgtctgttggtctccctggactgaagagagggagaatagaagcccaagactaagattctcaaaatggtttattacccagaactctttgtctgggtcagtcaagaaccatttccaaacaaggacatggagggaaggcttcctaagggaagacttcctgtcccaaaggaagtgaaccgcaagaagaacgatgagacaaacgctgcctccctgactccactgggcagcagtgaactccgctccccaagaatcagttacctccactttttttaatcgtaacacctccatttgtattacatatggtgtatgggtattgatgaggtcatggtatcatatatgggatttttttctgtgtaaatcatcaagtataagaagaaactatgggact

SEQ ID NO: 6051 - DNA, 311 bp, Homo sapiens
  source 1..311: mol_type = unassigned DNA
gcaggcaccattttctgcttcgctcaggacaggcacataaaaggaaggcggctgccgcccgtcgccgtcctcttttcctcagatgccctctgctgcaggtgtagagaggagagagagtgaacagggagcggggcttttgtctaaaatggttattcgtctgtaacctctaaagaggcatttttcgtttgctgacctgtggtgaggcgatgtgtctactgtatttaaacatattttgcaggttggtctccctggactgaagagagggagaatagaagcccaagactaagattctcaaaatggtttattaccca

SEQ ID NO: 6052 - DNA, 475 bp, Homo sapiens
  source 1..475: mol_type = unassigned DNA
acctctgggcccggccttcaggggcgctccccgccccgggcttccccgcggaagggagtggggcgcgcgtacccagctgaggggcagggtccgacccgaggccgtgtgcaaatgcatccttcgcggactctttgtgtgtctgagcgcggctccgcgccgccgcaggcaccattttctgcttcgctcaggacaggcacataaaaggaaggcggctgccgcccgtcgccgtcctcttttcctcagatgccctctgctgcaggtttattattacagtgtagagaggagagagagtgaacagggagcggggcttttgtctgttggtctccctggactgaagagagggagaatagaagcccaagactaagattctcaaaatggtttattacccagaactctttgtctgggtcagtcaagaaccatttccaaacaaggacatggagggaaggcttcctaagggaagacttcctgtcccaaa

SEQ ID NO: 6053 - DNA, 540 bp, Homo sapiens
  source 1..540: mol_type = unassigned DNA
cggggcgcgggtgcggggtgtcggggcgcgcgcgcctgttggccgctcgccgacggggcccagagccgccgattcctgccgagtgtagagaggagagagagtgaacagggagcggggcttttgtctaaaatggttattcgtctgtaacctctaaagaggcatttttcgtttgctgacctgtggtgaggcgatgtgtctactgtatttaaacatattttgcaggttggtctccctggactgaagagagggagaatagaagcccaagactaagattctcaaaatggtttattacccagaactctttgtctgggtcagtcaagaaccatttccaaacaaggacatggagggaaggcttcctaagggaagacttcctgtcccaaaggaagtgaaccgcaagaagaacgatgagacaaacgctgcctccctgactccactgggcagcagtgaactccgctccccaagaatcagttacctccactttttttaatcgtaacacctccatttgtattacatatggtgtatgggtattgatgaggtcat

SEQ ID NO: 6054 - DNA, 587 bp, Homo sapiens
  source 1..587: mol_type = unassigned DNA
agacacacacactcttggagagagagcgcgaggcagggagatgatctcctcctcctttttccaaggctgcacttcttggaagtgtagagaggagagagagtgaacagggagcggggcttttgtctgttggtctccctggactgaagagagggagaatagaagcccaagactaagattctcaaaatggtttattacccagaactctttgtctgggtcagtcaagaaccatttccaaacaaggacatggagggaaggcttcctaagggaagacttcctgtcccaaaggaagtgaaccgcaagaagaacgatgagacaaacgctgcctccctgactccactgggcagcagtgaactccgctccccaagaatcagttacctccactttttttaatcgtaacacctccatttgtattacatatggtgtatgggtattgatgaggtcatggtatcatatatgggatttttttctgtgtaaatcatcaagtataagaagaaactatgggactctgagccttgctttagagaatttacagtggacaaataggtgtcatcaaaccagtttttaatcattctgactcaagtgaaaac

SEQ ID NO: 6055 - DNA, 557 bp, Homo sapiens
  source 1..557: mol_type = unassigned DNA
aaatgcatccttcgcggactctttgtgtgtctgagcgcggctccgcgccgccgcaggcaccattttctgcttcgctcaggacaggcacataaaaggaaggcggctgccgcccgtcgccgtcctcttttcctcagatgccctctgctgcaggtttattattacagtgtagagaggagagagagtgaacagggagcggggcttttgtctaaaatggttattcgtctgtaacctctaaagaggcatttttcgtttgctgacctgtggtgaggcgatgtgtctactgtatttaaacatattttgcaggttggtctccctggactgaagagagggagaatagaagcccaagactaagattctcaaaatggtttattacccagaactctttgtctgggtcagtcaagaaccatttccaaacaaggacatggagggaaggcttcctaagggaagacttcctgtcccaaaggaagtgaaccgcaagaagaacgatgagacaaacgctgcctccctgactccactgggcagcagtgaactccgctccccaagaatcagttacctcc

SEQ ID NO: 6056 - DNA, 3135 bp, Homo sapiens
  source 1..3135: mol_type = unassigned DNA
cagaacccaagggcttacctgtgctctgtgattccccaactagggatttagttgtagccacggacctggtaggcaacagggaggggattttaatctgctccttgcatcagaaggtccaataggcagggttagtataatgggagatgccctggtagggctggcaaggagaagaagccacatgtattttggtctgatgaaaagcagcagtgatctgtcactgaccaaaatggtcccccaactatgcattacggagcagcaacccacatacagaactcgagaagccacggcctggagactgtacctggacaccaaagactggagagaggagctggtggggaaaccccagagttcccagggtgccactccccagctccaccagagaactttgggaatgagctgctgcccctgagtgcccctctccagggcctcagtgagggtctctaccctccagggaggaacaaaaccttgccagctggggtcctgcgagagggggcagttcaattcctccacaggggactctgcaactccaatctttcgagtgaagcatctgcgaggccctcagggacccaggatgaactgcatagcagcagaaggaagacaggccagaccaggcgggagggagcccggaaacatctggtttgtagtttcagactctacccgttcacagttcacacagtctcaccgggaaactcacaccttgccctgtaccaagtttttaaggcagttaagctctgcccatccgagacttcatttttcttgagtagaaaatcactgaaatcatcagatccatggcacccaccttcactttctcctaacagctggaaccgtcaggctggcttcagggcctggtcttcgcacttgatatcactatccctcacctgctcagacagccagagcaggcgggtgagttcctcccaacaacctccactgcattctctcagctcccaccgcagggcagcccacgtgcctgagtgaacatgtgtgcgtgtgcacacacgcaagtatgcacagacatacactaaacacgaacatacagtgcacatgaacgctgctcccagctagggccctctggtcagactgctgcctgggttagaattcttgtccccacccccacttactatagttctgtgatcctggacaagtaactgaatctctccgtgccacagtttcttcttgtagaaaacgggaaagttcacagtacttacctccttagagtcattgtgaaggtcagtttgaggcatcacaaatttaaggcacccagacataagggtcaacagggttagctatcactgtccagtttggtgggaggaactgaatgcatgtaggcacatggacccagtctacactcaggcacaaaaggagctacattagttacattcaggcataccccagagcactacaattctctgagacattgtctggaaatctagaaatcatctccttgccctttaaggtattttaaccctcgcattcctctgcttttccaagaatgtgaatcttgccaagctgtccgtgagagacacgggctcccctcgagggagacttgcaaatgctccataaacagccacagtgtggggctctgccatgaggaagtcacagcagacacgctagacagcatagtcctggatgcaacctggaggaagggaggcccatggtggagcactcactccgtgcctgtctgcccggtgagacctcaagttccttgcagacaaaggccatgggttgttggctcttgtgttcccggtggcctttccagagctgaacagaggacagatgcacagacgggggggctctggtggtcaaggcagcagtccccttggatactaaagtctgagccaggcccctcaggcccggcatgggcagtgcgaggcccatagtggtgggaagccagttggccagctggggtgagaaggccgcgaagccatgggcagacaggaagtggaggtgaatgtctctgcctcctgtaggcctcagcagggacagcacagaccctctggctggggcagcgcagaccctctagctggggcagaacaaggctggtgcttccttctagtccttgagactttgtagctctaactcaagcagaaccctggggttttgggattctgtgtggtgactgctgaggaaggtttatggatttgacagggtgcatgtcacagagagacagttctcagtcagcacttcctgtcccctgcagaggctcataggggacagcccctgccaaggagaccctggaggggctctgaggatagcaatcagaggttgggctggctggactgagcccaggcctgttgcccaccaagtctccataggttctagtctgacccctctctccacccctgggctatgcaggccagcccgtgcagaccacccccgacgcgtccacttgcaacacccgcctcactgtgccaacactccatccacacaggaaaggactgagaacgtgatgcttaacccaaaggagtgagtttcataggatgggtggctttaacagtttcacagcaggacactgagggaatatttccctatcccttcaaatggacggtcactacagaaacgtgtagagcaagactttgtcaaggggctgtttccaggtctcccggtgtctaaatagcagagctggaatgggaactgagaaccgattctttccacaaccgcccactgagcagcaaggctgcagccagcaaagaggtgcggaggcaagcaagctccatgtggtggggacagcgcattgcgacctccaccacccctgcagtgggctgccagctgagccacctgtcttccactgtatctactgtacgaacttctccagctctgctctgttttctcttcctcagcatccaccccgtgacacgtagtggtggctgatgtcgccacagtaccatgaggttaacaggtcctccctccagcttccctcatggtggcagcctaacctgcattgcagccgttcaccggacaccgcaccagaccctcaaaacccatccaagactgtgggaggagtaaacaacccagcccagttaagaggagatgccgaatttaatgaaccctatttgaattgcagggctgtgattcctcttacctttaacgtgaactcacaggcggattaaagtgaaataaaacctaccatttgagtta

SEQ ID NO: 6057 - DNA, 792 bp, Homo sapiens
  source 1..792: mol_type = unassigned DNA
cggcttttccggggcccgggagccaaccgagggcgttcctgtcggggctgcagcggcgggagggagcccagtggaggcgccctcccgaagcgccactgcccatgctgaccacccagccctccggctgctgatgtcatgagtaacaccactgtgcccaatgccccccaggccaacagcgactccatggtaatgtatgtacagaagaaaaagcgggtggaccggctgcgccatcacctgctccccatgtacagctatgacccagctgaggaactgcatgaggctgagcaggagctgctctctgacatgggagaccccaaggtggtacatggctggcagagtggctaccagcacaagcggatgccactgctggatgtcaagacgtgacctgacccccttgccccacccttcagagcctggggtcctggactgcctggggccctgccatctgcttcccctgctgtcacctggctccccctgctgggtgctgggtctccatttctccctccacccaccctcagcagcatctgcttcccatgccctcaccatcacctcactgcccccaggccttctgccctttgtgggtgttgagctcaccgcccacccacaggcactcatgggaagaggctttccttctgggatgggggcggctggtagacacctttgctttctctagccctcctgggctgggcttgggcacaaatccccaggcaggctttggagttgtttccatggtgatggggccagatgtatagtattcagtatatattttgtaaataaaatgttttgtggcta

SEQ ID NO: 6058 - DNA, 903 bp, Homo sapiens
  source 1..903: mol_type = unassigned DNA
agcggcgggaggtaaggcatggccaggccggctgggctgcagagcgccggcacgggtccacgcctcgggtgacgggcttccaggatgttcgggcgcggggcggcccatccgcatcccccaacacccccacctccggcctgagcctcccagcgccgtgggaaccacctcctgtccgctgttgctggcccgcatcctagcagcggcctgacgccctccccaccctggcatgcccccttgacctgggacgatgagcatacgactggggagcccagtggaggcgccctcccgaagcgccactgcccatgctgaccacccagccctccggctgctgatgtcatgagtaacaccactgtgcccaatgccccccaggccaacagcgactccatggtaatgtatgtacagaagaaaaagcgggtggaccggctgcgccatcacctgctccccatgtacagctatgacccagctgaggaactgcatgaggctgagcaggagctgctctctgacatgggagaccccaaggtggtacatggctggcagagtggctaccagcacaagcggatgccactgctggatgtcaagacgtgacctgacccccttgccccacccttcagagcctggggtcctggactgcctggggccctgccatctgcttcccctgctgtcacctggctccccctgctgggtgctgggtctccatttctccctccacccaccctcagcagcatctgcttcccatgccctcaccatcacctcactgcccccaggccttctgccctttgtgggtgttgagctcaccgcccacccacaggcactcatgggaagaggctttccttctgggatgggggcggctggtagacacctttgctttctctagccctcctgggctgggcttgggcacaaatc

SEQ ID NO: 6059 - DNA, 1297 bp, Homo sapiens
  source 1..1297: mol_type = unassigned DNA
cacagacggaggccgagtgggcccggagcagggtcttgccgcgaagggcctgggctcaacgttagagcgtggcgcgaccctattctggctgcaacgagaggggtgaatgaagtgggcgccggggacctcccagaatcggagctccagacgcgggcgggccaggggccgccggaaaactgcgcgcgccccgccctaccccgtccggccccgcgtcgcgttctcctcccccactgcgcagccctcggctgccccctgccgccgccgggcggaccctgcaagccccgctgtccccgccttcgcaccgcccacccccgcctccggattggcggctccagaaatctccaggccaccggctttccgctaccggattggctgcgtccgggtgctgaggcccggcccatttccccgggtcctttgatcacgcgcctgacggcttttccggggcccgggagccaaccgagggcgttcctgtcggggctgcagcggcgggagggagcccagtggaggcgccctcccgaagcgccactgcccatgctgaccacccagccctccggctgctgatgtcatgagtaacaccactgtgcccaatgccccccaggccaacagcgactccatggtgggctatgtgttggggcccttcttcctcatcaccctggtcggggtggtggtggctgtggtaatgtatgtacagaagaaaaagcgggtggaccggctgcgccatcacctgctccccatgtacagctatgacccagctgaggaactgcatgaggctgagcaggagctgctctctgacatgggagaccccaaggtggtacatggctggcagagtggctaccagcacaagcggatgccactgctggatgtcaagacgtgacctgacccccttgccccacccttcagagcctggggtcctggactgcctggggccctgccatctgcttcccctgctgtcacctggctccccctgctgggtgctgggtctccatttctccctccacccaccctcagcagcatctgcttcccatgccctcaccatcacctcactgcccccaggccttctgccctttgtgggtgttgagctcaccgcccacccacaggcactcatgggaagaggctttccttctgggatgggggcggctggtagacacctttgctttctctagccctcctgggctgggcttgggcacaaatccccaggcaggctttggagttgtttccatggtgatggggccagatgtatagtattcagtatatattttgtaaataaaatgttttgtggctaggggttttgatttca

SEQ ID NO: 6060 - DNA, 1053 bp, Homo sapiens
  source 1..1053: mol_type = unassigned DNA
agcggcgggaggtaaggcatggccaggccggctgggctgcagagcgccggcacgggtccacgcctcgggtgacgggcttccaggatgttcgggcgcggggcggcccatccgcatcccccaacacccccacctccggcctgagcctcccagcgccgtgggaaccacctcctgtccgctgttgctggcccgcatcctagcagcggcctgacgccctccccaccctggcatgcccccttgacctgggacgatgagcatacgactggggagcccagtggaggcgccctcccgaagcgccactgcccatgctgaccacccagccctccggctgctgatgtcatgagtaacaccactgtgcccaatgccccccaggccaacagcgactccatggtgggctatgtgttggggcccttcttcctcatcaccctggtcggggtggtggtggctgtggtaatgtatgtacagaagaaaaagcgggtggaccggctgcgccatcacctgctccccatgtacagctatgacccagctgaggaactgcatgaggctgagcaggagctgctctctgacatgggagaccccaaggtggtacatggctggcagagtggctaccagcacaagcggatgccactgctggatgtcaagacgtgacctgacccccttgccccacccttcagagcctggggtcctggactgcctggggccctgccatctgcttcccctgctgtcacctggctccccctgctgggtgctgggtctccatttctccctccacccaccctcagcagcatctgcttcccatgccctcaccatcacctcactgcccccaggccttctgccctttgtgggtgttgagctcaccgcccacccacaggcactcatgggaagaggctttccttctgggatgggggcggctggtagacacctttgctttctctagccctcctgggctgggcttgggcacaaatccccaggcaggctttggagttgtttccatggtgatggggccagatgtatagtattcagtatatattttgtaaataaaatgttttgtggcta

SEQ ID NO: 6061 - DNA, 891 bp, Homo sapiens
  source 1..891: mol_type = unassigned DNA
agaaagtactcaagacattcacggtgccccggtcagcactcgccatgacgaagacttctacatgcatataccacttccttgttctgagctggtatactttcctcaattattacatctcacaggaaggaaaagacgaggtgaaacccaaaatcttggcaaatggtgcaaggtggaaatatatgacgctgcttaatctgctcaagaacaggactgctgggtttgacatctaccagccaggaagctttaggcagctcttgcagaccattttctacggggtcacctgcctggatgatgtgctgaaaagaaccaaagggggaaaagacattaagttcctaactgccttcagagacctgcttttcaccactctggcttttcctgtatccacgtttgtatttttggcattctggatcctctttctctacaatcgagatctcatttaccccaaggtcctagatactgtcatccccgtgtggctgaatcatgcaatgcacactttcatattccccatcacattggctgaagtcgtcctcaggcctcactcctatccatcaaagaagacaggactcaccttgctggctgctgccagcattgcttacatcagccgcatcctatggctctactttgagacgggtacctgggtgtatcctgtgtttgccaaactcagcctcttgggtctagcagctttcttctctctcagctacgtcttcatcgccagcatctacctacttggagagaagctcaaccactggaaatggggtgacatgaggcagccacggaagaagaggaagtaattgcacaccattttccaagaaccaagaaagaagaaaacacaagagatttttctcatcttttttttttttttctggtggagggaggtggtggaggaacata

SEQ ID NO: 6062 - DNA, 1056 bp, Homo sapiens
  source 1..1056: mol_type = unassigned DNA
gcattgctacctgcccttctcaaagcccacatgttgtattttatgcaaatctacagattatctatcattatctaaatgcaggcatctgaaaaccagcagtaatcctgcctctgaagtttatcaggaaaggagcttaaaagagaaccaaattcagcctgtgttggaactctcagtcccagaggggtgtggtttgtagctctccggcctgctgttggacttaggctgtgacccacagaaggacgccagaaagtactcaagacattcacggtgccccggtcagcactcgccatgacgaagacttctacatgcatataccacttccttgttctgagctggtatactttcctcaattattacatctcacaggaaggaaaagacgaggtgaaacccaaaatcttggcaaatggtgcaaggtggaaatatatgacgctgcttaatctgctcttgcagaccattttctacggggtcacctgcctggatgatgtgctgaaaagaaccaaagggggaaaagacattaagttcctaactgccttcagagacctgcttttcaccactctggcttttcctgtatccacgtttgtatttttggcattctggatcctctttctctacaatcgagatctcatttaccccaaggtcctagatactgtcatccccgtgtggctgaatcatgcaatgcacactttcatattccccatcacattggctgaagtcgtcctcaggcctcactcctatccatcaaagaagacaggactcaccttgctggctgctgccagcattgcttacatcagccgcatcctatggctctactttgagacgggtacctgggtgtatcctgtgtttgccaaactcagcctcttgggtctagcagctttcttctctctcagctacgtcttcatcgccagcatctacctacttggagagaagctcaaccactggaaatgggtttctgttcagatcttgcaaagatggaggctagaatctgttggaatctgcttccagtggcccgattggaagtcaccagccaagcaccaactggtcaagaatatcaggtga

SEQ ID NO: 6063 - DNA, 991 bp, Homo sapiens
  source 1..991: mol_type = unassigned DNA
agtctccaaaccagagccaccattcttgcgaagtgagttcccacccacccgagagggagatccttagctcctcatcatcgccagtcatgatgatgagatactctggaagacatccattctgtggaaaccccacaaggtgaggccacgtctaaatagcttacagagtcttgctctttcacccaggctggagtgctgtggtgttatctcagctcactgcagtttcaagctcctgggctcaagtgatcttacctcagccttctgagtagctgggactccaggcatctgaaaaccagcagtaatcctgcctctgaagtttatcaggaaaggagcttaaaagagaaccaaattcagcctgtgttggaactctcagtcccagaggggtgtggtttgtagctctccggcctgctgttggacttaggctgtgacccacagaaggacgccagaaagtactcaagacattcacggtgccccggtcagcactcgccatgacgaagacttctacatgcatataccacttccttgttctgagctggtatactttcctcaattattacatctcacaggaaggaaaagacgaggtgaaacccaaaatcttggcaaatggtgcaaggtggaaatatatgacgctgcttaatctgctcttgcagaccattttctacggggtcacctgcctggatgatgtgctgaaaagaaccaaagggggaaaagacattaagttcctaactgccttcagagacctgcttttcaccactctggcttttcctgtatccacgtttgtatttttggcattctggatcctctttctctacaatcgagatctcatttaccccaaggtcctagatactgtcatccccgtgtggctgaatcatgcaatgcacactttcatattccccatcacattggctgaagtcgtcctcaggcctcactcctatccatcaaagaagacaggactcaccttgctggctgctgccagcattgcttacatcagccg

SEQ ID NO: 6064 - DNA, 1927 bp, Homo sapiens
  source 1..1927: mol_type = unassigned DNA
gaaaagaaaagagactacagccatggaagtatttcgctagattttcctagtatttcatgcttacttcatttaaccatgcccctgccccagtgccctagtgaaacagtacaatgtacagctcttgcattgctacctgcccttctcaaagcccacatgttgtattttatgcaaatctacagattatctatcattatctaaatgcaggcatctgaaaaccagcagtaatcctgcctctgaagtttatcaggaaaggagcttaaaagagaaccaaattcagcctgtgttggaactctcagtcccagaggggtgtggtttgtagctctccggcctgctgttggacttaggctgtgacccacagaaggacgccagaaagtactcaagacattcacggtgccccggtcagcactcgccatgacgaagacttctacatgcatataccacttccttgttctgagctggtatactttcctcaattattacatctcacaggaaggaaaagacgaggtgaaacccaaaatcttggcaaatggtgcaaggtggaaatatatgacgctgcttaatctgctcttgcagaccattttctacggggtcacctgcctggatgatgtgctgaaaagaaccaaagggggaaaagacattaagttcctaactgccttcagagacctgcttttcaccactctggcttttcctgtatccacgtttgtatttttggcattctggatcctctttctctacaatcgagatctcatttaccccaaggtcctagatactgtcatccccgtgtggctgaatcatgcaatgcacactttcatattccccatcacattggctgaagtcgtcctcaggcctcactcctatccatcaaagaagacaggactcaccttgctggctgctgccagcattgcttacatcagccgcatcctatggctctactttgagacgggtacctgggtgtatcctgtgtttgccaaactcagcctcttgggtctagcagctttcttctctctcagctacgtcttcatcgccagcatctacctacttggagagaagctcaaccactggaaatggggtgacatgaggcagccacggaagaagaggaagtaattgcacaccattttccaagaaccaagaaagaagaaaacacaagagatttttctcatcttttttttttttttctggtggagggaggtggtggaggaacatagcaaagtaggagggacagagagtgatacttaaatttaataagaggttcgtgaaggtagcttaacttgagaactcttggttttttgaaaggttgactgcacatgccaaaaacaactcctgctatctcagaattaattatctttgaccttcgtggaggatggtctctggttaaaatctggccaaagaaactcacataaacttggtgttagagaacatctagagagagagagaggaacttagagtcatttaaactcttcagtttacagagaaggatgctgaggacctagatgagaagttacctgcaaaaggcaaaagggttacttagtgtcagaaccaaggcaatgacttctctctcccagatctcctagctactggtcctgggccatttttttttttttaaataatcccaactttctttaaaagacaagcatttcagtaagctagttattttcatgggttgctcatccatttttttcagtgatctaaaaatgtagggagatggctactactgaagttgtctgtctacttgggataatagcaaattaattgaagacaatgggaaagtaagttataaaaaatactgggaaatctgtttctcttctgagcaagcattcagggcaggtataaacatcaaacatagtgacattgtcaaaacctcttccatttgaacattgattaattcatcaaataaatggtatagtaataaattttgcttgcagaagaa

SEQ ID NO: 6065 - DNA, 817 bp, Homo sapiens
  source 1..817: mol_type = unassigned DNA
acctgagtcagagcctagtccggcatgctgcctagcccagccacgtctcatcctattcatggcagagcggggactctcaccctctcccagcaatgtctaaagtcaggcatctgaaaaccagcagtaatcctgcctctgaagtttatcaggaaaggagcttaaaagagaaccaaattcagcctgtgttggaactctcagtcccagaggggtgtggtttgtagctctccggcctgctgttggacttaggctgtgacccacagaaggacgccagaaagtactcaagacattcacggtgccccggtcagcactcgccatgacgaagacttctacatgcatataccacttccttgttctgagctggtatactttcctcaattattacatctcacaggaaggaaaagacgaggtgaaacccaaaatcttggcaaatggtgcaaggtggaaatatatgacgctgcttaatctgctcttgcagaccattttctacggggtcacctgcctggatgatgtgctgaaaagaaccaaagggggaaaagacattaagttcctaactgccttcagagacctgcttttcaccactctggcttttcctgtatccacgtttgtatttttggcattctggatcctctttctctacaatcgagatctcatttaccccaaggtcctagatactgtcatccccgtgtggctgaatcatgcaatgcacactttcatattccccatcacattggctgaagtcgtcctcaggcctcactcctatccatcaaagaagacaggactcaccttgctggctgctgccagcattgcttacatcagc

SEQ ID NO: 6066 - DNA, 916 bp, Homo sapiens
  source 1..916: mol_type = unassigned DNA
gtgtaacctctcctgtttttgtacatgtgtttattcctgaactgttttgggctactcattgttaaccaggttgctgctctacttttcccactgctggctaaggaagattcaactttttcaggaacctacaagcagcaattggcgcctattatgactttgagagcccaaacatcagtgtgccctctatgtcctttgttgaagatgtcaccataggagaaggggagtcaatacctccggatactcagtttgtaaaaacatggcggatccagaattctggggcagaggcctggcctccaggggtttgtcttaaatatgtcgggggagaccaatttggacatgtgaacatggtgatggtgagatcgctagagccccaagagattgcagatgtcagcgtccagatgtgcagccccagcagagcaggaatgtatcagggacagtggcggatgtgcactgctacaggactctactatggagatgtcatctgggtgattctcagtgtggaggtgggtggacttttaggagtaacgcagcagctgtcatcttttgaaacggagttcaacacacagccgcatcgtaaggtagaaggaaacttcaacccttttgcctctccccaaaagaaccgacaatcagatgaaaacaacttaaaagaccctgggggctccgagttcgactcgatcagcaaaaacacatgggctcctgctcctgacacatgggctcctgctcctgaccaaactgagcaagaccagaatagactgtcacagaactctgtaaatctgtctcccagcagtcacgcaaacaacttatcagtagtgacttacagtaaggggctccatgggccttaccccttcggccagtcttaaacgggtgtcagcaagaagaaaaattaacaaaagacagaaggcctgactttgggggg

SEQ ID NO: 6067 - DNA, 4418 bp, Homo sapiens
  source 1..4418: mol_type = unassigned DNA
ggcggagtggcgagaggcgagaggcggcggaggcggcggagctggggggggtgggaggggggggagagtgagtgagtggcagagtgagtttacccctatgagactgtgagaggcccggggcctacctcaaaggagcggggtcgcgaagctagctagcagcggcccccctccaggtccccgggcccggcggcgcggcggcggcttggttgtgaagaggcggggaagcgggtgtccggtccccgccatggagggcatggacgtagacctggacccggagctgatgcagaagttcagctgcctgggcaccaccgacaaggacgtgctcatctccgagttccagaggctgctcggcttccagctcaatcctgccggttgcgccttcttcctggacatgaccaactggaacctacaagcagcaattggcgcctattatgactttgagagcccaaacatcagtgtgccctctatgtcctttgttgaagatgtcaccataggagaaggggagtcaatacctccggatactcagtttgtaaaaacatggcggatccagaattctggggcagaggcctggcctccaggggtttgtcttaaatatgtcgggggagaccaatttggacatgtgaacatggtgatggtgagatcgctagagccccaagagattgcagatgtcagcgtccagatgtgcagccccagcagagcaggaatgtatcagggacagtggcggatgtgcactgctacaggactctactatggagatgtcatctgggtgattctcagtgtggaggtgggtggacttttaggagtaacgcagcagctgtcatcttttgaaacggagttcaacacacagccgcatcgtaaggtagaaggaaacttcaacccttttgcctctccccaaaagaaccgacaatcagatgaaaacaacttaaaagaccctgggggctccgagttcgactcgatcagcaaaaacacatgggctcctgctcctgacacatgggctcctgctcctgaccaaactgagcaagaccagaatagactgtcacagaactctgtaaatctgtctcccagcagtcacgcaaacaacttatcagtagtgacttacagtaaggggctccatgggccttaccccttcggccagtcttaaacgggtgtcagcaagaagaaaaattaacaaaagacagaaggcctgactttggggggttagggcaaggggttcctctggattgcagaccacatcgcacagacccctggctctgaccccctctcatcccggaagaagaggaagaagcagaacagactagttttgagtaaactcagtatgcatgtgtgaatgctgaatcacaggaatggtgttgaggctaccaagaagaaatccatgcagccactttgggttttgttataggcatcagtctaacaagtcattaggtcactcgggaagggggaaaaagtttaaaatgggggaaaaaaagccatctttttaaacaaaaattattttgcctacagaaaggttgtagttttgagcacatgttaatttttttccctctttccccacttttatttttttaaataagggataacatattctttatagaatagtgcttgttctggaagagattcaggtgaaaagttggcgtggcatgtttgaggactctgcggatcagtgctacaggagtacatctgccctgccacatgactccagaagtctctgaccccatttgtttttaatggcatcagccaatgagttatcacccttttcctcctcttttctctttaatcttctgttgatttacacctttgacatttgtattcgtcaaccctgtggcttgttagcatcagaacctctctgaagaccaaacttccctgtgtggccagcagaggaagccttgaggatagatctcgggtgacgtgggattttctaagcctgagaggtgtccttctgcacacccttgtaacaattaaaattgcttttcttccatgtttctcttggcagagagaaatgccatcatgcttactgctcttttggattcttcatgcagtggcttcccatttgctctgggaacagtgcctctgtgctggttatatgtatgcaccacatgtgcacacacgggtgttggtgcaactcaccagcaggtgtgcagtaggcaagcttgaaggtggcccatgcttctctgttgtcacacaacacctttccctgtttctcttcagttgtcctctgatattttcacagcctgttagtggcggctgatctgtagaggtatgaaaatacagccccaaagggggaatttgtcatggggaagggccagccactgactacttgatcttggagaccacatttagatggaaatgagaggacctccacagccccgcctccctgccaggatgctagattattggctgggaggtgggcaagtggcagcccagctgaagcaagaggctgattgactggctgctcactcaggcaggtggcctgccctggcatcctgtagattctgagcaggttgagatgtggatatctccatgggaagcttgaaccaggctagaacagctgtctgccaaagatacaagaatatgcaaagtccctcttacccccctccttccctcaagtcttagttggtttgagagccagggatatggatccagggtgctgttgcagggtcacctgcctgttaccacacccccatccagctgggtggtgggtgagggtgtgagacaggcagggagaccaggtaatgagtggctgcaaggagtcatatagcctgggtgtgggtgagggtctgcctgcctgtttctgtctgggtgtctgagttccaaaaaatgtgtgttgtttgttcctcctcatcctcttctgagactgttgtttttttagagcttgattgtgggagaaaagcttgtgtgaaattccctcttcacctccccaccccccaaaaaataaaagggggcataaactttattccactggagaagccctgggggtggctggagccagcctgctgagaagcgtggtgcagctgggtctgggacttcactagagcttactctggagcacctattttctgtgcacatgggagtgctccactccctagcagagcagagggaagtctctgccaggtacccacgccacaggcctcaggatggctttttgtctgagggcctcattaggcccagactgctgctgctggtaccagtctcctgagacactgcctccctggagcccatgcatgcccagctgttcttactgcttagtagccttgaagcagcacatctccactgtccctggcaggattgtgggaggcttcacaacccctgctttcctgacttcctcttctgcccaacactgggtgccccttcccagtttcccagcaggggcttcatgggccaccgtcagtgggtctgggcctgccagagtcgtcttgctcttcctcttgcttctaggcaaccacacttggcaagttaaatgtcccaagcaccttgtctcccttcccaagaacaaaccatttctgtgcacatccttggaggcgagatgagctccttgcagagggccagagtaagtgcaagtcatggagtgcaggcagaggggtccatggcttccccagcccagggagggtatcagtatcattcattctctctcccctcactggtatgggttcagagcaatgcctagggcccctctctgctcccctgcctagtggggtggtagtggctacctctcagccccaatagtccctgctcctcttagaatcttcaccaagtggcaggccacctctgggcaggaccacctgcgtctggcacccaggaggtgaggcagacaccatggttaggtgatagggtctgaacccagttggggagacagaggggttcagacttgggaagaatctgtcagtgtgcatggagtgaggtgtgtgtgtgtggatggatgtgcacgtgtgcatgctttttttctttttgccgtgaggacagttgaatttggggcatttttctacaagaagcagtcagccttctctcccccataaggactggctgtaaccttaagcccatcaaagttacttccagcctggagagaacctcaccaaacagctggtgtggcctgagggtggccatggtgggaaatgggcatgagaataaatacctccccaaattcaatctgagcccagcaggagaggatggtagggttgccagggctcagaagtgcaagctgattactcaccccaccctgcctcgccgcacctttcctttgtttccttgggtgaatgcaggagcagcagtggctgcccttcccacctggacagtggtgtgtgtagaaagccagctggatgtttgtggtggggcctcatggtgcctaggaggagataaagatgaggaggtttttccttattgtataaatgaatatttgtatgattaaattaacacacacaccaaaaaaa

SEQ ID NO: 6068 - DNA, 4232 bp, Homo sapiens
  source 1..4232: mol_type = unassigned DNA
ggaggcggaggcggcggagtggcgagaggcgagaggcggcggaggcggcggagctggggggggtgggaggggggggagagtgagtgagtggcagagtgagtttacccctatgagactgtgagaggcccggggcctacctcaaaggagcggggtcgcgaagctagctagcagcggcccccctccaggtccccgggcccggcggcgcggcggcggcttggttgtgaagaggcggggaagcgggtgtccggtccccgccatggagggcatggacgtagacctggacccggagctgatgcagaagttcagctgcctgggcaccaccgacaaggacgtgctcatctccgagttccagaggctgctcggcttccagctcaatcctgccggttgcgccttcttcctggacatgaccaactggaacctacaagcagcaattggcgcctattatgactttgagagcccaaacatcagtgtgccctctatgtcctttgttgaagatgtcaccataggagaaggggagtcaatacctccggatactcagtttgtaaaaacatggcggatccagaattctgatgtcatctgggtgattctcagtgtggaggtgggtggacttttaggagtaacgcagcagctgtcatcttttgaaacggagttcaacacacagccgcatcgtaaggtagaaggaaacttcaacccttttgcctctccccaaaagaaccgacaatcagatgaaaacaacttaaaagaccctgggggctccgagttcgactcgatcagcaaaaacacatgggctcctgctcctgacacatgggctcctgctcctgaccaaactgagcaagaccagaatagactgtcacagaactctgtaaatctgtctcccagcagtcacgcaaacaacttatcagtagtgacttacagtaaggggctccatgggccttaccccttcggccagtcttaaacgggtgtcagcaagaagaaaaattaacaaaagacagaaggcctgactttggggggttagggcaaggggttcctctggattgcagaccacatcgcacagacccctggctctgaccccctctcatcccggaagaagaggaagaagcagaacagactagttttgagtaaactcagtatgcatgtgtgaatgctgaatcacaggaatggtgttgaggctaccaagaagaaatccatgcagccactttgggttttgttataggcatcagtctaacaagtcattaggtcactcgggaagggggaaaaagtttaaaatgggggaaaaaaagccatctttttaaacaaaaattattttgcctacagaaaggttgtagttttgagcacatgttaatttttttccctctttccccacttttatttttttaaataagggataacatattctttatagaatagtgcttgttctggaagagattcaggtgaaaagttggcgtggcatgtttgaggactctgcggatcagtgctacaggagtacatctgccctgccacatgactccagaagtctctgaccccatttgtttttaatggcatcagccaatgagttatcacccttttcctcctcttttctctttaatcttctgttgatttacacctttgacatttgtattcgtcaaccctgtggcttgttagcatcagaacctctctgaagaccaaacttccctgtgtggccagcagaggaagccttgaggatagatctcgggtgacgtgggattttctaagcctgagaggtgtccttctgcacacccttgtaacaattaaaattgcttttcttccatgtttctcttggcagagagaaatgccatcatgcttactgctcttttggattcttcatgcagtggcttcccatttgctctgggaacagtgcctctgtgctggttatatgtatgcaccacatgtgcacacacgggtgttggtgcaactcaccagcaggtgtgcagtaggcaagcttgaaggtggcccatgcttctctgttgtcacacaacacctttccctgtttctcttcagttgtcctctgatattttcacagcctgttagtggcggctgatctgtagaggtatgaaaatacagccccaaagggggaatttgtcatggggaagggccagccactgactacttgatcttggagaccacatttagatggaaatgagaggacctccacagccccgcctccctgccaggatgctagattattggctgggaggtgggcaagtggcagcccagctgaagcaagaggctgattgactggctgctcactcaggcaggtggcctgccctggcatcctgtagattctgagcaggttgagatgtggatatctccatgggaagcttgaaccaggctagaacagctgtctgccaaagatacaagaatatgcaaagtccctcttacccccctccttccctcaagtcttagttggtttgagagccagggatatggatccagggtgctgttgcagggtcacctgcctgttaccacacccccatccagctgggtggtgggtgagggtgtgagacaggcagggagaccaggtaatgagtggctgcaaggagtcatatagcctgggtgtgggtgagggtctgcctgcctgtttctgtctgggtgtctgagttccaaaaaatgtgtgttgtttgttcctcctcatcctcttctgagactgttgtttttttagagcttgattgtgggagaaaagcttgtgtgaaattccctcttcacctccccaccccccaaaaaataaaagggggcataaactttattccactggagaagccctgggggtggctggagccagcctgctgagaagcgtggtgcagctgggtctgggacttcactagagcttactctggagcacctattttctgtgcacatgggagtgctccactccctagcagagcagagggaagtctctgccaggtacccacgccacaggcctcaggatggctttttgtctgagggcctcattaggcccagactgctgctgctggtaccagtctcctgagacactgcctccctggagcccatgcatgcccagctgttcttactgcttagtagccttgaagcagcacatctccactgtccctggcaggattgtgggaggcttcacaacccctgctttcctgacttcctcttctgcccaacactgggtgccccttcccagtttcccagcaggggcttcatgggccaccgtcagtgggtctgggcctgccagagtcgtcttgctcttcctcttgcttctaggcaaccacacttggcaagttaaatgtcccaagcaccttgtctcccttcccaagaacaaaccatttctgtgcacatccttggaggcgagatgagctccttgcagagggccagagtaagtgcaagtcatggagtgcaggcagaggggtccatggcttccccagcccagggagggtatcagtatcattcattctctctcccctcactggtatgggttcagagcaatgcctagggcccctctctgctcccctgcctagtggggtggtagtggctacctctcagccccaatagtccctgctcctcttagaatcttcaccaagtggcaggccacctctgggcaggaccacctgcgtctggcacccaggaggtgaggcagacaccatggttaggtgatagggtctgaacccagttggggagacagaggggttcagacttgggaagaatctgtcagtgtgcatggagtgaggtgtgtgtgtgtggatggatgtgcacgtgtgcatgctttttttctttttgccgtgaggacagttgaatttggggcatttttctacaagaagcagtcagccttctctcccccataaggactggctgtaaccttaagcccatcaaagttacttccagcctggagagaacctcaccaaacagctggtgtggcctgagggtggccatggtgggaaatgggcatgagaataaatacctccccaaattcaatctgagcccagcaggagaggatggtagggttgccagggctcagaagtgcaagctgattactcaccccaccctgcctcgccgcacctttcctttgtttccttgggtgaatgcaggagcagcagtggctgcccttcccacctggacagtggtgtgtgtagaaagccagctggatgtttgtggtggggcctcatggtgcctaggaggagataaagatgaggaggtttttccttattgtataaatgaatatttgtatgattaaattaacacacacaccaaaaaaa

SEQ ID NO: 6069 - DNA, 1128 bp, Homo sapiens
  source 1..1128: mol_type = unassigned DNA
ctcggctagcaagctagaggggctcgtttccgccccgctaccgggcgggggcggccatcttagatgcgtgcaattaagggctttggcgggattggctccgcgtttgggctggtccgctgctccccacctaccagggtcggatccggagcccttccccgcggggcggggacctccaaacaaccgactcctttccagctgaagaaacacttaaattctggaaatagcgactcagtatcatggccagcagccttaatgaagatccagaaggaagcagaatcacttatgtgaaaggagacctttttgcatgcccgaaaacagactctttagcccactgtatcagtgaggattgtcgcatgggcgctgggatagctgtcctctttaagaagaaatttggaggggtgcaagaacttttaaatcaacaaaagaaatctggagaagtggctgttctgaagagagatgggcgatatatatattacttggattggatgtggtcttgatcgtctgcaatgggaaaatgtatctgcgatgatcgaggaggtatttgaggcaacagacatcaaaattactgtgtacacactctgaaccagtgaacattttggatgtttccgtgttctcctgtgtcatctctactgggccataggaccgggcaaacctaccttaaaataggcagaggaaagtttcatgagaagtagtgtgtttaacaagacagactttggttgctgtattcaagtatttggattatgactgtggaggagggcttgcttaagatatgtggttgtgtttttttgtggaaaagtaaggagttaggtggcttgataataggcagggaaaccagattgtcgggactatgacctttttctccagtatgctacctgatttgtttggctggccactaggtggcagcattggttctacttctctgctttttaagagaaatttcaggaaggatgatcattccagttagtttggcattttttgtcgtttgtgcacataacttggtgttatccttatgtcatcagattcctcctaggggagagtttttgttttaattacaaaattaaattctacattgttaccaagaaatttgtggtgataaaaatggaaaaataaaaatttggggagttagtg

SEQ ID NO: 6070 - DNA, 1337 bp, Homo sapiens
  source 1..1337: mol_type = unassigned DNA
gagtgtgggctcggctagcaagctagaggggctcgtttccgccccgctaccgggcgggggcggccatcttagatgcgtgcaattaagggctttggcgggattggctccgcgtttgggctggtccgctgctccccacctaccagggtcggatccggagcccttccccgcggggcggggacctccaaacaaccgactcctttccaggtgaagggtgacttgggtacgttggggctttgagcgagcctccccgcaccctcccataggaccccaggacagactgcgtcctcgctgacccgccctaggctgaagaaacacttaaattctggaaatagcgactcagtatcatggccagcagccttaatgaagatccagaaggaagcagaatcacttatgtgaaaggagacctttttgcatgcccgaaaacagactctttagcccactgtatcagtgaggattgtcgcatgggcgctgggatagctgtcctctttaagaagaaatttggaggggtgcaagaacttttaaatcaacaaaagaaatctggagaagtggctgttctgaagagagatgggcgatatatatattacttgattacaaagaaaagggcttcgcacaagccaacttatgaaaacttacagaagagtttagaggcaatgaagtctcattgtctgaagaatggagtcactgacctctccatgcccaggattggatgtggtcttgatcgtctgcaatgggaaaatgtatctgcgatgatcgaggaggtatttgaggcaacagacatcaaaattactgtgtacacactctgaaccagtgaacattttggatgtttccgtgttctcctgtgtcatctctactgggccataggaccgggcaaacctaccttaaaataggcagaggaaagtttcatgagaagtagtgtgtttaacaagacagactttggttgctgtattcaagtatttggattatgactgtggaggagggcttgcttaagatatgtggttgtgtttttttgtggaaaagtaaggagttaggtggcttgataataggcagggaaaccagattgtcgggactatgacctttttctccagtatgctacctgatttgtttggctggccactaggtggcagcattggttctacttctctgctttttaagagaaatttcaggaaggatgatcattccagttagtttggcattttttgtcgtttgtgcacataacttggtgttatccttatgtcatcagattcctcctaggggagagtttttgttttaattacaaaattaaattctacattgttaccaagaaatttgtggtgataaaaatggaaaaataaaaattt

SEQ ID NO: 6071 - DNA, 1515 bp, Homo sapiens
  source 1..1515: mol_type = unassigned DNA
ccgggcgggggcggccatcttagatgcgtgcaattaagggctttggcgggattggctccgcgtttgggctggtccgctgctccccacctaccagggtcggatccggagcccttccccgcggggcggggacctccaaacaaccgactcctttccagctgaagaaacacttaaattctggaaatagcgactcagtatcatggccagcagccttaatgaagatccagaaggaagcagaatcacttatgtgaaaggagacctttttgcatgcccgaaaacagactctttagcccactgtatcagtgaggattgtcgcatgggcgctgggatagctgtcctctttaagaagaaatttggaggggtgcaagaacttttaaatcaacaaaagaaatctggagaagtggctgttctgaagagagatgggcgatatatatattacttgattacaaagaaaagggcttcgcacaagccaacttatgaaaacttacagaagagtttagaggcaatgaagtctcattgtctgaagaatggagtcactgacctctccatgcccaggattggatgtggtcttgatcgtctgcaatgggaaaatgtatctgcgatgatcgaggaggtatttgaggcaacagacatcaaaattactgtgtacacactctgaaccagtgaacattttggatgtttccgtgttctcctgtgtcatctctactgggccataggaccgggcaaacctaccttaaaataggcagaggaaagtttcatgagaagtagtgtgtttaacaagacagactttggttgctgtattcaagtatttggattatgactgtggaggagggcttgcttaagatatgtggttgtgtttttttgtggaaaagtaaggagttaggtggcttgataataggcagggaaaccagattgtcgggactatgacctttttctccagtatgctacctgatttgtttggctggccactaggtggcagcattggttctacttctctgctttttaagagaaatttcaggaaggatgatcattccagttagtttggcattttttgtcgtttgtgcacataacttggtgttatccttatgtcatcagattcctcctaggggagagtttttgttttaattacaaaattaaattctacattgttaccaagaaatttgtggtgataaaaatggaaaaataaaaatttggggagttagtgaggttctgtgcttatgtctatttgttctggacatgggtaatggagggttcacctgcaacttaatttcaaacagtcagacaaagggtccaagcgggaggagaagcaaagtgagaaataagagataaaaatagacaagtcaaaaggcaggtttttagaatctcctcatggtgaactttttctctcttttgtccactgcatggtttctgtgattgaacctgcctgaatttaatcatgaaaacaagtgaaataatgtatgttaaatgcctggcagagtacttagcacagactagtgacccaataaatcagtgattgtc

SEQ ID NO: 6072 - DNA, 819 bp, Homo sapiens
  source 1..819: mol_type = unassigned DNA
ctctttgccccagaagggttttgtattacgtcccaggggccgaacaaactcacattcatcgataaacgttggggaaaaaagcctattaagtggttgtacagggcaatcagaatattatatactaaggctgcctaagcatttttacttccttttcccttctcatagctgaagaaacacttaaattctggaaatagcgactcagtatcatggccagcagccttaatgaagatccagaaggaagcagaatcacttatgtgaaaggagacctttttgcatgcccgaaaacagactctttagcccactgtatcagtgaggattgtcgcatgggcgctgggatagctgtcctctttaagaagaaatttggaggggtgcaagaacttttaaatcaacaaaagaaatctggagaagtggctgttctgaagagagatgggcgatatatatattacttgattacaaagaaaagggcttcgcacaagccaacttatgaaaacttacagaagagtttagaggcaatgaagtctcattgtctgaagaatggagtcactgacctctccatgcccaggattggatgtggtcttgatcgtctgcaatgggaaaatgtatctgcgatgatcgaggaggtatttgaggcaacagacatcaaaattactgtgtacacactctgaaccagtgaacattttggatgtttccgtgttctcctgtgtcatctctactgggccataggaccgggcaaacctaccttaaaataggcagaggaaagtttcatgagaagtagtgtgtttaacaagacagactttggttgctgtattcaagtatttg

SEQ ID NO: 6073 - DNA, 3330 bp, Homo sapiens
  source 1..3330: mol_type = unassigned DNA
ggcggcgggaaaccacggaatttactgccggaagttcggcggccttcgccaaagagtgtgggctcggctagcaagctagaggggctcgtttccgccccgctaccgggcgggggcggccatcttagatgcgtgcaattaagggctttggcgggattggctccgcgtttgggctggtccgctgctccccacctaccagggtcggatccggagcccttccccgcggggcggggacctccaaacaaccgactcctttccaggtgaagggtgacttggctgaagaaacacttaaattctggaaatagcgactcagtatcatggccagcagccttaatgaagatccagaaggaagcagaatcacttatgtgaaaggagacctttttgcatgcccgaaaacagactctttagcccactgtatcagtgaggattgtcgcatgggcgctgggatagctgtcctctttaagaagaaatttggaggggtgcaagaacttttaaatcaacaaaagaaatctggagaagtggctgttctgaagagagatgggcgatatatatattacttgattacaaagaaaagggcttcgcacaagccaacttatgaaaacttacagaagagtttagaggcaatgaagtctcattgtctgaagaatggagtcactgacctctccatgcccaggattggatgtggtcttgatcgtctgcaatgggaaaatgtatctgcgatgatcgaggaggtatttgaggcaacagacatcaaaattactgtgtacacactctgaaccagtgaacattttggatgtttccgtgttctcctgtgtcatctctactgggccataggaccgggcaaacctaccttaaaataggcagaggaaagtttcatgagaagtagtgtgtttaacaagacagactttggttgctgtattcaagtatttggattatgactgtggaggagggcttgcttaagatatgtggttgtgtttttttgtggaaaagtaaggagttaggtggcttgataataggcagggaaaccagattgtcgggactatgacctttttctccagtatgctacctgatttgtttggctggccactaggtggcagcattggttctacttctctgctttttaagagaaatttcaggaaggatgatcattccagttagtttggcattttttgtcgtttgtgcacataacttggtgttatccttatgtcatcagattcctcctaggggagagtttttgttttaattacaaaattaaattctacattgttaccaagaaatttgtggtgataaaaatggaaaaataaaaatttggggagttagtgaggttctgtgcttatgtctatttgttctggacatgggtaatggagggttcacctgcaacttaatttcaaacagtcagacaaagggtccaagcgggaggagaagcaaagtgagaaataagagataaaaatagacaagtcaaaaggcaggtttttagaatctcctcatggtgaactttttctctcttttgtccactgcatggtttctgtgattgaacctgcctgaatttaatcatgaaaacaagtgaaataatgtatgttaaatgcctggcagagtacttagcacagactagtgacccaataaatcagtgattgtcaaaaatccttatgagtcttctttaaaaaaataaaggccacttcctctcaaaaaattctcatacctgtcatctcagcactttgagaggctgagactggaggatgacttgagcccaggagtttgagacaaacctggttaacatagcgagaccctgtctctacaaaaaaaaaagaaattaaaaattagctgggcctggtggtgcaggcctgtagttccagctactctagaggttgaggcgggaggatggcttgagcctgggaggttgaagttgcattgagctgtgattgtgccactgcactccagtgtgggcaacagagcaagaccctatctcaattaaaaaaaaaaatttggtggtggagtgggatggccacttttgtgtttttaacctccatagaagatttggatgtgcagccagctggggtctaaatattagtcctcttttcttccgaagctgcaaagaccagtcgtctattgtggtcatggtaggaaaataaagttcatggatttagccaatggttcagtatcagagctattcgggaaactagacattttcttgttttcccttacagtggtgttgagagttaaaacagccagacttgctattgattttctccctagagtgactttgggtctgtcacaggacttgctgctttcccaagtataaaagaacaactgtattttagaaggggctggttaaaacaccaggaaagtactggttaaatataatctttgtactttagactgtgttcttatcacatatcagcctgataagaggcaacagtttcaaaaaagtatttcacttttgtatttctaggtggaacagacaagttcttcatgttgttggggtaggggcagtggagggtcaagttcattatcaaacttttagattgaggcttttcttgaagcattgcttttgtccacataaagttgaagggaaaaaggaaggagagattatctaaatacacaaaattgaaagtgagagtgggggataagaaacttaaagaaacttaaaatattttgcttaactctgcaattacagatgctcctcaacttaggtctatgtctgggtaaccccatcttaagttgagttcagttgaagggtgtactgaatgtgtatggcttttgcaccgttgtaaagtccaaaaattgcaagacaaaccattgtaaattgagtaccatctgtaaaccttaacacaagtcaaaacatggattttctaggcttcctttacttttaaagagattatggttattattattatttttttcttggcgtttgagccttgattctttagacaaaacctagtctcattcaggattggctgtaagtggaattctgggacttagcaggaatgtgataaagcactttgtcatttgccgatagtagtcttgggtcaaattccgacgacttatcacacttgaagcctgaggaaaggaggcatgccctggtaatcagagtgaacacattattcctggaaacctagttagagtttggcaaacacccggaaattcacctgtgaatttttgcttccacataggactcaaacaaacctttaaaaaaaaaaaaagagagacttgacatcatcctgccattaccatcaaacaccatgtattgaatacttttaaatgattgtatatctgaacattaaactactacttttcacccgctcctctctaataaagaagctagttgcttattaa

SEQ ID NO: 6074 - DNA, 814 bp, Homo sapiens
  source 1..814: mol_type = unassigned DNA
gctttcctgattgcagttttggttgagaaggttgttcttccctgctgagatggctggctgacttcaccagtcaagaggcctgcaggatgaactggtcttaagtgtgagaaagatttagctatgtgatgatgtggaggaaggtgaagtactacaaatcaagagagcataaaaacaagaacagaaatatttcagcatgtgaacagtggactaaacaggaaaaaaagcttggggccacactactttctctcaaaatgtcagacaaagaaattcttctgcagactggtggaagcttgtaaggtcaggacgcagtggctcatgcctgtaatcccaacgttttgggagaacaagaagggaggatggcttgagcccaggagttccagctgaagaaacacttaaattctggaaatagcgactcagtatcatggccagcagccttaatgaagatccagaaggaagcagaatcacttatgtgaaaggagacctttttgcatgcccgaaaacagactctttagcccactgtatcagtgaggattgtcgcatgggcgctgggatagctgtcctctttaagaagaaatttggaggggtgcaagaacttttaaatcaacaaaagaaatctggagaagtggctgttctgaagagagatgggcgatatatatattacttgattacaaagaaaagggcttcgcacaagccaacttatgaaaacttacagaagagtttagaggcaatgaagtctcattgtctgaagaatggagtcactgacctctccatgcccaggattggatgtggtcttgatcgtctgcaatgggaaaat

SEQ ID NO: 6075 - DNA, 2368 bp, Homo sapiens
  source 1..2368: mol_type = unassigned DNA
gcggccgcccgccagagtgccagtggctccttggaggtcgagtccaaggacgtggcttgaagccgggagctggggcgccggagtccacgcaccggggatggaggcgctgggtgacctggagggaccacgcgcaccaggaggtgatgatcctgcaggaagtgcaggagagacccccgggtggctttcgagagaacaggtttttgtactgatatcggcagcttcggtgaacttaggttccatgatgtgctattctatacttggaccgtttttccccaaagaggctgaaaagaagggagccagcaatacaattatcggtatgatctttggatgttttgctttgttcgagttgctggcatccttggtatttggaaactatcttgtacatattggagcaaaatttatgtttgtagcaggaatgtttgtctcaggaggagttacaattctctttggtgtattggaccgagttccagatgggccagtatttattgctatgtgttttctagtgagagtaatggatgcagttagctttgctgcagcaatgactgcatcttcttctatcctggcaaaggcttttccaaataacgtggctacggtattgggaagtcttgagactttttctggactggggctaatactaggtcctcctgtaggtggctttttgtatcaatcctttggctatgaagtgccttttattgttctgggatgcgtcgttttgctgatggtaccactcaatatgtatattttacccaattacgagtctgatccaggtgaacactcattctggaaactgatcgctttacccaaagttggccttatagccttcgtcatcaactcactcagctcgtgttttggcttcctcgatcctactctgtctctctttgttttggagaagttcaatttaccagctggatatgtgggactagtattcctgggtatggcactgtcctatgccatctcttcaccactatttggtctcctaagtgataaaaggccacctctaaggaaatggcttctggtgtttggcaacttaatcacagccgggtgctacatgctcttagggcctgtcccaatcttgcatattaaaagtcagctctggctgctggtgctgatattagttgtaagtggcctctctgctggaatgagtataattccaactttcccggaaattctcagttgtgcacatgaaaatgggtttgaagagggattaagtacattgggacttgtatcaggtctttttagtgcaatgtggtcaattggtgcttttatgggaccaacgctgggtggatttctgtatgagaaaattggttttgaatgggcagcagctatacaaggtctatgggctctgataagtggattagccatgggcttgttttatctactggagtattcaaggagaaaaaggtctaaatctcaaaacatcctcagcacagaggaggaacgaactactctcttgcctaatgaaacctagtccgatggatcctggattgatacaaggttgagaaatgaatgctcctggccttaaacatcaccgtaggaagggtttttaaaattttacgcgcaaaactccgtggaccccgtgccagtgtcttggaagtgtcaacgtgtttttggatgatcctgtattgggctgtacttactgtgatactgaaaagctgtcctgctgaagcagctatatttgaaatattaagtatgaaaggagtaattaaaaacaagcaaaacaaaacaagacttagtttttaaatgaccaaacttgtccttaaagatgttgttattaactcgagttagttcttatttcctctgtttattttttattctaagtacactgattctgtgaatgtaccttttttattaacagggaaagaaatgaattaatttgatatgctctaaatacataaaggtgcttcaaaatatgtagaaacattactatgaaatcagtttttaaaagatatactttctctttgtcctgaggtttttcggtcttgttcaaaaggaagaattcttgcctgccatacagaaactctctagcactccctgaccttaagcttttctaaaaattctgtttgtgtgaaaagtacaagaataacaatacttacaacttccatttttgtaacctacgttcacttatgatctggatttataaacattacttggtataacgtttttcatttcctttaatgtctctgttttttggctctaccatctgttttgtttttgtttttatctatatcttggtagatgtatttcatccctagagcaggtcagcctccttcccctaatgcgaatgcttgttttgttagggaagggcttcctccaacttcgtgtgaaattgtgatgttgaagtgaataaatgtctattgtgtaactctca

SEQ ID NO: 6076 - DNA, 472 bp, Homo sapiens
  source 1..472: mol_type = unassigned DNA
tggaggtcgagtccaaggacgtggcttgaagccgggagctggggcgccggagtccacgcaccggggatggaggcgctgggtgacctggagggaccacgcgcaccaggaggtgatgatcctgcaggaagtgcaggagagacccccgggtggctttcgagagaacaggtttttgtactgatatcggcagcttcggtgaacttaggttccatgatgtgctattctatacttggaccgtttttccccaaagaggctgaaaagaagggagccagcaatacaattatcggtatgatctttggatttcaatttaccagctggatatgtgggactagtattcctgggtatggcactgtcctatgccatctcttcaccactatttggtctcctaagtgataaaaggccacctctaaggaaatggcttctggtgtttggcaacttaatcacagccgggtgctacatgctcttagggcctgtc

SEQ ID NO: 6077 - DNA, 1862 bp, Homo sapiens
  source 1..1862: mol_type = unassigned DNA
ggccgggcggatcgctgcctgcagggagtcggggatgccaggttccagctgagcagcggccgcccgccagagtgccagtggctccttggaggtcgagtccaaggacgtggcttgaagccgggagctggggcgccggagtccacgcaccggggatggaggcgctgggtgacctggagggaccacgcgcaccaggaggtgatgatcctgcaggaagtgcaggagagacccccgggtggctttcgagagaacaggtttttgtactgatatcggcagcttcggtgaacttaggttccatgatgtgctattctatacttggaccgtttttccccaaagaggctgaaaagaagggagccagcaatacaattatcggtatgatctttggatttcaatttaccagctggatatgtgggactagtattcctgggtatggcactgtcctatgccatctcttcaccactatttggtctcctaagtgataaaaggccacctctaaggaaatggcttctggtgtttggcaacttaatcacagccgggtgctacatgctcttagggcctgtcccaatcttgcatattaaaagtcagctctggctgctggtgctgatattagttgtaagtggcctctctgctggaatgagtataattccaactttcccggaaattctcagttgtgcacatgaaaatgggtttgaagagggattaagtacattgggacttgtatcaggtctttttagtgcaatgtggtcaattggtgcttttatgggaccaacgctgggtggatttctgtatgagaaaattggttttgaatgggcagcagctatacaaggtctatgggctctgataagtggattagccatgggcttgttttatctactggagtattcaaggagaaaaaggtctaaatctcaaaacatcctcagcacagaggaggaacgaactactctcttgcctaatgaaacctagtccgatggatcctggattgatacaaggttgagaaatgaatgctcctggccttaaacatcaccgtaggaagggtttttaaaattttacgcgcaaaactccgtggaccccgtgccagtgtcttggaagtgtcaacgtgtttttggatgatcctgtattgggctgtacttactgtgatactgaaaagctgtcctgctgaagcagctatatttgaaatattaagtatgaaaggagtaattaaaaacaagcaaaacaaaacaagacttagtttttaaatgaccaaacttgtccttaaagatgttgttattaactcgagttagttcttatttcctctgtttattttttattctaagtacactgattctgtgaatgtaccttttttattaacagggaaagaaatgaattaatttgatatgctctaaatacataaaggtgcttcaaaatatgtagaaacattactatgaaatcagtttttaaaagatatactttctctttgtcctgaggtttttcggtcttgttcaaaaggaagaattcttgcctgccatacagaaactctctagcactccctgaccttaagcttttctaaaaattctgtttgtgtgaaaagtacaagaataacaatacttacaacttccatttttgtaacctacgttcacttatgatctggatttataaacattacttggtataacgtttttcatttcctttaatgtctctgttttttggctctaccatctgttttgtttttgtttttatctatatcttggtagatgtatttcatccctagagcaggtcagcctccttcccctaatgcgaatgcttgttttgttagggaagggcttcctccaacttcgtgtgaaattgtgatgttgaagtgaataaatgtctattgtgtaactctcatg

SEQ ID NO: 6078 - DNA, 1621 bp, Homo sapiens
  source 1..1621: mol_type = unassigned DNA
agctgagcagcggccgcccgccagagtgccagtggctccttggaggtcgagtccaaggacgtggcttgaagccgggagctggggcgccggagtccacgcaccggggatggaggcgctgggtgacctggagggaccacgcgcaccaggaggtgatgatcctgcaggaagtgcaggagagacccccgggtggctttcgagagaacaggtttttgtactgatatcggcagcttcggtgaacttaggttccatgatgtgctattctatacttggaccgtttttccccaaagaggctgaaaagaagggagccagcaatacaattatcggtatgatctttggatgttttgctttgttcgagttgctggcatccttggtatttggaaactatcttgtacatattggagcaaaatttatgtttgtagcaggaatgtttgtctcaggaggagttacaattctctttggggaagtcttgagactttttctggactggggctaatactaggtcctcctgtaggtggctttttgtatcaatcctttggctatgaagtgccttttattgttctgggatgcgtcgttttgctgatggtaccactcaatatgtatattttacccaattacgagtctgatccaggtgaacactcattctggaaactgatcgctttacccaaagttggccttatagccttcgtcatcaactcactcagctcgtgttttggcttcctcgatcctactctgtctctctttgttttggagaagttcaatttaccagctggatatgtgggactagtattcctgggtatggcactgtcctatgccatctcttcaccactatttggtctcctaagtgataaaaggccacctctaaggaaatggcttctggtgtttggcaacttaatcacagccgggtgctacatgctcttagggcctgtcccaatcttgcatattaaaagtcagctctggctgctggtgctgatattagttgtaagtggcctctctgctggaatgagtataattccaactttcccggaaattctcagttgtgcacagtaagttacttccattgcttgaagagctgtattgtgaataagtagtaagtatcacaggctttcttgaatttctcaattttgcagcatgttggatatttttgccccaatgttaaatcttcatgattttgtagcatatgatattatgatataaatagtaataatacactaatagaaatgataatagtacattaatagctaaaatgggttgtggacagatgtctggcttggtttatgcctcagtatgtaagtaattttgaaaagctaaagcaaaatagataggtctcagcattgttcctctttcatggaggaggtccatgagagagcctagagtgaccagcatctgtcacctggtcatcattcttttgtttaataggcatgatgatgaagaacactaagtactatggctgtgctgggtcagttcaatagttctcatgggaataaggaactatctctgttttttaaaagttgcctttgttctctttccatcttcatctcattttaagaatttcttaattatatatttttataagtatttaatgcaaatgagccatgcttcttaatatcatatatatatgcag

SEQ ID NO: 6079 - DNA, 1018 bp, Homo sapiens
  source 1..1018: mol_type = unassigned DNA
tcggcctttgggtttgctgtggtgtccttgtctcctgcaggaccggccgcagcatggacgctcccaggcggtttccgacgctcgtgcaactgatgcagccaaaagcaatgccagtggaggtgctcggtcacctccctaagcggttctcctggttccactctgagttcctgaagaatccgaaggtagttcgccttgaggtttggctggtggaaaagatcttcggccggggcggagaacgcatcccgcacgtccagggtatgtcccaaatcttgattcacgtgaatcgattggaccctaacggcgaggctgagatcttggtatttgggaggccttcttaccaggaggacacaatcaagatgatcatgaacctggctgactatcaccgccagctccaggcgaaaggctcaggaaaggccctcgcccaggatgtcgccactcagaaggccgagacccagcggtcttcaatagaagtccgggaggccgggacgcagcgttcggtggaggtccgggaggccgggacccagcgttcggtggaagtccaggaggtcgggacacagggttctccggtggaggtgcaggaggccgggacccagcagtctctccaggctgccaacaagtcggggacccagcgatcccccgaagctgccagcaaggcagtgacccagcggtttcgcgaggatgcccgggacccagttactagattatgaaggcatctcaggccctggagccagagccagtcaggggttaaagtgaaagcccgtatttccgcccagaagctggggttggggagaggatgtggattttttgttttaccctttctgttgcatggttgcaaacacaaacttgagttctaataaagaattgcaaagtggaagcccgccccccgcctcccccccgcctcacttaagtccaggaagctggggtggcgaggaaggatgatgtggattgtttttgttttacaccttctgttgaatggttgccaacacaaacttgagttctaataaataattgcatttcc

SEQ ID NO: 6080 - DNA, 1719 bp, Homo sapiens
  source 1..1719: mol_type = unassigned DNA
agttcgccgcttgcaccgggaccgatgccatctgagacgcacgcgatgctggcgacgctggcgagggtggcagctctgcgcagaacctgcctcttctccggccggggcggcgggagggggctgtggactggccgcccgcagtcagatatgaacaatataaagccattggaaggggtaaaaattctggatctaacaagagtcctggcgggaccttttgctactatgaatttaggagatcttggagcagaagttataaaagtggagagaccaggagctggtgatgatacacgaacttgggggccaccttttgttgggacagaaagtacatattatctcagtgttaaccgaaataaaaaaagtattgctgttaatatcaaggatccaaaaggggtgaaaatcatcaaagagcttgcagctgtttgtgatgtgtttgtggaaaactatgtccctggcaaactgtctgcaatgggcctgggatatgaagatatagacgagattgctcctcacatcatctattgttccatcacagggtatggtcagacaggtccaatttctcagcgagctggttatgatgctgttgcctcggctgtttctggtctgatgcacatcacagggcctgagaatggagatccagttcgcccaggagtagctatgactgatcttgccactggcctgtatgcatatggagctattatggctggattgatacaaaaatacaaaactgggaaaggactgttcattgattgtaacctactgtcatcccaggtggcgtgtttgtctcacatagctgcaaattatcttattggtcaaaaggaagcaaaacgttggggtacagctcatggcagtatcgttccttaccaggcttttaaaaccaaggatggctatattgtagttggagcaggaaataaccagcagtttgccaccgtctgcaagatcttggatttgcctgagttgattgataattccaagtataaaactaaccaccttcgggtacacaatagaaaagagcttattaaaatattatctgaacggtttgaagaagaactgaccagcaagtggttatatctttttgaaggcagtggagtcccgtatggcccaatcaacaacatgaagaatgtatttgcagaacctcagaacgctgtctctggcttccaaagcctgctgcattccttggcccatggccccttccttcatcttcaaggatcagcaagggtattacacaatggcctcgttatggagatggagcatccaactgtggggaagatttccgtcccaggcccagctgtgagatacagtaagttcaagatgtcagaggccaggccgcccccgctgctcgggcagcacacaacgcacatcctgaaggaggtcctgagatacgatgacagggccatcggggagctgctcagcgctggagtggtggaccaacatgaaactcactgacaaaggaaaagggctcttcctcataacctcgatccgaatacactggcaaaggcaacactttgcttggacccttctccccagttctgataccactaaaaagaagatttagagtaactccagatttcttacatggcatctccagaatggctctggtattaatgaatctagtgccttttaaatgtatcccacgttttgttccctaccatcttttttttcagatgatgatttcattatggatttgtgggatttttaaaaataaagttttaatttttttcctgg

SEQ ID NO: 6081 - DNA, 1645 bp, Homo sapiens
  source 1..1645: mol_type = unassigned DNA
gttcgccgcttgcaccgggaccgatgccatctgagacgcacgcgatgctggcgacgctggcgagggtggcagctctgcgcagaacctgcctcttctccggccggggcggcgggagggggctgtggactggccgcccgcagtcagatatgaacaatataaagccattggaaggggtaaaaattctggatctaacaagagtcctggcgggaccttttgctactatgaatttaggagatcttggagcagaagttataaaagtggagagaccaggagctggtgatgatacacgaacttgggggccaccttttgttgggacagaaagtacatattatctcagtgttaaccgaaataaaaaaagtattgctgttaatatcaaggatccaaaaggggtgaaaatcatcaaagagcttgcagctgtttgtgatgtgtttgtggaaaactatgtccctggcaaactgtctgcaatgggcctgggatatgaagatatagacgagattgctcctcacatcatctattgttccatcacagggtatggtcagacaggtccaatttctcagcgagctggttatgatgctgttgcctcggctgtttctggtctgatgcacatcacagggcctgagaatggagatccagttcgcccaggagtagctatgactgatcttgccactggcctgtatgcatatggagctattatggctggattgatacaaaaatacaaaactgggaaaggactgttcattgattgtaacctactgtcatcccaggtggcgtgtttgtctcacatagctgcaaattatcttattggtcaaaaggaagcaaaacgttggggtacagctcatggcagtatcgttccttaccaggcttttaaaaccaaggatggctatattgtagttggagcaggaaataaccagcagtttgccaccgtctgcaagatcttggatttgcctgagttgattgataattccaagtataaaactaaccaccttcgggtacacaatagaaaagagcttattaaaatattatctgaacggtttgaagaagaactgaccagcaagtggttatatctttttgaaggcagtggagtcccgtatggcccaatcaacaacatgaagaatgtatttgcagaacctcaggtattacacaatggcctcgttatggagatggagcatccaactgtggggaagatttccgtcccaggcccagctgtgagatacagtaagttcaagatgtcagaggccaggccgcccccgctgctcgggcagcacacaacgcacatcctgaaggaggtcctgagatacgatgacagggccatcggggagctgctcagcgctggagtggtggaccaacatgaaactcactgacaaaggaaaagggctcttcctcataacctcgatccgaatacactggcaaaggcaacactttgcttggacccttctccccagttctgataccactaaaaagaagatttagagtaactccagatttcttacatggcatctccagaatggctctggtattaatgaatctagtgccttttaaatgtatcccacgttttgttccctaccatcttttttttcagatgatgatttcattatggatttgtgggatttttaaaaataaagttttaatttttttcctggaaaaa

SEQ ID NO: 6082 - DNA, 1217 bp, Homo sapiens
  source 1..1217: mol_type = unassigned DNA
gatgctggcgacgctggcgagggtggcagctctgcgcagaacctgcctcttctccggccggggcggcgggagggggctgtggactggccgcccgcagtcagatatgaacaatataaagccattggaaggggtaaaaattctggatctaacaagagtcctggcgggaccttttgctactatgaatttaggagatcttggagcagaagttataaaagtggagagaccaggagctggtgatgatacacgaacttgggggccaccttttgttgggacagaaagtacatattatctcagtgttaaccgaaataaaaaaagtattgctgttaatatcaaggatccaaaaggggtgaaaatcatcaaagagcttgcagctgtttgtgatgtgtttgtggaaaactatgtccctggcaaactgtctgcaatgggcctgggatatgaagatatagacgagattgctcctcacatcatctattgttccatcacagagaaggggttttcccatgttgcccaggatggtcttgatctccaaacctcaagcaatctgccggctctggtctcccaaagtgctgggattacaggaatgagccaccgcgcctggccaacttcctgaattatcgttgtctccacacctgcttacagtgctgttcctcaggtatcaaagcatcccagcatgttgtgcctttctccccatcctcctctactttctcctctgttgtgtactggtaactcggaatctctgaatggctgtagaaacagaaaagtggatgggactgatggaaaacccaaatttgggtttcagaaagctatctgttgtttgacatgcagtctagaattaatgactataccaggttacccttggaacatcttgcatttgtgggcagaaacatttggctacttgccacggggttatcctgaaaaaagatgggcttgaaaaactgtcactagtgtcacttgaattggtcatccatggttggggagttccattccaagaggataatttacacaatttaaaataaagggggccaggtgtggtggctcacacctgtaatcctagcgctttgggaggccaaagcaggtggaatccttgaggtcaggagtttgagatcatcctggctaacatggtgaaaccctgtctctactaaaaatacaaaaattatctgggcatggtggtgtgcacctgtaatcccagtttttgggaggctgaggcaggagaatca

SEQ ID NO: 6083 - DNA, 1369 bp, Homo sapiens
  source 1..1369: mol_type = unassigned DNA
gttcgccgcttgcaccgggaccgatgccatctgagacgcacgcgatgctggcgacgctggcgagggtggcagctctgcgcagaacctgcctcttctccggccggggcggcgggagggggctgtggactggccgcccgcagtcagatatgaacaatataaagccattggaaggggtaaaaattctggatctaacaagagtcctggcgggaccttttgctactatgaatttaggagatcttggagcagaagttataaaagtggagagaccaggagctggtgatgatacacgaacttgggggccaccttttgttgggacagaaagtacatattatctcagtgttaaccgaaataaaaaaagtattgctgttaatatcaaggatccaaaaggggtgaaaatcatcaaagagcttgcagctgtttgtgatgtgtttgtggaaaactatgtccctggcaaactgtctgcaatgggcctgggatatgaagatatagacgagattgctcctcacatcatctattgttccatcacagggtatggtcagacaggtccaatttctcagcgagctggttatgatgctgttgcctcggctgtttctggtctgatgcacatcacagggcctgaggtggcgtgtttgtctcacatagctgcaaattatcttattggtcaaaaggaagcaaaacgttggggtacagctcatggcagtatcgttccttaccaggcttttaaaaccaaggatggctatattgtagttggagcaggaaataaccagcagtttgccaccgtctgcaagatcttggatttgcctgagttgattgataattccaagtataaaactaaccaccttcgggtacacaatagaaaagagcttattaaaatattatctgaacggtttgaagaagaactgaccagcaagtggttatatctttttgaaggcagtggagtcccgtatggcccaatcaacaacatgaagaatgtatttgcagaacctcaggtattacacaatggcctcgttatggagatggagcatccaactgtggggaagatttccgtcccaggcccagctgtgagatacagtaagttcaagatgtcagaggccaggccgcccccgctgctcgggcagcacacaacgcacatcctgaaggaggtcctgagatacgatgacagggccatcggggagctgctcagcgctggagtggtggaccaacatgaaactcactgacaaaggaaaagggctcttcctcataacctcgatccgaatacactggcaaaggcaacactttgcttggacccttctccccagttctgataccactaaaaagaagatttagagtaactccagatttcttacatggcatctccagaatggctctg

SEQ ID NO: 6084 - DNA, 948 bp, Homo sapiens
  source 1..948: mol_type = unassigned DNA
tggtaaaggactagcagttctctgcggagggccggttgatacagttccggtgggagaacgcggctgcgaggttttcggctttggctcctgatatgcagcgacagaattttcggcccccaactcctccttaccctggtccgggtggaggaggttggggtagcggaagcagcttccggggaaccccgggcgggggcggaccacggccgccctcccctcgagacgggtacgggagtccgcaccacacgccgccgtacgggccccggtctaggccgtacgggagcagtcactctccgcgacacggcggcagcttcccggggggccggttcgggtctccgtcccctggcggctaccctggctcctactccaggtcccccgcggggtcccagcagcaattcggctactccccagggcagcagcagacccacccccagggttctccaaggacatctacaccatttggatcagggcgtgttagagaaaaaagaatgtctaatgagttggaaaattatttcaagccttcaatgcttgaagatccttgggctggcctagaaccagtatctgtagtggatataagccaacaatacagcaatactcaaacattcacaggcaaaaaaggaagatacttttgttaacatttctgaaattcaactggaagcttcatgtgtcaggaacatcttggacaaaactttaagttgtgttgatataaatttacccaaagatgatgactttgattggataattagtaaggtctttttgttatttttcatcgtatcaggtattgttgatattagagaaaaaagtaggataacttgcaacatttagctctggaagtacctaccacattttagagatttaccgtttccatatatttaacattcctggttacataatggacatttgtcttttaatgttttttcaatgttttaaaataaaacattttgtcttcta

SEQ ID NO: 6085 - DNA, 1474 bp, Homo sapiens
  source 1..1474: mol_type = unassigned DNA
gtgctgccgccggccgcctctgggtctgtacgcgcgcatgcggcggctgcccgggccggaggtgtctgggcggagcgtggctgcggccagcggaccgggcgcctggggcactgaccactactgcctggagctgctgcggaaacgggattatgaaggttatttatgctccctgctgctccctgcagaatcccgaagctctgtttttgcactgagggcctttaatgtggaactggctcaggttaaagactcagtctctgagaaaacaattggactgatgcgaatgcagttttggaaaaaaactgtggaagatatatactgtgacaatccaccacatcagcctgtggccattgaactatggaaggtctgcacaccagcagaggcaggcccagtttctgggccccagattgacttcacagagccccagtaaagatggaaagccagaaccccccaactggggattgagaagaaaaagtggatgggaagctgctgttaaaagacataatctgactaaaagatggcttatgaaaatcgtcgatgaaagagaaaaaaatctggatgacaaagcatatcgtaatatcaaggaactggaaaattatgctgaaaacacacagagctctcttctttacttaacactagaaatattgggtataaaggatcttcatgcagatcatgctgcaagtcatattggaaaagcacaaggcattgtcacttgcttgagagcaacaccatatcatgggagcagaagaaaggtgttccttcccatggatatttgtatgctgcatggtgtttcacaagaggactttctacggaggaaccaagataaaaatgtgagagatgtaatatatgacattgccagtcaagcacacttgcacctaaagcatgctaggtcctttcacaaaactgttcctgtgaaagcatttcctgcttttcttcagacggaaattaaggatgcagacactcagggcgtgtgtcttgcacagccagccagcctgggaaaatgaagccaactgggagagagatttgaaggactctggttctaggcatgcgcacttctccaggtacttgagcttggaaaccttcttgcttaactagctctaggccaatcttgcttcactcgaacacgcacacacttctccttgcgctattttgaattaccagaggagaatctttgacaaacacaggtcgatgttagtgtgagccagactgggcaactacacaaaatcaaaatcaggaaaggagagccactttgctggaatctcccagaaggctggtggggtggactccggggctttgaaatctctaaagagtggtgactcacctctcctagaaattgccctggttatatcataaaagggctcaatttttacatgaggtctcaatggtctttttacttaatgtgacatcattagaaaaatcaacctttgaccagaaagaggcagttccctccttcctcacacaattcacaattttctgg

SEQ ID NO: 6086 - DNA, 1798 bp, Homo sapiens
  source 1..1798: mol_type = unassigned DNA
gaagggcacgcagtgccggcgtcatggcggcctccgcgcacggctctgtctgggggccgttgcggcttggcatccccggcctgtgctgccgccggccgcctctgggtctgtacgcgcgcatgcggcggctgcccgggccggaggtgtctgggcggagcgtggctgcggccagcggaccgggcgcctggggcactgaccactactgcctggagctgctgcggaaacgggattatgaaggttatttatgctccctgctgctccctgcagaatcccgaagctctgtttttgcactgagggcctttaatgtggaactggctcaggttaaagactcagtctctgagaaaacaattggactgatgcgaatgcagttttggaaaaaaactgtggaagatatatactgtgacaatccaccacatcagcctgtggccattgaactatggaaggctgttaaaagacataatctgactaaaagatggcttatgaaaatcgtcgatgaaagagaaaaaaatctggatgacaaagcatatcgtaatatcaaggaactggaaaattatgctgaaaacacacagagctctcttctttacttaacactagaaatattgggtataaaggatcttcatgcagatcatgctgcaagtcatattggaaaagcacaaggcattgtcacttgcttgagagcaacaccatatcatgggagcagaagaaaggtgttccttcccatggatatttgtatgctgcatggtgtttcacaagaggactttctacggaggaaccaagataaaaatgtgagagatgtaatatatgacattgccagtcaagcacacttgcacctaaagcatgctaggtcctttcacaaaactgttcctgtgaaagcatttcctgcttttcttcagacggtttctctagaggactttctaaagaaaattcagcgagtggattttgatatattccacccatctttacagcagaagaatacattacttccattatatttgtatattcagtcatggagaaaaacatattaaaataatttcatggcattgatgttaattctagtctattagttttataaaagttaggattcttatttaggaacaacaggaaatgactgttaaggagaaaatgaatttattgaatgggatgtcaagtagctcacaaaattgagaagttgccgtgggactagggtgccaagactgctgagattctggcagaggcactgccattggcacccctggcccagacagtgtctgctgtgctgtccctggaagctggagctccaacagggaatattggtgtagctgtgcataggccataagccacacttgagccagtgggcagggagaaggaatgtcattctcccttcaccactggggaaggaaaggggaaagggctcaagttatcataggggcttacatgctgagcagctataacctaggtgttcagaacacctggaagatgcatttatttaggggtcacaaatagtgaaattaatatttgaggaatatcagtcacgtgttgtgggcttttatccttaacgtttaatttttacaatcttgtgtaaaaatttatccatgataataacataacttctttaaggttggagtggctggcaagagcagagccttaatttgactttagctctggctggtctggaagcttttacttttttgttaatcccacttcctcactctgtcattcagcattatcatgatcgtgaacaaaattgtactgagaaagtttgtataagtgatatgaacggtattgtattgaacatccattaaagggttgctacacttta

SEQ ID NO: 6087 - DNA, 860 bp, Homo sapiens
  source 1..860: mol_type = unassigned DNA
atgccaatcagcatttcacattcctcatggttggttcaaaggaaacgggattatgaaggttatttatgctccctgctgctccctgcagaatcccgaagctctgtttttgcactgagggcctttaatgtggaactggctcaggttaaagactcagtctctgagaaaacaattggactgatgcgaatgcagttttggaaaaaaactgtggaagatatatactgtgacaatccaccacatcagcctgtggccattgaactatggaaggctgttaaaagacataatctgactaaaagatggcttatgaaaatcgtcgatgaaagagaaaaaaatctggatgacaaagcatatcgtaatatcaaggaactggaaaattatgctgaaaacacacagagctctcttctttacttaacactagaaatattgggtataaaggatcttcatgcagatcatgctgcaagtcatattggaaaagcacaaggcattgtcacttgcttgagagcaacaccatatcatgggagcagaagaaaggtgttccttcccatggatatttgtatgctgcatggtgtttcacaagaggactttctacggaggaaccaagataaaaatgtgagagatgtaatatatgacattgccagtcaagcacacttgcacctaaagcatgctaggtcctttcacaaaactgttcctgtgaaagcatttcctgcttttcttcagacggtttctctagaggactttctaaagaaaattcagcgagtggattttgatatattccacccatctttacagcagaagaatacattacttccattatatttgtatattcagtcatggagaaaaacatattaaaataatttcatggc

SEQ ID NO: 6088 - DNA, 1833 bp, Homo sapiens
  source 1..1833: mol_type = unassigned DNA
aatgatttcactacagactctctggaaagcctgggagctgaattccggaagatccccacatcgatgaaagcaaagcgaagccaccaagccgtcatcatgtccacgtcgctacgagtcagcccatccatccatggctaccacttcgacacagcctctcgtaagaaagccgtgggcaacatctttgaaaacacagaccaagaatcactagaaaggctcttcagaaactctggagacaagaaagcagaggagagagccaagatcatttttgccatagatcaagatgtggaggagaaaacgcgtgccctgatggccttgaagaagaggacaaaagacaagcttttccagtttctgaaactgcggaaatattccatcaaagttcactgaagagaagaggatggataaggacgttatccaagaatggacattcaaagaccaagtgagtttgtgagattctaacagatgcagcattttgctgctaccttacaagcttctcttctgtcaggactccagaggctggaaagggaccgggactggaaagggaccaggactgaacagactggttacaaagactccaaacaatttcatgccctgtgctgttacagaggagaacaaaatgctttcagcaaggatttgaaaactcttccgtccctgcaggaaaggattgatgctgatagaagagcctggacagatgtaatgagaactaaagaaaacagatggctggagatgacatttatccagggtcactttgtcaggccctaggacttaaatcgaagttgaacttttttttttttttttaaccaaatagataggggaagggaggagggagagggaggacagggagagaaaataccatgcataaattgtttactgaatttttatatctgagtgttcaaaatatttccaagcctgagtattgtctattggtatagatttttagaaatcaataattgattatttatttgcacttattacaatgcctgaaaaagtgcaccacatggatgttaagtagaaattcaagaaagtaagatgtcttcagcaactcagtaaaaccttacgccaccttttggtttgtaaaaggttttttatacatttcaaacaggttgcacaaaagttaaaataatggggtcttttataaatccaaagtactgtgaaaacattttacatattttttaaatcttctgactaatgctaaaacgtaatctaattaaatttcatacagttactgcagtaagcattaggaagtgaatatgatatacaaaatagtttataaagactctatagtttctataatttattttactggcaaatgtcatgcaacaataataaattattgtaaactttgtggcttttggtctgtgatgcttggtctcaaaggaaaaaataagatggtaaatgttgatatttacaaacttttctaaagatgtgtctctaacaataaaagttaattttagagtagttttatattaattaccaaactttttcaaaacaaattcttacgtcaaatatctgggaagtttctctgtcccaatcttaaaatataaaatatagatatagaagttcatagattgactccttggcatttctatttatgtatccattaaggatgagttttaaaaggctttctcttcatacttttgaaaaatttcttctatgattacagtagctatgtacatgtgtacatctatttttcccaagcaatatgttttgggtttagagtctgagtgatgaccaagattctgtgtgttactactgtttgtttaataggaacaaatatagaaataatattatctctttgcttatttcccgttaaaactataataaaatgtttctagg

SEQ ID NO: 6089 - DNA, 3843 bp, Homo sapiens
  source 1..3843: mol_type = unassigned DNA
gccgcgaggagggccccattcaaaagtagtcgctattgtcgccgtgggctgagctcgccgggccggcccctccgtggggccgcgctgggacgcacgcgggtggacgaggggaccgatcccgggcgcccatggccggggccgccatggccgagcggggccgcgtgcctccccccgcacccgcgcccagcacggaggggctgccgcgcgccttcctgcagagcctgcgcaccctgttcgacatcctggacgaccggcggcgcggctgcgtgcacctgcgcgagatcgagtcccgctggcagggcaccgacgcgcgggagctgccccgcggggtgctggagggcttgcgccaggtggccccggccagcggctacctgaccttcgagcgcttcgtggccggcctgcgcacctccctgctgagcgccgacggcggcccccgggaccccacgcgcgccccggcccggcccggggatcagccgccgccgccgccgcagcgcctggtgttcgctccggccgacgagccgcggacggtcctggagaggaagcccctgcccctgggcgtgcgcgcccctctggccggtcccagcgccgccgcccgcagcccggagcagctgtgcgccccggctgaggcggcgccctgccccgcggagcccgagcggtcccagagcgcggcgctggaaccgagctccagcgcggacgcaggtgcagtggcgtgcagggccctggaggcggactcaggggatgcccggcgggctccccgtgcccgaggggaacgtcggaggcacaccatcgccagcggcgtggactgcggcctgctgaagcagatgaaggagctggagcaggagaaggaggtgctgctgcagggtttggagatgatggcgcggggccgcgactggtaccagcagcagctgcaacgagtgcaggagcgccagcgccgcctgggccagagcagagccagcgccgactttggggctgcagggagcccccgcccactggggcggctactgcccaaggtacaagaggtggcccggtgcctgggggagctgctggctgcagcctgtgccagccgggccctgcccccgtcctcctccgggcccccctgccctgccctgacgtccacctcacccccggtctggcagcagcagaccatcctcatgctgaaggagcagaaccgactcctcacccaggaggtgaccgagaagagtgagcgcatcacgcagctggagcaggagaagtcggcgctcattaagcagctgtttgaggcccgcgccctgagccagcaggacgggggacctctggattccaccttcatctagtccttgtgggccgcgtgggcccccagggccagcctggcactcagcccttcgagggtgggcgccccatcgcacccaccctctctggctggagacccccggcaggcccaggcacagtcccggagtgggcgccttcctgccgcccttgccagatgggctccccaggcctgcccccggctggtccccgcaccgagcgcttgactccgttttggctcctggtgctgacatgggctggggctctcttgagtccgcatagtccgcagctactactgccgctgtcagtggacagtggggtacccctccatgagttagcgtccccccgtttccagcggtgccgccctgggtcccatcttcagggaaaggcactgcccacgccaggctgcacttccaacaacgggcagcagagggcgcggggcggctccgacgcgggtccaagggcagcttcccgctcaaccagggcaccaggacgaggtggctgtagctcggacggacggaagtagatggagggggtggggacggcctgtaagcggggggtgcctgcctggctggggagccccagggatagcggtcggacttcaggttctggccaaggctgagggaccctggctgcagcggatcggcacgccgggtgggcgagagcttggcctgcatgtgcctcccacagaccctggggtgatggccttccccctcttggccgggacgttgccccacgttgagtcccacacaacatcctgtgagcctggctccccaggagggcccccagacagctcccaggcacgtcataggcaaagcctgttcccccgactcaggatttccaaggcctggggtcctgctcacccccctttgctctcacgcccagcctgtccccaggtttcagctgggagaggccacctccctcagccaaggaaaacgagaacccccagggtacaggaggaggctggggcaggtccccttgggtgtcactccctcagcccctgcccaggcccactcccgctggtgctggagtacgcactggtgggggggccctgctcagcccaacctggagggtcccagtgtcaccagaaccaggggcacggcaacagcatcgatgggttctgcagcccagggcccccgatgcggggtcagtgcgtggggggcgcagggcccccgatgccgatgcggggtcagtgtgtgtggggcgcagggcctccgatgcggggtcagtgcgtggggggcgcagggccccctcgtgtccagggcactttggtacactgtcccacaaggcacctgtctcagaggaggggccctggcaggcagcgtggcaactcccttccggagcccagctccatgctaacctgcccacagcaaccccacagagccacattccctgctgcacctggtctgcaggggtgtcccaggacaggcccaagtcagcccagcatgcagctgccctcctaccctgaagatgggagtgggctttccaggggacataaggatgtcaggcctggacctcctgggcaggaaagggtgcaggtcctgagggcctgtgccccacagccccagcaccaggtggactgcagcgcagtgggtgggccagtggcagccagggagaagccccccgtcagcaggctggggtctgcccaccagggcctccccacgtctgcctttgagggtgcctgccatgccctgggggatcctggcatctttactggactggaagcaggagacagaacagtgtctgtcccggggtgacttcatcaggagaccgcccacatagagctggaccccgcagctgaagcggaaatgtgagacaggctggcacctccggaaaaactgcctttcagccttggtgttccgtgcaaggtgaaaagaaataggtcctcccagtttacagcttgaaatcaggctagtgagtggccctggagaccacgaggggagaatttaaaggccccggctggcagggtctaggtggctggcagaggcacatgcagaccctgcctggagcctgccctaggacgctgggcgggtcagtctccgtgcaggatgtgagcagcgtccctgggctctatccgcgaggtgccagtagcgtgtgcaggtacatacacgtgcgtgcacactgtgatgacacccggaaatgtctcaggatgttgaaatgtgtccttgggggcagaagtgtccccagttgagaatctgccccagaggaacacacccacaccaggcctcaggattttgtgttgatcaagttccaaggaaaaggaacatctcagccgggcgtggtggttcacgcctggaatcccagcacttgaggccaggagttccagagcagcctgggcaacgcagtgagagaccccatctctacaaaaaaaaaaaagaaagaaagaaaatgagagatccaggtttaaaaattcataaacaccacaaggaaacaatacactatgagacccagcagaagcaacagattgactctagacccagatactagaattatcagagagaatataaagtaacagtgttttatatatctaaagaaataaaagagatttctggaaacatg

SEQ ID NO: 6090 - DNA, 1603 bp, Homo sapiens
  source 1..1603: mol_type = unassigned DNA
atgcgcagaccgaggcagggaggcgggggtgcgggaggctccgcggctgcgcgggcgcgtgctggtggcctcggcggaggctcagtcccggcccgcgcccgcggcgcccccgctgcggcccgagcggcctggctgcgggatctgtgcgcacggatggcgcggccgccccggcagcacccgggggtctgggcgtcgctgctcctgctgctactgacggggcccgccgcctgcgcagccagccccgcggacgacggtgcgggcccggggggccggggaccccggggacgcgcgcggggggacacgggcgccgacgaggcggtgccgcgccacgactcctcctacggcaccttcgcgggggagttctacgacctgcgctacctgtcggaggagggttaccccttccctactgctcctcctgtggatccatttgccaaaatcaaagtggacgactgtggaaaaactaagggatgctttagatatggcaaaccaggctgtaatgcagagacctgtgactatttcctcagctaccggatgataggggctgatgtagaatttgagctgagtgcagacacagatggttgggtagcagttggattctcttcagacaagaaaatgggtggtgatgatgtcatggcctgcgtccatgatgacaatggcagggtccgcatacagcacttctataatgtaggccagtgggcaaaggagattcagagaaaccctgccagagatgaagaaggagtttttgagaacaatcgcgtcacctgcagatttaaacgccctgtgaatgttcccagagatgaaacaattgttgatctgcatttgagttggtattatctgtttgcttggggtccagccattcagggctctatcactcgacatgatatagactcaccgccggcttcagagcgtgttgtcagtatttacaagtatgaagacatttttatgccatcagctgcctatcaaaccttctcatctccattttgtttgcttctgattgttgctctgaccttctacctattgatgggaaccccctaaccacagctgcagggccaacagattacatggattgggaagtctttagtataaatatattttttaaagaatatccagtataattttagcttcaattatttaagaaaaaaaacctcatataatttcagctttttggaagaaagaacaagcttcttttgtagtcaaagaagattgtttaataatgaccctatacttttggaacatacttacaccttttctaagcactttcacatatgttttcttatttaacttcacaacatctctgagttggattgatgaaaattgtgattgccatcttcctgaatgggatttgagacccaaaaagactgcctttttatgatccacataccatataactttggctagaaatgacaaatagaaaggcagagaaggaactaagtatagaaatcatgtctcaaaacagtctttactatgagtgctatagcacagagagttattttgaatattactagggagaactttactgaatgtcataagttcacagtcagccttttgggcagaagaaatttcaaatttccgtaaagcagaagtgcttttggatatttacaca

SEQ ID NO: 6091 - DNA, 2688 bp, Homo sapiens
  source 1..2688: mol_type = unassigned DNA
gctaatatgctccctctcccacaaggcagcgcgccggctcggacgcggccggctaccgagccctttgtgagggctgtgagctgcgcctgacggtggcaccatgagcagctcaggtggggcgcccggggcgtccgccagctctgcgccgcccgcgcaggaagagggcatgacgtggtggtaccgctggctgtgtcgcctgtctggggtgctgggggcagtctcttgcgcgatctctggcctcttcaactgcatcaccatccaccctctgaacattgcggccggcgtgtggatgatgatggcggtcgttcccatcgtcatcagcctgaccctgaccacgctgctgggcaacgccatcgcctttgctacgggggtgctgtacggactctctgctctgggcaaaaagggcgatgcgatctcctatgccaggatccagcagcagaggcagcaggcggatgaggagaagctcgcggagaccctggagggggagctgtgaagggctgggcgcccctccctccctgtcccctcttctggctctgtgtgggtccaagtgaggcctggactgtccacgctgaggcacagcctggagaggggcctttgcacgtgtccctacacctggagtcctctgctcctttctccagactggcttaagccaggagccactggctgctggtgtgagggtctgggctgctggacttgaggcagagcctgcagcagctgtgtggacactacccagccctactcctctgctgggtgggtctgcagatctcacaccacagacagggctgcctgtgacctgctgtgacctgggagcagcttcccctggagatgctggtcctggcttgaggggaggggcaagtgggaccctgccacctgggcactgagcagagggacctcccccagctctcttagcaggtggagccccagggcctgggacagcctgccgctgccagcaacctcccactgctgcctagggtgcagcgcccactgtcaccctgccttctgaagaagcccacagggctcctaaggtgcaccccggtacctggaactgcagccttggcagtgactggacagctgggtgggggatgctccctgctggccctgggaaccttggacaggccacctcaaggcccctcggctgcccctcctccctgggcctgctggggcccctaggttctgcccatcaccccccgcccctgctggccttggtgctaaggaagtggggagagcaggctctccctggcaccgagggtgcccaccctctccctggtgtggccccgtcaacatcagccacagcccagccccattagtgggttagtgggtctgacctcagccccactcaggtgctcctgctggcctgcccaagccctgccctcagggagcttctgccttttaagaactgggcagaggccacagtcacctccccacacagagctgtccccactgccctgggtgccaggctgtccggagccaggcctacccagggaggatgcagagagctggtgcccaggatgtgcacccccatattccctctgccctgtggcctcagcccgctggcctctctgaccgtgaggctggctctcagccatcgggcaggtgcctggtcgggcctggcttagcccaggtggggtttggcagaagcgggcgggtgtggaagatattccatctggggccaaccccaggctgggcctgcgctgagcttctggagcgcaggtactgggtcttgctaagtgaactgtttcccaggaacacctctcgggcccatctgcgtctgaggctgggagtggcatctgaggccgggagtggcatctgaggccaggagtggcaggctggtgggctgggcgtggggttttctgggccctgcccagtactgccctggggacttggtgggctcctgggtcagcagcatcccacccctgggagtctggccagctgagccccagggtggcaggggcattatagcctggtggacatgtgccttcagggttcctccggggccaccttcctcaggccagtgctgggttcaaagggctgtgtgtgtgtgtgtgtgtgtgtgtgtgtgtgtgtgtatgtatatgtgtgtgggtgcacacatctgtcccatgtatgcagtgagacctgtctacctcccacaaggagcaagggctctgcccgccctctgctcattcctacccaggtagtgggaccccgggcccccttctgcctggcttgcctgcttctgccctttccagaggggtctcactgacagccagagacagcaggagaagggttggctgtggatcaaggaaggctgcccctgtaccctgtggggaaatggtgggtgcatggctggatgcagaggtggaaggccctgggccacaggcgagagtgggcgtgtcacctgtcccaggttcccagcaagtctgcagctgtgcagtcctggggtccctgaccctgtcgcccagggggcgtgctgtccagcaggggccctgccttgcaaggaacgtctcttccggcggctgggccgctcctgcctggtctgggctgtgtgtggcgccctttcctccttgtttgttcctctgtgttctgtgtgcgtcttaagcaataaagcgtggccgtggctcgcgtgcctgccctctgctcccttctgccttggtgcctgtgtgtgagtgtggaagccaggcaggagccgctggcccaggaaataactac

SEQ ID NO: 6092 - DNA, 2794 bp, Homo sapiens
  source 1..2794: mol_type = unassigned DNA
acaaggcagcgcgccggctcggacgcggccggctaccgagccctttgtgagggctgtgagctgcgcctgacggtggcaccatgagcagctcaggtggggcgcccggggcgtccgccagctctgcgccgcccgcgcaggaagagggcatgacgtggtggtaccgctggctgtgtcgcctgtctggggtgctgggggcagtctcttgcgcgatctctggcctcttcaactgcatcaccatccaccctctgaacattgcggccggcgtgtggatgatcatgaatgccttcatcttgttgctgtgtgaggcgcccttctgctgccagttcatcgagtttgcaaacacagtggcggagaaggtggaccggctgcgctcctggcagaaggctgtcttctactgcgggatggcggtcgttcccatcgtcatcagcctgaccctgaccacgctgctgggcaacgccatcgcctttgctacgggggtgctgtacggactctctgctctgggcaaaaagggcgatgcgatctcctatgccaggatccagcagcagaggcagcaggcggatgaggagaagctcgcggagaccctggagggggagctgtgaagggctgggcgcccctccctccctgtcccctcttctggctctgtgtgggtccaagtgaggcctggactgtccacgctgaggcacagcctggagaggggcctttgcacgtgtccctacacctggagtcctctgctcctttctccagactggcttaagccaggagccactggctgctggtgtgagggtctgggctgctggacttgaggcagagcctgcagcagctgtgtggacactacccagccctactcctctgctgggtgggtctgcagatctcacaccacagacagggctgcctgtgacctgctgtgacctgggagcagcttcccctggagatgctggtcctggcttgaggggaggggcaagtgggaccctgccacctgggcactgagcagagggacctcccccagctctcttagcaggtggagccccagggcctgggacagcctgccgctgccagcaacctcccactgctgcctagggtgcagcgcccactgtcaccctgccttctgaagaagcccacagggctcctaaggtgcaccccggtacctggaactgcagccttggcagtgactggacagctgggtgggggatgctccctgctggccctgggaaccttggacaggccacctcaaggcccctcggctgcccctcctccctgggcctgctggggcccctaggttctgcccatcaccccccgcccctgctggccttggtgctaaggaagtggggagagcaggctctccctggcaccgagggtgcccaccctctccctggtgtggccccgtcaacatcagccacagcccagccccattagtgggttagtgggtctgacctcagccccactcaggtgctcctgctggcctgcccaagccctgccctcagggagcttctgccttttaagaactgggcagaggccacagtcacctccccacacagagctgtccccactgccctgggtgccaggctgtccggagccaggcctacccagggaggatgcagagagctggtgcccaggatgtgcacccccatattccctctgccctgtggcctcagcccgctggcctctctgaccgtgaggctggctctcagccatcgggcaggtgcctggtcgggcctggcttagcccaggtggggtttggcagaagcgggcgggtgtggaagatattccatctggggccaaccccaggctgggcctgcgctgagcttctggagcgcaggtactgggtcttgctaagtgaactgtttcccaggaacacctctcgggcccatctgcgtctgaggctgggagtggcatctgaggccgggagtggcatctgaggccaggagtggcaggctggtgggctgggcgtggggttttctgggccctgcccagtactgccctggggacttggtgggctcctgggtcagcagcatcccacccctgggagtctggccagctgagccccagggtggcaggggcattatagcctggtggacatgtgccttcagggttcctccggggccaccttcctcaggccagtgctgggttcaaagggctgtgtgtgtgtgtgtgtgtgtgtgtgtgtgtgtgtgtatgtatatgtgtgtgggtgcacacatctgtcccatgtatgcagtgagacctgtctacctcccacaaggagcaagggctctgcccgccctctgctcattcctacccaggtagtgggaccccgggcccccttctgcctggcttgcctgcttctgccctttccagaggggtctcactgacagccagagacagcaggagaagggttggctgtggatcaaggaaggctgcccctgtaccctgtggggaaatggtgggtgcatggctggatgcagaggtggaaggccctgggccacaggcgagagtgggcgtgtcacctgtcccaggttcccagcaagtctgcagctgtgcagtcctggggtccctgaccctgtcgcccagggggcgtgctgtccagcaggggccctgccttgcaaggaacgtctcttccggcggctgggccgctcctgcctggtctgggctgtgtgtggcgccctttcctccttgtttgttcctctgtgttctgtgtgcgtcttaagcaataaagcgtggccgtggctcgcgtgcctgccctctgctcccttctgccttggtgcctgtgtgtgagtgtggaagccaggcaggagccgctggcccaggaaataactac

SEQ ID NO: 6093 - DNA, 356 bp, Homo sapiens
  source 1..356: mol_type = unassigned DNA
gctggaggccaaatgctgactgcagcaggaagcacagccgagctgtcagcttgcgcgatctctggcctcttcaactgcatcaccatccaccctctgaacattgcggccggcgtgtggatgatcatgaatgccttcatcttgttgctgtgtgaggcgcccttctgctgccagttcatcgagtttgcaaacacagtggcggagaaggtggaccggctgcgctcctggcagaaggctgtcttctactgcgggatggcggtcgttcccatcgtcatcagcctgaccctgaccacgctgctgggcaacgccatcgcctttgctacgggggtgctgtacggactctctgctctgggcaaaaa

SEQ ID NO: 6094 - DNA, 1252 bp, Homo sapiens
  source 1..1252: mol_type = unassigned DNA
tccctctcccacaaggcagcgcgccggctcggacgcggccggctaccgagccctttgtgagggctgtgagctgcgcctgacggtggcaccatgagcagctctgcgccgcccgcgcaggaagagggcatgacgtggtggtaccgctggctgtgtcgcctgtctggggtgctgggggcagtctcttgcgcgatctctggcctcttcaactgcatcaccatccaccctctgaacattgcggccggcgtgtggatgatcatgaatgccttcatcttgttgctgtgtgaggcgcccttctgctgccagttcatcgagtttgcaaacacagtggcggagaaggtggaccggctgcgctcctggcagaaggctgtcttctactgcgggatggcggtcgttcccatcgtcatcagcctgaccctgaccacgctgctgggcaacgccatcgcctttgctacgggggtgctgtacggactctctgctctgggcaaaaagggcgatgcgatctcctatgccaggatccagcagcagaggcagcaggcggatgaggagaagctcgcggagaccctggagggggagctgtgaagggctgggcgcccctccctccctgtcccctcttctggctctgtgtgggtccaagtgaggcctggactgtccacgctgaggcacagcctggagaggggcctttgcacgtgtccctacacctggagtcctctgctcctttctccagactggcttaagccaggagccactggctgctggtgtgagggtctgggctgctggacttgaggcagagcctgcagcagctgtgtggacactacccagccctactcctctgctgggtgggtctgcagatctcacaccacagacagggctgcctgtgacctgctgtgacctgggagcagcttcccctggagatgctggtcctggcttgaggggaggggcaagtgggaccctgccacctgggcactgagcagagggacctcccccagctctcttagcaggtggagccccagggcctgggacagcctgccgctgccagcaacctcccactgctgcctagggtgcagcgcccactgtcaccctgccttctgaagaagcccacagggctcctaaggtgcaccccggtacctggaactgcagccttggcagtgactggacagctgggtgggggatgctccctgctggccctgggaaccttggacaggccacctcaaggcccctcggctgcccctcctccctgggcctgctggggccc

SEQ ID NO: 6095 - DNA, 1033 bp, Homo sapiens
  source 1..1033: mol_type = unassigned DNA
aggcagcgcgccggctcggacgcggccggctaccgagccctttgtgagggctgtgagctgcgcctgacggtggcaccatgagcagctcaggtggggcgcccggggcgtccgccagctctgcgccgcccgcgcaggaagagggcatgacgtggtggtaccgctggctgtgtcgcctgtctggggtgctgggggcagtctcttgcgcgatctctggcctcttcaactgcatcaccatccaccctctgaacattgcggccggcgtgtggatgatcatgaatgccttcatcttgttgctgtgtgaggcgcccttctgctgccagttcatcgagtttgcaaacacagtggcggagaaggtggaccggctgcgctcctggcagaaggctgtcttctactgcgggatggcggtcgttcccatcgtcatcagcctgaccctgaccacgctgctgggcaacgccatcgcctttgctacgggggtgctgtacggactctctgctctgggcaaaaaagcccagactgaggctggttccttcgcagcccagcatcccagggagcctgggccattctcagaggggacaagacaggcctttgccaccccagcagttgtctctggggaaatcagaatgcctgcaggggcgatgcgatctcctatgccaggatccagcagcagaggcagcaggcggatgaggagaagctcgcggagaccctggagggggagctgtgaagggctgggcgcccctccctccctgtcccctcttctggctctgtgtgggtccaagtgaggcctggactgtccacgctgaggcacagcctggagaggggcctttgcacgtgtccctacacctggagtcctctgctcctttctccagactggcttaagccaggagccactggctgctggtgtgagggtctgggctgctggacttgaggcagagcctgcagcagctgtgtggacactacccagccctactcctctgctgggtgggtctgcagatctcacaccacagacagggctgcctgtgacctgctgtgacct

SEQ ID NO: 6096 - DNA, 1277 bp, Homo sapiens
  source 1..1277: mol_type = unassigned DNA
gtgagggctgtgagctgcgcctgacggtggcaccatgagcagctcaggtggggcgcccggggcgtccgccagctctgcgccgcccgcgcaggaagagggcatgacgtggtggtaccgctggctgtgtcgcctgtctggggtgctgggggcagtctcttgcgcgatctctggcctcttcaactgcatcaccatccaccctctgaacattgcggccggcgtgtggatgatgatggcggtcgttcccatcgtcatcagcctgaccctgaccacgctgctgggcaacgccatcgcctttgctacgggggtgctgtacggactctctgctctgggcaaaaaagcccagactgaggctggttccttcgcagcccagcatcccagggagcctgggccattctcagaggggacaagacaggcctttgccaccccagcagttgtctctggggaaatcagaatgcctgcaggggcgatgcgatctcctatgccaggatccagcagcagaggcagcaggcggatgaggagaagctcgcggagaccctggagggggagctgtgaagggctgggcgcccctccctccctgtcccctcttctggctctgtgtgggtccaagtgaggcctggactgtccacgctgaggcacagcctggagaggggcctttgcacgtgtccctacacctggagtcctctgctcctttctccagactggcttaagccaggagccactggctgctggtgtgagggtctgggctgctggacttgaggcagagcctgcagcagctgtgtggacactacccagccctactcctctgctgggtgggtctgcagatctcacaccacagacagggctgcctgtgacctgctgtgacctgggagcagcttcccctggagatgctggtcctggcttgaggggaggggcaagtgggaccctgccacctgggcactgagcagagggacctcccccagctctcttagcaggtggagccccagggcctgggacagcctgccgctgccagcaacctcccactgctgcctagggtgcagcgcccactgtcaccctgccttctgaagaagcccacagggctcctaaggtgcaccccggtacctggaactgcagccttggcagtgactggacagctgggtgggggatgctccctgctggccctgggaaccttggacaggccacctcaaggcccctcggctgcccctcctccctgggcctgctggggcccctaggttctgcccatcaccccccgcccctgctggccttggtgctaaggaagt

SEQ ID NO: 6097 - DNA, 777 bp, Homo sapiens
  source 1..777: mol_type = unassigned DNA
tctcttttgggggcggggtctagcaagagcagatatctccggagcatttggataatgtgacagttggaatgcagtgatgtcgactctttgcccaccgccatctccagctgttgccaagacagagattgctttaagtggcaaatcacctttattagcagctacttttgcttactgggacaatattcttggtcctagagtaaggcacatttgggctccaaagacagaacaggtacttctcagtgatggagaaataacttttcttgccaaccacactctaaatggagaaatccttcgaaatgcagagagtggtgctatagatgtaaagttttttgtcttgtctgaaaagggagtgattattgtttcattaatctttgatggaaactggaatggggatcgcagcacatatggactatcaattatacttccacagacagaacttagtttctacctcccacttcatagagtgtgtgttgatagattaacacatataatccggaaaggaagaatatggatgcataaggaaagacaagaaaatgtccagaagattatcttagaaggcacagagagaatggaagatcagggtcagagtattattccaatgcttactggagaagtgattcctgtaatggaactgctttcatctatgaaatcacacagtgttcctgaagaaatagatatagctgatacagtactcaatgatgatgatattggtgacagctgtcatgaaggctttcttctcaagtaagaatttttcttttcataaaagctggatgaagc

SEQ ID NO: 6098 - DNA, 1873 bp, Homo sapiens
  source 1..1873: mol_type = unassigned DNA
acgtaacctacggtgtcccgctaggaaagagaggtgcgtcaaacagcgacaagttccgcccacgtaaaagatgacgcttgatatctccggagcatttggataatgtgacagttggaatgcagtgatgtcgactctttgcccaccgccatctccagctgttgccaagacagagattgctttaagtggcaaatcacctttattagcagctacttttgcttactgggacaatattcttggtcctagagtaaggcacatttgggctccaaagacagaacaggtacttctcagtgatggagaaataacttttcttgccaaccacactctaaatggagaaatccttcgaaatgcagagagtggtgctatagatgtaaagttttttgtcttgtctgaaaagggagtgattattgtttcattaatctttgatggaaactggaatggggatcgcagcacatatggactatcaattatacttccacagacagaacttagtttctacctcccacttcatagagtgtgtgttgatagattaacacatataatccggaaaggaagaatatggatgcataaggaaagacaagaaaatgtccagaagattatcttagaaggcacagagagaatggaagatcagggtcagagtattattccaatgcttactggagaagtgattcctgtaatggaactgctttcatctatgaaatcacacagtgttcctgaagaaatagatatagctgatacagtactcaatgatgatgatattggtgacagctgtcatgaaggctttcttctcaagtaagaatttttcttttcataaaagctggatgaagcagataccatcttatgctcacctatgacaagatttggaagaaagaaaataacagactgtctacttagattgttctagggacattacgtatttgaactgttgcttaaatttgtgttatttttcactcattatatttctatatatatttggtgttattccatttgctatttaaagaaaccgagtttccatcccagacaagaaatcatggccccttgcttgattctggtttcttgttttacttctcattaaagctaacagaatcctttcatattaagttgtactgtagatgaacttaagttatttaggcgtagaacaaaattattcatatttatactgatctttttccatccagcagtggagtttagtacttaagagtttgtgcccttaaaccagactccctggattaatgctgtgtacccgtgggcaaggtgcctgaattctctatacacctatttcctcatctgtaaaatggcaataatagtaatagtacctaatgtgtagggttgttataagcattgagtaagataaataatataaagcacttagaacagtgcctggaacataaaaacacttaataatagctcatagctaacatttcctatttacatttcttctagaaatagccagtatttgttgagtgcctacatgttagttcctttactagttgctttacatgtattatcttatattctgttttaaagtttcttcacagttacagattttcatgaaattttacttttaataaaagagaagtaaaagtataaagtattcacttttatgttcacagtcttttcctttaggctcatgatggagtatcagaggcatgagtgtgtttaacctaagagccttaatggcttgaatcagaagcactttagtcctgtatctgttcagtgtcagcctttcatacatcattttaaatcccatttgactttaagtaagtcacttaatctctctacatgtcaatttcttcagctataaaatgatggtatttcaataaataaatacattaattaaatgatattatactgactaattgggctgttttaaggc

SEQ ID NO: 6099 - DNA, 3200 bp, Homo sapiens
  source 1..3200: mol_type = unassigned DNA
gcgcaggcggtggcgagtggatatctccggagcatttggataatgtgacagttggaatgcagtgatgtcgactctttgcccaccgccatctccagctgttgccaagacagagattgctttaagtggcaaatcacctttattagcagctacttttgcttactgggacaatattcttggtcctagagtaaggcacatttgggctccaaagacagaacaggtacttctcagtgatggagaaataacttttcttgccaaccacactctaaatggagaaatccttcgaaatgcagagagtggtgctatagatgtaaagttttttgtcttgtctgaaaagggagtgattattgtttcattaatctttgatggaaactggaatggggatcgcagcacatatggactatcaattatacttccacagacagaacttagtttctacctcccacttcatagagtgtgtgttgatagattaacacatataatccggaaaggaagaatatggatgcataaggaaagacaagaaaatgtccagaagattatcttagaaggcacagagagaatggaagatcagggtcagagtattattccaatgcttactggagaagtgattcctgtaatggaactgctttcatctatgaaatcacacagtgttcctgaagaaatagatatagctgatacagtactcaatgatgatgatattggtgacagctgtcatgaaggctttcttctcaatgccatcagctcacacttgcaaacctgtggctgttccgttgtagtaggtagcagtgcagagaaagtaaataagatagtcagaacattatgcctttttctgactccagcagagagaaaatgctccaggttatgtgaagcagaatcatcatttaaatatgagtcagggctctttgtacaaggcctgctaaaggattcaactggaagctttgtgctgcctttccggcaagtcatgtatgctccatatcccaccacacacatagatgtggatgtcaatactgtgaagcagatgccaccctgtcatgaacatatttataatcagcgtagatacatgagatccgagctgacagccttctggagagccacttcagaagaagacatggctcaggatacgatcatctacactgacgaaagctttactcctgatttgaatatttttcaagatgtcttacacagagacactctagtgaaagccttcctggatcaggtctttcagctgaaacctggcttatctctcagaagtactttccttgcacagtttctacttgtccttcacagaaaagccttgacactaataaaatatatagaagacgatacgcagaagggaaaaaagccctttaaatctcttcggaacctgaagatagaccttgatttaacagcagagggcgatcttaacataataatggctctggctgagaaaattaaaccaggcctacactcttttatctttggaagacctttctacactagtgtgcaagaacgagatgttctaatgactttttaaatgtgtaacttaataagcctattccatcacaatcatgatcgctggtaaagtagctcagtggtgtggggaaacgttcccctggatcatactccagaattctgctctcagcaattgcagttaagtaagttacactacagttctcacaagagcctgtgaggggatgtcaggtgcatcattacattgggtgtctcttttcctagatttatgcttttgggatacagacctatgtttacaatataataaatattattgctatcttttaaagatataataataggatgtaaacttgaccacaactactgtttttttgaaatacatgattcatggtttacatgtgtcaaggtgaaatctgagttggcttttacagatagttgactttctatcttttggcattctttggtgtgtagaattactgtaatacttctgcaatcaactgaaaactagagcctttaaatgatttcaattccacagaaagaaagtgagcttgaacataggatgagctttagaaagaaaattgatcaagcagatgtttaattggaattgattattagatcctactttgtggatttagtccctgggattcagtctgtagaaatgtctaatagttctctatagtccttgttcctggtgaaccacagttagggtgttttgtttattttattgttcttgctattgttgatattctatgtagttgagctctgtaaaaggaaattgtattttatgttttagtaattgttgccaactttttaaattaattttcattatttttgagccaaattgaaatgtgcacctcctgtgccttttttctccttagaaaatctaattacttggaacaagttcagatttcactggtcagtcattttcatcttgttttcttcttgctaagtcttaccatgtacctgctttggcaatcattgcaactctgagattataaaatgccttagagaatatactaactaataagatctttttttcagaaacagaaaatagttccttgagtacttccttcttgcatttctgcctatgtttttgaagttgttgctgtttgcctgcaataggctataaggaatagcaggagaaattttactgaagtgctgttttcctaggtgctactttggcagagctaagttatcttttgttttcttaatgcgtttggaccattttgctggctataaaataactgattaatataattctaacacaatgttgacattgtagttacacaaacacaaataaatattttatttaaaattctggaagtaatataaaagggaaaatatatttataagaaagggataaaggtaatagagcccttctgccccccacccaccaaatttacacaacaaaatgacatgttcgaatgtgaaaggtcataatagctttcccatcatgaatcagaaagatgtggacagcttgatgttttagacaaccactgaactagatgactgttgtactgtagctcagtcatttaaaaaatatataaatactaccttgtagtgtcccatactgtgttttttacatggtagattcttatttaagtgctaactggttattttctttggctggtttattgtactgttatacagaatgtaagttgtacagtgaaataagttattaaagcatgtgtaaacattgttatatatcttttctcctaaatggagaattttgaataaaatatatttgaaatttt

SEQ ID NO: 6100 - DNA, 713 bp, Homo sapiens
  source 1..713: mol_type = unassigned DNA
agcgcagcgggggcgggaaggttgtagtgccgcgagttgagctcctcttgcctaagtggtcgcgccccctttaagagcagcgattgtaaggagaggcggtcccggtgtcctcgggtcccaggttttcaaaacaaaaatagagttgcaatcttggcagaactggacaaagagaaaagaaaactacttatgcagaaccagtcttcaacaaatcatcctggagctagcatgctcatgcacattcatctggatacttcatcactcaagactctgcatttgggaaccttattcttcctgttttacctcgccttgacccagaatgaagaaaacatttgcgatggaaaagtgactttgtaatatcaaatgccaaagctactatcattcagtgctacatgaactgtgactttaagaattttggtgaactttgatattttttgtttgtctgaaagaaaggaatgtgtaagtgaaagctgaaagaagaataaccaggatgatgagagctgtggaagctgtatcgtccaaggaattgattatgtaccgtgactgtaacttttttgtaatgctgtttaactctcaatcagactgtgaactggatggtcacgaagtcattccccaactcctagcaagtttgactgaatatatcatgtccacagtagattttcaagaatcatttatagtacttaactttaaagaaacaaggctgcttttaaaaaatg

SEQ ID NO: 6101 - DNA, 874 bp, Homo sapiens
  source 1..874: mol_type = unassigned DNA
ggggtttccgctccctggggcgcacgtcagtcaggaggcggaagcgcagcgggggcgggaaggttgtagtgccgcgagttgagctcctcttgcctaagtggtcgcgccccctttaagagcagcgattgtaaggagaggcggtcccggtgtcctcgggtcccaggttttcaaaacaaaaatagagttgcaatcttggcagaactggacaaagagaaaagaaaactacttatgcagaaccagtcttcaacaaatcatcctggagctagcattgcactctcgagaccctctcttaataaggacttccgggatcacgctgagcagcagcatattgcagcccaacagaaggcagctttgcagcatgctcatgcacattcatctggatacttcatcactcaagactctgcatttgggaaccttattcttcctgttttacctcgccttgacccagaatgaagaaaacatttgcgatggaaaagtgactttgtaatatcaaatgccaaagctactatcattcagtgctacatgaactgtgactttaagaattttggtgaactttgatattttttgtttgtctgaaagaaaggaatgtgtaagtgaaagctgaaagaagaataaccaggatgatgagagctgtggaagctgtatcgtccaaggaattgattatgtaccgtgactgtaacttttttgtaatgctgtttaactctcaatcagactgtgaactggatggtcacgaagtcattccccaactcctagcaagtttgactgaatatatcatgtccacagtagattttcaagaatcatttatagtacttaactttaaagaaacaaggctgcttttaaaaaatgaactaataggcttaaatcaattgcatcc

SEQ ID NO: 6102 - DNA, 1425 bp, Homo sapiens
  source 1..1425: mol_type = unassigned DNA
ggaagcgcagcgggggcgggaaggttgtagtgccgcgagttgagctcctcttgcctaagtggtcgcgccccctttaagagcagcgattgtaaggagaggcggtcccggtgtcctcgggtcccaggtgattgtgaagtgctgaccaattgccactggacatacttgaaacaaaataggaaaatggcagcaaactcttcaggacaaggttttcaaaacaaaaatagagttgcaatcttggcagaactggacaaagagaaaagaaaactacttatgcagaaccagtcttcaacaaatcatcctggagctagcatgctcatgcacattcatctggatacttcatcactcaagactctgcatttgggaaccttattcttcctgttttacctcgccttgacccagaatgaagaaaacatttgcgatggaaaagtgactttgtaatatcaaatgccaaagctactatcattcagtgctacatgaactgtgactttaagaattttggtgaactttgatattttttgtttgtctgaaagaaaggaatgtgtaagtgaaagctgaaagaagaataaccaggatgatgagagctgtggaagctgtatcgtccaaggaattgattatgtaccgtgactgtaacttttttgtaatgctgtttaactctcaatcagactgtgaactggatggtcacgaagtcattccccaactcctagcaagtttgactgaatatatcatgtccacagtagattttcaagaatcatttatagtacttaactttaaagaaacaaggctgcttttaaaaaatgaactaataggcttaaatcaattgcatccatatttgctgtttataggattgctatcagtataccttttgcgtttatagtcaacatgtatcatcctgaaatattctttctggacttataactacttccccctttttcactttaaaacaaacctcaagaataaattactaaccagtcttaaccatcttttataaacatatgctcttataaatgttgtgactagatgcaattaaaaataatagggaatgtggtaggtttttaatttgtacatcctcttatttagtgttaccacataaatgatgagtttgtgtggttctgttttccatttttgttctaactgaaaactttttggctgggcacggtgcctcatgcctgtaatcccagcactttgggaggccaaggcgggcagatcacttgagatcaggagtttgagaccagcctggccaacatggtgaaaccctgtctctactaaaagtataaaaaattagccatgtgtggtggcacacgcctgtaatcccagctactcaggaggctgaggcaggagaatcgcttgaacctgggaggcaggggttgcagtgagctgagacggtgtcactgcactccagcctgggtgacagtgagtctttgtctc

SEQ ID NO: 6103 - DNA, 1653 bp, Homo sapiens
  source 1..1653: mol_type = unassigned DNA
tttggaaaaaaaagtgacgtctgcactgaggtggccgctaaagtgcgaatcacgacgggcggtggccgttgggtcccggcgggaggcggggtttccgctccctggggcgcacgtcagtcaggaggcggaagcgcagcgggggcgggaaggttgtagtgccgcgagttgagctcctcttgcctaagtggtcgcgccccctttaagagcagcgattgtaaggagaggcggtcccggtgtcctcgggtcccaggtgattgtgaagtgctgaccaattgccactggacatacttgaaacaaaataggaaaatggcagcaaactcttcaggacaaggttttcaaaacaaaaatagagttgcaatcttggcagaactggacaaagagaaaagaaaactacttatgcagaaccagtcttcaacaaatcatcctggagctagcattgcactctcgagaccctctcttaataaggacttccgggatcacgctgagcagcagcatattgcagcccaacagaaggcagctttgcagcatgctcatgcacattcatctggatacttcatcactcaagactctgcatttgggaaccttattcttcctgttttacctcgccttgacccagaatgaagaaaacatttgcgatggaaaagtgactttgtaatatcaaatgccaaagctactatcattcagtgctacatgaactgtgactttaagaattttggtgaactttgatattttttgtttgtctgaaagaaaggaatgtgtaagtgaaagctgaaagaagaataaccaggatgatgagagctgtggaagctgtatcgtccaaggaattgattatgtaccgtgactgtaacttttttgtaatgctgtttaactctcaatcagactgtgaactggatggtcacgaagtcattccccaactcctagcaagtttgactgaatatatcatgtccacagtagattttcaagaatcatttatagtacttaactttaaagaaacaaggctgcttttaaaaaatgaactaataggcttaaatcaattgcatccatatttgctgtttataggattgctatcagtataccttttgcgtttatagtcaacatgtatcatcctgaaatattctttctggacttataactacttccccctttttcactttaaaacaaacctcaagaataaattactaaccagtcttaaccatcttttataaacatatgctcttataaatgttgtgactagatgcaattaaaaataatagggaatgtggtaggtttttaatttgtacatcctcttatttagtgttaccacataaatgatgagtttgtgtggttctgttttccatttttgttctaactgaaaactttttggctgggcacggtgcctcatgcctgtaatcccagcactttgggaggccaaggcgggcagatcacttgagatcaggagtttgagaccagcctggccaacatggtgaaaccctgtctctactaaaagtataaaaaattagccatgtgtggtggcacacgcctgtaatcccagctactcaggaggctgaggcaggagaatcgcttgaacctgggaggcaggggttgcagtgagctgagacggtgtcactgcactccagcctgggtgacagtgagtctttgtctcaaagaaaaaaa

SEQ ID NO: 6104 - DNA, 3091 bp, Homo sapiens
  source 1..3091: mol_type = unassigned DNA
gactcctggagagcggtcgcgccggaggccgcgggggccggagcggagcagccgcggctgaggttcccgagtcgccgctcggggctgcgctccgccgccgggaccccggcctctggccgcgccggctccggcctccgggggggccggggccgccgggacatggtgccagtcgcaccccttccccgccgccgctgagctcgccggccgcgcccgggctgggacgtccgagcgggaagatgttttccgccctgaagaagctggtggggtcggaccaggccccgggccgggacaagaacatccccgccgggctgcagtccatgaaccaggcgttgcagaggcgcttcgccaagggggtgcagtacaacatgaagatagtgatccggggagacaggaacacgggcaagacagcgctgtggcaccgcctgcagggccggccgttcgtggaggagtacatccccacacaggagatccaggtcaccagcatccactggagctacaagaccacggatgacatcgtgaaggttgaagtctgggatgtagtagacaaaggaaaatgcaaaaagcgaggcgacggcttaaagatggagaacgacccccaggaggcggagtctgaaatggccctggatgctgagttcctggacgtgtacaagaactgcaacggggtggtcatgatgttcgacattaccaagcagtggaccttcaattacattctccgggagcttccaaaagtgcccacccacgtgccagtgtgcgtgctgggaaactaccgggacatgggcgagcaccgagtcatcctgccggacgacgtgcgtgacttcatcgacaacctggacagacctccaggttcctcctacttccgctatgctgagtcttccatgaagaacagcttcggcctaaagtaccttcataagttcttcaatatcccatttttgcagcttcagagggagacgctgttgcggcagctggagacgaaccagctggacatggacgccacgctggaggagctgtcggtgcagcaggagacggaggaccagaactacggcatcttcctggagatgatggaggctcgcagccgtggccatgcgtccccactggcggccaacgggcagagcccatccccgggctcccagtcaccagtggtgcctgcaggcgctgtgtccacggggagctccagccccggcacaccccagcccgccccacagctgcccctcaatgccgccccaccatcctctgtgccccctgtaccaccctcagaggccctgcccccacctgcgtgcccctcagcccccgccccacggcgcagcatcatctctaggctgtttgggacgtcacctgccaccgaggcagcccctccacctccagagccagtcccggccgcagagggcccagcaacggtccagagtgtggaggactttgttcctgacgaccgcctggaccgcagcttcctggaagacacaacccccgccagggacgagaagaaggtgggggccaaggctgcccagcaggacagcgacagtgatggggaggccctgggcggcaacccgatggtggcagggttccaggacgatgtggacctcgaagaccagccacgtgggagtcccccgctgcctgcaggccccgtccccagtcaagacatcactctttcgagtgaggaggaagcagaagtggcagctcccacaaaaggccctgccccagctccccagcagtgctcagagccagagaccaagtggtcctccataccagcttcgaagccacggagggggacagctcccacgaggaccgcagcacccccctggccaggcggtgtctctgttcgcacaggtccggagaagcgcagcagcaccaggccccctgctgagatggagccggggaagggtgagcaggcctcctcgtcggagagtgaccccgagggacccattgctgcacaaatgctgtccttcgtcatggatgaccccgactttgagagcgagggatcagacacacagcgcagggcggatgactttcccgtgcgagatgacccctccgatgtgactgacgaggatgagggccctgccgagccgcccccaccccccaagctccctctccccgccttcagactgaagaatgactcggacctcttcgggctggggctggaggaggccggacccaaggagagcagtgaggaaggtaaggagggcaaaaccccctctaaggagaagaagaagaagaagaaaaaaggcaaagaggaagaagaaaaagctgccaagaagaagagcaaacacaagaagagcaaggacaaggaggagggcaaggaggagcggcgacggcggcagcagcggcccccgcgcagcagggagaggacggctgccgatgagctggaggctttcctggggggcggggccccgggcggccgccaccctgggggtggcgactacgaggagctctaggccggcgtgggcagtggccgccctggggcggggggcgtgcctgtcactgcctggggaggcatttgcctctgtaccatcgcctttgccgctgccccgtggctgccgtgtgcgcttctgagctggaagaggccgggcattggtggtccccaggctgggccctgcaggtgctgggccttcaggcccagtgtgagcctgctctgcaagaagggaggggacagctggcttcagccaggctcggtggacaccctggccctctcggggcagagccgccagtgtttctcagggatgtgactgaggcccaggagggacctgtgagggtctgtttacagaggctgggcaggggccgcttggctgtggggtgtgcgctgccccggcacctgcttgccctccgcgctcatctggggccgcagcatgcctatggttccgcttccggccgggagccctgaacacgggtgtgcagactcaccctaaagggcggcccaggccccacgctagaaggctggcgagaccgaaggcagcatgtgaggcctctcctgggagtgggggttgtgtttcccacagtggcctcagctgcgcccccgctcaggtgagcccgaaggcaggagccgggaggcactcctcccaaacactccactcagaccataaagcactcctgtttcactctg

SEQ ID NO: 6105 - DNA, 1820 bp, Homo sapiens
  source 1..1820: mol_type = unassigned DNA
cgccggccgcgcccgggctgggacgtccgagcgggaagatgttttccgccctgaagaagctggtggggtcggaccaggccccgggccgggacaagaacatccccgccgggctgcagtccatgaaccaggcgttgcagaggcgcttcgccaagggggtgcagtacaacatgaagatagtgatccggggagacaggaacacgggcaagacagcgctgtggcaccgcctgcagggccggccgttcgtggaggagtacatccccacacaggagatccaggtcaccagcatccactggagctacaagaccacggatgacatcgtgaaggttgaagtctgggatgtagtagacaaaggaaaatgcaaaaagcgaggcgacggcttaaagatggagaacgacccccaggaggcggagtctgaaatggccctggatgctgagttcctggacgtgtacaagaactgcaacggggtggtcatgatgttcgacattaccaagcagtggaccttcaattacattctccgggagcttccaaaagtgcccacccacgtgccagtgtgcgtgctgggaaactaccgggacatgggcgagcaccgagtcatcctgccggacgacgtgcgtgacttcatcgacaacctggacagacctccaggttcctcctacttccgctatgctgagtcttccatgaagaacagcttcggcctaaagtaccttcataagttcttcaatatcccatttttgcagcttcagagggagacgctgttgcggcagctggagacgaaccagctggacatggacgccacgctggaggagctgtcggtgcagcaggagacggaggaccagaactacggcatcttcctggagatgatggaggctcgcagccgtggccatgcgtccccactggcggccaacgggcagagcccatccccgggctcccagtcaccagtggtgcctgcaggcgctgtgtccacggggagctccagccccggcacaccccagcccgccccacagctgcccctcaatgccgccccaccatcctctgtgccccctgtaccaccctcagaggccctgcccccacctgcgtgcccctcagcccccgccccacggcgcagcatcatctctaggccgccaccctgggggtggcgactacgaggagctctaggccggcgtgggcagtggccgccctggggcggggggcgtgcctgtcactgcctggggaggcatttgcctctgtaccatcgcctttgccgctgccccgtggctgccgtgtgcgcttctgagctggaagaggccgggcattggtggtccccaggctgggccctgcaggtgctgggccttcaggcccagtgtgagcctgctctgcaagaagggaggggacagctggcttcagccaggctcggtggacaccctggccctctcggggcagagccgccagtgtttctcagggatgtgactgaggcccaggagggacctgtgagggtctgtttacagaggctgggcaggggccgcttggctgtggggtgtgcgctgccccggcacctgcttgccctccgcgctcatctggggccgcagcatgcctatggttccgcttccggccgggagccctgaacacgggtgtgcagactcaccctaaagggcggcccaggccccacgctagaaggctggcgagaccgaaggcagcatgtgaggcctctcctgggagtgggggttgtgtttcccacagtggcctcagctgcgcccccgctcaggtgagcccgaaggcaggagccgggaggcactcctcccaaacactccactcagaccataaagcactcctgtttcactctg

SEQ ID NO: 6106 - DNA, 3133 bp, Homo sapiens
  source 1..3133: mol_type = unassigned DNA
cctcccgtcccgccgagccggcgccaagatggcggcgctgactcctggagagcggtcgcgccggaggccgcgggggccggagcggagcagccgcggctgaggttcccgagtcgccgctcggggctgcgctccgccgccgggaccccggcctctggccgcgccggctccggcctccgggggggccggggccgccgggacatggtgccagtcgcaccccttccccgccgccgctgagctcgccggccgcgcccgggctgggacgtccgagcgggaagatgttttccgccctgaagaagctggtggggtcggaccaggccccgggccgggacaagaacatccccgccgggctgcagtccatgaaccaggcgttgcagaggcgcttcgccaagggggtgcagtacaacatgaagatagtgatccggggagacaggaacacgggcaagacagcgctgtggcaccgcctgcagggccggccgttcgtggaggagtacatccccacacaggagatccaggtcaccagcatccactggagctacaagaccacggatgacatcgtgaaggttgaagtctgggatgtagtagacaaaggaaaatgcaaaaagcgaggcgacggcttaaagatggagaacgacccccaggaggcggagtctgaaatggccctggatgctgagttcctggacgtgtacaagaactgcaacggggtggtcatgatgttcgacattaccaagcagtggaccttcaattacattctccgggagcttccaaaagtgcccacccacgtgccagtgtgcgtgctgggaaactaccgggacatgggcgagcaccgagtcatcctgccggacgacgtgcgtgacttcatcgacaacctggacagcagacctccaggttcctcctacttccgctatgctgagtcttccatgaagaacagcttcggcctaaagtaccttcataagttcttcaatatcccatttttgcagcttcagagggagacgctgttgcggcagctggagacgaaccagctggacatggacgccacgctggaggagctgtcggtgcagcaggagacggaggaccagaactacggcatcttcctggagatgatggaggctcgcagccgtggccatgcgtccccactggcggccaacgggcagagcccatccccgggctcccagtcaccagtggtgcctgcaggcgctgtgtccacggggagctccagccccggcacaccccagcccgccccacagctgcccctcaatgccgccccaccatcctctgtgccccctgtaccaccctcagaggccctgcccccacctgcgtgcccctcagcccccgccccacggcgcagcatcatctctaggctgtttgggacgtcacctgccaccgaggcagcccctccacctccagagccagtcccggccgcagagggcccagcaacggtccagagtgtggaggactttgttcctgacgaccgcctggaccgcagcttcctggaagacacaacccccgccagggacgagaagaaggtgggggccaaggctgcccagcaggacagcgacagtgatggggaggccctgggcggcaacccgatggtggcagggttccaggacgatgtggacctcgaagaccagccacgtgggagtcccccgctgcctgcaggccccgtccccagtcaagacatcactctttcgagtgaggaggaagcagaagtggcagctcccacaaaaggccctgccccagctccccagcagtgctcagagccagagaccaagtggtcctccataccagcttcgaagccacggagggggacagctcccacgaggaccgcagcacccccctggccaggcggtgtctctgttcgcacaggtccggagaagcgcagcagcaccaggccccctgctgagatggagccggggaagggtgagcaggcctcctcgtcggagagtgaccccgagggacccattgctgcacaaatgctgtccttcgtcatggatgaccccgactttgagagcgagggatcagacacacagcgcagggcggatgactttcccgtgcgagatgacccctccgatgtgactgacgaggatgagggccctgccgagccgcccccaccccccaagctccctctccccgccttcagactgaagaatgactcggacctcttcgggctggggctggaggaggccggacccaaggagagcagtgaggaaggtaaggagggcaaaaccccctctaaggagaagaagaagaagaagaaaaaaggcaaagaggaagaagaaaaagctgccaagaagaagagcaaacacaagaagagcaaggacaaggaggagggcaaggaggagcggcgacggcggcagcagcggcccccgcgcagcagggagaggacggctgccgatgagctggaggctttcctggggggcggggccccgggcggccgccaccctgggggtggcgactacgaggagctctaggccggcgtgggcagtggccgccctggggcggggggcgtgcctgtcactgcctggggaggcatttgcctctgtaccatcgcctttgccgctgccccgtggctgccgtgtgcgcttctgagctggaagaggccgggcattggtggtccccaggctgggccctgcaggtgctgggccttcaggcccagtgtgagcctgctctgcaagaagggaggggacagctggcttcagccaggctcggtggacaccctggccctctcggggcagagccgccagtgtttctcagggatgtgactgaggcccaggagggacctgtgagggtctgtttacagaggctgggcaggggccgcttggctgtggggtgtgcgctgccccggcacctgcttgccctccgcgctcatctggggccgcagcatgcctatggttccgcttccggccgggagccctgaacacgggtgtgcagactcaccctaaagggcggcccaggccccacgctagaaggctggcgagaccgaaggcagcatgtgaggcctctcctgggagtgggggttgtgtttcccacagtggcctcagctgcgcccccgctcaggtgagcccgaaggcaggagccgggaggcactcctcccaaacactccactcagaccataaagcactcctgtttcactctg

SEQ ID NO: 6107 - DNA, 1603 bp, Homo sapiens
  source 1..1603: mol_type = unassigned DNA
cctcccgtcccgccgagccggcgccaagatggcggcgctgactcctggagagcggtcgcgccggaggccgcgggggccggagcggagcagccgcggctgaggttcccgagtcgccgctcggggctgcgctccgccgccgggaccccggcctctggccgcgccggctccggcctccgggggggccggggccgccgggacatggtgccagtcgcaccccttccccgccgccgctgagctcgccggccgcgcccgggctgggacgtccgagcgggaagatgttttccgccctgaagaagctggtggggtcggaccaggccccgggccgggacaagaacatccccgccgggctgcagtccatgaaccaggcgttgcagaggcgcttcgccaagggggtgcagtacaacatgaagatagtgatccggggagacaggaacacgggcaagacagcgctgtggcaccgcctgcagggccggccgttcgtggaggagtacatccccacacaggagatccaggtcaccagcatccactggagctacaagaccacggatgacatcgtgaaggttgaagtctgggatgtagtagacaaaggaaaatgcaaaaagcgaggcgacggcttaaagatggagaacgacccccaggaggcggagtctgaaatggccctggatgctgagttcctggacgtgtacaagaactgcaacggggtggtcatgatgttcgacattaccaagcagtggaccttcaattacattctccgggagcttccaaaagtgcccacccacgtgccagtgtgcgtgctgggaaactaccgggacatgggcgagcaccgagtcatcctgccggacgacgtgcgtgacttcatcgacaacctggacagacctccaggttcctcctacttccgctatgctgagtcttccatgaagaacagcttcggcctaaagtaccttcataagttcttcaatatcccatttttgcagcttcagaaggatgtcaggcttgcccaggaaaggggctgtgctgtcgtcctggtgtcagaagaagtgaggatgcctgcaggctgggactgctgctggggacgtttgggttggaaggaaggcggcagtcagacttgtcctgtgccggcactgctggggaggcccctccttcctgcagagccgtcccctcatcactgggttgattactccttagagagctccccactgctcagctgctccattccctaatggtttgccctccaaacccttccaaagcctcccagggagagaacgggaccctggacagagtcttgagctggaagcgtagggctgagctgtgtgtgactatccttttgctatggatgtgttcaagcagatctgatgtcctcgcctgtctcagcagcgggacccctgtttcctctttgtcttgcccctggattgcctggaagcaaatttcaggccttctttatgtcacctaaaaatatttcaaacacatctctaaaaaaatcagttgtttttttaacctgaccgtagtacctaatgtaataccgcatgttaaactcacagaaggtttttcttggagaaataagccacaataacaaattgaaaaaataaaattcccaaagagttct

SEQ ID NO: 6108 - DNA, 1841 bp, Homo sapiens
  source 1..1841: mol_type = unassigned DNA
cctcccgtcccgccgagccggcgccaagatggcggcgctgactcctggagagcggtcgcgccggaggccgcgggggccggagcggagcagccgcggctgaggttcccgagtcgccgctcggggctgcgctccgccgccgggaccccggcctctggccgcgccggctccggcctccgggggggccggggccgccgggacatggtgccagtcgcaccccttccccgccgccgctgagctcgccggccgcgcccgggctgggacgtccgagcgggaagatgttttccgccctgaagaagctggtggggtcggaccaggccccgggccgggacaagaacatccccgccgggctgcagtccatgaaccaggcgttgcagaggcgcttcgccaagggggtgcagtacaacatgaagatagtgatccggggagacaggaacacgggcaagacagcgctgtggcaccgcctgcagggccggccgttcgtggaggagtacatccccacacaggagatccaggtcaccagcatccactggagctacaagaccacggatgacatcgtgaaggttgaagtctgggatgtagtagacaaaggaaaatgcaaaaagcgaggcgacggcttaaagatggagaacgacccccaggaggcggagtctgaaatggccctggatgctgagttcctggacgtgtacaagaactgcaacggggtggtcatgatgttcgacattaccaagcagtggaccttcaattacattctccgggagcttccaaaagtgcccacccacgtgccagtgtgcgtgctgggaaactaccgggacatgggcgagcaccgagtcatcctgccggacgacgtgcgtgacttcatcgacaacctggacagcagacctccaggttcctcctacttccgctatgctgagtcttccatgaagaacagcttcggcctaaagtaccttcataagttcttcaatatcccatttttgcagcttcagagggagacgctgttgcggcagctggagacgaaccagctggacatggacgccacgctggaggagctgtcggtgcagcaggagacggaggaccagaactacggcatcttcctggagatgatggaggctcgcagccgtggccatgcgtccccactggcggccaacgggcagagcccatccccgggctcccagtcaccagtggtgcctgcaggcgctgtgtccacggggagctccagccccggcacaccccagcccgccccacagctgcccctcaatgccgccccaccatcctctgtgccccctgtaccaccctcagaggccctgcccccacctgcgtgcccctcagcccccgccccacggcgcagcatcatctctaggccgccaccctgggggtggcgactacgaggagctctaggccggcgtgggcagtggccgccctggggcggggggcgtgcctgtcactgcctggggaggcatttgcctctgtaccatcgcctttgccgctgccccgtggctgccgtgtgcgcttctgagctggaagaggccgggcattggtggtccccaggctgggccctgcaggtgctgggccttcaggcccagtgtgagcctgctctgcaagaagggaggggacagctggcttcagccaggctcggtggacaccctggccctctcggggcagagccgccagtgtttctcagggatgtgactgaggcccaggagggacctgtgagggtctgtttacagaggctgggcaggggccgcttggctgtggggtgtgcgctgccccggcacctgcttgccctccgcgctcatctggggccgcagcatgcctatggttccgcttccggccgggagccctga

SEQ ID NO: 6109 - DNA, 3395 bp, Homo sapiens
  source 1..3395: mol_type = unassigned DNA
ttttcactgcaaaaaaaaaaaaactagtgggttactagtgggaggcaaagatgagtttgagctgccacgtggtgacagctgacacttggactgctgtgcaggaacagccgtggagttgctgggcatctgctgctctctagggcctgggagggtggtgctgggctgacaggacacagagcccacagggccggcgcacagaagctctacctgccaccgcaccctcttcctggtttggggtgaggctgatggcagcgttcatgcccctctgctcaggcgacgtggatgtgattggtgtgggggcagatgcctggctgtgtgagggccccgggcgtgcctctcccctctggttctcccttccccttggaatccttgggtgggcgggaggctccatccatcagctcccccagtccccagcacgccccacaacagagcacagtcatgggagctcaggaggagtggttggcaccagcaggcccagctgcgatggtgcggtgtgaggcaggcctggggcctctcaggtggctccgaagggagggtccggcctccgccctcagtgattacttagattctgctccctcaaagtgaactagaggccagtcactggatgaagaaacagggtcagaaggtgacacaggcgggcccattcattcgcacctgtcagcagaagcgtactccatgggcaaaaacacagacatcgacccagccaggagggtccccttccaccacggatgacatcgtgaaggttgaagtctgggatgtagtagacaaaggggttttgtttgttgtcccagtccgtgactccaagactgggacccccagagttcccaggatggtctggagcctttatcctcaggaaaatgcaaaaagcgaggcgacggcttaaagatggagaacgacccccaggaggcggagtctgaaatggccctggatgctgagttcctggacgtgtacaagaactgcaacggggtggtcatgatgttcgacattaccaagcagtggaccttcaattacattctccgggagcttccaaaagtgcccacccacgtgccagtgtgcgtgctgggaaactaccgggacatgggcgagcaccgagtcatcctgccggacgacgtgcgtgacttcatcgacaacctggacagacctccaggttcctcctacttccgctatgctgagtcttccatgaagaacagcttcggcctaaagtaccttcataagttcttcaatatcccatttttgcagcttcagagggagacgctgttgcggcagctggagacgaaccagctggacatggacgccacgctggaggagctgtcggtgcagcaggagacggaggaccagaactacggcatcttcctggagatgatggaggctcgcagccgtggccatgcgtccccactggcggccaacgggcagagcccatccccgggctcccagtcaccagtggtgcctgcaggcgctgtgtccacggggagctccagccccggcacaccccagcccgccccacagctgcccctcaatgccgccccaccatcctctgtgccccctgtaccaccctcagaggccctgcccccacctgcgtgcccctcagcccccgccccacggcgcagcatcatctctaggctgtttgggacgtcacctgccaccgaggcagcccctccacctccagagccagtcccggccgcagagggcccagcaacggtccagagtgtggaggactttgttcctgacgaccgcctggaccgcagcttcctggaagacacaacccccgccagggacgagaagaaggtgggggccaaggctgcccagcaggacagcgacagtgatggggaggccctgggcggcaacccgatggtggcagggttccaggacgatgtggacctcgaagaccagccacgtgggagtcccccgctgcctgcaggccccgtccccagtcaagacatcactctttcgagtgaggaggaagcagaagtggcagctcccacaaaaggccctgccccagctccccagcagtgctcagagccagagaccaagtggtcctccataccagcttcgaagccacggagggggacagctcccacgaggaccgcagcacccccctggccaggcggtgtctctgttcgcacaggtccggagaagcgcagcagcaccaggccccctgctgagatggagccggggaagggtgagcaggcctcctcgtcggagagtgaccccgagggacccattgctgcacaaatgctgtccttcgtcatggatgaccccgactttgagagcgagggatcagacacacagcgcagggcggatgactttcccgtgcgagatgacccctccgatgtgactgacgaggatgagggccctgccgagccgcccccaccccccaagctccctctccccgccttcagactgaagaatgactcggacctcttcgggctggggctggaggaggccggacccaaggagagcagtgaggaaggtaaggagggcaaaaccccctctaaggagaagaagaagaagaagaaaaaaggcaaagaggaagaagaaaaagctgccaagaagaagagcaaacacaagaagagcaaggacaaggaggagggcaaggaggagcggcgacggcggcagcagcggcccccgcgcagcagggagaggacggctgccgatgagctggaggctttcctggggggcggggccccgggcggccgccaccctgggggtggcgactacgaggagctctaggccggcgtgggcagtggccgccctggggcggggggcgtgcctgtcactgcctggggaggcatttgcctctgtaccatcgcctttgccgctgccccgtggctgccgtgtgcgcttctgagctggaagaggccgggcattggtggtccccaggctgggccctgcaggtgctgggccttcaggcccagtgtgagcctgctctgcaagaagggaggggacagctggcttcagccaggctcggtggacaccctggccctctcggggcagagccgccagtgtttctcagggatgtgactgaggcccaggagggacctgtgagggtctgtttacagaggctgggcaggggccgcttggctgtggggtgtgcgctgccccggcacctgcttgccctccgcgctcatctggggccgcagcatgcctatggttccgcttccggccgggagccctgaacacgggtgtgcagactcaccctaaagggcggcccaggccccacgctagaaggctggcgagaccgaaggcagcatgtgaggcctctcctgggagtgggggttgtgtttcccacagtggcctcagctgcgcccccgctcaggtgagcccgaaggcaggagccgggaggcactcctcccaaacactccactcagaccataaagcactcctgtttcactctg

SEQ ID NO: 6110 - DNA, 887 bp, Homo sapiens
  source 1..887: mol_type = unassigned DNA
ggatgacatcgtgaaggttgaagtctgggatgtagtagacaaaggaaaatgcaaaaagcgaggcgacggcttaaagatggagaacgacccccaggaggcggagtctgaaatggccctggatgctgagttcctggacgtgtacaagaactgcaacggggtggtcatgatgttcgacattaccaagcagtggaccttcaattacattctccgggagcttccaaaagtgcccacccacgtgccagtgtgcgtgctgggaaactaccgggacatgggcgagcaccgagtcatcctgccggacgacgtgcgtgacttcatcgacaacctggacagacctccaggttcctcctacttccgctatgctgagtcttccatgaagaacagcttcggcctaaagtaccttcataagttcttcaatatcccatttttgcagcttcagaaggatgtcaggcttgcccaggaaaggggctgtgctgtcgtcctggtgtcagaagaagtgaggatgcctgcaggctgggactgctgctggggacgtttgggttggaaggaaggcggcagtcagacttgtcctgtgccggcactgctggggaggcccctccttcctgcagagccgtcccctcatcactgggttgattactccttagagagctccccactgctcagctgctccattccctaatggtttgccctccaaacccttccaaagcctcccagggagagaacgggaccctggacagagtcttgagctggaagcgtagggctgagctgtgtgtgactatccttttgctatggatgtgttcaagcagatctgatgtcctcgcctgtctcagcagcgggacccctgtttcctctttgtcttgcccctggattgcctggaagcaaatttcagg

SEQ ID NO: 6111 - DNA, 2496 bp, Homo sapiens
  source 1..2496: mol_type = unassigned DNA
actcccgggaaagacccggagacgggaccaccgcatgtggaaaccaccgggaagcacagcgcgtgggccgcctgagcggtgccggggcggggaggcagggccgccgctcaggccgtggacctcggggccgcgggacggacgtggatggcgccgccgttctctcgcgggcccagcgaggctatgcgtgcgcggcccgggcagtctctgcgagcccgggctgctgctcatctgggggggacggcggccgcccgactgagcccagagctgtgggccgcgcccgggttcctgcctcgggccggaggagggagggcgccgcggcccgtctcgggcctcccgccgcgctggggcctggctccctcctggctgcgctgagcgcctgcggctccgcttggggctgctgtgctctccacaggccgggccgccgggctggagggcgctgcaggcggcctctgttctccaagttctccgcgggagagggaggggaacgagggcccagccttccgcggggtgggctcggccgggagaagcgcggagcctcctggctgcccccagccggtgcggccgccaccgtggccgtgagggcgcctgggtcccctctggaggttttgccgcagcgctggccggcgccgagatatgaccagaggcgttgaaagttggcgcgttgaggtacctaggatgggcgaggaaatgaacaagcttcaggggagaagaaatgactgtgggaacagtgaagatagtgatccggggagacaggaacacgggcaagacagcgctgtggcaccgcctgcagggccggccgttcgtggaggagtacatccccacacaggagatccaggtcaccagcatccactggagctacaagaccacggatgacatcgtgaaggttgaagtctgggatgtagtagacaaaggaaaatgcaaaaagcgaggcgacggcttaaagatggagaacgacccccaggaggcggagtctgaaatggccctggatgctgagttcctggacgtgtacaagaactgcaacggggtggtcatgatgttcgacattaccaagcagtggaccttcaattacattctccgggagcttccaaaagtgcccacccacgtgccagtgtgcgtgctgggaaactaccgggacatgggcgagcaccgagtcatcctgccggacgacgtgcgtgacttcatcgacaacctggacagacctccaggttcctcctacttccgctatgctgagtcttccatgaagaacagcttcggcctaaagtaccttcataagttcttcaatatcccatttttgcagcttcagagggagacgctgttgcggcagctggagacgaaccagctggacatggacgccacgctggaggagctgtcggtgcagcaggagacggaggaccagaactacggcatcttcctggagatgatggaggctcgcagccgtggccatgcgtccccactggcggccaacgggcagagcccatccccgggctcccagtcaccagtggtgcctgcaggcgctgtgtccacggggagctccagccccggcacaccccagcccgccccacagctgcccctcaatgccgccccaccatcctctgtgccccctgtaccaccctcagaggccctgcccccacctgcgtgcccctcagcccccgccccacggcgcagcatcatctctaggctgtttgggacgtcacctgccaccgaggcagcccctccacctccagagccagtcccggccgcagagggcccagcaacggtccagagtgtggaggactttgttcctgacgaccgcctggaccgcagcttcctggaagacacaacccccgccagggacgagaagaaggtgggggccaaggctgcccagcaggacagcgacagtgatggggaggccctgggcggcaacccgatggtggcagggttccaggacgatgtggacctcgaagaccagccacgtgggagtcccccgctgcctgcaggccccgtccccagtcaagacatcactctttcgagtgaggaggaagcagaagtggcagctcccacaaaaggccctgccccagctccccagcagtgctcagagccagagaccaagtggtccggagaagcgcagcagcaccaggccccctgctgagatggagccggggaagggtgagcaggcctcctcgtcggagagtgaccccgagggacccattgctgcacaaatgctgtccttcgtcatggatgaccccgactttgagagcgagggatcagacacacagcgcagggcggatgactttcccgtgcgagatgacccctccgatgtgactgacgaggatgagggccctgccgagccgcccccaccccccaagctccctctccccgccttcagactgaagaatgactcggacctcttcgggctggggctggaggaggccggacccaaggagagcagtgaggaaggtaaggagggcaaaaccccctctaaggagaagaagaagaagaagaaaaaaggcaaagagg

SEQ ID NO: 6112 - DNA, 3328 bp, Homo sapiens
  source 1..3328: mol_type = unassigned DNA
ctggatcacctgaggtcaggagttcgtgaggctccggcgtttgtatttcatttgaatctaaagtgagcagccacagggacccgcagctcatcagaccagcctggggttccaggccaggagggcagtggtttgctccagagccagctgcttgtgggtgtgggacggtggcgacgcgtgcaccggggatgtgtcctgccaccagaggaggtgtgcgtggcggggagcagaggggctttgtttcccaggtgaaggtgcggcttcttcactcttagaggtgcgtgtgtgggtgggggtgcttgctgttgaggtttatgcctgtgactgacagctgtcccccaagccatgctggcagtgtgtaggtgtcgtgccggccaccgcagaggaatcctctgggcttctgtggttcaagtggggcccagcgcagagctccatgagttgctgagcagccagccctgcagcatctcctggttttggcagcaggaggcgtcccctgtgcattcaggggctgtggggctggggcactcgcagcaggaaggagccctgctcaggcctgcgtgctccctttctgcagagggagacgctgttgcggcagctggagacgaaccagctggacatggacgccacgctggaggagctgtcggtgcagcaggagacggaggaccagaactacggcatgtatgtggccggacccgcccgtgcgggcggtgtgggggctgcgggcgtggccgtggtgcagggccatgggctgcaccaaggagacagcagaggggagtgtcccctgtttggggtaaattagtcacctttgggcacgggtggaggaggactcaggtttgcactgcccccagcagcccccccacagtcacccctggcgtggactcctcatacaggtcatgctgtgcctgccactctgagtaccgctgaccgtggccaggtgctggtgctcatggagtgctgctggggctgcctgcccatcaggggcttggcctcccagattgatgccagcatggggtgtgctttctggggagctgcttgactttgggaagctccctgtgttgaagaggcatacaggccaggacatggaggtctctggtcctcgatagcagagggcggctcagagcatcctcctgagtgggcctgggcagtgcatagccccggggttgcggccagtgggacagctggcccgttctctgcctcaggctcctgtacagctaggggcttggtgcctcccctgggacccaggcagggaccacggaatcagtggccctcctgaggccccccaggaggtctctgtttccagaaggagagccctgtgggtcaccttggatctggctgttggctcagacacagcaagagaccgagagggaaggcagtttgatgcctggagagggacccgtggcttccagctgccaggccagccccagaatggagccccccgcatgggcgcttctctgttgaaccaatcctggcatttcctgggcctgagagttgggtcagctggatgctgcgatggccgcacgtgctccaccaagccccagccccctcctcttcccagaaacccccgctcacgggaaggtccagttgctgccatctggccacctctgcatggagcccccaacagctgtgcctcagaacagatccgaagtgactttcaggggagctggacacatgtacgctggtgcctgctgtccccaccctttggcactgctgctctttctttttctgagatggagtctcgctctgtcgcccaggctggagcgcagtggtgtgatctcggctcaccgcaagctccgcctcccgggttcacgccattctcctgcctcagcctcccaagtagctggggctacaggcacccgccaccacacccggctaattttttttgtatttttagtagagacggggtttcactgcgttagccaggacggtctccacctcctgacctcgtgatctgcctgccttggcctcctacagtgctgggattacaggcatgagccaccgtgcctggctggcactgctgcccttggaagtggatggggatgatggcctctgtggggcgggtggcccagaacacagtggctcttcccagccccagcagcagcagcagagagccccctgtcacctgagggcctcagggagaggcaggggagccaggcttctcacccgccttctgcctttcagcttcctggagatgatggaggctcgcagccgtggccatgcgtccccactggcggccaacgggcagagcccatccccgggctcccagtcaccagtggtgcctgcaggcgctgtgtccacggggagctccagccccggcacaccccagcccgccccacagctgcccctcaatgccgccccaccatcctctgtgccccctgtaccaccctcagaggccctgcccccacctgcgtgcccctcagcccccgccccacggcgcagcatcatctctaggctgtttgggacgtcacctgccaccgaggcagcccctccacctccagagccagtcccggccgcagagggcccagcaacggtccagagtgtggaggactttgttcctgacgaccgcctggaccgcagcttcctggaagacacaacccccgccagggacgagaagaaggtgggggccaaggctgcccagcaggacagcgacagtgatggggaggccctgggcggcaacccgatggtggcagggttccaggacgatgtggacctcgaagaccagccacgtgggagtcccccgctgcctgcaggccccgtccccagtcaagacatcactctttcgagtgaggaggaagcagaagtggcagctcccacaaaaggccctgccccagctccccagcagtgctcagagccagagaccaagtggtcctccataccagcttcgaagccacggagggggacagctcccacgaggaccgcagcacccccctggccaggcggtgtctctgttcgcacaggtccggagaagcgcagcagcaccaggccccctgctgagatggagccggggaagggtgagcaggcctcctcgtcggagagtgaccccgagggacccattgctgcacaaatgctgtccttcgtcatggatgaccccgactttgagagcgagggatcagacacacagcgcagggcggatgactttcccgtgcgagatgacccctccgatgtgactgacgaggatgagggccctgccgagccgcccccaccccccaagctccctctccccgccttcagactgaagaatgactcggacctcttcgggctggggctggaggaggccggacccaaggagagcagtgaggaaggtaaggagggcaaaaccccctctaaggagaag

SEQ ID NO: 6113 - DNA, 2547 bp, Homo sapiens
  source 1..2547: mol_type = unassigned DNA
gaagatagtgatccggggagacaggaacacgggcaagacagcgctgtggcaccgcctgcagggccggccgttcgtggaggagtacatccccacacaggagatccaggtcaccagcatccactggagctacaagaccacggatgacatcgtgaaggttgaagtctgggatgtagtagacaaaggaaaatgcaaaaagcgaggcgacggcttaaagatggagaacgacccccaggaggcggagtctgaaatggccctggatgctgagttcctggacgtgtacaagaactgcaacggggtggtcatgatgttcgacattaccaagcagtggaccttcaattacattctccgggagcttccaaaagtgcccacccacgtgccagtgtgcgtgctgggaaactaccgggacatgggcgagcaccgagtcatcctgccggacgacgtgcgtgacttcatcgacaacctggacagcagacctccaggttcctcctacttccgctatgctgagtcttccatgaagaacagcttcggcctaaagtaccttcataagttcttcaatatcccatttttgcagcttcaggtaagcactcaccacgtggggtggagtggctgctggtctctcacctccttccaggtgtctcctgtgtagcaacgggtctccctcctaacccctgagaaagctgtggacctgctcggagattggctgctggcaagggcccagcgttctactgcacctgcctgctctgggtggcagagggtacagggtcctgagggctagacccagtcccaggagcccctccacctctgcggggaccccttgctcagtttcccccagtgtttttggttgtttttgtttgttgagataaggtcttgctgtgtggcccaggctggagtgcagtggcgcaatcatggctcactgcggcctcaaactccggggctcaggcaatcctcccacctgtctcccaaagtgctgggatgccaggcgtgagtcaccgaggtactcgctgttcacatctcacatttccctggtgcttgtgtcaaaaccaaggaaccaactttggcctacggactaaactcactttcctttgtagaaacaagggccaggccagctgtggctgcaaagtagcccagcaaatgatgaggcttgaacctcctcgccctgggctgccctgattgggtctgggggacctgaacctcctcgccctgggctgccctgactgggtctgggggacctgaacctcctcgccctgggctgccccagctgggtctggggacctgaacctcctcgccctgggctgccccgcctgggtctggggacctgaacctcctcgccctgggctgccccgcctgggtctggggacctgaacctcctcgccctgggctgccccacctgggtctggggacctgaacctcctcgccctgggctgccccagctgggtctgggggacctgaacctcctcgccctgggctgccccagctgggtctgggggacctgaacctcctcgccctgggctgccccagctggatctgggggacctgaacctcctcgccctgggctgccccgcctgggtctgggggacctgaacctccttgcctgggctgccccgcctgggtctgggggacctgaacctcctcgccctgggctgccccagctgggtctgggggacctgtacctcctcgccctgggctgccccgcctgggtctgggggacctgaacctcctcgccctgggctgccccgactgggtctgggggacctgaatctcctcaccctgggctgccccagctgggtctggggacctgaacctcctcgccctgggctgccccagctgggtctgggggacctgaacctcctcgccctgggctgccccgactgggtctgggggacctggggcccagctgcagctgcagcagccttggtctttctccagaaggatgtcaggcttgcccaggaaaggggctgtgctgtcgtcctggtgtcagaagaagtgaggatgcctgcaggctgggactgctgctggggacgtttgggttggaaggaaggcggcagtcagacttgtcctgtgccggcactgctggggaggcccctccttcctgcagagccgtcccctcatcactgggttgattactccttagagagctccccactgctcagctgctccattccctaatggtttgccctccaaacccttccaaagcctcccagggagagaacgggaccctggacagagtcttgagctggaagcgtagggctgagctgtgtgtgactatccttttgctatggatgtgttcaagcagatctgatgtcctcgcctgtctcagcagcgggacccctgtttcctctttgtcttgcccctggattgcctggaagcaaatttcaggccttctttatgtcacctaaaaatatttcaaacacatctctaaaaaaatcagttgtttttttaacctgaccgtagtacctaatgtaataccgcatgttaaactcacagaaggtttttcttggagaaataagccacaataacaaattgaaaaaataaaattcccaaagagtt

SEQ ID NO: 6114 - DNA, 2441 bp, Homo sapiens
  source 1..2441: mol_type = unassigned DNA
gtgattccacttcagtgttcatttttatttttctgaaagtaaagatactcctgtaaaatgccattgtccatagaaaaaatattaactcattaagtttaaagacagatgataccttaatattaacttacttacacgattttaaagacgcctactgagagaactcaaatttataaactctgttgcctaataattatggtttaattctatatcctcttgcttgttacagttatacttaatttgcagtagatttttaaatgaaattatttgaatgtattccagactattttatttaaaatcatcatacatcatatactttgaacctttattttctaatgcaatcataaacattttaagttttattaactcactagcatccccactgactatattctgttttgctttatctgctcaagcactttcgaccatattttattttaggatttttatttttatcttccacagctggatattgctatttcacttttatttcacatgcagctttaagacgtatgagcatcagcacagcaaaatggttccagcctacagaatgcagtctcccagggccctgccaagaacatatctgtatgtctggccctacaaatgacaaatggtaattcccttctattttagctcttaattagttgctttcactatttccgaatatacctgtggctaagtttttattgaaacactcaaaaataccacttctcagtatgaacacaattgctaagagcctaatttggttctggactatggtcaacctgtgtgccttgttagttctctccagcagctggtgagtaaggaaatgacccttcaatttcctcttctttttcctctgacctctgtgacttaatttttcttaatgtctccaagtcatcaagggcttaataatttatgaattttacaaaaagcatttaaggaataagaaagaggttctgtgatttttcagactctgaaaattcattttgattctacatattccagaaatatactgggttggatgctagagtgaagaaagccgtccagacaattctcccagtccattcatttcttcattcatttgttcattcagtagttattgagtgcttatttcctgggtgcctggctctaggctatgtcctgagacatacagtggacagggtctctaccctcctcacaacaccctcttcaccctccacgccaccccctactactcactctcaccctagcaaggagcttcgtgctaataagagagagtcttacctgaatggcaatcgcccagattaacagtggagacagtaatgcaatgcaggaagttaagtttttaaaggtgattctgtgcagtaaggtataaaacagatatataataaatagcctagcttagtctaacatctctttagaattacacagctaaaaaggaaaaaaaacaccaaaataagataaaataaaacaaatttaaacaccaaaataagatataataaaacatttgtttttgcaaaataaggcccaatgttatggcctaatgaaagctatatacttgtgctatctaaagcactactttgtaaagatgactacccaagattgtaaatacaaaatttaaaaaggtacttaaattttctggaatatccatgtttcagaggtaatatttactttctatttcagtggcttaaattataacgttttggcttaagtgtcttttatcaatacaatgataagacaccttaatcctgagagagaaaattaagtactgtatataggtgtactttgcttctcacaatgattgtgcaaaaagtcacgtgtaaattgaacttttgtaaatcaaattgtattttaaatgcattaggggagctgccatttagaggaaacttgtgaattctttcataaagcagaaaaccattttataatacaaataaccattctctgatttatctcttttgtatgtttggattttcaatatcgactttgcttaaaacagagcccacctgcatagtaactgtgttttgccaaggctgcttgtgctaccagtttgctggtggctaacggcttgtgcttgaaagtcttctgaagtctgatgtgaattgagctatcaagcaatgctatcatagcacagtagcagtcctgaacagtctgagcagccaacccatttcaacaaaattgaacacaggactcttctgctcagcagcatctcttttctcagatgtggccatgttacagtagagggtattccataagcacatattccataaagtgctcagagtcacaggttttataataaattatgttattatgtaaacgaattgcatgcatgttgaaattttttagcagtactttagcttgaaagtactcgtacaaatactgttagatttagttgcaaataattgttctcaagttattgcaataaatgtcaaatgaaacaagctcttgtgtaaatagacttctgtgcctaatagtgacattgtttc

SEQ ID NO: 6115 - DNA, 548 bp, Homo sapiens
  source 1..548: mol_type = unassigned DNA
ataaagcgggacaacacagaacttcccagttacaccaggcatcctggcccaaagtttcccaaatccaggcggctagaggcccactgcttcccaactaccagctgagggggtccgtcccgagaagggagaagaggccgaagaggaaacatgaacttctatttactcctagcgagcagcattctgtgtgccttgattgtcttctggaaatatcgccgctttcagagaaacactggcgaaatgtcatcaaattcaactgctcttgcactagtgagaccctcttcttctgggttaattaacagcaatacagacaacaatcttgcagtctacgacctctctcgggatattttaaataatttcccacactcaatagccaggcagaagcgaatattggtaaacctcagtatggtggaaaacaagctggttgaactggaacatactctacttagcaagggtttcagaggtgcatcacctcaccggaaatccacctaaaagcgtacaggatgtaatgccagtggtggaaatcattaaagacactttgagtagattca

SEQ ID NO: 6116 - DNA, 633 bp, Homo sapiens
  source 1..633: mol_type = unassigned DNA
agcatttgctcaggcagcctctctgggaagatgctgcttcttcctctccccctgctgctctttctcttgtgctccagagctgaagctggtctataacagtcacccttggagcccataacataacagaggaagaagacacatggcagaagcttgaggttataaagcaattccgtcatccaaaatataacacttctactcttcaccacgatatcatgttactaaagttgaaggagaaagccagcctgaccctggctgtggggacactccccttcccatcccaattcaactttgtcccacctgggagaatgtgccgggtggctggctggggaagaacaggtgtgttgaagccgggctcagacactctgcaagaggtgaagctgagactcatggatccccaggcctgcagccacttcagagactttgaccacaatcttcagctgtgtgtgggcaatcccaggaagacaaaatctgcatttaagggagactctgggggccctcttctgtgtgctggggtggcccagggcatcgtatcctatggacggtcggatgcaaagccccctgctgtcttcacccgaatctcccattaccggccctggatcaaccagatcctgcaggcaaattaatcctggatcc

SEQ ID NO: 6117 - DNA, 937 bp, Homo sapiens
  source 1..937: mol_type = unassigned DNA
agcatttgctcaggcagcctctctgggaagatgctgcttcttcctctccccctgctgctctttctcttgtgctccagagctgaagctggggagatcatcgggggcacagaatgcaagccacattcccgcccctacatggcctacctggaaattgtaacttccaacggtccctcaaaattttgtggtggtttccttataagacggaactttgtgctgacggctgctcattgtgcaggaaggtctataacagtcacccttggagcccataacataacagaggaagaagacacatggcagaagcttgaggttataaagcaattccgtcatccaaaatataacacttctactcttcaccacgatatcatgttactaaagttgaaggagaaagccagcctgaccctggctgtggggacactccccttcccatcccaattcaactttgtcccacctgggagaatgtgccgggtggctggctggggaagaacaggtgtgttgaagccgggctcagacactctgcaagaggtgaagctgagactcatggatccccaggcctgcagccacttcagagactttgaccacaatcttcagctgtgtgtgggcaatcccaggaagacaaaatctgcatttaagggagactctgggggccctcttctgtgtgctggggtggcccagggcatcgtatcctatggacggtcggatgcaaagccccctgctgtcttcacccgaatctcccattaccggccctggatcaaccagatcctgcaggcaaattaatcctggatcctgagccagcctgaaagggaagctggaactggacctgagcagcaaagtgtgtgccactcattctggtctacccttggtccctcagccacaaccctaagcctccagaagtatcctacaggtcacagaactctcaataaacctcagtgaagacaca

SEQ ID NO: 6118 - DNA, 3147 bp, Homo sapiens
  source 1..3147: mol_type = unassigned DNA
cagccagtcctgagcacctaaccatgttgggcatcactgtcctcgctgcgctcttggcctgtgcaacacccggacctaccgtgtggccgtgggaaagaacaacctggaggtggaagacgaagaaggatccctgtttgtgggtgtggacaccatccacgtccacaagagatggaatgccctcctgttgcgcaatgatattgccctcatcaagcttgcagagcatgtggagctgagtgacaccatccaggtggcctgcctgccagagaaggactccctgctccccaaggactacccctgctatgtcaccggctggggccgcctctggaggggactccggtggcccactgaactgccagttggagaacggttcctgggaggtgtttggcatcgtcagctttggctcccggcggggctgcaacacccgcaagaagccggtagtctacacccgggtgtccgcctacatcgactggatcaacgagaaaatgcagctgtgatttgttgctgggagcggcggcagcgagtccctgcaacagcaataaacttccttctcctcgggccacctggatccttgatttgtgcagcttctgttgcttccctcctctctggtgctgcccctttccacactatggagccaaagagagaccccactcagccagtttcccccaccctgcattagacaggtggggaaacagaggccgggagagagggccaaggaaggagcctcctggggcattaatgggaggcagggggctggggtggagagcccagggagtcctgcgtgaagccggaggggatgggagtgaaggacgcatcagacaccttccccgctccatctcacaagctgcgaacaggtgagaccctgatgaaatcactcgcttctccgatcctacctccaccgaggggcctggcaggtcctcacagccccccagcagcaggtggaagacagggtctccccaaaagcagcgtcccccaggccagagagaccaggccacaggaggatggccaaagctcagggacaaccactcctggggaaggggctccctagcagggaccccccacccccaccccgcagcacagaccccatggctgctgttggcaggggctctctgctttgagaagtgtttagtgagccagcccctgtgtccagtcctgtgctgggcatgatgagggtacaggaagaggaagagaccccagcatcatcctcaggagacatacgtttgaagaaggcaatggtttccacacagaatcacagtggtcagagctggatatgctttcattgcattagacaagtggggaaactgaggcccagagagaggaaggagttgggatagctggcaatgcctgatccaggagaagagagttctcctgaggctgacaagaggccaagaggagccagagatgagatagacccagtgtccagggagggacatgccagtgggatcagaccctgatgacaggggcagccagagatgagagagatccaatgtccagggagggacatgccagggggatcagaccctgatgataggggcctctggcctggcctgctcctgggaatgtcctgttctgtgggggtgcccccagcccagcctctggacccctcgctggagagccctcggctgcagctacctcagactggcccaagagttgtcccttttctccaccagactttgtcccctgggagtggggaccatggtgtgactcccacacccccatgatgccaaggcaagtctcaggaaagacttgacttactcaacaagcagtgggagctacagggagcccagcaccacccagacccgggaatccaggatgggggtaccccagctgtgcaggagacagaccagtaaatagatcattaaattccctggtatacatttgaaaacagaaatacagaccagaagcatagaaacaggacacctgaagcagtgtcagttggcgggaggaatccaggatggcttcctggaggtgatgatgcccaagcttggtcttaaaatttgactagaaggtacccaagtacagaacgtagtccttcttaagtttgcttaatctaaacttcattcccacctatcctcttcttttttttttttttttttttgagacggagtcttgctctgatgcccaggctggagtgcagtggcacaatctcagctcactgcaacctccacctcccaggttcaagtgattcttctgcctcagcctcccaagtagctgggattacaggcacgcaccaccatgcacagctaattttttttttttttttttagacagagtctcgctctctcacctgggctgtagtgcagtggtgccatctcggctcactgcaagctccgcctcccaggttcacgccattctcctgcctcagcctcctgagtagctgggactacaggcgccagccaccatgcctggctaattttttttttttttgtatttttagcagagacggggtttcaccgtgttagccaggatggtctcgatctcctgatctcgtgatccacctgcctcggcctcccaaagtgctggcattacaggcgtgagccaccgtgcccggccccagctaatttttttgtatttttttagtagagatggggtttcaccatgtcgtccaggctggtctcaaactcctgacctcaggtgatctgcccgccttggcctcccaaagtactgggatcacaggtgtgagccaccacacccggtctcattcccagctatcttcttttgtgtatgtctttatattgggggttataaatgctaaatgcttgctgtcctcagatcccttgtagttagggagctaattaaaatgttaattaatattacaatgttatttaagcaatgttaaataatatctaacatttattgggcacttagtatgtgccaagcactatcctataggttttacattatctcaatccccagaaacaatcccatgaggtaggttactattaacatcatgcccattttacagatgagaaaactgaggccagacagggttagtgacttcccaatgtgtgaactagaaggtagtggagccggaatccagactttagtgatctgactccagggcctgtgctcttgtccaccatgctctgctgccctgcaatgtaaaacatcctccagaaaaaaaataaataaataaaaacttccctgatg

SEQ ID NO: 6119 - DNA, 898 bp, Homo sapiens
  source 1..898: mol_type = unassigned DNA
ggtcagccagtcctgagcacctaaccatgttgggcatcactgtcctcgctgcgctcttggcctgtgcctccagctgtggggtgcccagcttcccgcccaacctatccgcccgagtggtgggaggagaggatgcccggccccacagctggccctggcagatctccctccagtacctcaagaacgacacgtggaggcatacgtgtggcgggactttgattgctagcaacttcgtcctcactgccgcccactgcatcagcaacacccggacctaccgtgtggccgtgggaaagaacaacctggaggtggaagacgaagaaggatccctgtttgtgggtgtggacaccatccacgtccacaagagatggaatgccctcctgttgcgcaatgatattgccctcatcaagcttgcagagcatgtggagctgagtgacaccatccaggtggcctgcctgccagagaaggactccctgctccccaaggactacccctgctatgtcaccggctggggccgcctctggaccaacggccccattgctgataagctgcagcagggcctgcagcccgtggtggatcacgccacgtgctccaggattgactggtggggcttcagggtgaagaaaaccatggtgtgcgctgggggcgatggcgtcatctcagcctgcaatggggactccggtggcccactgaactgccagttggagaacggttcctgggaggtgtttggcatcgtcagctttggctcccggcggggctgcaacacccgcaagaagccggtagtctacacccgggtgtccgcctacatcgactggatcaacgagaaaatgcagctgtgatttgttgctgggagcggcggcagcgagtccctgcaacagcaataaacttccttctcctcgggcca

SEQ ID NO: 6120 - DNA, 1174 bp, Homo sapiens
  source 1..1174: mol_type = unassigned DNA
ctcacatctgccacgatgttgctgctcagcctgaccctaagcctggttctcctcggctcctcctggggctgcggcattcctgccatcaaaccggcactgagcttcagccagaggattgtcaacggggagaatgcagtgttgggctcctggccctggcaggtgtccctgcaggacagcagcggcttccacttctgcggtggttctctcatcagccagtcctgggtggtcactgctgcccactgcaatgtcagccctggccgccattttgttgtcctgggcgagtatgaccgatcatcaaacgcagagcccttgcaggttctgtccgtctctcgggccattacacaccctagctggaactctaccaccatgaacaatgacgtgacgctgctgaagctcgcctcgccagcccagtacacaacacgcatctcgccagtttgcctggcatcctcaaacgaggctctgactgaaggcctcacgtgtgtcaccaccggctggggtcgcctcagtggcgtgggcaatgtgacaccagcacatctgcagcaggtggctttgcccctggtcactgtgaatcagtgccggcagtactggggctcaagtatcactgactccatgatctgtgcaggtggcgcaggtgcctcctcgtgccagggtgactccggaggccctcttgtctgccagaagggaaacacatgggtgcttattggtattgtctcctggggcaccaaaaactgcaatgtgcgcgcacctgctgtgtatactcgagttagcaagttcagcacctggatcaaccaggtcatagcctacaactgagctcaccacaggccctccccagctcaacccattaaagacccaggccctgtcccatcatgcattcatgtctgtcttcctggctcaggagaaagaagaggctgttgagggtccgactccctacttggacttctggcacagaaggggctgagtgactccttgagtagcagtggctcttcctagagtagccatgccgaggccggggcccccacccctcctccagggcaaccccttggtcctacagcaagaagccagaactgttggaatgaatggcagccctccctggagaggcagcctgtttactgaatacagaggatacgtttacaaactgaatacgcataataaataactgcacattctccatcca

SEQ ID NO: 6121 - DNA, 1721 bp, Homo sapiens
  source 1..1721: mol_type = unassigned DNA
cacgtgctggtgggagagtcaccatctctgagcagacctgtgactcctgttccaaatggacgaggaaccactgcgatgatgtgttaggactcccagcctgccagaacctcacagcccctggcccttcacagcaaagttgaccgcagtgagcattccatccaccagtcagaacaccctggacgctgagcggccttctctgaaagcctggtgcctttgttagccctgggtgactcctgtgatcccagccaccaggttgtcactatagacctaatttaaccatctgtcctcagtaccgagggctcaacatttggaatgggaggtggttctgggagccaattagaggccaggctttgggaggtggcagaggtgagtctcacacctgggctctgtctgataagtctaggtctcggtcaggggaccttggcctaaagggcctgtcttgcctggagcgtgggagggggctgagtctacacagctggcctggcctcaggcctggagctttagctcaaggacgagaagacccataaagccagacccagctcccaacctcacatctgccacgatgttgctgctcagcctgaccctaagcctggttctcctcggctcctcctggggctgcggcattcctgccatcaaaccggcactgagcttcagccagaggattgtcaacggggagaatgcagtgttgggctcctggccctggcaggtgtccctgcaggacagcagcggcttccacttctgcggtggttctctcatcagccagtcctgggtggtcactgctgcccactgcaatgtcagccctggccgccattttgttgtcctgggcgagtatgaccgatcatcaaacgcagagcccttgcaggttctgtccgtctctcgggccattacacaccctagctggaactctaccaccatgaacaatgacgtgacgctgctgaagctcgcctcgccagcccagtacacaacacgcatctcgccagtttgcctggcatcctcaaacgaggctctgactgaaggcctcacgtgtgtcaccaccggctggggtcgcctcagtggcgtgggcaatgtgacaccagcacatctgcagcaggtggctttgcccctggtcactgtgaatcagtgccggcagtactggggctcaagtatcactgactccatgatctgtgcaggtggcgcaggtgcctcctcgtgccagggtgactccggaggccctcttgtctgccagaagggaaacacatgggtgcttattggtattgtctcctggggcaccaaaaactgcaatgtgcgcgcacctgctgtgtatactcgagttagcaagttcagcacctggatcaaccaggtcatagcctacaactgagctcaccacaggccctccccagctcaacccattaaagacccaggccctgtcccatcatgcattcatgtctgtcttcctggctcaggagaaagaagaggctgttgagggtccgactccctacttggacttctggcacagaaggggctgagtgactccttgagtagcagtggctcttcctagagtagccatgccgaggccggggcccccacccctcctccagggcaaccccttggtcctacagcaagaagccagaactgttggaatgaatggcagccctccctggagaggcagcctgtttactgaatacagaggatacgtttacaaactgaatacgcataataaataactgcacattctccatcca

SEQ ID NO: 6122 - DNA, 868 bp, Homo sapiens
  source 1..868: mol_type = unassigned DNA
accttctgaggcagcggcatggcttccctctggctcctctcctgcttctcccttgtgggggccgcctttggctgcggggtccccgccatccaccctgtgctcagcggcctgtccaggatcgtgaatggggaggacgccgtccccggctcctggccctggcaggtgtccctgcaggacaaaaccggcttccacttctgcgggggctccctcatcagcgaggactgggtggtcaccgctgcccactgcggggtcaggacctccgacgtggtcgtggctggggagtttgaccagggctctgacgaggagaacatccaggtcctgaagatcgccaaggtcttcaagaaccccaagttcagcattctgaccgtgaacaatgacatcaccctgctgaagctggccacacctgcccgcttctcccagacagtgtccgccgtgtgcctgcccagcgccgacgacgacttccccgcggggacactgtgtgccaccacaggctggggcaagaccaagtacaacgccaacaagacccctgacaagctgcagcaggcagccctgcccctcctgtccaatgccgaatgcaagaagtcctggggcaggaggatcaccgacgtgatgatctgtgccggggccagtggcgtctcctcctgcatgggcgactctggcggccccctggtctgccaaaaggatggagcctggaccctggtgggcattgtgtcctggggcagcgacacctgctccacctccagccctggcgtgtacgcccgtgtcaccaagctcataccttgggtgcagaagatcctggctgccaactgagcccgcggctccctccgaccctgctccccacagagcctcagtaaacccatggaacaca

SEQ ID NO: 6123 - DNA, 1910 bp, Homo sapiens
  source 1..1910: mol_type = unassigned DNA
gcggcggcagcggaggcggcggctccagccggcgcggcgcgaggctcggcggtgggatccggcgggcggtgctagctccgcgctccctgcctcgctcgctgccgggggcggtcggaaggcgcggcgcgaagcccgggtggcccgagggcgcgatggctgctcctgtcccgtgggcctgctgtgctgtgcttgccgccgccgccgcagttgtctacgcccagagacacagtccacaggaggcaccccatgtgcagtacgagcgcctgggctctgacgtgacactgccatgtgggacagcaaactgggatgctgcggtgacgtggcgggtaaatgggacagacctggcccctgacctgctcaacggctctcagctggtgctccatggcctggaactgggccacagtggcctctacgcctgcttccaccgtgactcctggcacctgcgccaccaagtcctgctgcatgtgggcttgccgccgcgggagcctgtgctcagctgccgctccaacacttaccccaagggcttctactgcagctggcatctgcccacccccacctacattcccaacaccttcaatgtgactgtgctgcatggctccaaaattatggtctgtgagaaggacccagccctcaagaaccgctgccacattcgctacatgcacctgttctccaccatcaagtacaaggtctccataagtgtcagcaatgccctgggccacaatgccacagctatcacctttgacgagttcaccattgtgaagcctgatcctccagaaaatgtggtagcccggccagtgcccagcaaccctcgccggctggaggtgacgtggcagaccccctcgacctggcctgaccctgagtcttttcctctcaagttctttctgcgctaccgacccctcatcctggaccagtggcagcatgtggagctgtccgacggcacagcacacaccatcacagatgcctacgccgggaaggagtacattatccaggtggcagccaaggacaatgagattgggacatggagtgactggagcgtagccgcccacgctacgccctggactgaggaaccgcgacacctcaccacggaggcccaggctgcggagaccacgaccagcaccaccagctccctggcacccccacctaccacgaagatctgtgaccctggggagctgggcagcggcgggggaccctcggcacccttcttggtcagcgtccccatcactctggccctggctgccgctgccgccactgccagcagtctcttgatctgagcccggcaccccatgaggacatgcagagcacctgcagaggagcaggaggccggagctgagcctgcagaccccggtttctattttgcacacgggcaggaggaccttttgcattctcttcagacacaatttgtggagaccccggcgggcccgggcctgccgccccccagccctgccgcaccaagctggccctccttcctccctcaggggaggtgggccatgcagctaacccacccaccaaagaccccctcaccctggccccttgggctggaccctccaatgccagcgactcccaggagcccttgggggacgtgaggggagcctctcacatccgatttctcctcctgccccagcctcctgtctatcccagggtctctgttgccaccatcagattataagctcctgatgctgggggggcccagccatccccctccccccagcacccacaattttcagtcccctcccctctgccctgttttgtatacccctcccctgaccctgctcctatcccacagtatttaatgccctgtcagtcccttctagtctgactcaatggtaacttgctgtatttgaattttttatagatgtatatacagggtggggggagtgggcggttctcattaaacgtcaccatttcatgag

SEQ ID NO: 6124 - DNA, 2052 bp, Homo sapiens
  source 1..2052: mol_type = unassigned DNA
ctgaagagccggtgcagagcgggcggcggcggcggcggcagcggaggcggcggctccagccggcgcggcgcgaggctcggcggtgggatccggcgggcggtgctagctccgcgctccctgcctcgctcgctgccgggggcggtcggaaggcgcggcgcgaagcccgggtggcccgagggcgcgactctagccttgtcacctcatcttgcccccttggttttggaagtcctgaagagttggtctggaggaggaggaggacattgatgtgcttggtgtgtggccagtggtgaagagatggctgctcctgtcccgtgggcctgctgtgctgtgcttgccgccgccgccgcagttgtctacgcccagagacacagtccacaggaggcaccccatgtgcagtacgagcgcctgggctctgacgtgacactgccatgtgggacagcaaactgggatgctgcggtgacgtggcgggtaaatgggacagacctggcccctgacctgctcaacggctctcagctggtgctccatggcctggaactgggccacagtggcctctacgcctgcttccaccgtgactcctggcacctgcgccaccaagtcctgctgcatgtgggcttgccgccgcgggagcctgtgctcagctgccgctccaacacttaccccaagggcttctactgcagctggcatctgcccacccccacctacattcccaacaccttcaatgtgactgtgctgcatggctccaaaattatggtctgtgagaaggacccagccctcaagaaccgctgccacattcgctacatgcacctgttctccaccatcaagtacaaggtctccataagtgtcagcaatgccctgggccacaatgccacagctatcacctttgacgagttcaccattgtgaagcctgatcctccagaaaatgtggtagcccggccagtgcccagcaaccctcgccggctggaggtgacgtggcagaccccctcgacctggcctgaccctgagtcttttcctctcaagttctttctgcgctaccgacccctcatcctggaccagtggcagcatgtggagctgtccgacggcacagcacacaccatcacagatgcctacgccgggaaggagtacattatccaggtggcagccaaggacaatgagattgggacatggagtgactggagcgtagccgcccacgctacgccctggactgaggaaccgcgacacctcaccacggaggcccaggctgcggagaccacgaccagcaccaccagctccctggcacccccacctaccacgaagatctgtgaccctggggagctgggcagcggcgggggaccctcggcacccttcttggtcagcgtccccatcactctggccctggctgccgctgccgccactgccagcagtctcttgatctgagcccggcaccccatgaggacatgcagagcacctgcagaggagcaggaggccggagctgagcctgcagaccccggtttctattttgcacacgggcaggaggaccttttgcattctcttcagacacaatttgtggagaccccggcgggcccgggcctgccgccccccagccctgccgcaccaagctggccctccttcctccctcaggggaggtgggccatgcagctaacccacccaccaaagaccccctcaccctggccccttgggctggaccctccaatgccagcgactcccaggagcccttgggggacgtgaggggagcctctcacatccgatttctcctcctgccccagcctcctgtctatcccagggtctctgttgccaccatcagattataagctcctgatgctgggggggcccagccatccccctccccccagcacccacaattttcagtcccctcccctctgccctgttttgtatacccctcccctgaccctgctcctatcccacagtatttaatgccctgtcagtcccttctagtctgactcaatggtaacttgctgtatttgaattttttatagatgtatatacagggtggggggagtgggcggttctcattaaacgtcaccatttcatgag

SEQ ID NO: 6125 - DNA, 921 bp, Homo sapiens
  source 1..921: mol_type = unassigned DNA
gcacggggaccacagccgtcttgagggcgcgcccgagaaaggactctagccttgtcacctcatcttgcccccttggttttggaagtcctgaagagttggtctggaggaggaggaggacattgatgtgcttggtgtgtggccagtggtgaagagatggctgctcctgtcccgtgggcctgctgtgctgtgcttgccgccgccgccgcagttgtctacgcccagagacacagtccacaggaggcaccccatgtgcagtacgagcgcctgggctctgacgtgacactgccatgtgggacagcaaactgggatgctgcggtgacgtggcgggtaaatgggacagacctggcccctgacctgctcaacggctctcagctggtgctccatggcctggaactgggccacagtggcctctacgcctgcttccaccgtgactcctggcacctgcgccaccaagtcctgctgcatgtgggcttgccgccgcgggagcctgtgctcagctgccgctccaacacttaccccaagggcttctactgcagctggcatctgcccacccccacctacattcccaacaccttcaatgtgactgtgctgcatggctccaaaattatggtctgtgagaaggacccagccctcaagaaccgctgccacattcgctacatgcacctgttctccaccatcaagtacaaggtctccataagtgtcagcaatgccctgggccacaatgccacagctatcacctttgacgagttcaccattgtgaagcctgatcctccagaaaatgtggtagcccggccagtgcccagcaaccctcgccggctggaggtgacgtggcagaccccctcgacctggcctgaccctgagtcttttcctctcaagttctttctgcgctaccgacccctcatcctggaccagtggcagcat

SEQ ID NO: 6126 - DNA, 7224 bp, Homo sapiens
  source 1..7224: mol_type = unassigned DNA
gcactccggccgggctctgctggctgcggcgggagctggacgcgggaggaggcggcggcggcgctggaacagtgaaccatggagctgtatttcggtgaatatcaacatgtgcagcaggaatatggggtccatctgagactcgcaagtgatgatacccaaaaatcaaggagttcccagaactccaaggcaggctcctacggtgtcagtattcgggtccagggaattgatggtcacccctatattgtcctgaataacacagaacggtgcctagcaggcacatcgttttctgaaaatgggccaccctttccacctccagtgataaataacctgcctctacattccagcaatggttctgtgccaaaggagaacagtgaagaacttcagcttccagaaaacccatacgcccagcctagcccaataagaaacctgaaacagcccctgctccatgagggcaagaatggagttctagatcgcaaagacgggtctgtgaagccatctcacctgctgaactttcagaggcatccagagcttttgcaaccctatgaccctgaaaagaatgagttgaatttacaaaatcaccagccttctgagagtaattggctaaaaacgttgacagaagaaggcatcaacaataagaagccttggacttgctttcccaaacctagcaattcccagcctaccagtccctccttggaagacccggccaaatctggtgtgacagctattcgtttatgcagctccgtggtcatagaggaccccaaaaagcagacctcagtgtgtgtaaacgttcagagctgcaccaaggagagggtgggagaggaggcccttttcactagcgggaggcccctgactgcccacagcccacatgcccaccctgaaaccaagaaaaccaggccagatgttcttcccttccggcgacaggattcagcgggacccgtcctggatggagctcggtcccggaggtcctcctcgtcatccacaactcccacgtcagccaactctttgtacaggtttttactggatgatcaggaatgtgccatccatgccgacaacgtcaatcgtcatgaaaacagaaggtatattcccttcctgccaggaactggacgggatattgatacaggatcaattcctggtgtggatcagttaattgaaaaatttgatcaaaaacctgggcttcagagaagaggaaggtctgggaagcgaaacagaattaatacagatgacaggaaaagatccagaagcgtggatagcgcctttccttttggcctccaagggaactcggagtacctgattgaattcagtaggaacttgggcaagtcaagcgaacacctcctccggccttcccaggtgtgcccgcagcggccactgtctcaggagcgccgtgggaaacagagcgtgggccgcacctttgcaaagctgcagggagcagcgcacggggcttcatgtgcccactccaggcctccccagccgaacatagatgggaaagttctggaaaccgaaggtagtcaggaaagtacagtgatccgtgcgccctcccttggtgcacagagtaaaaaggaggaggaggtgaaaacagccaccgctacgctgatgttacagaaccgggcaacagcaacttcgcctgattctggtgccaagaaaatttccgtgaagacatttccttcggcctcaaatactcaggccacaccggatctcttaaagggccagcaagagctcactcagcaaaccaatgaggagacagctaagcagattctctacaattacctcaaagaaggaagcactgataatgacgatgctactaaaaggaaagtcaacttggtctttgagaaaatccagaccttaaagtctcgagcagctgggagcgcccaaggaaataaccaagcttgtaattccacatctgaagtcaaagatctattggaacagaaaagcaagttgaccatagaagtggctgaacttcagagacagcttcaactggaagtcaagaatcaacagaacattaaagaagagagagagaggatgagagcaaacctagaagagctccgaagccaacacaacgaaaaggtggaggagaactccacattgcagcaacgactggaagaaagtgaaggggagctccggaagaatctggaggagctattccaggtgaagatggaacgggagcagcatcagactgagatcagggatctccaggaccagctctcagaaatgcacgatgaactggacagtgcaaagcgatcggaggacagggagaagggagctctgattgaggagctcttacaggcaaaacaggatcttcaagatctgctgattgccaaagaggagcaagaagacctcttgagaaagcgagagcgtgaactcaccgccctgaagggagccctgaaagaagaggtttccagccatgatcaggagatggacaagctgaaggagcaatatgatgctgagttgcaggccctgagggagagtgtggaagaagcaaccaagaatgtcgaggtcttggcgagcaggagcaacacttcagagcaagaccaggcggggactgaaatgcgcgtgaagcttctgcaggaggagaatgagaagctgcagggaagaagcgaagagctggagcggagagttgctcagcttcaaaggcagatcgaggacctgaaaggcgatgaagccaaggcgaaggaaacgctgaagaagtacgagggagaaatacgacagttagaggaggcccttgtgcacgccagaaaggaagaaaaagaagctgtgtcagccagaagggccctggagaatgaactggaggctgctcagggaaatctgagtcagactacccaggagcagaagcagttgtctgagaagctcaaagaggagagtgagcagaaggagcagctaagaaggttgaagaacgagatggagaatgagcggtggcacctgggcaaaaccattgagaaactgcagaaggagatggcagacattgttgaggcctcccgtacctcaaccctggagctccagaaccagctggatgagtataaggagaaaaaccgcagggagctcgcagaaatgcaaagacagttgaaggagaaaacgctggaggcagaaaagtcccgactgacagccatgaaaatgcaggatgagatgcgtctgatggaggaagagttacgggactaccagagagctcaggatgaagcactcacaaaaaggcagcttctggagcagacgctgaaggacctggagtatgagctggaagccaagagtcacctcaaagatgaccgcagcaggctggtcaagcagatggaggacaaggtgtctcaactggagatggaactggaagaagagagaaacaactcagatttgctgtctgagaggatcagtaggagcagggaacagatggagcagttgaggaatgagctacttcaggagagagctgcgagacaagacttggagtgcgacaagatttccctggagaggcagaacaaggacttaaagagccggattatccacctggaaggttcctacaggtccagcaaagaggggctggttgtgcagatggaggccaggatcgcggagctggaggaccgcctggagagtgaggagagggatcgggccaatcttcagctcagcaaccggcggctggagcggaaagtgaaggagctggtgatgcaggtggatgatgagcacctgtcattgactgatcagaaggaccagctgagcttgcgtttgaaagccatgaagcggcaggtggaggaggctgaggaggaaatcgacagactggaaagttctaaaaagaagctgcagagggagctggaggagcagatggacatgaatgagcatctgcaggggcagctcaactccatgaagaaggacttaagactgaagaagctgccgagtaaagtgctggatgacatggatgacgacgatgacctcagcacggatgggggaagcctctatgaggcgcctgtgagctacacattctccaaggacagcaccgtcgccagccagatctgagtgctctcccgggctgtggaagtacctgtcattcctgcaggagctgcagccacccaaagtgggaggcagggaggggagcatctgtctgccactgagaccaatcacagcctctttgcacagcatgccagctcctcagtgttacattcctcgccagggtctctcagtgggtcttcgacagagagcttttgcagtttaaaatgttgggatgcctgaggaccaggagccaccacccactggggtgttgtgagagatacactttggtaggctgaggcccctgttccacagccactatttgcattgctgtccctgccccctcatcactccccctgccaagacaaagggtccagaaggctaggacttacttaatagcactgtgcagggaggaaaccatgtatagcttgtacatattttaaaccagaccttctcacgaactgctgctgttgggtttggaatgtgatggaggcttggtagggtggctggtttgtaaagttcatgcatctatattgagtattctttttttttttttttgagatggagtttcattcttgttgccgaggctggagtgcaatggcgcaaccttggctcactgcaacctctgcctccctggttcaagtgattctcctgcctcatcctcccaagaagctgagattacagatgaccaccaccactcctggctaattttttgtatttagtagagacggggtttcaccatgttggtcaggctggtcttgaactcctgacctcaggtgatccacctgcctcagcctcccaaagtgctgagattacaggcatgagccaccacgcccagccattgagtattcttttttaaaatatgaagctattagattttaagtgttgaggagcagaggtgagaagagagagagagagagaaagtcaaataaagtcaaagaccagtttggaaaccaaagttggaaaagaagaattgtagtggtcatggacagctaagactgagcatagcagttcacatggtctgggtaaacaagtcactggcacaggggaaagccagaaggttgcttgtgtctgtgactgcagctatggccttgtttgcttagtttatctggaattctgttataatttctgaactgttctgagacctgttcccagtcactgattgcaatttcttttacacaggttgggtagggagagttgtaggtaaggccttaaacaaatgaggccgtttctggaaggatagggctgtgtggtcatgtcccacagcaagcttttgggatcgggggaataagagggtatgggggaaaggttcatagacttaggtgtgagaatgaggtgggaggtgtctggtaaggtcatgggggaagggagatgagagaggagataggcagatgtgggtatggggcccagtgtgagaaggaagacagagaagttcttgaaagctgggggatgtgtgggcaagaggtggattgagcaggatctcagggttatgtcgaggaagggaagaaagaaacagaagtcaggcagaggcgtgtctgtgcaaactggaggactccttccaacttcctggaacaaagcgacatcgccagcagcaggctggcagggagtggttgaggtctgggggccaggccacatggctggagaggaatttcagggagcatagcatcgggaggatgctacatatccagggactccctcctggccttcctgtgtcacttcacaatgtgacagtccccaggcatgcccacaggccaggcccagtcacagctgggcttccacaggtcagaatatgggacaggacatggtcagggagaggaccctgtgagttggtgacatatatgtggcagagatggtagtgttcagctgcttcagcagtgtccccaaccatcccaatagggtgggggcctgtgggccagaggactccatgacagtagccatggagtcccacctgtgccaggtcagagcccacccggcaggtttcagagtggtcagcccagtttaagggtgggagtctggagccagacagccaagccccttccacatctacagggtcactgtcatcctcaccacagccaggggtgattctcacctctgcctgcttatgtggggtgtggccgattcctccctttagtcattcattcatttagcacatatttattgggcatcggtgatgtgtcaggcacagtccttggcacacagaatacagcagtgaattaaacaggcaaaaattcctcccctcctggagctcagtgtcaggaaagggggtgataaatgacaatcaaatcgacatggaggttgagcacctctgtactcagccctctgtctgtccttctgaggacgcaacaagcctggttccctagagctcactttgaccctcaatatgttcataatttccctgctgcttctcccatcgttagacatctgccagtaagcctgctgagagaagcctcagcccactcatacctagagacgctgctggggaaggtcagcacacccaagaactttgggagtgtgtgtctgttttggtttgtgagaaagtagctgcccctcattctggccagttctttccagtagccatggggctggctacaagaagcaaaactgcccatgcaaagagaacacaggtcacttttcaaaacacttgcatcattaccctaaaaataggctgttatgcgttttgacaattgcgctatcctacactctgagggagttggcaacgcatgcggtatagtggagtgggaagagttgagactgaaagttaagagaagggttttcaagtcccggctcatctcaccccagtgactttgacagtgtgctcactctcagagccatggattacctggaacaaagtgcagattagtgcccacggtcctttccaggtataacatgctatcgttctttaattttattatatatacatacttttcttctgttttttgctttaagaactaaccccgatcaagagtattttctttagctagcttaaaaagaaaacatatattttatgtaaaaacacatacatggccaaatgcaatactgaagagacaatcatcctgtatcttttatggtttttcctgcttctgagtgtcgttctacaatgcccgttgacttattccattgcgtctctgctttagggtatggtttggtcgctttggttgtcatgagaaagagacattctccttgcagctacctccatgtgagtgaattcctggataaagcaagatttcctttcaataaacgctgtcacccaatgggaattttgactct

SEQ ID NO: 6127 - DNA, 2322 bp, Homo sapiens
  source 1..2322: mol_type = unassigned DNA
gcggccaacgggcgacaaccgaacctcccgccgccgtcgccgccgccgcgagcactgcctgcgcacttccgactatgcgccaggagcacttccggggcagagcctgagagcgcgcgcgcacgtggggccggggcggagagaggcgagcaccgggaaggggagcgtggggccgctggaatgggtgaatttaaggtccatcgagtacgtttctttaattatgttccatcaggaatccgctgtgtggcttacaataaccagtcaaacagattggctgtttcacgaacagatggcactgtggaaatttataacttgtcagcaaactactttcaggagaaatttttcccaggtcatgagtctcgggctacagaagctttgtgctgggcagaaggacagcgactctttagtgctgggctcaatggcgagattatggagtatgatttacaggcgttaaacatcaagtatgctatggatgcctttggaggacctatttggagcatggctgccagccccagtggctctcaacttttggttggttgtgaagatggatctgtgaaactatttcaaattaccccagacaaaatccagtttgaaagaaattttgatcggcagaaaagtcgcatcctgagtctcagctggcatccctctggtacccacattgcagctggttccatagactacattagtgtgtttgatgtcaaatcaggcagcgctgttcataagatgattgtggacaggcagtatatgggcgtgtctaagcggaagtgcatcgtgtggggtgtcgccttcttgtccgatggcactatcataagtgtggactctgctgggaaggtgcagttctgggactcagccactgggacgcttgtgaagagccatctcatcgctaatgctgacgtgcagtccattgctgtagctgaccaagaagacagtttcgtggtgggcacagccgagggaacagtcttccattttcagctggtccctgtgacatctaacagcagtgagaagcagtgggtgcggacaaaaccgttccagcatcacactcatgacgtgcgcactgtggcccacagcccaacagcgctgatatctggaggcactgacacccacttagtctttcgtcctctcatggagaaggtggaagtaaagaattacgatgccgctctccgaaaaatcacctttccccaccgatgtctcatctcctgttctaaaaagaggcagcttctcctcttccagtttgctcatcacttagaactttggcgactgggatccacagttgcaacaggcaagaatggggatactcttccactctctaaaaatgcagatcatttactgcacctaaagacaaagggtcctgagaacattatctgtagctgtatctccccatgtggaagttggatagcctattctacagtttctcggttttttctctatcggctgaattatgaacatgacaacataagcctcaaaagggtttccaaaatgccagcattccttcgctctgcccttcagattttgttttctgaagattcaacaaagctctttgtagcatcaaatcaaggagctctgcatattgttcagctgtcaggaggaagcttcaagcacctgcatgctttccagcctcagtcaggaacagtggaggccatgtgtcttttggcagtcagtccagatgggaattggctagctgcatcaggtaccagtgctggagtccatgtctacaacgtaaaacagctaaagcttcactgcacggtgcctgcttacaatttcccagtgactgctatggctattgcccccaataccaacaaccttgtcatcgctcattcggaccagcaggtatttgagtacagcatcccagacaaacagtatacagattggagccggactgtccagaagcagggctttcaccacctttggctccaaagggatactcctatcacacacatcagttttcatcccaagagaccgatgcacatccttctccatgatgcctacatgttctgcatcattgacaagtcattgccccttccaaatgacaaaaccttactctacaatccatttcctcccacgaatgaatcagatgtcatccggaggcgcacagctcatgcttttaaaatttctaagatatataagcctctactcttcatggatcttttggatgaaagaacactcgtggcagtagaacggcctctggatgacatcattgctcagctcccaccacccattaaaaagaagaaatttggaacctaaaacagggcactgtctgtgtccttccttgaactgtctaccctgttgcttttcacaaatcatggtaataaaacaagttattcttga

SEQ ID NO: 6128 - DNA, 1861 bp, Homo sapiens
  source 1..1861: mol_type = unassigned DNA
gcgcacgtggggccggggcggagagaggcgagcaccgggaaggggagcgtggggccgctggaatgggtgaatttaaggtccatcgagtacgtttctttaattatgttccatcaggaatccgctgtgtggcttacaataaccagtcaaacagattggctgtttcacgaacagatggcactgtggaaatttataacttgtcagcaaactactttcaggagaaatttttcccaggtcatgagtctcgggctacagaagctttgtgctgggcagaaggacagcgactctttagtgctgggctcaatggcgagattatggagtatgatttacaggcgttaaacatcaagtatgctatggatgcctttggaggacctatttggagcatggctgccagccccagtggctctcaacttttggttggttgtgaagatggatctgtgaaactatttcaaattaccccagacaaaatccagtttgaaagaaattttgatcggcagaaaagtcgcatcctgagtctcagctggcatccctctggtacccacattgcagctggttccatagactacattagtgtgtttgatgtcaaatcaggcagcgctgttcataagatgattgtggacaggcagtatatgggcgtgtctaagcggaagtgcatcgtgtggggtgtcgccttcttgtccgatggcactatcataagtgtggactctgctgggaaggtgcagttctgggactcagccactgggacgcttgtgaagagccatctcatcgctaatgctgacgtgcagtccattgctgtagctgaccaagaagacagtttcgtggtgggcacagccgagggaacagtcttccattttcagctggtccctgtgacatctaacagcagtgagaagcagtgggtgcggacaaaaccgttccagcatcacactcatgacgtgcgcactgtggcccacagcccaacagcgctgatatctggaggcactgacacccacttagtctttcgtcctctcatggagaaggtggaagtaaagaattacgatgccgctctccgaaaaatcacctttccccaccgatgtctcatctcctgttctaaaaagaggcagcttctcctcttccagtttgctcatcacttagaactttggcgactgggatccacagttgcaacaggaacagtggaggccatgtgtcttttggcagtcagtccagatgggaattggctagctgcatcaggtaccagtgctggagtccatgtctacaacgtaaaacagctaaagcttcactgcacggtgcctgcttacaatttcccagtgactgctatggctattgcccccaataccaacaaccttgtcatcgctcattcggaccagcaggtatttgagtacagcatcccagacaaacagtatacagattggagccggactgtccagaagcagggctttcaccacctttggctccaaagggatactcctatcacacacatcagttttcatcccaagagaccgatgcacatccttctccatgatgcctacatgttctgcatcattgacaagtcattgccccttccaaatgacaaaaccttactctacaatccatttcctcccacgaatgaatcagatgtcatccggaggcgcacagctcatgcttttaaaatttctaagatatataagcctctactcttcatggatcttttggatgaaagaacactcgtggcagtagaacggcctctggatgacatcattgctcagctcccaccacccattaaaaagaagaaatttggaacctaaaacagggcactgtctgtgtccttccttgaactgtctaccctgttgcttttcacaaatcatggtaataaaacaagttattcttg

SEQ ID NO: 6129 - DNA, 1169 bp, Homo sapiens
  source 1..1169: mol_type = unassigned DNA
atggcgctacgtctgctgcggagggcggcgcgcggagctgcggcggcggcgctgctgaggctgaaagcgtctctagcagctgatatccccagacttggatatagttcctcatcccatcacaagtacatcccccggagggcagtgctttatgtacctggaaatgatgaaaagaaaataaagaagattccatccctgaatgtagattgtgcagtgctcgactgtgaggatggagtggctgcaaacaaaaagaatgaagctcgactgagaattgtaaaaactcttgaagacattgatctgggccctactgaaaaatgtgtgagagtcaactcagtttccagtggtctggcggaagaagacctagagacccttttgcaatcccgggtccttccttccagcctgatgctaccaaaggtggaaagtcctgaagaaatccagtggtttgcagacaaattttcattccacttaaaaggccgaaaacttgaacaaccaatgaatttaatcccttttgtggaaactgcaatgggtttgctcaattttaaggcagtgtgtgaagaaaccctgaaggtcgggcctcaagtaggtctctttctagatgcagtcgtttttggaggagaagactttcgagccagcataggtgcaacaagtagtaaagaaaccctggatattctctacgcccggcaaaagattgttgtcatagcgaaagcctttggtctccaagccatagatctggtgtacattgactttcgagatggagctgggctgcttagacagtcacgagaaggagccgccatgggcttcactggtaagcaggtgattcaccctaaccaaattgccgtggtccaggagcagttttctccttcccctgaaaaaattaagtgggctgaagaactgattgctgcctttaaagaacatcaacaattaggaaagggggcctttactttccaagggagtatgatcgacatgccattactgaagcaggcccagaacactgttacgcttgccacctccatcaaggaaaaatgatctgttaaatgaagctgtcatcaggctaaagggtattgaagctgcagagggatcaacttgtgcttgccagaggacgccaatgaagtttgaaacaccaacaatcagagattttgtttctgttcctcattaaatcatgagcttttgtg

SEQ ID NO: 6130 - DNA, 1127 bp, Homo sapiens
  source 1..1127: mol_type = unassigned DNA
gggaagatggcgctacgtctgctgcggagggcggcgcgcggagctgcggcggcggcgctgctgaggctgaaagcgtctctagcagctgatatccccagacttggatatagttcctcatcccatcacaagtacatcccccggagggcagtgctttatgtacctggaaatgatgaaaagaaaataaagaagattccatccctgaatgtagattgtgcagtgctcgactgtgaggatggagtggctgcaaacaaaaagaatgaagctcgactgagaattgtaaaaactcttgaagacattgatctgggccctactgaaaaatgtgtgagagtcaactcagtttccagtggtctggcggaagaagacctagagacccttttgcaatcccgggtccttccttccagcctgatgctaccaaaggtggaaagtcctgaagaaatccagtgggcagtgtgtgaagaaaccctgaaggtcgggcctcaagtaggtctctttctagatgcagtcgtttttggaggagaagactttcgagccagcataggtgcaacaagtagtaaagaaaccctggatattctctacgcccggcaaaagattgttgtcatagcgaaagcctttggtctccaagccatagatctggtgtacattgactttcgagatggagctgggctgcttagacagtcacgagaaggagccgccatgggcttcactggtaagcaggtgattcaccctaaccaaattgccgtggtccaggagcagttttctccttcccctgaaaaaattaagtgggctgaagaactgattgctgcctttaaagaacatcaacaattaggaaagggggcctttactttccaagggagtatgatcgacatgccattactgaagcaggcccagaacactgttacgcttgccacctccatcaaggaaaaatgatctgttaaatgaagctgtcatcaggtgggctgaacatatacagtggggttcttaaagacaaaccacaatactcaaagcaacttgttaggatgccagattgggacctgactccatttacagttcatgttaatcacaattttgttgttgttgtctcactggccagttattcccctaaaaaaatgaacgcttttccctttgga

SEQ ID NO: 6131 - DNA, 5667 bp, Homo sapiens
  source 1..5667: mol_type = unassigned DNA
aggcaaagggcggggcgcgcgcgtcgggaagatggcgctacgtctgctgcggagggcggcgcgcggagctgcggcggcggcgctgctgaggctgaaagcgtctctagcagctgatatccccagacttggatatagttcctcatcccatcacaagtacatcccccggagggcagtgctttatgtacctggaaatgatgaaaagaaaataaagaagattccatccctgaatgtagattgtgcagtgctcgactgtgaggatggagtggctgcaaacaaaaagaatgaagctcgactgagaattgtaaaaactcttgaagacattgatctgggccctactgaaaaatgtgtgagagtcaactcagtttccagtggtctggcggaagaagacctagagacccttttgcaatcccgggtccttccttccagcctgatgctaccaaaggtggaaagtcctgaagaaatccagtgggcagtgtgtgaagaaaccctgaaggtcgggcctcaagtaggtctctttctagatgcagtcgtttttggaggagaagactttcgagccagcataggtgcaacaagtagtaaagaaaccctggatattctctacgcccggcaaaagattgttgtcatagcgaaagcctttggtctccaagccatagatctggtgtacattgactttcgagatggagctgggctgcttagacagtcacgagaaggagccgccatgggcttcactggtaagcaggtgattcaccctaaccaaattgccgtggtccaggagcagttttctccttcccctgaaaaaattaagtgggctgaagaactgattgctgcctttaaagaacatcaacaattaggaaagggggcctttactttccaagggagtatgatcgacatgccattactgaagcaggcccagaacactgttacgcttgccacctccatcaaggaaaaatgatctgttaaatgaagctgtcatcaggctaaagggtattgaagctgcagagggatcaacttgtgcttgccagaggacgccaatgaagtttgaaacaccaacaatcagagattttgtttctgttcctcattaaatcatgagcttttgtgccgagactctggacgactgttccttaagaaattaacagaatgggaagttttaaactctacaccaaccttttcatgacctacacagcagcaacgctgctactcttagacaaacaccgcggggaaggctgttctgtttatttaaatttgtaaatagaaaacagttgttttttactttcatttttcacctcctcctacgcccttttggattatttcctctgcggcccctagcatgagccccaaccaggcctccccttttccccacttctctcaattcccacaggaagcccgagaggtgaggagctgaggttagacaccaggagaggcaccatcacacaaaagcgcggccgcagagtcccaccgccaccaggcgacccccacccagagagggacagacatgcggggagccagcaccgggcaagatggctctggggatcctcattctgtgaagacaccaactcatttctcaaacacaggatccaggagacagatagctcctaaatggagatggcacatgctccgtggggtccctcatagaggagtgccaccctccacactggccacgctgggctgccccagagcggccagaaaggaaggtgggagctagccccatcctcactcagaggccggaaggaggaagatggcatctcgccaacttcagagccgaatggcctctagccacactgcttccagaccccagacggggcagcagcagcagttcccagaggagcacccattgttgcagctaggacccaccaaggatgggactcctggagtcaggtgcacaccaggtaacccaggaccacgctgtgcacccccagtctgcccctctgctcagaacacagagggatgggaggatggcttggcagtgggaaggcaaaagaaggcctctctcactctgcccctgccatacgcacccgctgagggtgttagaagcagtggaggcagagctggccctaagcaaaagaagaaaataaacctcaccttgtccttcctatgggcagccctcaccccaatctaactaaccttcccatcctccagcctaatccaaagaagcccttggcttgaggggatgaagggcttgcgttctagtctccaccccagccccacaggcagccagccagccagccccacacagaggggcctcctcaaggcctcactgggagcctcctgtccccagccaaggagccctacagacctggggaaaagcaggcccctccgcaaggcccctgggtggtgcggaggccggaccggctaggcctcccgctgctggccactcccaggccacgggttcctaggtcccaaccacattggactgctcgccacgccactgccctcatcccaaactgctttgttcaaacaaaaccaccttgtttcagtctccccaaatgtccagttcattatcttcctcataacccatggtccctattagggtaggatcatgagactaagacctatgagagccacaaatctggaccaaagtcccattccctgaacagagacccaaacgacgagggtcccagaagagagttcagtcctgatcagaaacccatggtgccttagtccttgaagaacaaaactctaggaagaagatgctggaaggcaaagggtattccccctctttccccacccgcgtctctgtggtgccatgggtgggcccaggtaccctgggaaaggtgggagagcagtcaagggtgggtgtgtgatctccactgggctcactgggcacccccgacacggggaagtgagagctgcccgactcctgagccaggcgtgggtgacaggaagaggaccttgcagctaatctgattcattagaaaccatacctgtttatgttttgtgtagctcatcacaagccgcttagccatatcacccccgttattaattcttggggtctaaattatgggtaacactattaaaacattatcagaactaatgagaaacaattacttagaaaatgagccgggacaagactgagttgggaacatcagtggtgatcactgtagattagtttaataaatcatcaggtgcaaggcaagactgactgtatgtatgcaaagccccgtcacgggaaaatgaaattgagattttttttttttgcataattttttcattaatctcaataggacccgtgtggtgtagattgctttattcccctaataccttgcctgaggcgggggggggggggggtgcccaataatgtcttcattgttttactgaggtcttaatgacaatctgtgacaacctcattttaatgtatagaggattatatcaatacagtcatgttttattgaaatggtgaagggaactccagtcagagtcaggcagtgtctgtgagcacaagttaggaagtttctcggcatccgggagcgttcccgtctgatgtcccagtgttagtcctcccggccgccctcccctcctctcctccagggacggctgggaaaacagtcctgcgggatgaagacttcaccgcctccgatttgaatttgaaagtaactccttccgtggcatatttcgctgggcagatagaacaaaccatgtcgttttcccccgtctctaaaatagacatattattatcattcacacttttgcacccggtcgttttgcgggagttcgggaaactgactttcttcattggggacattgtaattttctgatgatgccacgaggagaaaaaaaatacgggtttgttttaattggaaggaccttccgcttttatgatttcggtttaccttggaaaactgaatcttctgtgttttatttctttcctctagtactagaaaagcaatgaattaattgcacaaaacaggttctgagacggcccgcaggccccgagctcgtggacgcggccgagggtcgggtgtgacccgcggagccgctgccaggcttcccagctcgtcttcgcggggaggcgggaggcaggaccagaccccagcatttcagcgtgaaagtcttcgcctttctttccgcgctgtctttcccgcgggcggagcggcgtacctgagcgcggtccccacggaggatcagtgactttcccagaccccgcgggcgagcccgcgcttgggacccggcagctctgcgcgggctggttttggagggggtggtgttcgtttgtttaaattccagttgttatttggcagcatatcgccttccgagtcagtaagaattgcccacgacgtaaagagcgacttgcaggaaggggccgaagccgtcgttagcgcccgggcggcggcggccactcgaaccccgtttccgccaagcgcgctgcaacctgcggggcgagttcgttttgttttgccaaaatcatttggggacttctttgtcattcatgcccttccttttaaatgatttttatttttttccactgtaagtgaccggctgggtttgacttttgcttcttccgacggaagggcaccgcgagccggggtgggcggccccgcgggcaggaggagcgcggggtacacgcggtggccgcagacgccgagccctgcggagccccgaggcctcgtcgcccgcgcccccggtgcgcgcggagccggggccgaggccgggccaggaggagtgtggcggcccaggaggcctggactgtgggccctgctcgcccgcccgccgcgggccgcccggagcccgcgcgcctgtcgcgcagcccggctgtaatggtggcagatcaaaggcggccccgtgtccccgcggagcccgggacaatcccgcgcctttgtgcgctgttgctaggagcccgagaaactaagagaaagtgtcaggagcatgttaatcagactcgttacactgtaacaataacgtctctctcgggtctcccaggccccagtacccccgcgcaccctgcgcgcaggccggacacctgcgcagggcccttgcgcccgccctggggtcccgccggccctggggtccctgcagccccgaatccgcacccgagccacgcggaacgactagccccgaggggccccgcaggctcccggtgcagctccctggtcgtggtctccttgaccgaagccccggcctcacaccgcctggccgcgagcccgagggacgcagggacgatcccggtcccctgcttttcagtcctccagtcgaatcgcccactttgttcaatcacagtattcgaatcaagaggaaaatgaacattccctttatggtagctttttggttatgagttttggcaaaactgttaaatcaactttgccgatttcccttgggaatccctggaggccactctaagtggtaatcccaagtttaagaaggaaatggggaaattttgctgagagtaaagatgtcgccgaactttttgaagggatttgcttcattcattcatttagtcattcaacagacacctgttgaacccgactgggtgccagaggggccagtcacaggacttattccagatgaacttttcttttgaaattagaatgcccttgtggaagccaaaggaggagcagaggcctaaaataatgtcaagtgtcaaagcaaaaagaagtgccattggctactacagtgtgtgatgataacaagagaggtgcgaattaggaattaaaaacgtttgaaaaactacaggcc

SEQ ID NO: 6132 - DNA, 2207 bp, Homo sapiens
  source 1..2207: mol_type = unassigned DNA
aaagggcggggcgcgcgcgtcgggaagatggcgctacgtctgctgcggagggcggcgcgcggagctgcggcggcggcgctgctgaggctgaaagcgtctctagcagctgatatccccagacttggatatagttcctcatcccatcacaagtacatcccccggagggcagtgctttatgtacctggaaatgatgaaaagaaaataaagaagattccatccctgaatgtagattgtgcagtgctcgactgtgaggatggagtggctgcaaacaaaaagaatgaagctcgactgagaattgtaaaaactcttgaagacattgatctgggccctactgaaaaatgtgtgagagtcaactcagtttccagtggtctggcggaagaagacctagagacccttttgcaatcccgggtccttccttccagcctgatgctaccaaaggtggaaagtcctgaagaaatccagtggtttgcagacaaattttcattccacttaaaaggccgaaaacttgaacaaccaatgaatttaatcccttttgtggaaactgcaatgggtttgctcaattttaaggcagtgtgtgaagaaaccctgaaggtcgggcctcaagtaggtctctttctagatgcagtcgtttttggaggagaagactttcgagccagcataggtgcaacaagtagtaaagaaaccctggatattctctacgcccggcaaaagattgttgtcatagcgaaagcctttggtctccaagccatagatctggtgtacattgactttcgagatggagctgggctgcttagacagtcacgagaaggagccgccatgggcttcactggtaagcaggtgattcaccctaaccaaattgccgtggtccaggagcagttttctccttcccctgaaaaaattaagtgggctgaagaactgattgctgcctttaaagaacatcaacaattaggaaagggggcctttactttccaagggagtatgatcgacatgccattactgaagcaggcccagaacactgttacgcttgccacctccatcaaggaaaaatgatctgttaaatgaagctgtcatcaggtgggctgaacatatacagtggggttcttaaagacaaaccacaatactcaaagcaacttgttaggatgccagattgggacctgactccatttacagttcatgttaatcacaattttgttgttgttgtctcactggccagttattcccctaaaaaaatgaacgcttttccctttggatccaagcttatgattttatcatttttagtgtattacgaatatgggcttatgatttcacagggaggtaagatcctggggaaagatgggctgtgaggcgaaggtaggtctttaatgaaatggatctttcccaaatagacatattccctccacccttctcatgttagtaaatgtttcctgcttgttcatttatacagctgacaccacaaataattttaagaaaagccaggcctttaaaacatagtagcaacattaaggggtcatctctatttcactagtaatctgataaaacaacagagatggcatcaaaaaagaatactaagtattatattggcttaaaaagacactttctgaaaataaactttcgaaactggttactattaacctccacccctaaaacgaaacatccatctccttgaaccgctagacgatgaacacgaaagctgtcatcctgggtgaatgctgtgagtcaaccattaccggcaattaaaaaataaatgtgcagaaacacaagaccatccattctccccctttattttcccgtttaactgtttgccattgaggctatttccccctggaaatgtatggctgggacaggactccctcagtcataaacttgtagcgtctcagaagacacaatgcacccgagctggtgcatgtggcccctgcgagatttgcatcacattagagatgcggctgcaggtcagatgggtggtgtggttaacgggcttagtaaagctgttttgaagaggttaacccagcttgtagtaagggtaaataaacataacaaccagccattgttccctattcagcatgtactcttatattgaaggctaaagggtattgaagctgcagagggatcaacttgtgcttgccagaggacgccaatgaagtttgaaacaccaacaatcagagattttgtttctgttcctcattaaatcatgagcttttgtgccgaga

SEQ ID NO: 6133 - DNA, 712 bp, Homo sapiens
  source 1..712: mol_type = unassigned DNA
aatgaagctcgactgagaattgtaaaaactcttgaagacattgatctgggccctactgaaaaatgtgtgagagtcaactcagtttccagtggtctggcggaagaagacctagagacccttttgcaatcccgggtccttccttccagcctgatgctaccaaaggtggaaagtcctgaagaaatccagtggtttgcagacaaattttcattccacttaaaaggccgaaaacttgaacaaccaatgaatttaatcccttttgtggaaactgcaatgggtttgctcaattttaaggcagtgtgtgaagaaaccctgaaggtcgggcctcaagtaggtctctttctagatgcagtcgtttttggaggagaagactttcgagccagcataggtgtcaaagacatctctctctctctttttctgtgtgtgtgtgtgtatatgtgtgtatatattttttctttgcccctcaaggatggacatttacataacaatgtatatttgccaaccatgacaatggtttttcatgacaatggaatggacactacttcctgataatttagggctcctcatagctgccctgcttctagagcactgcattattacttctgttcatttataaaagacacgagcaatagaaagcctgttgcagccccaggcatgctcaggaatatatggcatctcctttgctcctaataaatatattatgtgaacagcctca

SEQ ID NO: 6134 - DNA, 386 bp, Homo sapiens
  source 1..386: mol_type = unassigned DNA
ctccaagccatagatctggtgtacattgactttcgagatggagctgggctgcttagacagtcacgagaaggagccgccatgggcttcactggtaagcaggtgattcaccctaaccaaattgccgtggtccaggagcagttttctccttcccctgaaaaaattaagtgggctgaagaactgattgctgcctttaaagaacatcaacaattaggaaagggggcctttactttccaagggagtatgatcgacatgccattactgaagcaggcccagaacactgttacgcttgccacctccatcaaggaaaaatgatctgttaaatgaagctgtcatcaggaagcccgagaggtgaggagctgaggttagacaccaggagaggcaccatc

SEQ ID NO: 6135 - DNA, 470 bp, Homo sapiens
  source 1..470: mol_type = unassigned DNA
gaagaactgattgctgcctttaaagaacatcaacaattaggaaaggtaggtcggtattgctgctcttggctttgcattcagccttttccatcatcaccaggtcagcggtcacagagcatctcccgtgtacctggcaggtactgggtgctgggtgccaggtcctgggagtcaaagggggcctttactttccaagggagtatgatcgacatgccattactgaagcaggcccagaacactgttacgcttgccacctccatcaaggaaaaatgatctgttaaatgaagctgtcatcaggtgggctgaacatatacagtggggttcttaaagacaaaccacaatactcaaagcaacttgttaggatgccagattgggacctgactccatttacagttcatgttaatcacaattttgttgttgttgtctcactggccagttattcccctaaaaaaatgaacgcttttccctttgga

SEQ ID NO: 6136 - DNA, 610 bp, Homo sapiens
  source 1..610: mol_type = unassigned DNA
aatgaagctcgactgagaattgtaaaaactcttgaagacattgatctgggccctactgaaaaatgtgtgagagtcaactcagtttccagtggtctggcggaagaagacctagagacccttttgcaatcccgggtccttccttccagcctgatgctaccaaaggtggaaagtcctgaagaaatccagtgggcagtgtgtgaagaaaccctgaaggtcgggcctcaagtaggtctctttctagatgcagtcgtttttggaggagaagactttcgagccagcataggtgtcaaagacatctctctctctctttttctgtgtgtgtgtgtgtatatgtgtgtatatattttttctttgcccctcaaggatggacatttacataacaatgtatatttgccaaccatgacaatggtttttcatgacaatggaatggacactacttcctgataatttagggctcctcatagctgccctgcttctagagcactgcattattacttctgttcatttataaaagacacgagcaatagaaagcctgttgcagccccaggcatgctcaggaatatatggcatctcctttgctcctaataaatatattatgtgaacagcctca

SEQ ID NO: 6137 - DNA, 1448 bp, Homo sapiens
  source 1..1448: mol_type = unassigned DNA
aaagggcggggcgcgcgcgtcgggaagatggcgctacgtctgctgcggagggcggcgcgcggagctgcggcggcggcgctgctgaggctgaaagcgtctctagcagctgatatccccagacttggatatagttcctcatcccatcacaagtacatcccccggagggcagtgctttatgtacctggaaatgatgaaaagaaaataaagaagattccatccctgaatgtagattgtgcagtgctcgactgtgaggatggagtggctgcaaacaaaaagaatgaagctcgactgagaattgtaaaaactcttgaagacattgatctgggccctactgaaaaatgtgtgagagtcaactcagtttccagtggtctggcggaagaagacctagagacccttttgcaatcccgggtccttccttccagcctgatgctaccaaaggtggaaagtcctgaagaaatccagtgggcagtgtgtgaagaaaccctgaaggtcgggcctcaagtaggtctctttctagatgcagtcgtttttggaggagaagactttcgagccagcataggtgcaacaagtagtaaagaaaccctggatattctctacgcccggcaaaagattgttgtcatagcgaaagcctttggtctccaagccatagatctggtgtacattgactttcgagatggagctgggctgcttagacagtcacgagaaggagccgccatgggcttcactggtaagcaggtgattcaccctaaccaaattgccgtggtccaggagcagttttctccttcccctgaaaaaattaagtgggctgaagaactgattgctgcctttaaagaacatcaacaattaggaaagacagtgtcttgctctgccagccaggctggagtgcaatggcgtgatctcggctccctgcaacctccgcctcccgggttcaagtgattctcctgcctcagcctcctgagtagctaggattacaggcgcacaacatgcctggctaatttttgtatttttagtagagacggtgtttcaccattttggtcaggctggtctcaaactcctgacctcatgatctgcccacctccgcctcccaaagtgctgggattacaggcgtaagccaccgcgcccagcccagaattttgtagttctttttatactgaattttattaaaaatacaaagcaaccatttctataattgtcttttttttcccccactttaggtcagtgggcctcaaaaaaaaagtgaggcaatttcttaccactaccttagggaataaagaattctctctaccgtagcacgcacctccctgcagcatcttgggcagaaataggtacacgaaacacatttagtaaacattatttagctaactggtttccaaattcctgacaatgctaaaaaaaaatttattagatgtacttttaacagtatatatgacatacttctgctgccttct

SEQ ID NO: 6138 - DNA, 2975 bp, Homo sapiens
  source 1..2975: mol_type = unassigned DNA
cagtgggcggggcctccttgaggaccccgggctgggcgccgccgccggttcgtctactctttccttcagccgcctcctttcaaccttgtcaacccgtcggcgcggcctctggtgcagcggcggcggctcctgttcctgccgcagctctctccctttcttacctccccaccagatcccggagatcgcccgccatggctttacttactgcggccgcccggctcttgggaaccaagaatgcatcttgtcttgttcttgcagcccggcatgccagtgcttcctccacgaatttgaaagacatattggctgacctgatacctaaggagcaggccagaattaagactttcaggcagcaacatggcaagacggtggtgggccaaatcactgtggacatgatgtatggtggcatgagaggcatgaagggattggtctatgaaacatcagttcttgatcctgatgagggcatccgtttccgaggctttagtatccctgaatgccagaaactgctacccaaggctaagggtggggaagaacccctgcctgagggcttattttggctgctggtaactggacatatcccaacagaggaacaggtatcttggctctcaaaagagtgggcaaagagggcagctctgccttcccatgtggtcaccatgctggacaactttcccaccaatctacaccccatgtctcagctcagtgcagctgttacagccctcaacagtgaaagtaactttgcccgagcatatgcacagggtatcagccgaaccaagtactgggagttgatttatgaagactctatggatctaatcgcaaagctaccttgtgttgcagcaaagatctaccgaaatctctacagagaaggcagcggtattggggccattgactctaacctggactggtctcacaatttcaccaacatgttaggctatactgatcatcagttcactgagctcacgcgcctgtacctcaccatccacagtgaccatgagggtggcaatgtaagtgcccataccagccatttggtgggcagtgccctttccgacccttacctgtcctttgcagcagccatgaacgggctggcagggcctctccatggactggcaaatcaggaagtgcttgtctggctaacacagctgcagaaggaagttggcaaagatgtgtcagatgagaagttacgagactacatctggaacacactcaactcaggacgggttgttccaggctatggccatgcagtactaaggaagactgatccgcgatatacctgtcagcgagagtttgctctgaaacacctgcctaatgaccccatgtttaagttggttgctcagctgtacaagattgtgcccaatgtcctcttagagcagggtaaagccaagaatccttggcccaatgtagatgctcacagtggggtgctgctccagtattatggcatgacggagatgaattactacacggtcctgtttggggtgtcacgagcattgggtgtactggcacagctcatctggagccgagccttaggcttccctctagaaaggcccaagtccatgagcacagagggtctgatgaagtttgtggactctaagtcagggtaaaactggagactgggtgaaagtgactaccagaaagtgaggaagcctaaataaaaagtatacttttgtttcagggggcctttaaagacttaagattaaattatatctgaggcactgataatatgtttgaggttaaaatataaattaagactttaaaagatgaaaaatggtcccttcttccctaatcagctcccttcccctgcctggtatgagttgcccatcatacgcatggtcctggaggatgaccaggactaatgcatgtggtatgagtaggtttggccccctcactatctctagagtgagaatctggctcctgtttccatgggtcaaagccggttgcagagaatctgtagtcactttggagctttagcttctctgccaagccctcaataagccagcaaaccaggactctgccccttctgtttccataggaatcatgttggatagtcagctgtaccaagccccttggccctctcccatgcacacaaacacctcctagcaagacctgttggttagctggacatgctttggcaatttttttatactaccaagtgaccataaaggcatggcatttgttgtgactggcacccaatgtttgattttttttttaaaactatccaattaaaattaaggtctgggagtgttctgtttcccattactttaatactcacctcctcccagactttctacacctgttgcacctcaggcagaggatgttctggacctccccctcttggtccctactagagacctctcaacagatctgtgggcccagtcattgggttttatcagtgcttaatgtgaactaagttttttacttccacagaatacaagccactaccttctgacctccccaccccccaccaacccccatcttttaatatgctgtggggcatagaactccggaatgaccagcatgatattttcagagtcttgtccccggggtattagcacctctttttgaacagggaattgattcaagattggacatggtctcctctgattatcaggtactggggctgagggcattaaaaatagtaagcctccctcctcgtcccctgcctcaagaaattgcctccttatttatcaacatctttttcctccctttccctgagagctcacagtacaatgtttcagaagccccatttgcacaggttttcagcaactcagaatgctctacttctttttctttgagaaaggattaagatacactcctgctgtgcccccatctttcctccaaactcctgcctgtgtttgtgtggatacccagtcccagaaccacactgttgagttggacacactgtaaacccctgggtaactgtcaagtcatgatggagacttcaggttgttctgtataaaatgcaaaataaatgtttttattaacaa

SEQ ID NO: 6139 - DNA, 589 bp, Homo sapiens
  source 1..589: mol_type = unassigned DNA
ctccttgaggaccccgggctgggcgccgccgccgatcccggagatcgcccgccatggctttacttactgcggccgcccggctcttgggaaccaagaatgcatcttgtcttgttcttgcagcccggcatgccagtgcttcctccacgaatttgaaagacatattggctgacctgatacctaaggagcaggccagaattaagactttcaggcagcaacatggcaagacggtggtgggccaaatcactgtggacatgatgtatggtggcatgagaggcatgaagggattggtctatgaaacatcagttcttgatcctgatgagggcatccgtttccgaggctttagtatccctgaatgccagaaactgctacccaaggctaagggtggggaagaacccctgcctgagggcttattttggctgctggtaactggacatatcccaacagaggaacaggtatcttggctctcaaaagagtgggcaaagagggcagctctgccttcccatgtggtcaccatgctggacaactttcccaccaatctacaccccatgtctcagctcagtgcagctgttacagccctcaacagtgaaag

SEQ ID NO: 6140 - DNA, 8578 bp, Homo sapiens
  source 1..8578: mol_type = unassigned DNA
gcggggcggaacagatcgcagacctgggggttcgcagagccgccagtggggagatgttgaagttcaaatatggagcgcggaatcctttggatgctggtgctgctgaacccattgccagccgggcctccaggctgaatctgttcttccaggggaaaccaccctttatgactcaacagcagatgtctcctctttcccgagaagggatattagatgccctctttgttctctttgaagaatgcagtcagcctgctctgatgaagattaagcacgtgagcaactttgtccggaagtattccgacaccatagctgagttacaggagctccagccttcggcaaaggacttcgaagtcagaagtcttgtaggttgtggtcactttgctgaagtgcaggtggtaagagagaaagcaaccggggacatctatgctatgaaagtgatgaagaagaaggctttattggcccaggagcaggtttcattttttgaggaagagcggaacatattatctcgaagcacaagcccgtggatcccccaattacagtatgcctttcaggacaaaaatcacctttatctggtcatggaatatcagcctggaggggacttgctgtcacttttgaatagatatgaggaccagttagatgaaaacctgatacagttttacctagctgagctgattttggctgttcacagcgttcatctgatgggatacgtgcatcgagacatcaagcctgagaacattctcgttgaccgcacaggacacatcaagctggtggattttggatctgccgcgaaaatgaattcaaacaagatggtgaatgccaaactcccgattgggaccccagattacatggctcctgaagtgctgactgtgatgaacggggatggaaaaggcacctacggcctggactgtgactggtggtcagtgggcgtgattgcctatgagatgatttatgggagatcccccttcgcagagggaacctctgccagaaccttcaataacattatgaatttccagcggtttttgaaatttccagatgaccccaaagtgagcagtgactttcttgatctgattcaaagcttgttgtgcggccagaaagagagactgaagtttgaaggtctttgctgccatcctttcttctctaaaattgactggaacaacattcgtaactctcctccccccttcgttcccaccctcaagtctgacgatgacacctccaattttgatgaaccagagaagaattcgtgggtttcatcctctccgtgccagctgagcccctcaggcttctcgggtgaagaactgccgtttgtggggttttcgtacagcaaggcactggggattcttggtagatctgagtctgttgtgtcgggtctggactcccctgccaagactagctccatggaaaagaaacttctcatcaaaagcaaagagctacaagactctcaggacaagtgtcacaagatggagcaggaaatgacccggttacatcggagagtgtcagaggtggaggctgtgcttagtcagaaggaggtggagctgaaggcctctgagactcagagatccctcctggagcaggaccttgctacctacatcacagaatgcagtagcttaaagcgaagtttggagcaagcacggatggaggtgtcccaggaggatgacaaagcactgcagcttctccatgatatcagagagcagagccggaagctccaagaaatcaaagagcaggagtaccaggctcaagtggaagaaatgaggttgatgatgaatcagttggaagaggatcttgtctcagcaagaagacggagtgatctctacgaatctgagctgagagagtctcggcttgctgctgaagaattcaagcggaaagcgacagaatgtcagcataaactgttgaaggctaaggatcaagggaagcctgaagtgggagaatatgcgaaactggagaagatcaatgctgagcagcagctcaaaattcaggagctccaagagaaactggagaaggctgtaaaagccagcacggaggccaccgagctgctgcagaatatccgccaggcaaaggagcgagccgagagggagctggagaagctgcagaaccgagaggattcttctgaaggcatcagaaagaagctggtggaagctgaggagctcgaagagaaacatcgggaggcccaagtctcagcccagcacctagaagtgcacctgaaacagaaagagcagcactatgaggaaaagattaaagtgttggacaatcagataaagaaagacctggctgacaaggagacactggagaacatgatgcagagacacgaggaggaggcccatgagaagggcaaaattctcagcgaacagaaggcgatgatcaatgctatggattccaagatcagatccctggaacagaggattgtggaactgtctgaagccaataaacttgcagcaaatagcagtctttttacccaaaggaacatgaaggcccaagaagagatgatttctgaactcaggcaacagaaattttacctggagacacaggctgggaagttggaggcccagaaccgaaaactggaggagcagctggagaagatcagccaccaagaccacagtgacaagaatcggctgctggaactggagacaagattgcgggaggtcagtctagagcacgaggagcagaaactggagctcaagcgccagctcacagagctacagctctccctgcaggagcgcgagtcacagttgacagccctgcaggctgcacgggcggccctggagagccagcttcgccaggcgaagacagagctggaagagaccacagcagaagctgaagaggagatccaggcactcacggcacatagagatgaaatccagcgcaaatttgatgctcttcgtaacagctgtactgtaatcacagacctggaggagcagctaaaccagctgaccgaggacaacgctgaactcaacaaccaaaacttctacttgtccaaacaactcgatgaggcttctggcgccaacgacgagattgtacaactgcgaagtgaagtggaccatctccgccgggagatcacggaacgagagatgcagcttaccagccagaagcaaacgatggaggctctgaagaccacgtgcaccatgctggaggaacaggtcatggatttggaggccctaaacgatgagctgctagaaaaagagcggcagtgggaggcctggaggagcgtcctgggtgatgagaaatcccagtttgagtgtcgggttcgagagctgcagagaatgctggacaccgagaaacagagcagggcgagagccgatcagcggatcaccgagtctcgccaggtggtggagctggcagtgaaggagcacaaggctgagattctcgctctgcagcaggctctcaaagagcagaagctgaaggccgagagcctctctgacaagctcaatgacctggagaagaagcatgctatgcttgaaatgaatgcccgaagcttacagcagaagctggagactgaacgagagctcaaacagaggcttctggaagagcaagccaaattacagcagcagatggacctgcagaaaaatcacattttccgtctgactcaaggactgcaagaagctctagatcgggctgatctactgaagacagaaagaagtgacttggagtatcagctggaaaacattcaggttctctattctcatgaaaaggtgaaaatggaaggcactatttctcaacaaaccaaactcattgattttctgcaagccaaaatggaccaacctgctaaaaagaaaaagggtttatttagtcgacggaaagaggaccctgctttacccacacaggttcctctgcagtacaatgagctgaagctggccctggagaaggagaaagctcgctgtgcagagctagaggaagcccttcagaagacccgcatcgagctccggtccgcccgggaggaagctgcccaccgcaaagcaacggaccacccacacccatccacgccagccaccgcgaggcagcagatcgccatgtccgccatcgtgcggtcgccagagcaccagcccagtgccatgagcctgctggccccgccatccagccgcagaaaggagtcttcaactccagaggaatttagtcggcgtcttaaggaacgcatgcaccacaatattcctcaccgattcaacgtaggactgaacatgcgagccacaaagtgtgctgtgtgtctggataccgtgcactttggacgccaggcatccaaatgtctcgaatgtcaggtgatgtgtcaccccaagtgctccacgtgcttgccagccacctgcggcttgcctgctgaatatgccacacacttcaccgaggccttctgccgtgacaaaatgaactccccaggtctccagaccaaggagcccagcagcagcttgcacctggaagggtggatgaaggtgcccaggaataacaaacgaggacagcaaggctgggacaggaagtacattgtcctggagggatcaaaagtcctcatttatgacaatgaagccagagaagctggacagaggccggtggaagaatttgagctgtgccttcccgacggggatgtatctattcatggtgccgttggtgcttccgaactcgcaaatacagccaaagcagatgtcccatacatactgaagatggaatctcacccgcacaccacctgctggcccgggagaaccctctacttgctagctcccagcttccctgacaaacagcgctgggtcaccgccttagaatcagttgtcgcaggtgggagagtttctagggaaaaagcagaagctgatgctaaactgcttggaaactccctgctgaaactggaaggtgatgaccgtctagacatgaactgcacgctgcccttcagtgaccaggtggtgttggtgggcaccgaggaagggctctacgccctgaatgtcttgaaaaactccctaacccatgtcccaggaattggagcagtcttccaaatttatattatcaaggacctggagaagctactcatgatagcaggagaagagcgggcactgtgtcttgtggacgtgaagaaagtgaaacagtccctggcccagtcccacctgcctgcccagcccgacatctcacccaacatttttgaagctgtcaagggctgccacttgtttggggcaggcaagattgagaacgggctctgcatctgtgcagccatgcccagcaaagtcgtcattctccgctacaacgaaaacctcagcaaatactgcatccggaaagagatagagacctcagagccctgcagctgtatccacttcaccaattacagtatcctcattggaaccaataaattctacgaaatcgacatgaagcagtacacgctcgaggaattcctggataagaatgaccattccttggcacctgctgtgtttgccgcctcttccaacagcttccctgtctcaatcgtgcaggtgaacagcgcagggcagcgagaggagtacttgctgtgtttccacgaatttggagtgttcgtggattcttacggaagacgtagccgcacagacgatctcaagtggagtcgcttacctttggcctttgcctacagagaaccctatctgtttgtgacccacttcaactcactcgaagtaattgagatccaggcacgctcctcagcagggacccctgcccgagcgtacctggacatcccgaacccgcgctacctgggccctgccatttcctcaggagcgatttacttggcgtcctcataccaggataaattaagggtcatttgctgcaagggaaacctcgtgaaggagtccggcactgaacaccaccggggcccgtccacctcccgcagcagccccaacaagcgaggcccacccacgtacaacgagcacatcaccaagcgcgtggcctccagcccagcgccgcccgaaggccccagccacccgcgagagccaagcacaccccaccgctaccgcgaggggcggaccgagctgcgcagggacaagtctcctggccgccccctggagcgagagaagtcccccggccggatgctcagcacgcggagagagcggtcccccgggaggctgtttgaagacagcagcaggggccggctgcctgcgggagccgtgaggaccccgctgtcccaggtgaacaaggtctgggaccagtcttcagtataaatctcagccagaaaaaccaactcctcatcttgatctgcaggaaaacaccaaacacactatggaactctgctgatggggacccaagcgcccacgtgctcagccaccctctggctcagcggggcccagacccacctcggcacggacacccctgtctccaggaggggcaggtggctgaggctcttcggagctgtcagcgcccggtgcctgccctgggcacctccctgcagtcatctctttgcactttgttactctttcaaagcattcacaaacttttgtacctagctctagcctgtaccagttagttcatcaaaggaaaccaaccgggatgctaactacaacatggttagaatcctaattagctactttaagatcctaggattggttggtttttcttttttttttctctttgtttctttcctttttttttttttttttttaagacaacagaattcttaatagatttgaatagcgacgtatttcctgttgtagtcatttttagctcgaccacatcatcaggtctttgccaccgaggcatagtgtagaacagtcccggtcagttggccaacctcccgcagccaagtaggttcatccttgttcctgttcattctcatagatggccctgctttccccagggtgacatcgtagccaaatgtttactgttttcattgccttttatggccttgacgacttcccctcccaccagctgagaatgtatggaggtcatcggggcctcagctcggaggcagtgacttggggccaagggacctcgagacgctttccttccccaccccccagcgtcatctccccagcctgctgttcccgctttccatatagctttggccaggaaagcatgcaatagacttgctcggagcccagcactcctgggtctcggggtcggggaggggacgggggcacccacttccttgtctgtgacggcgtgttgttccccactctgggatggggaagaggcccgtcgggagttctgcatggcagttcactgcatgtgctgcccccttgggttgctctgccaatgtattaataccatcccatagctcctgccaaatcgagaccctctgacgacttgccgactaactggccaccacaagctgcagtctgtagcactgaacaaacaaaaaacaaaacgctcaagccttacgaccagagaaggatttcagcaaaccaccacctcccactcagtgtcccctccaaacttcacacttccctgcctgcagaggatgactctgttcacacccaatccagcgcggttctaccccacgaaactgtgactttccaaatgagcctttccctagggctagacctaagaccaggaagtttgagaaagcagccgcagctcaactcttccagctccgccagggttgggaagtccttaggtgcagtgcggctcccactgggtctgcggaccctcctattagagtacgaaattcctggcaactggtacagaaccaacctagaggctttgcagttggcaagctaactcgcggccttatttctgcctttaatctcccacaaggcatctgttgctttgggtcctccacgactcttaggcccgcctcaacaacccaggcacctcctaggtaggctcaaaggtagacccgtttccaccgcagcaggtgaacatgaccgtgttttcaactgtgtccacagttcagatccctttccagattgcaacctggcctgcatcccagctccttcctgctcgtgtcttaacctaagtgctttcttgtttgaaacgcctacaaacctccatgtggtagctcctttggcaaatgtcctgctgtggcgttttatgtgttgcttggagtctgtggggtcgtactccctcccctcccgtccccagggcagatttgattgaatgtttgctgaagttttgtctcttggtccacagtatttggaaaggtcactgaaaatgggtctttcagtcttggcatttcatttaggatctccatgagaaatgggcttcttgagccctgaaaatgtatattgtgtgtctcatctgtgaactgctttctgctatatagaactagctcaaaagactgtacatatttacaagaaactttatattcgtaaaaaaaaaaagaggaaattgaattggtttctacttttttattgtaaaaggtgcatttttcaacacttacttttggtttcaatggtggtagttgtggacagccatcttcactggagggtggggagctccgtgtgaccaccaagatgccagcaggatataccgtaacacgaaattgctgtcaaaagcttattagcatcaatcaagattctaggtctccaaaagtacaggctttttcttcattaccttttttattcagaacgaggaagagaacacaaggaatgattcaagatccaccttgagaggaatgaactttgttgttgaacaattagtgaaataaagcaatgatctaaactaa

SEQ ID NO: 6141 - DNA, 8708 bp, Homo sapiens
  source 1..8708: mol_type = unassigned DNA
ggcgcggggcggaacagatcgcagacctgggggttcgcagagccgccagtggggagatgttgaagttcaaatatggagcgcggaatcctttggatgctggtgctgctgaacccattgccagccgggcctccaggctgaatctgttcttccaggggaaaccaccctttatgactcaacagcagatgtctcctctttcccgagaagggatattagatgccctctttgttctctttgaagaatgcagtcagcctgctctgatgaagattaagcacgtgagcaactttgtccggaagtattccgacaccatagctgagttacaggagctccagccttcggcaaaggacttcgaagtcagaagtcttgtaggttgtggtcactttgctgaagtgcaggtggtaagagagaaagcaaccggggacatctatgctatgaaagtgatgaagaagaaggctttattggcccaggagcaggtttcattttttgaggaagagcggaacatattatctcgaagcacaagcccgtggatcccccaattacagtatgcctttcaggacaaaaatcacctttatctggtcatggaatatcagcctggaggggacttgctgtcacttttgaatagatatgaggaccagttagatgaaaacctgatacagttttacctagctgagctgattttggctgttcacagcgttcatctgatgggatacgtgcatcgagacatcaagcctgagaacattctcgttgaccgcacaggacacatcaagctggtggattttggatctgccgcgaaaatgaattcaaacaagatggtgaatgccaaactcccgattgggaccccagattacatggctcctgaagtgctgactgtgatgaacggggatggaaaaggcacctacggcctggactgtgactggtggtcagtgggcgtgattgcctatgagatgatttatgggagatcccccttcgcagagggaacctctgccagaaccttcaataacattatgaatttccagcggtttttgaaatttccagatgaccccaaagtgagcagtgactttcttgatctgattcaaagcttgttgtgcggccagaaagagagactgaagtttgaaggtctttgctgccatcctttcttctctaaaattgactggaacaacattcgtaactctcctccccccttcgttcccaccctcaagtctgacgatgacacctccaattttgatgaaccagagaagaattcgtgggtttcatcctctccgtgccagctgagcccctcaggcttctcgggtgaagaactgccgtttgtggggttttcgtacagcaaggcactggggattcttggtagatctgagtctgttgtgtcgggtctggactcccctgccaagactagctccatggaaaagaaacttctcatcaaaagcaaagagctacaagactctcaggacaagtgtcacaagatggagcaggaaatgacccggttacatcggagagtgtcagaggtggaggctgtgcttagtcagaaggaggtggagctgaaggcctctgagactcagagatccctcctggagcaggaccttgctacctacatcacagaatgcagtagcttaaagcgaagtttggagcaagcacggatggaggtgtcccaggaggatgacaaagcactgcagcttctccatgatatcagagagcagagccggaagctccaagaaatcaaagagcaggagtaccaggctcaagtggaagaaatgaggttgatgatgaatcagttggaagaggatcttgtctcagcaagaagacggagtgatctctacgaatctgagctgagagagtctcggcttgctgctgaagaattcaagcggaaagcgacagaatgtcagcataaactgttgaaggctaaggatcaagggaagcctgaagtgggagaatatgcgaaactggagaagatcaatgctgagcagcagctcaaaattcaggagctccaagagaaactggagaaggctgtaaaagccagcacggaggccaccgagctgctgcagaatatccgccaggcaaaggagcgagccgagagggagctggagaagctgcagaaccgagaggattcttctgaaggcatcagaaagaagctggtggaagctgaggaacgccgccattctctggagaacaaggtaaagagactagagaccatggagcgtagagaaaacagactgaaggatgacatccagacaaaatcccaacagatccagcagatggctgataaaattctggagctcgaagagaaacatcgggaggcccaagtctcagcccagcacctagaagtgcacctgaaacagaaagagcagcactatgaggaaaagattaaagtgttggacaatcagataaagaaagacctggctgacaaggagacactggagaacatgatgcagagacacgaggaggaggcccatgagaagggcaaaattctcagcgaacagaaggcgatgatcaatgctatggattccaagatcagatccctggaacagaggattgtggaactgtctgaagccaataaacttgcagcaaatagcagtctttttacccaaaggaacatgaaggcccaagaagagatgatttctgaactcaggcaacagaaattttacctggagacacaggctgggaagttggaggcccagaaccgaaaactggaggagcagctggagaagatcagccaccaagaccacagtgacaagaatcggctgctggaactggagacaagattgcgggaggtcagtctagagcacgaggagcagaaactggagctcaagcgccagctcacagagctacagctctccctgcaggagcgcgagtcacagttgacagccctgcaggctgcacgggcggccctggagagccagcttcgccaggcgaagacagagctggaagagaccacagcagaagctgaagaggagatccaggcactcacggcacatagagatgaaatccagcgcaaatttgatgctcttcgtaacagctgtactgtaatcacagacctggaggagcagctaaaccagctgaccgaggacaacgctgaactcaacaaccaaaacttctacttgtccaaacaactcgatgaggcttctggcgccaacgacgagattgtacaactgcgaagtgaagtggaccatctccgccgggagatcacggaacgagagatgcagcttaccagccagaagcaaacgatggaggctctgaagaccacgtgcaccatgctggaggaacaggtcatggatttggaggccctaaacgatgagctgctagaaaaagagcggcagtgggaggcctggaggagcgtcctgggtgatgagaaatcccagtttgagtgtcgggttcgagagctgcagagaatgctggacaccgagaaacagagcagggcgagagccgatcagcggatcaccgagtctcgccaggtggtggagctggcagtgaaggagcacaaggctgagattctcgctctgcagcaggctctcaaagagcagaagctgaaggccgagagcctctctgacaagctcaatgacctggagaagaagcatgctatgcttgaaatgaatgcccgaagcttacagcagaagctggagactgaacgagagctcaaacagaggcttctggaagagcaagccaaattacagcagcagatggacctgcagaaaaatcacattttccgtctgactcaaggactgcaagaagctctagatcgggctgatctactgaagacagaaagaagtgacttggagtatcagctggaaaacattcaggttctctattctcatgaaaaggtgaaaatggaaggcactatttctcaacaaaccaaactcattgattttctgcaagccaaaatggaccaacctgctaaaaagaaaaagggtttatttagtcgacggaaagaggaccctgctttacccacacaggttcctctgcagtacaatgagctgaagctggccctggagaaggagaaagctcgctgtgcagagctagaggaagcccttcagaagacccgcatcgagctccggtccgcccgggaggaagctgcccaccgcaaagcaacggaccacccacacccatccacgccagccaccgcgaggcagcagatcgccatgtccgccatcgtgcggtcgccagagcaccagcccagtgccatgagcctgctggccccgccatccagccgcagaaaggagtcttcaactccagaggaatttagtcggcgtcttaaggaacgcatgcaccacaatattcctcaccgattcaacgtaggactgaacatgcgagccacaaagtgtgctgtgtgtctggataccgtgcactttggacgccaggcatccaaatgtctcgaatgtcaggtgatgtgtcaccccaagtgctccacgtgcttgccagccacctgcggcttgcctgctgaatatgccacacacttcaccgaggccttctgccgtgacaaaatgaactccccaggtctccagaccaaggagcccagcagcagcttgcacctggaagggtggatgaaggtgcccaggaataacaaacgaggacagcaaggctgggacaggaagtacattgtcctggagggatcaaaagtcctcatttatgacaatgaagccagagaagctggacagaggccggtggaagaatttgagctgtgccttcccgacggggatgtatctattcatggtgccgttggtgcttccgaactcgcaaatacagccaaagcagatgtcccatacatactgaagatggaatctcacccgcacaccacctgctggcccgggagaaccctctacttgctagctcccagcttccctgacaaacagcgctgggtcaccgccttagaatcagttgtcgcaggtgggagagtttctagggaaaaagcagaagctgatgctaaactgcttggaaactccctgctgaaactggaaggtgatgaccgtctagacatgaactgcacgctgcccttcagtgaccaggtggtgttggtgggcaccgaggaagggctctacgccctgaatgtcttgaaaaactccctaacccatgtcccaggaattggagcagtcttccaaatttatattatcaaggacctggagaagctactcatgatagcaggagaagagcgggcactgtgtcttgtggacgtgaagaaagtgaaacagtccctggcccagtcccacctgcctgcccagcccgacatctcacccaacatttttgaagctgtcaagggctgccacttgtttggggcaggcaagattgagaacgggctctgcatctgtgcagccatgcccagcaaagtcgtcattctccgctacaacgaaaacctcagcaaatactgcatccggaaagagatagagacctcagagccctgcagctgtatccacttcaccaattacagtatcctcattggaaccaataaattctacgaaatcgacatgaagcagtacacgctcgaggaattcctggataagaatgaccattccttggcacctgctgtgtttgccgcctcttccaacagcttccctgtctcaatcgtgcaggtgaacagcgcagggcagcgagaggagtacttgctgtgtttccacgaatttggagtgttcgtggattcttacggaagacgtagccgcacagacgatctcaagtggagtcgcttacctttggcctttgcctacagagaaccctatctgtttgtgacccacttcaactcactcgaagtaattgagatccaggcacgctcctcagcagggacccctgcccgagcgtacctggacatcccgaacccgcgctacctgggccctgccatttcctcaggagcgatttacttggcgtcctcataccaggataaattaagggtcatttgctgcaagggaaacctcgtgaaggagtccggcactgaacaccaccggggcccgtccacctcccgcagcagccccaacaagcgaggcccacccacgtacaacgagcacatcaccaagcgcgtggcctccagcccagcgccgcccgaaggccccagccacccgcgagagccaagcacaccccaccgctaccgcgaggggcggaccgagctgcgcagggacaagtctcctggccgccccctggagcgagagaagtcccccggccggatgctcagcacgcggagagagcggtcccccgggaggctgtttgaagacagcagcaggggccggctgcctgcgggagccgtgaggaccccgctgtcccaggtgaacaaggtctgggaccagtcttcagtataaatctcagccagaaaaaccaactcctcatcttgatctgcaggaaaacaccaaacacactatggaactctgctgatggggacccaagcgcccacgtgctcagccaccctctggctcagcggggcccagacccacctcggcacggacacccctgtctccaggaggggcaggtggctgaggctcttcggagctgtcagcgcccggtgcctgccctgggcacctccctgcagtcatctctttgcactttgttactctttcaaagcattcacaaacttttgtacctagctctagcctgtaccagttagttcatcaaaggaaaccaaccgggatgctaactacaacatggttagaatcctaattagctactttaagatcctaggattggttggtttttcttttttttttctctttgtttctttcctttttttttttttttttttaagacaacagaattcttaatagatttgaatagcgacgtatttcctgttgtagtcatttttagctcgaccacatcatcaggtctttgccaccgaggcatagtgtagaacagtcccggtcagttggccaacctcccgcagccaagtaggttcatccttgttcctgttcattctcatagatggccctgctttccccagggtgacatcgtagccaaatgtttactgttttcattgccttttatggccttgacgacttcccctcccaccagctgagaatgtatggaggtcatcggggcctcagctcggaggcagtgacttggggccaagggacctcgagacgctttccttccccaccccccagcgtcatctccccagcctgctgttcccgctttccatatagctttggccaggaaagcatgcaatagacttgctcggagcccagcactcctgggtctcggggtcggggaggggacgggggcacccacttccttgtctgtgacggcgtgttgttccccactctgggatggggaagaggcccgtcgggagttctgcatggcagttcactgcatgtgctgcccccttgggttgctctgccaatgtattaataccatcccatagctcctgccaaatcgagaccctctgacgacttgccgactaactggccaccacaagctgcagtctgtagcactgaacaaacaaaaaacaaaacgctcaagccttacgaccagagaaggatttcagcaaaccaccacctcccactcagtgtcccctccaaacttcacacttccctgcctgcagaggatgactctgttcacacccaatccagcgcggttctaccccacgaaactgtgactttccaaatgagcctttccctagggctagacctaagaccaggaagtttgagaaagcagccgcagctcaactcttccagctccgccagggttgggaagtccttaggtgcagtgcggctcccactgggtctgcggaccctcctattagagtacgaaattcctggcaactggtacagaaccaacctagaggctttgcagttggcaagctaactcgcggccttatttctgcctttaatctcccacaaggcatctgttgctttgggtcctccacgactcttaggcccgcctcaacaacccaggcacctcctaggtaggctcaaaggtagacccgtttccaccgcagcaggtgaacatgaccgtgttttcaactgtgtccacagttcagatccctttccagattgcaacctggcctgcatcccagctccttcctgctcgtgtcttaacctaagtgctttcttgtttgaaacgcctacaaacctccatgtggtagctcctttggcaaatgtcctgctgtggcgttttatgtgttgcttggagtctgtggggtcgtactccctcccctcccgtccccagggcagatttgattgaatgtttgctgaagttttgtctcttggtccacagtatttggaaaggtcactgaaaatgggtctttcagtcttggcatttcatttaggatctccatgagaaatgggcttcttgagccctgaaaatgtatattgtgtgtctcatctgtgaactgctttctgctatatagaactagctcaaaagactgtacatatttacaagaaactttatattcgtaaaaaaaaaaagaggaaattgaattggtttctacttttttattgtaaaaggtgcatttttcaacacttacttttggtttcaatggtggtagttgtggacagccatcttcactggagggtggggagctccgtgtgaccaccaagatgccagcaggatataccgtaacacgaaattgctgtcaaaagcttattagcatcaatcaagattctaggtctccaaaagtacaggctttttcttcattaccttttttattcagaacgaggaagagaacacaaggaatgattcaagatccaccttgagaggaatgaactttgttgttgaacaattagtgaaataaagcaatgatctaaactaat

SEQ ID NO: 6142 - DNA, 981 bp, Homo sapiens
  source 1..981: mol_type = unassigned DNA
atggatcctgaacacgccaaacctgagtcatccgaggcaccttcagggaacttgaaacaaccggagactgccgcagccctggcaagtagcggcagcgtagtgagttctgtacccaaggcacagcgcaacatctcagcgaagaccgcaccccggaagcaccccgcagtctcaattcgcagtgcgcagtccgcagccgccgcacgtccccaaggcagtgagggcaccgcaccctcaaggaaagccaccacacgcccacccccaaagcccacactcccaccccccacgccctctgcacacactgaatccaaactcttaaatgagatggcgatcaaagagcgcgtggagggccgagccaaagtcccgtacaaattcagggacagcctcaaacgtttctccttctcgcccactggaatgttgaagatcctgagactgagtcttatcttaggagcattagcttgtttcatcatcacccaagccaatgagtcatttataacaatcacaagtctggaaatctgcattgtcgttttttttattctaatatatgtgctaacccttcaccacttgctgacctatttacattggcccttacttgatcttaccaacagtatcattacagctgtgttcctttcagtagttgccatcttggccatgcaagaaaagaaaagaaggcatttactctatgtcggggggcggtaatcgtgtgttgcatcgatgcgtttgtggtcaccacgaagatgaggaccaacttgaaaagattcctgggagtcgaagttgaaaggaagctttcccccgccaaggacgcctaccccgaaaccggccccgacgccccgcagaggcccgcctgaagccagcccggcgccctagcagatgcacgtgtctgtcgaatcgctgcctccgagcccacccccgagctcgcatgctgtcacccattccagcctaaatgtgaccataaaattagggctgctgcttttatcgagaaca

SEQ ID NO: 6143 - DNA, 624 bp, Homo sapiens
  source 1..624: mol_type = unassigned DNA
agagccgggtgcacgcgccggggaggtagccaacagccgttgggacgcgacgctggttcccaggggagagccagccgctgccgcggcactggttcagacggccaggccctagggacccaccatggatcctgaacacgccaaacctgagtcatccgaggcaccttcagggaacttgaaacaaccggagactgccgcagccctggcaagtagcggcagcgtagatcttaccaacagtatcattacagctgtgttcctttcagtagttgccatcttggccatgcaagaaaagaaaagaaggcatttactctatgtcggggggtccctgtgtctcacagcggtaatcgtgtgttgcatcgatgcgtttgtggtcaccacgaagatgaggaccaacttgaaaagattcctgggagtcgaagttgaaaggaagctttcccccgccaaggacgcctaccccgaaaccggccccgacgccccgcagaggcccgcctgaagccagcccggcgccctagcagatgcacgtgtctgtcgaatcgctgcctccgagcccacccccgagctcgcatgctgtcacccattccagcctaaatgtgaccataaaattagggctgctgcttttatcgagaa

SEQ ID NO: 6144 - DNA, 606 bp, Homo sapiens
  source 1..606: mol_type = unassigned DNA
agagccgggtgcacgcgccggggaggtagccaacagccgttgggacgcgacgctggttcccaggggagagccagccgctgccgcggcactggttcagacggccaggccctagggacccaccatggatcctgaacacgccaaacctgagtcatccgaggcaccttcagggaacttgaaacaaccggagactgccgcagccctggatcttaccaacagtatcattacagctgtgttcctttcagtagttgccatcttggccatgcaagaaaagaaaagaaggcatttactctatgtcggggggtccctgtgtctcacagcggtaatcgtgtgttgcatcgatgcgtttgtggtcaccacgaagatgaggaccaacttgaaaagattcctgggagtcgaagttgaaaggaagctttcccccgccaaggacgcctaccccgaaaccggccccgacgccccgcagaggcccgcctgaagccagcccggcgccctagcagatgcacgtgtctgtcgaatcgctgcctccgagcccacccccgagctcgcatgctgtcacccattccagcctaaatgtgaccataaaattagggctgctgcttttatcgagaa

SEQ ID NO: 6145 - DNA, 636 bp, Homo sapiens
  source 1..636: mol_type = unassigned DNA
atggatcctgaacacgccaaacctgagtcatccgaggcaccttcagggaacttgaaacaaccggagactgccgcagccctggcaagtagcggcagcgtagtgagttctgtacccaaggcacagcgcaacatctcagcgaagaccgcaccccggaagcaccccgcagtctcaattcgcagtgcgcagtccgcagccgccgcacgtccccaaggcagtgagggcaccgcaccctcaaggatcttaccaacagtatcattacagctgtgttcctttcagtagttgccatcttggccatgcaagaaaagaaaagaaggcatttactctatgtcggggggtccctgtgtctcacagcggtaatcgtgtgttgcatcgatgcgtttgtggtcaccacgaagatgaggaccaacttgaaaagattcctgggagtcgaagttgaaaggaagctttcccccgccaaggacgcctaccccgaaaccggccccgacgccccgcagaggcccgcctgaagccagcccggcgccctagcagatgcacgtgtctgtcgaatcgctgcctccgagcccacccccgagctcgcatgctgtcacccattccagcctaaatgtgaccataaaattagggctgctgcttttatcg

SEQ ID NO: 6146 - DNA, 1064 bp, Homo sapiens
  source 1..1064: mol_type = unassigned DNA
ggttcccaggggagagccagccgctgccgcggcactggttcagacggccaggccctagggacccaccatggatcctgaacacgccaaacctgagtcatccgaggcaccttcagggaacttgaaacaaccggagactgccgcagccctggcaagtagcggcagcgtagtgagttctgtacccaaggcacagcgcaacatctcagcgaagaccgcaccccggaagcaccccgcagtctcaattcgcagtgcgcagtccgcagccgccgcacgtccccaaggcagtgagggcaccgcaccctcaaggaaagccaccacacgcccacccccaaagcccacactcccaccccccacgccctctgcacacactgaatccaaactcttaaatgagatggcgatcaaagagcgcgtggagggccgagccaaagtcccgtacaaattcagggacagcctcaaacgtttctccttctcgcccactggaatgttgaagatcctgagactgagtcttatcttaggagcattagcttgtttcatcatcacccaagccaatgagtcatttataacaatcacaagtctggaaatctgcattgtcgttttttttattctaatatatgtgctaacccttcaccacttgctgacctatttacattggcccttacttgatcttaccaacagtatcattacagctgtgttcctttcagtagttgccatcttggccatgcaagaaaagaaaagaaggcatttactctatgtcggggggtccctgtgtctcacagcggtaatcgtgtgttgcatcgatgcgtttgtggtcaccacgaagatgaggaccaacttgaaaagattcctgggagtcgaagttgaaaggaagctttcccccgccaaggacgcctaccccgaaaccggccccgacgccccgcagaggcccgcctgaagccagcccggcgccctagcagatgcacgtgtctgtcgaatcgctgcctccgagcccacccccgagctcgcatgctgtcacccattccagcctaaatgtgaccataaaattagggctgctgcttttatcgagaaca

SEQ ID NO: 6147 - DNA, 765 bp, Homo sapiens
  source 1..765: mol_type = unassigned DNA
agagccgggtgcacgcgccggggaggtagccaacagccgttgggacgcgacgctggttcccaggggagagccagccgctgccgcggcactggttcagacggccaggccctagggacccaccatggatcctgaacacgccaaacctgagtcatccgaggcaccttcagggaacttgaaacaaccggagactgccgcagccctgagtcttatcttaggagcattagcttgtttcatcatcacccaagccaatgagtcatttataacaatcacaagtctggaaatctgcattgtcgttttttttattctaatatatgtgctaacccttcaccacttgctgacctatttacattggcccttacttgatcttaccaacagtatcattacagctgtgttcctttcagtagttgccatcttggccatgcaagaaaagaaaagaaggcatttactctatgtcggggggtccctgtgtctcacagcggtaatcgtgtgttgcatcgatgcgtttgtggtcaccacgaagatgaggaccaacttgaaaagattcctgggagtcgaagttgaaaggaagctttcccccgccaaggacgcctaccccgaaaccggccccgacgccccgcagaggcccgcctgaagccagcccggcgccctagcagatgcacgtgtctgtcgaatcgctgcctccgagcccacccccgagctcgcatgctgtcacccattccagcctaaatgtgaccataaaattagggctgctgcttttatcgagaa

SEQ ID NO: 6148 - DNA, 749 bp, Homo sapiens
  source 1..749: mol_type = unassigned DNA
agagccgggtgcacgcgccggggaggtagccaacagccgttgggacgcgacgctggttcccaggggagagccagccgctgccgcggcactggttcagacggccaggccctagggacccaccatggatcctgaacacgccaaacctgagtcatccgaggcaccttcagggaacttgaaacaaccggagactgccgcagccctgagtcttatcttaggagcattagcttgtttcatcatcacccaagccaatgagtcatttataacaatcacaagtctggaaatctgcattgtcgttttttttattctaatatatgtgctaacccttcaccacttgctgacctatttacattggcccttacttgatcttaccaacagtatcattacagctgtgttcctttcagtagttgccatcttggccatgcaagaaaagaaaagaaggcatttactctatgtcggggggcggtaatcgtgtgttgcatcgatgcgtttgtggtcaccacgaagatgaggaccaacttgaaaagattcctgggagtcgaagttgaaaggaagctttcccccgccaaggacgcctaccccgaaaccggccccgacgccccgcagaggcccgcctgaagccagcccggcgccctagcagatgcacgtgtctgtcgaatcgctgcctccgagcccacccccgagctcgcatgctgtcacccattccagcctaaatgtgaccataaaattagggctgctgcttttatcgagaa

SEQ ID NO: 6149 - DNA, 240 bp, Homo sapiens
  source 1..240: mol_type = unassigned DNA
cgagagccgggtgcacgcgccggggaggtagccaacagccgttgggacgcgacgctggttcccaggggagagccagccgctgccgcggcactggttcagacggccaggccctagggacccaccatggatcctgaacacgccaaacctgagtcatccgaggcaccttcagggaacttgaaacaaccggagactgccgcagccctggaagcagacaaagcaaatatgagcaactttaattga

SEQ ID NO: 6150 - DNA, 493 bp, Homo sapiens
  source 1..493: mol_type = unassigned DNA
agagccgggtgcacgcgccggggaggtagccaacagccgttgggacgcgacgctggttcccaggggagagccagccgctgccgcggcactggttcagacggccaggccctagggacccaccatggatcctgaacacgccaaacctgagtcatccgaggcaccttcagggaacttgaaacaaccggagactgccgcagccctgcggtaatcgtgtgttgcatcgatgcgtttgtggtcaccacgaagatgaggaccaacttgaaaagattcctgggagtcgaagttgaaaggaagctttcccccgccaaggacgcctaccccgaaaccggccccgacgccccgcagaggcccgcctgaagccagcccggcgccctagcagatgcacgtgtctgtcgaatcgctgcctccgagcccacccccgagctcgcatgctgtcacccattccagcctaaatgtgaccataaaattagggctgctgcttttatcgagaaca

SEQ ID NO: 6151 - DNA, 1054 bp, Homo sapiens
  source 1..1054: mol_type = unassigned DNA
gttggcattcggtggtcctggcagttagctgagcacgccctctgagccgctcggtggacaccaggcactctagtaggcctggcctacccagaaacagcaggagagagaagaaacaggccagctgtgagaagccaaggacaccgagtcagtcatggcacctaaggcggcaaagggggccaagccagagccagcaccagctccacctccacccggggccaaacccgaggaagacaagaaggacggtaaggagccatcggacaaacctcaaaaggcggtgcaggaccataaggagccatcggacaaacctcaaaaggcggtgcagcccaagcacgaagtgggcacgaggagggggtgtcgccgctaccggtgggaattaaaagacagcaataaagagttctggctcttggggcacgctgagatcaagattcggagtttgggctgcctaatagctgcaatgatactgttgtcctcactcaccgtgcaccccatcttgaggcttatcatcaccatggagatatccttcttcagcttcttcatcttactgtacagctttgccattcatagatacatacccttcatcctgtggcccatttctgacctcttcaacgacctgattgcttgtgcgttccttgtgggagccgtggtctttgctgtgagaagtcggcgatccatgaatctccactacttacttgctgtgatccttattggtgcggctggagtttttgcttttatcgatgtgtgtcttcaaagaaaccacttcagaggcaagaaggccaaaaagcatatgctggttcctcctccaggaaaggaaaaaggaccccagcagggcaagggaccagaacccgccaagccaccagaacctggcaagccaccagggccagcaaagggaaagaaatgacttggaggaggctcctggtgtctgaaacggcagtgtattttacagcaatatgtttccactctcttccttgtcttctttctggaatggttttcttttccattttcattaccacctttgcttggaaaagaatggattaatggattctaaaagcctaaa

SEQ ID NO: 6152 - DNA, 904 bp, Homo sapiens
  source 1..904: mol_type = unassigned DNA
ggcgcgggagttggcattcggtggtcctggcagttagctgagcacgccctctgagccgctcggtggacaccaggcactctagtaggcctggcctacccagaaacagcaggagagagaagaaacaggccagctgtgagaagccaaggacaccgagtcagtcatggcacctaaggcggcaaagggggccaagccagagccagcaccagctccacctccacccggggccaaacccgaggaagacaagaaggacggtaaggagccatcggacaaacctcaaaaggcggtgcaggaccataaggagccatcggacaaacctcaaaaggcggtgcagcccaagcacgaagtgggcacgaggagggggtgtcgccgctaccggtgggaattaaaagacagcaataaagagttctggctcttggggcacgctgagatcaagattcggagtttggacctcttcaacgacctgattgcttgtgcgttccttgtgggagccgtggtctttgctgtgagaagtcggcgatccatgaatctccactacttacttgctgtgatccttattggtgcggctggagtttttgcttttatcgatgtgtgtcttcaaagaaaccacttcagaggcaagaaggccaaaaagcatatgctggttcctcctccaggaaaggaaaaaggaccccagcagggcaagggaccagaacccgccaagccaccagaacctggcaagccaccagggccagcaaagggaaagaaatgacttggaggaggctcctggtgtctgaaacggcagtgtattttacagcaatatgtttccactctcttccttgtcttctttctggaatggttttcttttccattttcattaccacctttgcttggaaaagaatggattaatggattctaaaagcctaaa

SEQ ID NO: 6153 - DNA, 605 bp, Homo sapiens
  source 1..605: mol_type = unassigned DNA
tgcagatgtgcgtgcctgtgtgtgtttgcgcgcgcgcgcgcgtgtgtgtgtgtctgtgtgtgtgcctggagctgcgcttgcaggtctgagagtcctctgagaatgggttgggggaggcgggtgcaggaccgaggcctggaacagccaacaaagaggccctggaggagggtggggctggccggggacaggaggggtggccaagaaagtcgcaagaaaactccggcccccaagaaaaagagagggcatgggttgcggagccgacatcacggccggggtctttgctgtttagacgcctgggttcccggatcccagacacgcgcacgggcaggaagttagaccggagacagcgacccgggtttccgcttccctccgggcgcgagaagaggggagccaggccgagccccggccctaccgccgccgccgccatgtggcccccagaccccgaccccgacccggaccccgagcctgccggcggctcccgtcccggccccgcggtccccgggctccgcgccctgctgccggcgcgggctttcctctgctctctcaaaggccccggtgggtttgtctgcacttggtgctcctgcccacaccagccactttggtga

SEQ ID NO: 6154 - DNA, 2123 bp, Homo sapiens
  source 1..2123: mol_type = unassigned DNA
aagaaaactccggcccccaagaaaaagagagggcatgggttgcggagccgacatcacggccggggtctttgctgtttagacgcctgggttcccggatcccagacacgcgcacgggcaggaagttagaccggagacagcgagtatagacagcccttctggataggggcagacgggtgggagctccgaaggggtgccggggcggtgatcgggaggtctccagcggcccgaaccagggtgaagaagaagcccgggtttccgcttccctccgggcgcgagaagaggggagccaggccgagccccggccctaccgccgccgccgccatgtggcccccagaccccgaccccgacccggaccccgagcctgccggcggctcccgtcccggccccgcggtccccgggctccgcgccctgctgccggcgcgggctttcctctgctctctcaaaggccgcctcctgctggccgagtcgggtctctcattcatcacttttatctgctatgtggcgtcctcagcatctgccttcctcacagcgcctctgctggagttcctgctggccttgtacttcctctttgctgatgccatgcagctgaatgacaagtggcagggcttgtgctggcccatgatggacttcctgcgctgtgtcaccgcggccctcatctactttgctatctccatcacggccatcgccaagtactcggatggggcttccaaagccgctggggtgtttggcttctttgctaccatcgtgtttgcaactgatttctacctgatctttaacgacgtggccaaattcctcaaacaaggggactctgcagatgagaccacagcccacaagacagaagaagagaattccgactcggactctgactgaaggcctggcgggtgccttggcaacctgagccacacaggcctccacccctgcgcctcacaggggtcgctggcgttggagcggaggcctggacttctgagttgcagagggggctgcggacacagcaggccccctacagcctcaggttctgcctgagcccagcctaccaggcttgcccctcagctcagcactgttgaccacgctgcgtatgagggcatcttgggtatcccactccttctccccatttctgtcccacaggccttcagccctttaacgtctctgccaaaaaccagcacaaggagacaaagcagagccttgtctgtatctgggcagcaggtgttccatgctgctaggtggcgggggtcgggggtcttctgtttcactaacaggaacaaagacagaaaccatgacagggctgccccgccaggccccggtgggtttgtctgcacttggtgctcctgcccacaccagccactttggtgacaatgacccttccaagaatctttggttcaaggagcaccagttccctcttcattcttgaagcagggagaaattgacctttgccttgtcgcccaggaagtggggctcggcacccataactaacacctcccacccttggaaaccatgtcttctgggggtgagatgaccattctgggtctaagactgtttcaaagaagagctcatagactgactggtccagaagacagagggtacaacagtggcatcacagtgacagtgtcatggggagctgggcgggcccagccaaaccctccttcttcctagagcccagccagcaggcaggagttcctggaccctcaggacagtgaacttccagacctcagggcaggtctatgggccactgcaggagatgagaccagccttctgtgttcacctaacgatttatactgtgtatctgtctttgatggaattttgtaactttttatatttttttatgcaaaagcagcttcttaacagatggcattttctgtgactctaggcctcacaaaagagccagagttctggacccatgtttggagcatttgtagccttattctcttgcgtgtgaatctcttaccctgaaaaaaagccataatgaattaagccagactgaccacttgcttggagtgtgtgcttgaaaaaaccagagcaatactgttgggtattgtatcaggcttcagtacaaactggtaacaccaatgtggatcctgacagctttcagttttagcaaaaatacacgtgaaatctgactaccattt

SEQ ID NO: 6155 - DNA, 2330 bp, Homo sapiens
  source 1..2330: mol_type = unassigned DNA
gtgtgtgtgtgtgtgtgtgtgagagagagagatgtgttggggtggggggactgcaggtcaggaagtcctgcagatgtgcgtgcctgtgtgtgtttgcgcgcgcgcgcgcgtgtgtgtgtgtctgtgtgtgtgcctggagctgcgcttgcaggtctgagagtcctctgagaatgggttgggggaggcgggtgcaggaccgaggcctggaacagccaacaaagaggccctggaggagggtggggctggccggggacaggaggggtggccaagaaagtcgcaagaaaactccggcccccaagaaaaagagagggcatgggttgcggagccgacatcacggccggggtctttgctgtttagacgcctgggttcccggatcccagacacgcgcacgggcaggaagttagaccggagacagcgagtatagacagcccttctggataggggcagacggcccgggtttccgcttccctccgggcgcgagaagaggggagccaggccgagccccggccctaccgccgccgccgccatgtggcccccagaccccgaccccgacccggaccccgagcctgccggcggctcccgtcccggccccgcggtccccgggctccgcgccctgctgccggcgcgggctttcctctgctctctcaaaggccgcctcctgctggccgagtcgggtctctcattcatcacttttatctgctatgtggcgtcctcagcatctgccttcctcacagcgcctctgctggagttcctgctggccttgtacttcctctttgctgatgccatgcagctgaatgacaagtggcagggcttgtgctggcccatgatggacttcctgcgctgtgtcaccgcggccctcatctactttgctatctccatcacggccatcgccaagtactcggatggggcttccaaagccgctggggtgtttggcttctttgctaccatcgtgtttgcaactgatttctacctgatctttaacgacgtggccaaattcctcaaacaaggggactctgcagatgagaccacagcccacaagacagaagaagagaattccgactcggactctgactgaaggcctggcgggtgccttggcaacctgagccacacaggcctccacccctgcgcctcacaggggtcgctggcgttggagcggaggcctggacttctgagttgcagagggggctgcggacacagcaggccccctacagcctcaggttctgcctgagcccagcctaccaggcttgcccctcagctcagcactgttgaccacgctgcgtatgagggcatcttgggtatcccactccttctccccatttctgtcccacaggccttcagccctttaacgtctctgccaaaaaccagcacaaggagacaaagcagagccttgtctgtatctgggcagcaggtgttccatgctgctaggtggcgggggtcgggggtcttctgtttcactaacaggaacaaagacagaaaccatgacagggctgccccgccaggccccggtgggtttgtctgcacttggtgctcctgcccacaccagccactttggtgacaatgacccttccaagaatctttggttcaaggagcaccagttccctcttcattcttgaagcagggagaaattgacctttgccttgtcgcccaggaagtggggctcggcacccataactaacacctcccacccttggaaaccatgtcttctgggggtgagatgaccattctgggtctaagactgtttcaaagaagagctcatagactgactggtccagaagacagagggtacaacagtggcatcacagtgacagtgtcatggggagctgggcgggcccagccaaaccctccttcttcctagagcccagccagcaggcaggagttcctggaccctcaggacagtgaacttccagacctcagggcaggtctatgggccactgcaggagatgagaccagccttctgtgttcacctaacgatttatactgtgtatctgtctttgatggaattttgtaactttttatatttttttatgcaaaagcagcttcttaacagatggcattttctgtgactctaggcctcacaaaagagccagagttctggacccatgtttggagcatttgtagccttattctcttgcgtgtgaatctcttaccctgaaaaaaagccataatgaattaagccagactgaccacttgcttggagtgtgtgcttgaaaaaaccagagcaatactgttgggtattgtatcaggcttcagtacaaactggtaacaccaatgtggatcctgacagctttcagttttagcaaaaatacacgtgaaatctgactaccatttaa

SEQ ID NO: 6156 - DNA, 1934 bp, Homo sapiens
  source 1..1934: mol_type = unassigned DNA
ggcggggcgtggcggcgggggatgcgcccctgcgcgagccagtgtcgcctgccctccttccgcacagcccgggtttccgcttccctccgggcgcgagaagaggggagccaggccgagccccggccctaccgccgccgccgccatgtggcccccagaccccgaccccgacccggaccccgagcctgccggcggctcccgtcccggccccgcggtccccgggctccgcgccctgctgccggcgcgggctttcctctgctctctcaaaggccgcctcctgctggccgagtcgggtctctcattcatcacttttatctgctatgtggcgtcctcagcatctgccttcctcacagcgcctctgctggagttcctgctggccttgtacttcctctttgctgatgccatgcagctgaatgacaagtggcagggcttgtgctggcccatgatggacttcctgcgctgtgtcaccgcggccctcatctactttgctatctccatcacggccatcgccaagtactcggatggggcttccaaagccgctggggtgtttggcttctttgctaccatcgtgtttgcaactgatttctacctgatctttaacgacgtggccaaattcctcaaacaaggggactctgcagatgagaccacagcccacaagacagaagaagagaattccgactcggactctgactgaaggcctggcgggtgccttggcaacctgagccacacaggcctccacccctgcgcctcacaggggtcgctggcgttggagcggaggcctggacttctgagttgcagagggggctgcggacacagcaggccccctacagcctcaggttctgcctgagcccagcctaccaggcttgcccctcagctcagcactgttgaccacgctgcgtatgagggcatcttgggtatcccactccttctccccatttctgtcccacaggccttcagccctttaacgtctctgccaaaaaccagcacaaggagacaaagcagagccttgtctgtatctgggcagcaggtgttccatgctgctaggtggcgggggtcgggggtcttctgtttcactaacaggaacaaagacagaaaccatgacagggctgccccgccaggccccggtgggtttgtctgcacttggtgctcctgcccacaccagccactttggtgacaatgacccttccaagaatctttggttcaaggagcaccagttccctcttcattcttgaagcagggagaaattgacctttgccttgtcgcccaggaagtggggctcggcacccataactaacacctcccacccttggaaaccatgtcttctgggggtgagatgaccattctgggtctaagactgtttcaaagaagagctcatagactgactggtccagaagacagagggtacaacagtggcatcacagtgacagtgtcatggggagctgggcgggcccagccaaaccctccttcttcctagagcccagccagcaggcaggagttcctggaccctcaggacagtgaacttccagacctcagggcaggtctatgggccactgcaggagatgagaccagccttctgtgttcacctaacgatttatactgtgtatctgtctttgatggaattttgtaactttttatatttttttatgcaaaagcagcttcttaacagatggcattttctgtgactctaggcctcacaaaagagccagagttctggacccatgtttggagcatttgtagccttattctcttgcgtgtgaatctcttaccctgaaaaaaagccataatgaattaagccagactgaccacttgcttggagtgtgtgcttgaaaaaaccagagcaatactgttgggtattgtatcaggcttcagtacaaactggtaacaccaatgtggatcctgacagctttcagttttagcaaaaatacacgtgaaatctg

SEQ ID NO: 6157 - DNA, 3414 bp, Homo sapiens
  source 1..3414: mol_type = unassigned DNA
agcggaccgagccgcagccgcagccgggcggcgggcgagaggcggcggcggcgggcgggccgcgggcagtcagtcgggcggcggcggcggcggcggcggcggcgatgcggcggccccgctgagtccgcccgctcctggcgccgggagccagccgcgcgaggcggcccgggccgggcggcagcatgcggagcggcgaggagctggacggcttcgagggcgaggcctcgagcacctccatgatctcgggcgccagcagcccgtaccagcccaccaccgagccggtgagccagcgccgcgggctggccggcctgcgctgcgaccccgactacctgcgcggcgcgctcggccgcctcaaggtcgcccaagtgatcttggccctgattgcattcatctgcatagagaccatcatggcatgctccccgtgtgaaggcctctacttttttgagtttgtgagctgcagtgcgtttgtggtgactggcgtcttgctgattatgttcagtctcaacctgcacatgaggatcccccagatcaactggaatctgacagatttggtcaacactggactcagcgctttccttttctttattgcttcaatcgtactggctgctttaaaccatagagccggagcagaaattgctgccgtgatatttggcttcttggcgactgcggcatatgcagtgaacacattcctggcagtgcagaaatggagagtcagcgtccgccagcagagcaccaatgactacatccgagcccgcacggagtccagggatgtggacagtcgccctgagatccagcgcctggacactttttcctactccacaaacgtaacagtaaggaaaaaatcacccacaaacctgctgagtttgaatcactggcaacttgcctagaaaagttcagatgatgggtccttgaactgtgtatctatttcatagggtaagtttgttgtctatgtttgtttttttatgctgaggctttaattcaggtgacttgctatctagacacctggggtggcgtgttttctttgggatgcataatacacaaaggccagggagcctttggcttggacccccagggagctattgaaacttttaaagtttgagtttaggagtaagaacatatctcagaccaccttagtcagctttgctgatgggatttagggccaggtcagagtttcttttcataactgcctgaaaagagagatggtgtgaaacaagattctgataatggtttgtgtgagatttgatcatagtctaaaactatcacgtctgagttgccttaggatgacagtgctgacacccagtaggaagtatcccatttttatcaggaaagtcagtcacgcgtagggatggtgaggagacgcgtagggatggtgaggaggggagaggagggagacctgctggtgcccttgcaccagggtgaggcctgactcacgctgcttccccccacaggccctgctttgcttgcctgctttttccagaatcgattttgcaagcttcaagattctgttcccctcttcgcagaagtgaggaaggcaaatactcagggtttgaagggagacctggccggcctgagggctggcagatgtgagggcaggacacctgggatggactcgtaggctgacccaggcccaaagggggctgcctgttcccaactctttcactctgtaacccattttaaaatgagtttttgaatcttgcctcaaattgacctacttggataaaatcagtgcttttcctaacttgattttgtttgacgtggttccctctaagagaatggtaggaattgaaactatttgtatatgttgaaatttgtaggggttcaggaacccatggcagaaacactaaactatttatttacaagtatgactatttttttttcaaagtaggcaattctttgtatattttaaggcaaataatcacttcacctctggtgccttccatgcgtcgcataagcactcttgtcaatcatggaattggaaaaaaagatgtacatttagttaaacaagataacactatttttgtagcatgattttagattgtgtccttttaatattgttttcaacaatggtagttttgaggttttggccattttctctttacacttcgtatgtattttaaagaagaaaaaaaacaaaaaaaattccctggctattcctctttcctctctgctgctgcttctcctgcatcttgttcctgcttatttaaatagtctgagagtaagagtatatttctgtgaaataattataagtcagtataattgcatttggcattttttaaccacttgctcagtttggagccactgctcacctcaaacagtacaaagaaagtggttccatattttacaaacagaagagtagcatcagagccctgacctcctgtctttgggtgtaaaatggtgagaggccggtgtccggctccttcccctgtggtttgggctggtgaactgagcccaagtgtattctctggcctgggccccttccagaatcagtgcgagcgtcctgcagaggcatggccttcctgccactgcagagtgggaagcttcctgggggacctcagccagctccggggctctcatcttccactcggatctcagattggttcgttgtggatgctctggctaggctcggcggccttttccaggcttcaggcctgaacaaaacaggctgtttgctgtgaggagctagatgacaccaagacacagacacgtactcttcaccggctccttttgcttctccttcctgcaggacgtgagttatgtctggtcccaaaacccttgagtaaactagctgagccattgcaaatgaaggtacagatggattgaaacataaaattgtagcttttggtgtccttctgaagggtcagaatatgtaattatttgataaccaaggaagtcaagtcagatggctaagtagtaactttccaatatgatttctccgtggtacttcacctggtggcacttttggggggcaatgttaacaactatcacattttactcatcaagtctctttcatttcggcagtttaaagacacaactgtgggctttctgaggcgatgcccgttgggcaaacttaggtttatgtgtttggtttttcagctgacgtggaagccctgggtgggcgtcccctggctggcctggcttttgggttcaagtctgtatgtatggagtgggttggggccccaaagctttgctgctattgatttgtccccgacagcaggcaaagcctcacattgccctcaattttccccctttcatttgaaggaccagtttttcatggtacttgtcttgatctttttcatagtgttcaaatctgtatttttgtatgtagagggaaataattttctcaacactaatcgttaataactattgtattaaattgtcatgaaggaacttgtttaataaatggacgtgtaagga

SEQ ID NO: 6158 - DNA, 8116 bp, Homo sapiens
  source 1..8116: mol_type = unassigned DNA
agcggaccgagccgcagccgcagccgggcggcgggcgagaggcggcggcggcgggcgggccgcgggcagtcagtcgggcggcggcggcggcggcggcggcggcgatgcggcggccccgctgagtccgcccgctcctggcgccgggagccagccgcgcgaggcggcccgggccgggcggcagcatgcggagcggcgaggagctggacggcttcgagggcgaggcctcgagcacctccatgatctcgggcgccagcagcccgtaccagcccaccaccgagccggtgagccagcgccgcgggctggccggcctgcgctgcgaccccgactacctgcgcggcgcgctcggccgcctcaaggtcgcccaagtgatcttggccctgattgcattcatctgcatagagaccatcatggcatgctccccgtgtgaaggcctctacttttttgagtttgtgagctgcagtgcgtttgtggtgactggcgtcttgctgattatgttcagtctcaacctgcacatgaggatcccccagatcaactggaatctgacagatttggtcaacactggactcagcgctttccttttctttattgcttcaatcgtactggctgctttaaaccatagagccggagcagaaattgctgccgtgatatttggcttcttggcgactgcggcatatgcagtgaacacattcctggcagtgcagaaatggagagtcagcgtccgccagcagagcaccaatgactacatccgagcccgcacggagtccagggatgtggacagtcgccctgagatccagcgcctggacacgtgaggacctgcctggatcctcctccctcccgtcctcgtgcctgtctctcagtcaagttttctttcccttgtcctgtcagatttccatgtgattcagttgaattttgtcctctttggtaaaagttcattttgggaaagggtttcccgagtggcccagtgggcgggtccgcggtggagttgggaggcccacgttcctcagcgtttggggctgtggagcagccggcgtcactgcccaggtccacttgaggtcttacctgccctgaagcacaggcttcctttgactctgagccaccttgtcgtgtgtatttgtaacaagactttggattaaatggggctgctaagaggggggaaatatgaaggaatgaagggacagcattggaacggtcagtcggcagtggttctcaggcagccttaggcaccacctgctccaagtcagtgttgagtctgcgtgctgggatccagcccactcctcatcttccatgccagggcccccaggcagccagcaccagcccaaaggccacagggctggggaaagctgatgtcctgttaggatggctcccagggacctctgactcaaggaagggtgaccttttgtttcctactctgctgagaaatcacttgattcttcctcaaatgaatcaccttcctgaaccccagattcttctccaggaatatgggggccatcttgttatggggactatcttgttttccagtttcctgcctaccctaaatactttgaggctgaattgcagattttcagtcattttaccttctcaggtaaaagccatgaaagaaacaagcctactccaccagccaaagcacttgcccatttgctggcttcatgaaccgcaggtgggaggtgtttgtgttaaaaaacagcatgcacacgcgtgcgcgcacacatgcacacacacacccctctattttagggatgtgtgctaattttctaaatgcctgcaaagagttctaaaatgattctgagcagattcgtctaggatttgaaaatacttgaatttgcaccagaacacacccttccacccatgtttcagaaggcactaattgtcgctttgggcgcctcagtgtcataactgtagacatcattcttgggagttgttggggggaaaaatcctagctacttaaggtttctgattgattcttgataaagtgaagattattgtgtgtggtgaatgagttcagtgagtccccatgatgcagtagtttttttaaaaaattagagagtaattatatcttttatggaaaaaagttgttttagtttgtcaggttttccctctttgaactgtttttaatgtttacaaacctcactttagctctaacattttgtgtttagccctcaccaaaaagcacttactgtggcaggaagattttgcagtaacatggagaaatccccaagatcaagtgctgacaaatgttgacagctttagcagcgtactgtgtaataaataactccgagggggcggcggggggtctgtgcaagaaagcgtcaccttatggacatgtggcgtctcattccccagaaaaggacagcatctgagctcacagtgttgatcaggcaacactgctgggctgggggtcggagttggggttagcttcctgcaccaacaccttcagtacgatctgagttgggagcagtgtcccaggctatgtggctgagcaccacgtctgcctcaggggctgaccctgctagcctgttaacaactcgtctcccctctgctcccacagagagggcagccaggccagctcacagctgggtgtgctgcctgtcaggtctgttgagtgtgtttgcaaagtcaaaattgggcttatctctctttgagagttccttttaaaatagggccacaaaggctcagccttgcattaaatggggcccacttggaaggaccatcctgagctttatcagaaatctcctgctgggaatcatgttacttggcccccaaaaaaggccatctttgaagtgagattgaaaacaagaacaccattcaggtgggcttgttgcccaagttttcccagctcacttcagtaaaaccacttgatcatctggtgaaagaggggggcaggtggttggcctcctgaggatatgttgtcagctgcaagaaatagttctgaagtcactgaaactaaatgcagatgaatgaccaaaaaggatgacacgccagagagtgacttaggagttaatttgcatcttcgtgatagactcttcagaattatttatgtccctgtaactatttaatatcctttgtgccgtgaggctcctcggtggttttgtaaatgttctccttgtatttaattaactcccactagaaccggaagtggtgctatggacgctttctagttgatgtaatgtgtggttgcacatgtcatcatgtatagaccacgtggtgacgaaagttctggagggaatagggttatccaaggtgaatatgaagacgcctatatttttcttatattgcctctatatgcaaacagaagacaatcgatatctgggggccttaaaatgacctcttggcaaattgaaggaagcgtttttgcgtttaatagtttcaatagggaccaatatcagtttggtttggggcatttgaaggctgagcgaccttagtttttctcagtgttctggtgggacgatattggttttcacatttaaagcaaaacttgaagaaactgcagttgctgtgtgcatttgggttttttcctggacactgtacagctgaaaccctcaagcatttggtggaacctctggtggttttagatggatgcaaacactgatgtcctcagagaaagtttattttggcactgattgggtggatttggtattttttccctctgattctctttgatatccttctttcacactgctgaaggcatgggagggaaatatgttttccctgccttaaagagggattacagtcatgaaaggctggagatacttgttggccccacataaagctgggaagaacagatgcagtttcagattaaaatctcgtcagagaagtttgatttgaagtaaacagccatccgagggaggtgacttttgtctacagaaaaagcaagaatgtggcagcctgcacagccccaatacacatcttccttggcaatgtgagctgaagccagcatgggcaagtccggcccagctctgagcgcttggccctgggaagccagcggcacccccagcccttcgggccctgttactgtcccctggcaggaaggctcacgcctgtgggcagccagggaatgtgtctgacctccaccctatgtcgggtgcttctgggacagcttcgtgactcagttgaaaacattctgactctcttcaagtttgcagttacatctgtggttcttggaagctgtcctagtgagtcagccttgggttaagcctgaggagaccaagctccaacacctttgtgcactcatgtacgtgaattcttgcttgcagtgaatgagacctgaacaaccctagtgggtgccatgtcctgcgtgtggcccaggcgtaccttttcttgtagattcacatgagaaacccgtcacctatccatgtgctctgagaggtggactgaggtctaatccctttctgtgccagattttctgtgggttggtcttagcacctaggagatgaatagagcatggagacacctgaacaatttagtgattctgcaaggcagtgatgatttaagggttcctattgtctcatctgtgttcaaaacaaaacagtcatgaagtctttgtgccactgcctgactgtcatcttctccagatcttgtttacagagtaataatgacgttaaacaggtatcagaaaggggaaaaagtttctaggccaagagctgctggtggattctcttgagcagaataacaagttgcttcctgctccagggactgccattagcttgtgaagtctctaggtgccttgttatttcctagtgaagttgcagaatccagggttttttccaggtttgtcttattttatcagcacccacgtccaggcccaacagcttggtaggctggtgaggtccacacacggccaggtctgggagataagggaggaagcagtggcctggaacaccccacctgtctgctatcagcactagacagctcaggctgtcttggaaacgtgtactttgttaactgccttcctgtcctcttgtctttgaaagctgtctcgcgttccacagtcagcttgagggcaagagtgggatgctggggacaggtctttcccgtcctgtgggtgagctcctggcatctggctcaggaacatgtgggtccagcaggtgactctgaagctggcttggctgccatctcagacaggacgcaggcctgacaccctcagcttttagctttgtaaacttccctggcgctttgtagaatcttgtgtttcttctcttctcagcagatatcattcaagtcacaagaactgtctggttgagaaagtaatttaaaatatttgaccttttatgtttcttttatttagaaactgtgagagaaaataccgtcaatatctgttaggtctagaaaaattttcttccgaaagtgaatgttctgtttaattcttcttcatgcaagtgagtggcattttgtacactctttagcttgaagcggagtgggtcctattgtattttcccttcttttgtctggaatatattctttttccatttggatacagtttttcaacctttgggatttttttttcctttctagtttttcctactccacaaacgtaacagtaaggaaaaaatcacccacaaacctgctgagtttgaatcactggcaacttgcctagaaaagttcagatgatgggtccttgaactgtgtatctatttcatagggtaagtttgttgtctatgtttgtttttttatgctgaggctttaattcaggtgacttgctatctagacacctggggtggcgtgttttctttgggatgcataatacacaaaggccagggagcctttggcttggacccccagggagctattgaaacttttaaagtttgagtttaggagtaagaacatatctcagaccaccttagtcagctttgctgatgggatttagggccaggtcagagtttcttttcataactgcctgaaaagagagatggtgtgaaacaagattctgataatggtttgtgtgagatttgatcatagtctaaaactatcacgtctgagttgccttaggatgacagtgctgacacccagtaggaagtatcccatttttatcaggaaagtcagtcacgcgtagggatggtgaggagacgcgtagggatggtgaggaggggagaggagggagacctgctggtgcccttgcaccagggtgaggcctgactcacgctgcttccccccacaggccctgctttgcttgcctgctttttccagaatcgattttgcaagcttcaagattctgttcccctcttcgcagaagtgaggaaggcaaatactcagggtttgaagggagacctggccggcctgagggctggcagatgtgagggcaggacacctgggatggactcgtaggctgacccaggcccaaagggggctgcctgttcccaactctttcactctgtaacccattttaaaatgagtttttgaatcttgcctcaaattgacctacttggataaaatcagtgcttttcctaacttgattttgtttgacgtggttccctctaagagaatggtaggaattgaaactatttgtatatgttgaaatttgtaggggttcaggaacccatggcagaaacactaaactatttatttacaagtatgactatttttttttcaaagtaggcaattctttgtatattttaaggcaaataatcacttcacctctggtgccttccatgcgtcgcataagcactcttgtcaatcatggaattggaaaaaaagatgtacatttagttaaacaagataacactatttttgtagcatgattttagattgtgtccttttaatattgttttcaacaatggtagttttgaggttttggccattttctctttacacttcgtatgtattttaaagaagaaaaaaaacaaaaaaaattccctggctattcctctttcctctctgctgctgcttctcctgcatcttgttcctgcttatttaaatagtctgagagtaagagtatatttctgtgaaataattataagtcagtataattgcatttggcattttttaaccacttgctcagtttggagccactgctcacctcaaacagtacaaagaaagtggttccatattttacaaacagaagagtagcatcagagccctgacctcctgtctttgggtgtaaaatggtgagaggccggtgtccggctccttcccctgtggtttgggctggtgaactgagcccaagtgtattctctggcctgggccccttccagaatcagtgcgagcgtcctgcagaggcatggccttcctgccactgcagagtgggaagcttcctgggggacctcagccagctccggggctctcatcttccactcggatctcagattggttcgttgtggatgctctggctaggctcggcggccttttccaggcttcaggcctgaacaaaacaggctgtttgctgtgaggagctagatgacaccaagacacagacacgtactcttcaccggctccttttgcttctccttcctgcaggacgtgagttatgtctggtcccaaaacccttgagtaaactagctgagccattgcaaatgaaggtacagatggattgaaacataaaattgtagcttttggtgtccttctgaagggtcagaatatgtaattatttgataaccaaggaagtcaagtcagatggctaagtagtaactttccaatatgatttctccgtggtacttcacctggtggcacttttggggggcaatgttaacaactatcacattttactcatcaagtctctttcatttcggcagtttaaagacacaactgtgggctttctgaggcgatgcccgttgggcaaacttaggtttatgtgtttggtttttcagctgacgtggaagccctgggtgggcgtcccctggctggcctggcttttgggttcaagtctgtatgtatggagtgggttggggccccaaagctttgctgctattgatttgtccccgacagcaggcaaagcctcacattgccctcaattttccccctttcatttgaaggaccagtttttcatggtacttgtcttgatctttttcatagtgttcaaatctgtatttttgtatgtagagggaaataattttctcaacactaatcgttaataactattgtattaaattgtcatgaaggaacttgtttaataaatggacgtgtaagg

SEQ ID NO: 6159 - DNA, 1173 bp, Homo sapiens
  source 1..1173: mol_type = unassigned DNA
cagcagaggcactctgggcagctgggtgagggcccatctgggcaaggcccccagcgcctgccttctctcccggggccctgtgggcaagcctcctgcttcactttcaggtttctcgaagtgccttcttgctcctgtctgtttccccatcctgccagatttctgtttctcttgctgggcttttggcagtagggggctgtgttggtgggccctacgaagatgctcagtgctcgagatcgccgggaccggcaccctgaggagggggtagttgcagagctccagggcttcgcggtggacaaggccttcctcacctcccacaagggcatcctgctggaaaccgagctggccctgaccctcatcatcttcatctgcttcacggcctccatctctgcctacatggccgcggcgctactggagttcttcatcacacttgccttcctcttcctctatgccacccagtactaccagcgcttcgaccgaattaactggccctgtctgctgcagggccacgggcaatcaggaggaccacatccgctagatctactctcccactcagcaaaggtccagccccagccctggcctggcttgacccccccgggctggcatactccagccgctgtcccctgggttccagccccagcgcctggcttctggtcctggttgctctggttcatctgcttccactccctgggtagcagtgacttcctgcgctgtgtcagtgccatcatcatcttcctggtggtctcctttgcagctgtgacctcccgggacggagctgccattgctgcttttgtttttggcatcatcctggtttccatctttgcctatgatgccttcaagatctaccggactgagatggcacccggggccagccagggggaccagcagtgactctggggctacctggctcctaggcccagccagccagagaggacagtggagcccagacacgtctccttgggattcactagcccccagcccgccaaaccccaccccagccctacacagcagtctggcctgagacgtcactggggacttatctgtggagcctggtgctccaggatgtggcttctcatgaagctctggccagaggaggggaacttattgggggagggggggtggaggggaggaatctggacctctaagtcattcccaaattaaaatattcaaattcta

SEQ ID NO: 6160 - DNA, 725 bp, Homo sapiens
  source 1..725: mol_type = unassigned DNA
agcagaggcactctgggcagctgggtgagggcccatctgggcaaggcccccagcgcctgccttctctcccggggccctgtgggcaagcctcctgcttcactttcaggtttctcgaagtgccttcttgctcctgtctgtttccccatcctgccagatttctgtttctcttgctgggcttttggcagtagggggctgtgttggtgggccctacgaagatgctcagtgctcgagatcgccgggaccggcaccctgaggagggggtagttgcagagctccagggcttcgcggtggacaaggccttcctcacctcccacaagggcatcctgctggaaaccgagctggtttttggcatcatcctggtttccatctttgcctatgatgccttcaagatctaccggactgagatggcacccggggccagccagggggaccagcagtgactctggggctacctggctcctaggcccagccagccagagaggacagtggagcccagacacgtctccttgggattcactagcccccagcccgccaaaccccaccccagccctacacagcagtctggcctgagacgtcactggggacttatctgtggagcctggtgctccaggatgtggcttctcatgaagctctggccagaggaggggaacttattgggggagggggggtggaggggaggaatctggacctctaagtcattcccaaattaaaatattcaaattcta

SEQ ID NO: 6161 - DNA, 1200 bp, Homo sapiens
  source 1..1200: mol_type = unassigned DNA
gttagagaagggggacacaaatgtcttcaggcttaggtccctgggggctcccagtcctgcccctgttcctctactcacatcccagctcctcccagtttcttttcggacctcctcctctccccttccttctctattccaggctgggttgggctctaagcaaggggagggattagagcctccttcctctctgcccctccccatgggtctctagggggctggtgcaggcagcagcagaggcactctgggcagctgggtgagggcccatctgggcaaggcccccagcgcctgccttctctcccggggccctgtgggcaagcctcctgcttcactttcaggtttctcgaagtgccttcttgctcctgtctgtttccccatcctgccagatttctgtttctcttgctgggcttttggcagtagggggctgtgttggtgggccctacgaagatgctcagtgctcgagatcgccgggaccggcaccctgaggagggggtagttgcagagctccagggcttcgcggtggacaaggccttcctcacctcccacaagggcatcctgctggaaaccgagctggccctgaccctcatcatcttcatctgcttcacggcctccatctctgcctacatggccgcggcgctactggagttcttcatcacacttgccttcctcttcctctatgccacccagtactaccagcgcttcgaccgaattaactggccctgtctggacttcctgcgctgtgtcagtgccatcatcatcttcctggtggtctcctttgcagctgtgacctcccgggacggagctgccattgctgcttttgtttttggcatcatcctggtttccatctttgcctatgatgccttcaagatctaccggactgagatggcacccggggccagccagggggaccagcagtgactctggggctacctggctcctaggcccagccagccagagaggacagtggagcccagacacgtctccttgggattcactagcccccagcccgccaaaccccaccccagccctacacagcagtctggcctgagacgtcactggggacttatctgtggagcctggtgctccaggatgtggcttctcatgaagctctggccagaggaggggaacttattgggggagggggggtggaggggaggaatctggacctctaagtcattcccaaattaaaatattcaaattcta

SEQ ID NO: 6162 - DNA, 1106 bp, Homo sapiens
  source 1..1106: mol_type = unassigned DNA
gttagagaagggggacacaaatgtcttcaggcttaggtccctgggggctcccagtcctgcccctgttcctctactcacatcccagctcctcccagtttcttttcggacctcctcctctccccttccttctctattccaggctgggttgggctctaagcaaggggagggattagagcctccttcctctctgcccctccccatgggtctctagggggctggtgcaggcagcagcagaggcactctgggcagctgggtgagggcccatctgggcaaggcccccagcgcctgccttctctcccggggccctgtgggcaagcctcctgcttcactttcaggtttctcgaagtgccttcttgctcctgtctgtttccccatcctgccagatttctgtttctcttgctgggcttttggcagtagggggctgtgttggtgggccctacgaagatgctcagtgctcgagatcgccgggaccggcaccctgaggagggggtagttgcagagctccagggcttcgcggtggacaaggccttcctcacctcccacaagggcatcctgctggaaaccgagctggccctgaccctcatcatcttcatctgcttcacggcctccatctctgcctacatggccgcggcgctactggagttcttcatcacacttgccttcctcttcctctatgccacccagtactaccagcgcttcgaccgaattaactggccctgtctggtttttggcatcatcctggtttccatctttgcctatgatgccttcaagatctaccggactgagatggcacccggggccagccagggggaccagcagtgactctggggctacctggctcctaggcccagccagccagagaggacagtggagcccagacacgtctccttgggattcactagcccccagcccgccaaaccccaccccagccctacacagcagtctggcctgagacgtcactggggacttatctgtggagcctggtgctccaggatgtggcttctcatgaagctctggccagaggaggggaacttattgggggagggggggtggaggggaggaatctggacctctaagtcattcccaaattaaaatattcaaattct

SEQ ID NO: 6163 - DNA, 818 bp, Homo sapiens
  source 1..818: mol_type = unassigned DNA
agcagaggcactctgggcagctgggtgagggcccatctgggcaaggcccccagcgcctgccttctctcccggggccctgtgggcaagcctcctgcttcactttcaggtttctcgaagtgccttcttgctcctgtctgtttccccatcctgccagatttctgtttctcttgctgggcttttggcagtagggggctgtgttggtgggccctacgaagatgctcagtgctcgagatcgccgggaccggcaccctgaggagggggtagttgcagagctccagggcttcgcggtggacaaggccttcctcacctcccacaagggcatcctgctggaaaccgagctggacttcctgcgctgtgtcagtgccatcatcatcttcctggtggtctcctttgcagctgtgacctcccgggacggagctgccattgctgcttttgtttttggcatcatcctggtttccatctttgcctatgatgccttcaagatctaccggactgagatggcacccggggccagccagggggaccagcagtgactctggggctacctggctcctaggcccagccagccagagaggacagtggagcccagacacgtctccttgggattcactagcccccagcccgccaaaccccaccccagccctacacagcagtctggcctgagacgtcactggggacttatctgtggagcctggtgctccaggatgtggcttctcatgaagctctggccagaggaggggaacttattgggggagggggggtggaggggaggaatctggacctctaagtcattcccaaattaaaatattcaaattcta

SEQ ID NO: 6164 - DNA, 3863 bp, Homo sapiens
  source 1..3863: mol_type = unassigned DNA
cactttgagtctcattcaattcaaagatcatggtcctcagagaggcctttcctgaccactcagtttagtagtggccatttaagtagagcacccaattctccatccttttttccttctccttcctcttctcctcctcctccatcttctttttttttttaataaatttatcaagccaccagaaatgctgaatccattattttcgtatcatattttcacgtcacttatcactatctgaaattgctatccatctgttttcttgtttattgtctgtctctgttactagggatcctgtgattttgggtagtacttggctgtcacccaagtacctagaacggggttcactgcacaccgaaagtacgcaaaaatactaagtgaatgaatgtcaggaggatgaaagatggagggaggtgagaaatccatcaaaggctcacagaaagaactcaattcttggatgaaagtcggaagaatcccaacagctaacaagcaaatttgctgagagggggcggggcgggccaagggcgggggcgggaaggggcggagtcaggcggaagccggggagaaggcccaggaagtgacggccgcctcccggctaccggggacttctggagtccgagaagtcaacggcgcggttgctgcggccgccgcgctccccggcccgaggcgatggagaacggagcggtgtacagccccactacggaggaggacccgggccccgccagaggcccccggagcggcctcgctgcctactttttcatgggccggctcccattgctccggcgcgttctcaagggcttgcagctgttgctgtctctgctggccttcatctgtgaagaagttgtatcacaatgtactttatgtggaggactttatttttttgagtttgtaagctgcagtgcctttcttctgagtctccttatactgattgtgtattgcactccattttatgagagagttgataccacaaaagtaaaatcatcggatttttatattactttgggaacaggatgtgtgtttttgttggcatccatcatttttgtttccacacatgacaggacttcagctgagattgctgcaattgtgtttggatttatagcaagttttatgttcctacttgactttatcactatgctgtatgaaaaacgacaggagtcccagctgagaaaacctgaaaataccactagggctgaagccctcactgagccacttaatgcctaaagactctggggagcagatgttacctaaggtagtgaccctgcattgtggtgcctgagccctggcagaagctcttgtaaaatttgttaattgtttaaaccacttcttttggagagcaaggggaaggtcaagaaggcagttttatcaatattgtgtcagtcaccacaaagtaggccagataagttaaaaaaaatttttttttaaataataattgaaacttatctcaaatggagattttggtgggaggaggagaaaacaattgtttttaaatcacacagctcaacggttgataaatgattctgtcattctgttacaggtcattcttttactaggcttagcttccaaattatgctttatagctgtataaacatcgtgattatattcatctacttagaaattgttttatttttaaattaatttgcttagctgtttgttttgatgcttagattatgttctgttaatgggaatttaacatatttaagaaaccaatatttaaaatgttggtctaggtttttttccttaacatatattaccaggctttactgtatttcactcagccttaaatgttataatatttttggataacggttattaattctttgagaccttcgtatagcctataaaatgtatgggagatgttggtattttatgtgtataaaagcaacaatatcagcaacttcgtgtttatactgcaccttggttgttgatgtcaagtaaaaaaaagattgttttgtaacacataaaaaaatggaagaaactgataccacacctaaggaccaaagataagaaagactttttgcccaagacagtgaaagtaattataaaaacaagctttgaccacttaccaagtatctgaagagatgagttcatactatgatttagaaagtggttcaattcccctgttggcatatgattatttttactaaaattaatacagctctgtgggtcttccttagtgttttctttgaagccaatctgttttttttaggacaccagcctttggtttttcatctgttcgagatgcctcttctctgtctccttatcagatagaaatggagtcatgtgctgctgcttcatctagcagaggttggcctctggctctgacactttttgtcagttgtctttaggtggtcctgaatcttgggcccttttgattgtgaatactgtgtagcaggatcttgagagtccttgttcttacataggcattgctctagtttgtctttggcaaaaaaaaaaaaaaaaaaaagtaaatatccagggaaccctgcccagactaatactgttggtggcataagagaatcaagccattctcaagagataacttcataaccagaattgtctgttggctagcagctgtcacagataggcagggcacttgggatatgacctttctgtccaggtgattcacagactagacctttcttatcctcctcctagagttttgacttgggactctagtgttaagatgatgagcccgtgcatcaggtccttctgcactttggtggaagtctcccagggtaggtttcctatttgaaacagtggaatcatgtttccagtgataaagtttaatgacctcatccttttttttttttctcatctgccatttgtgtgtcttagatgggttttaattgcatgaatgtggctaatgtggttctcagaaattggtcagtatggcccaacatagcttctgctctgtcttactgactcaatacctttaggatttgtatcagagtttggatactagtgttagtggtggtgtcaccactacttaattgggagataatgaaaccaatcatggatgctgtttttattgggcatgtcatctaagagaggagaaatagctgggttttgggtctaattatgaataaggactgattcagaaaacgagtttatggtaggtagactaaagtttcacatcagactgtaccattgtgatttagacctatctaaaattcagagcatatcatctgggctacctcagggtcaccacccatgtattgggcttagtcaggattgacagatacattctcagctggcctgtcatataaaacatactgtcattgagcttaagctccgcttgttctgaggtttcacctccatgtgtttcattggtgcaaaagtggatctcttagttggtcacttaattctttctttttcagaaagatagtatgttcactggtatatttggtcactcttagaaccttccttcacattgttttttatgggacccatgaatggttagcctttcttttctattgtagaaggaaataaataggagtaaaaagaccattgtagtaaataagttcaaggggaacttgggaccagaaaccactgttatgtacaaaaaaatggcaaattcaataaactcaaatttaaaataatttttaaattaacagttatgataaattttatattttatacaaatagattgcttagaatggttctcaagaattataagagaaatgaactcacagtacaaaaattttataattactatacttgtgttttgtttgggggctgggaaatgtatttttacattgtagccaatcattttatatttgtcaatttaaatcttatgggtcttttttttttatctctcttgatgtcagattttatagtctttttaaataaatccatttaattaaaacgtt

SEQ ID NO: 6165 - DNA, 2038 bp, Homo sapiens
  source 1..2038: mol_type = unassigned DNA
agtctaacttccgcgcatctacgagggccgggactgccgctacctttctggaaggcgccggccggccagtcaccggagggatcccgccagaggcggctccgcgtctccagcagcggggcagggacccgggcgccccgccctcgccagcgcccgcccccgcccgcccccggcccgccctctgtatctggcccctgggcagctgcccggggaggcggccagcgagctggggccgcgcaatgtcgcacggagccgggctcgtccgcaccacgtgcagcagcggcagcgcgctcggacccggggccggcgcggcccagcccagcgcgagccccttggaggggctgctggacctcagctacccccgcacccacgcggccctgctgaaagtggcgcaaatggtcaccctgctgattgccttcatctgtgtgcggagctccctgtggaccaactacagcgcctacagctactttgaagtggtcaccatttgcgacttgataatgatcctcgccttttacctggtccacctcttccgcttctaccgcgtgctcacctgtatcagctggcccctgtcggaacttctgcactatttaatcggtaccctgctcctcctcatcgcctccattgtggcagcttccaagagttacaaccagagcggactggtagccggagcgatctttggtttcatggccaccttcctctgcatggcaagcatatggctgtcctataagatctcgtgtgtaacccagtccacagatgcagccgtctgatgaggccacaacccctaggcccctcaggagctttgcagagaggaggacgtgtactccaggcgaggcctctggacctgtgttcctgtgccaaagtcctgtcaggctggtgggcaccaggaaaggcctgcaccctcttcctgctctcccaggaagccagctccctgagctcctgagccagccggaaactcttcctccagccttccggggagaacatccctcccattctgggaaaggaaagcagcctccagggaaatgttttctgccttcctgcttctagaaccacctcaggtactgatgaaccccacttagcacagctgaaggggtttgtgaatactcccgcctaaatcccttctacttcactcctcaggggagtgaagtgccttaagaaacaaagccctgtcctaatttatctagcttgtcagtccggtcttagagataccctctttcctgaagtgaggcgtgcctgtagaaacactatgtggtcagcctgtccccaaggagatcttgtgtctcctctccatctctgcctttgttaccagtgtgcatgtgtttgtgtgttttttaataaaatattgactcggccagttgcacaaggatttcttattgaaccagatgaaggctgtaaaacctggcctgaaacagtttccattcgagcttgtgtctggcccatggccctccacccgtgctctgtgtgtgccccttgctgaactgctggacttcaggttttctctccatcttgggggatagtatagcagggcagagttttaggtaaacatgtgcaggttctcaattatattcacgtcctccttctcctgcaataccaatcttctcattttggaaagagctttagagcaagctaagggttgtgtttacactatgatgattaatgatctcggcctaaatgtgctgtttcgctgatcttgagctgctcagttggctagaaaaaggagggatggaacaatgtttgagcaaccccgtgtgcaaggacctacattcacaaccacatctaatagcgatggtagtgactgcaagggggcaggttataggaccacatttttagaaatgaaatcggggctccatccccaggcacagggcaagccagtgaggagctgggctcaggatctaggtctgcctgactcccagccccatccttgcctctgctgagtgttgccggaaatggaagcagcccctgtgggctttgagctggagctctggggctactcttgtggctgctggccagctcggggcatcgggttctgtctgggatgatctaa

SEQ ID NO: 6166 - DNA, 1214 bp, Homo sapiens
  source 1..1214: mol_type = unassigned DNA
ccgggactgccgctacctttctggaaggcgccggccggccagtcaccggagggatcccgccagaggcggctccgcgtctccagcagcggggcagggacccgggcgccccgccctcgccagcgcccgcccccgcccgcccccggcccgccctctgtatctggcccctgggcagctgcccggggaggcggccagcgagctggggccgcgcaatgtcgcacggagccgggctcgtccgcaccacgtgcagcagcggcagcgcgctcggacccggggccggcgcggcccagcccagcgcgagccccttggaggggctgctggacctcagctacccccgcacccacgcggccctgctgaaagtggcgcaaatggtcaccctgctgattgccttcatctgtgtgcggagctccctgtggaccaactacagcgcctacagctactttgaagtggtcaccatttgcgacttgataatgatcctcgccttttacctggtccacctcttccgcttctaccgcgtgctcacctgtatcagctggcccctgtcgatctttggtttcatggccaccttcctctgcatggcaagcatatggctgtcctataagatctcgtgtgtaacccagtccacagatgcagccgtctgatgaggccacaacccctaggcccctcaggagctttgcagagaggaggacgtgtactccaggcgaggcctctggacctgtgttcctgtgccaaagtcctgtcaggctggtgggcaccaggaaaggcctgcaccctcttcctgctctcccaggaagccagctccctgagctcctgagccagccggaaactcttcctccagccttccggggagaacatccctcccattctgggaaaggaaagcagcctccagggaaatgttttctgccttcctgcttctagaaccacctcaggtactgatgaaccccacttagcacagctgaaggggtttgtgaatactcccgcctaaatcccttctacttcactcctcaggggagtgaagtgccttaagaaacaaagccctgtcctaatttatctagcttgtcagtccggtcttagagataccctctttcctgaagtgaggcgtgcctgtagaaacactatgtggtcagcctgtccccaaggagatcttgtgtctcctctccatctctgcctttgttaccagtgtgcatgtgtttgtgtgttttttaataaaatattga

SEQ ID NO: 6167 - DNA, 1174 bp, Homo sapiens
  source 1..1174: mol_type = unassigned DNA
ggcctccaccgccttccccggctgcccggcagcctcccctcgctcgctctcctcttcctctagggccccagcgcagctcgggagcccgcgcaccgaggcgctaggggcaccgcgcactagagggacacccgccgcgcctggacagcccccggcgggcgcccccctcgcacctcctgccccgcgcgggccgcgctcccctcccccgcgcctgtgtccccagggcgcagggccgcgcgtccagccccagacccgccggggtccctggggacgcgccagcccggcagtggctcgacgatggaggagccgcagcgcgcccgctcgcacacagtcaccaccaccgccagctccttcgcagagaacttctccaccagcagcagcagcttcgcctacgaccgggagttcctccgcaccctgcccggcttcctcatcgtggccgagatcgttctggggctgctggtatggacgcttattgctggaactgagtacttccgggtccccgcatttggctgggtcatgtttgtagctgtattttactgggtcctcaccgtcttcttcctcattatctacataacaatgacctacaccaggattccccaggtgccctggacaacagtgggcctgtgctttaacggcagtgccttcgtcttgtacctctctgccgctgttgtagatgcatcttccgtctcccctgagagggacagtcacaacttcaacagctgggcggcctcatcgttctttgccttcctggtcaccatctgctacgctggaaatacatatttcagttttatagcatggagatccaggaccatacagtgatttaccattttgataattaaaaggaaaaaaaaaggaagactctcactgtaaaaacagctgtaggtataatgtatattcccagagaattgtatttaactaattaatgttttttatattcttaaatttgctcacaaattgtggtttgttacaattaaactggatacttatttgcaaagtgttgtagcttataatgaactcttaagtatcttattaatgtattaatgtcttcatagatcatattttcttagacaatgtttaaatagataaattgctaatattgagaatgtgtcaagtttgtaaacctaacttttaagatgccagattcttttttgattaaatgttgcaaaatcccaagtaa

SEQ ID NO: 6168 - DNA, 1444 bp, Homo sapiens
  source 1..1444: mol_type = unassigned DNA
tgcctccccaccattcaccaggctccactgcactggctcattcctgcctcagttgtgcttcttttccctggaaagttctttctgtagatctttaaagggtgatttccttctcaacattcaggtgtcagctcgtttcactttcctgaccatgcccatccactcagagatcactcaaaatcccattaccctattttatttctccatcatatgtatcactatctgaaactatcttgttgttgatgcaggctattttcttgaccccttcatgggactcccaacaggggtaccccatttactcagcctgccctgctcaacctcttgcaggagggagcacacgagtgaacgagtgcaggaaccagctggctgctttagtgctgtgaggagtaaactccatgcaggccctgcagcagcaaccagtttttccagatttgctcaaagcaatcccagtgagcatccacgtcaatgtcattctcttctctgccatccttattgtgttaaccatggtggggacagccttcttcatgtacaatgcttttggaaaaccttttgaaactctgcatggtcccctagggctgtaccttttgagcttcatttcaggctcctgtggctgtcttgtcatgatattgtttgcctctgaagtgaaaatccatcacctctcagaaaaaattgcaaattataaagaagggacttatgtctacaaaacgcaaagtgaaaaatataccacctcattctggctgactaaaggccacagctgagcctggaactgacccttccttcatcctcaacctgctgtcctccagaaagcaccaaggaaaaagcagagaatgacagcaaacagatcactaggcctctgaccacaggtgctgagtactcagcagccctcatataataggtttgaaagtactccttaaaataaaacactgtttccctttggaactatttacaaggatgaaacaaccgtatacctgagaaataacttgctctggtgtcaattcgctattcgccagcagacatcagaacacaccgagtttccagatgctggtttttccccttaaatcaggaaatacacctggacaatttctagaagactacaattcagtctagccacaaaggggattttttttttttggtaacaggctagagcccggttctgtaagtctttagctgaaatggtccagtacaaaagcactggaaatgagtgggctaggaggacaaggaccgtctcctgcgtgaggagttggttggaggtccccaaggccaggtaccccctgcactcttattggattcctctctgtcttcttggagttttgaaaaactccttcgaacaccaggcttttttctttagaaaacaagtctccaatcgttctctgttccgtagaaagagaaagaaaacctggagcagctgctgaaaaatctaatgaggaactaagaggcaaacccacca

SEQ ID NO: 6169 - DNA, 2359 bp, Homo sapiens
  source 1..2359: mol_type = unassigned DNA
aggagatacttgaaggcagtttgaaagacttgttttacagattcttagtccaaagatttccaattagggagaagaagcagcagaaaaggagaaaagccaagtatgagtgatgatgaggccttcatctactgacatttaacctggcgagaaccgtcgatggtgaagttgccttttcagctgggagctgtccgttcagcttccgtaataaatgcagtcaaagaggcagtcccttcccattgctcacaaaggtcttgtttttgaacctcgccctcacagaagccgtttctcatcatgccaagccaacagaagaaaatcattttttgcatggccggagtgttcagttttgcatgtgccctcggagttgtgacagccttggggacaccgttgtggatcaaagccactgtcctctgcaaaacgggagctctgctcgtcaatgcctcagggcaggagctggacaagtttatgggtgaaatgcagtacgggcttttccacggagagggtgtgaggcagtgtgggttgggagcaaggccctttcggttctcattttttccagatttgctcaaagcaatcccagtgagcatccacgtcaatgtcattctcttctctgccatccttattgtgttaaccatggtggggacagccttcttcatgtacaatgcttttggaaaaccttttgaaactctgcatggtcccctagggctgtaccttttgagcttcatttcaggctcctgtggctgtcttgtcatgatattgtttgcctctgaagtgaaaatccatcacctctcagaaaaaattgcaaattataaagaagggacttatgtctacaaaacgcaaagtgaaaaatataccacctcattctgggtcattttcttttgcttttttgttcattttctgaatgggctcctaatacgacttgctggatttcagttcccttttgcaaaatctaaagacgcagaaacaactaatgtagctgcagatctaatgtactgaaaggcaaacctttctataattttacaagggagtagacttgctttggtcacttttagatgtggttaattttgcatatccttttagtctgcatatattaaagcatcaggacccttcgtgacaatgtttacaaattacgtactaaggatacaggctggaaagtaagggaagcagaaggaaggctttgaaaagttgttttatctggtgggaaattgcttgacccaggtagtcaaaggcagttgactagaatcgacaaattgttactccatatatatatatgtgtgtgtgtgtgtgtgtgtgtgtgtgtaagatgtcttcctatcaaaaagatatcaaaggcacatggaatatattttaataaaaacaaataatatctctaatatatccacacatttgttgccagatttcagaaaactgagctgcaatcgctttcctaaaacagtagtgtattaaatgaacatctataaaatgtatcaacacacattttaaaaaatttgtttaaagtatactcttaggccaggcgtggtgactcacacctgtaattccagcacttcaggaggccaaggtgggaagatcatttgagttcaggagttcgagttacagcctgggcaataaagtgagaccctgtcactaacaaaattaaaaaataaaataaatataaaatataggctttaaaaaagcatagtcttattaaccatgtctgttggtcaaaatctgcaaactctaaaagaagaaaagaagaaaaaaccaagcttagggtatttttcctcccgtgcctgagtcccaattacattcacgacagtactttcaatgaacataattgttaggaccactgaggaatcatgaaaaatgatctctgcttagtacatttgatgcaaaatgacttattaggggctgtttttctagctatagtgtctcgagtactaatatgcaattatgaaaattatattaaatctgggattatgacggtatcactgtatcatcttggtcttgttctggctgtcaccaagcatgacccaggtcaactttttttttcccctgaattacccatcaaattgatctgcagctgactaaaggccacagctgagcctggaactgacccttccttcatcctcaacctgctgtcctccagaaagcaccaaggaaaaagcagagaatgacagcaaacagatcactaggcctctgaccacaggtgctgagtactcagcagccctcatataataggtttgaaagtactccttaaaataaaacactgtttccctttggaactatttacaaggatgaaacaaccgtatacctgagaaataacttgctctggtgtcaattcgctattcgccagcagacatcagaacacaccgagtttccagatgct

SEQ ID NO: 6170 - DNA, 738 bp, Homo sapiens
  source 1..738: mol_type = unassigned DNA
atgccaagccaacagaagaaaatcattttttgcatggccggagtgttcagttttgcatgtgccctcggagttgtgacagccttggggacaccgttgtggatcaaagccactgtcctctgcaaaacgggagctctgctcgtcaatgcctcagggcaggagctggacaagtttatgggtgaaatgcagtacgggcttttccacggagagggtgtgaggcagtgtgggttgggagcaaggccctttcggttctcattttttccagatttgctcaaagcaatcccagtgagcatccacgtcaatgtcattctcttctctgccatccttattgtgttaaccatggtggggacagccttcttcatgtacaatgcttttggaaaaccttttgaaactctgcatggtcccctagggctgtaccttttgagcttcatttcagttgccctttggctgccagctaccaggcaccaggctcaaggctcctgtggctgtcttgtcatgatattgtttgcctctgaagtgaaaatccatcacctctcagaaaaaattgcaaattataaagaagggacttatgtctacaaaacgcaaagtgaaaaatataccacctcattctgggtcattttcttttgcttttttgttcattttctgaatgggctcctaatacgacttgctggatttcagttcccttttgcaaaatctaaagacgcagaaacaactaatgtagctgcagatctaatgtactga

SEQ ID NO: 6171 - DNA, 722 bp, Homo sapiens
  source 1..722: mol_type = unassigned DNA
attttttgcatggccggagtgttcagttttgcatgtgccctcggagttgtgacagccttggggacaccgttgtggatcaaagccactgtcctctgcaaaacgggagctctgctcgtcaatgcctcagggcaggagctggacaagtttatgggtgaaatgcagtacgggcttttccacggagagggtgtgaggcagtgtgggttgggagcaaggccctttcggttctcatgctattttcttgaccccttcatgggactcccaacaggggtaccccatttactcagcctgccctgctcaacctcttgcaggagggagcacacgagtgaacgagtgcaggaaccagctggctgctttagtgctgtgaggagtaaactccatgcaggccctgcagcagcaaccagtttttccagatttgctcaaagcaatcccagtgagcatccacgtcaatgtcattctcttctctgccatccttattgtgttaaccatggtggggacagccttcttcatgtacaatgcttttggaaaaccttttgaaactctgcatggtcccctagggctgtaccttttgagcttcatttcaggctcctgtggctgtcttgtcatgatattgtttgcctctgaagtgaaaatccatcacctctcagaaaaaattgcaaattataaagaagggacttatgtctacaaaacgcaaagtgaaaaatataccacctcattctgggtca

SEQ ID NO: 6172 - DNA, 3479 bp, Homo sapiens
  source 1..3479: mol_type = unassigned DNA
agcgcctgtgctgccgcgtctcgacgtgtcaccggcggcgccgctgctgtggcaaaggaaggagctgactgggggagttcgaggcggcgggcggcggtgaccccggcctggaactgccccggtacggaagtgttccggggtccgtggggagcaggagagggaggcggcggaccgtcccgcgcggggcacgatgttgaacatgtggaaggtgcgcgagctggtggacaaagccaccaatgttgttatgaattattcagagatcgagtctaaggttcgagaggcaacgaacgatgatccttggggaccttctgggcaactcatgggagagattgccaaggctacatttatgtatgaacaatttccagaacttatgaacatgctttggtcacgaatgttaaaagacaacaaaaagaattggagaagagtttataagtcgttgctgctcctagcttacctcataaggaatggatcagagcgtgttgttacaagtgccagagaacacatttatgatttacgatccctggaaaattaccactttgtagatgagcatggtaaggatcaaggtataaatattcgacagaaggtgaaggaattggttgaatttgcccaggatgacgacaggcttcgtgaagagcgaaagaaagcaaagaagaacaaagacaagtatgttggggtttcctcagacagtgttggaggattcagatacagtgaaagatatgatcctgagcccaaatcaaaatgggatgaggagtgggataaaaacaagagtgcttttccattcagtgataaattaggtgagctgagtgataaaattggaagcacaattgatgacaccatcagcaagttccggaggaaagatagagaagactctccagaaagatgcagcgacagcgatgaggaaaagaaagcgagaagaggcagatctcccaaaggtgaattcaaagatgaagaggagactgtgacgacaaagcatattcatatcacacaggccacagagaccaccacaaccagacacaagcgcacagcaaatccttccaaaaccattgatcttggagcagcagcacattacacaggggacaaagcaagtccagatcagaatgcttcaacccacacacctcagtcttcagttaagacttcagtgcctagcagcaagtcatctggtgaccttgttgatctgtttgatggcaccagccagtcaacaggaggatcagctgatttattcggaggatttgctgactttggctcagctgctgcatcaggcagtttcccttcccaagtaacagcaacaagtgggaatggagactttggtgactggagtgccttcaaccaagccccatcaggccctgttgcttccagtggcgagttctttggcagtgcctcacagccagcggtagaacttgttagtggctcacaatcagctctaggcccacctcctgctgcctcaaattcttcagacctgtttgatcttatgggctcgtcccaggcaaccatgacatcttcccagagtatgaatttctctatgatgagcactaacactgtgggacttggtttgcctatgtcaagatcacagcctttgcaaaatgttagcacagtgctgcagaagcctaatcctctctataatcagaatacagatatggtccagaaatcagtcagcaaaaccttgccctctacttggtctgaccccagtgtaaacatcagcctagacaacttactacctggtatgcagccttccaaaccccagcagccatcactgaatacaatgattcagcaacagaatatgcagcagcctatgaatgtgatgactcaaagttttggagctgtgaacctcagttctccatcgaacatgcttcctgtccggccccaaactaatgctttgatagggggacccatgcctatgagcatgcccaatgtgatgactggcaccatgggaatggcccctcttggaaatactccgatgatgaaccagagcatgatgggcatgaacatgaacatagggatgtccgctgctgggatgggcttgacaggcacaatgggaatgggcatgcccaacatagccatgacttctggaactgtgcaacccaagcaagatgcctttgcaaatttcgccaattttagcaaataagagattgtaaaagaagcagattgaatgaagaatttttagctgtgcagataggtgatgttgggatggaaaatgctaatcaactaccctttcttttatcaagtaattaaaataaatctacataaagaaccaaaaaggctgttttataaaagtgaaatatccagtatttcagagggccaggcaagagcacttcagatgaggcagtcaaaatcatttttttccagtgaggatagaccacaagtgggtggtgagaccattgaaagcctttatcaactgaagagtccatttaacagcataatttgtgggaagactggaatagggctgaataaatgtgtttgaatctctaattttatactttcttttcctgaggaacttgatttttctgtccctggatcgccttgtcataattgggtctgttccttttactaccactcttgagtccatatatgaaatcattaaagttggatgatcagttttttataaaaatatatatttttgtccaagaaaaaaaaaagcatacatatgtgattatggctaaatcaaaggtaactggaatgtatatacttttgctaatgttccagcaacactgctattatactatccaaatttttattgtaacaaaacctctttaagcaattggtgattgccatgggacttttcccatgtcttctgctgtaattatcctgtgcagaactaggaagaaatttttttcaggactgctctatggtttcctttaaaagaaaaaaacttctgtttgtttttagcagtcattatttacaatttgcagtgattaacttggcaaggcttccttccgtgtttatccctgtagccatcatttaagtcaggaacagtcagaaaaatatttattttattttttttttgggtgtctgcaaaggtaaaaatccattaaaaccttaagttaaatataaatgttacaactcaatgtttgcttttagattttatacagtatttgttttgttttggttttgagtgtatataatgcagcattagcaatatggttccaatagaggagttaaatatatattgttaaaggagacctgtagcagtcaaagattttattgatttaatgacaaaggaaattaatgaaaatgtttttgtttttctgctgtaattctgcattaagctcacatgaaaatcatgattctagagtttggaatgcaaaattaattgttttaccctcaagctgggaatatttttcaaaataaatactataatatagatatcaaattattacctccccatgttatgttgaaaatttttttattaaattgataaaactttatttccattatattcataatgttctgttatacataacattaaaatgttcattaaaatc

SEQ ID NO: 6173 - DNA, 3440 bp, Homo sapiens
  source 1..3440: mol_type = unassigned DNA
acttccgctccacgcagcgcctgtgctgccgcgtctcgacgtgtcaccggcggcgccgctgctgtggcaaaggaaggagctgactgggggagttcgaggcggcgggcggcggtgaccccggcctggaactgccccggtacggaagtgttccggggtccgtggggagcaggagagggaggcggcggaccgtcccgcgcggggcacgatgttgaacatgtggaaggtgcgcgagctggtggacaaagccaccaatgttgttatgaattattcagagatcgagtctaaggttcgagaggcaacgaacgatgatccttggggaccttctgggcaactcatgggagagattgccaaggctacatttatgtatgaacaatttccagaacttatgaacatgctttggtcacgaatgttaaaagacaacaaaaagaattggagaagagtttataagtcgttgctgctcctagcttacctcataaggaatggatcagagcgtgttgttacaagtgccagagaacacatttatgatttacgatccctggaaaattaccactttgtagatgagcatggtaaggatcaaggtataaatattcgacagaaggtgaaggaattggttgaatttgcccaggatgacgacaggcttcgtgaagagcgaaagaaagcaaagaagaacaaagacaagtatgttggggtttcctcagacagtgttggaggattcagatacagtgaaagatatgatcctgagcccaaatcaaaatgggatgaggagtgggataaaaacaagagtgcttttccattcagtgataaattaggtgagctgagtgataaaattggaagcacaattgatgacaccatcagcaagttccggaggaaagatagagaagactctccagaaagatgcagcgacagcgatgaggaaaagaaagcgagaagaggcagatctcccaaaggtgaattcaaagatgaagaggagactgtgacgacaaagcatattcatatcacacaggccacagagaccaccacaaccagacacaagcgcacagcaaatccttccaaaaccattgatcttggagcagcagcacattacacaggggacaaagcaagtccagatcagaatgcttcaacccacacacctcagtcttcagttaagacttcagtgcctagcagcaagtcatctggtgaccttgttgatctgtttgatggcaccagccagtcaacaggaggatcagctgatttattcggaggatttgctgactttggctcagctgctgcatcaggcagtttcccttcccaagtaacagcaacaagtgggaatggagactttggtgactggagtgccttcaaccaagccccatcaggccctgttgcttccagtggcgagttctttggcagtgcctcacagccagcggtagaacttgttagtggctcacaatcagctctaggcccacctcctgctgcctcaaattcttcagacctgtttgatcttatgggctcgtcccaggcaaccatgacatcttcccagagtatgaatttctctatgatgagcactaacactgtgggacttggtttgcctatgtcaagatcacagaatacagatatggtccagaaatcagtcagcaaaaccttgccctctacttggtctgaccccagtgtaaacatcagcctagacaacttactacctggtatgcagccttccaaaccccagcagccatcactgaatacaatgattcagcaacagaatatgcagcagcctatgaatgtgatgactcaaagttttggagctgtgaacctcagttctccatcgaacatgcttcctgtccggccccaaactaatgctttgatagggggacccatgcctatgagcatgcccaatgtgatgactggcaccatgggaatggcccctcttggaaatactccgatgatgaaccagagcatgatgggcatgaacatgaacatagggatgtccgctgctgggatgggcttgacaggcacaatgggaatgggcatgcccaacatagccatgacttctggaactgtgcaacccaagcaagatgcctttgcaaatttcgccaattttagcaaataagagattgtaaaagaagcagattgaatgaagaatttttagctgtgcagataggtgatgttgggatggaaaatgctaatcaactaccctttcttttatcaagtaattaaaataaatctacataaagaaccaaaaaggctgttttataaaagtgaaatatccagtatttcagagggccaggcaagagcacttcagatgaggcagtcaaaatcatttttttccagtgaggatagaccacaagtgggtggtgagaccattgaaagcctttatcaactgaagagtccatttaacagcataatttgtgggaagactggaatagggctgaataaatgtgtttgaatctctaattttatactttcttttcctgaggaacttgatttttctgtccctggatcgccttgtcataattgggtctgttccttttactaccactcttgagtccatatatgaaatcattaaagttggatgatcagttttttataaaaatatatatttttgtccaagaaaaaaaaaagcatacatatgtgattatggctaaatcaaaggtaactggaatgtatatacttttgctaatgttccagcaacactgctattatactatccaaatttttattgtaacaaaacctctttaagcaattggtgattgccatgggacttttcccatgtcttctgctgtaattatcctgtgcagaactaggaagaaatttttttcaggactgctctatggtttcctttaaaagaaaaaaacttctgtttgtttttagcagtcattatttacaatttgcagtgattaacttggcaaggcttccttccgtgtttatccctgtagccatcatttaagtcaggaacagtcagaaaaatatttattttattttttttttgggtgtctgcaaaggtaaaaatccattaaaaccttaagttaaatataaatgttacaactcaatgtttgcttttagattttatacagtatttgttttgttttggttttgagtgtatataatgcagcattagcaatatggttccaatagaggagttaaatatatattgttaaaggagacctgtagcagtcaaagattttattgatttaatgacaaaggaaattaatgaaaatgtttttgtttttctgctgtaattctgcattaagctcacatgaaaatcatgattctagagtttggaatgcaaaattaattgttttaccctcaagctgggaatatttttcaaaataaatactataatatagatatcaaattattacctccccatgttatgttgaaaatttttttattaaattgataaaactttatttccattatattcataatgttctgttatacataacattaaaatgttcattaaaatc

SEQ ID NO: 6174 - DNA, 3987 bp, Homo sapiens
  source 1..3987: mol_type = unassigned DNA
gcgtctcgacgtgtcaccggcggcgccgctgctgtggcaaaggaaggagctgactgggggagttcgaggcggcgggcggcggtgaccccggcctggaactgccccggtacggaagtgttccggggtccgtggggagcaggagagggaggcggcggaccgtcccgcgcggggcacgatgttgaacatgtggaagcaccaatgttgttatgaattattcagagatcgagtctaaggttcgagaggcaacgaacgatgatccttggggaccttctgggcaactcatgggagagattgccaaggctacatttatgtatgaacaatttccagaacttatgaacatgctttggtcacgaatgttaaaagacaacaaaaagaattggagaagagtttataagtcgttgctgctcctagcttacctcataaggaatggatcagagcgtgttgttacaagtgccagagaacacatttatgatttacgatccctggaaaattaccactttgtagatgagcatggtaaggatcaaggtataaatattcgacagaaggtgaaggaattggttgaatttgcccaggatgacgacaggcttcgtgaagagcgaaagaaagcaaagaagaacaaagacaagtatgttggggtttcctcagacagtgttggaggattcagatacagtgaaagatatgatcctgagcccaaatcaaaatgggatgaggagtgggataaaaacaagagtgcttttccattcagtgataaattaggtgagctgagtgataaaattggaagcacaattgatgacaccatcagcaagttccggaggaaagatagagaagactctccagaaagatgcagcgacagcgatgaggaaaagaaagcgagaagaggcagatctcccaaaggtgaattcaaagatgaagaggagactgtgacgacaaagcatattcatatcacacaggccacagagaccaccacaaccagacacaagcgcacagcaaatccttccaaaaccattgatcttggagcagcagcacattacacaggggacaaagcaagtccagatcagaatgcttcaacccacacacctcagtcttcagttaagacttcagtgcctagcagcaagtcatctggtgaccttgttgatctgtttgatggcaccagccagtcaacaggaggatcagctgatttattcggaggatttgctgactttggctcagctgctgcatcaggcagtttcccttcccaagtaacagcaacaagtgggaatggagactttggtgactggagtgccttcaaccaagccccatcaggccctgttgcttccagtggcgagttctttggcagtgcctcacagccagcggtagaacttgttagtggctcacaatcagctctaggcccacctcctgctgcctcaaattcttcagacctgtttgatcttatgggctcgtcccaggcaaccatgacatcttcccagagtatgaatttctctatgatgagcactaacactgtgggacttggtttgcctatgtcaagatcacagcctttgcaaaatgttagcacagtgctgcagaagcctaatcctctctataatcagaatacagatatggtccagaaatcagtcagcaaaaccttgccctctacttggtctgaccccagtgtaaacatcagcctagacaacttactacctggtatgcagccttccaaaccccagcagccatcactgaatacaatgattcagcaacagaatatgcagcagcctatgaatgtgatgactcaaagttttggagctgtgaacctcagttctccatcgaacatgcttcctgtccggccccaaactaatgctttgatagggggacccatgcctatgagcatgcccaatgtgatgactggcaccatgggaatggcccctcttggaaatactccgatgatgaaccagagcatgatgggcatgaacatgaacatagggatgtccgctgctgggatgggcttgacaggcacaatgggaatgggcatgcccaacatagccatgacttctggaactgtgcaacccaagcaagatgcctttgcaaatttcgccaattttagcaaataagagattgtaaaagaagcagattgaatgaagaatttttagctgtgcagataggtgatgttgggatggaaaatgctaatcaactaccctttcttttatcaagtaattaaaataaatctacataaagaaccaaaaaggctgttttataaaagtgaaatatccagtatttcagagggccaggcaagagcacttcagatgaggcagtcaaaatcatttttttccagtgaggatagaccacaagtgggtggtgagaccattgaaagcctttatcaactgaagagtccatttaacagcataatttgtgggaagactggaatagggctgaataaatgtgtttgaatctctaattttatactttcttttcctgaggaacttgatttttctgtccctggatcgccttgtcataattgggtctgttccttttactaccactcttgagtccatatatgaaatcattaaagttggatgatcagttttttataaaaatatatatttttgtccaagaaaaaaaaaagcatacatatgtgattatggctaaatcaaaggtaactggaatgtatatacttttgctaatgttccagcaacactgctattatactatccaaatttttattgtaacaaaacctctttaagcaattggtgattgccatgggacttttcccatgtcttctgctgtaattatcctgtgcagaactaggaagaaatttttttcaggactgctctatggtttcctttaaaagaaaaaaacttctgtttgtttttagcagtcattatttacaatttgcagtgattaacttggcaaggcttccttccgtgtttatccctgtagccatcatttaagtcaggaacagtcagaaaaatatttattttattttttttttgggtgtctgcaaaggtaaaaatccattaaaaccttaagttaaatataaatgttacaactcaatgtttgcttttagattttatacagtatttgttttgttttggttttgagtgtatataatgcagcattagcaatatggttccaatagaggagttaaatatatattgttaaaggagacctgtagcagtcaaagattttattgatttaatgacaaaggaaattaatgaaaatgtttttgtttttctgctgtaattctgcattaagctcacatgaaaatcatgattctagagtttggaatgcaaaattaattgttttaccctcaagctgggaatatttttcaaaataaatactataatatagatatcaaattattacctccccatgttatgttgaaaatttttttattaaattgataaaactttatttccattatattcataatgttctgttatacataacattaaaatgttcattaaaatcaatgttgaactgctttttctttcgttctgttagacatttgagaccatttggggaaaaaataattatagtttgggcaaagtaatttttataaataatttaaaattatttaatgacttctctattctttcctatcagactctactgttaggaattaaaaatgaagcagcaaagatatcctgacctgctccattcttgctaatgttccatctacaacatttctaattaggcagaaattcatgtacttcagctaagtggtaatgaaaagtgattcatttgctgaataagagatgagagtgagtgtaattagctgactgcggtttttaatctttcaacaattcaatgtgtttaacttagtttcaaagaataggagctttcaagtgttgttacttcagagcaatcaagccagcctctggtggccgcatagtagaatatggtccctgatatttaaaaccgatcatcttaagtaaattttttctttaagaagtatatcttcactttctcaaatatgtatggttcttagacgaagtaaatgtttatctgaacctt

SEQ ID NO: 6175 - DNA, 3344 bp, Homo sapiens
  source 1..3344: mol_type = unassigned DNA
gtcaccggcggcgccgctgctgtggcaaaggaaggagctgactgggggagttcgaggcggcgggcggcggtgaccccggcctggaactgccccgcaccaatgttgttatgaattattcagagatcgagtctaaggttcgagaggcaacgaacgatgatccttggggaccttctgggcaactcatgggagagattgccaaggctacatttatgtatgaacaatttccagaacttatgaacatgctttggtcacgaatgttaaaagacaacaaaaagaattggagaagagtttataagtcgttgctgctcctagcttacctcataaggaatggatcagagcgtgttgttacaagtgccagagaacacatttatgatttacgatccctggaaaattaccactttgtagatgagcatggtaaggatcaaggtataaatattcgacagaaggtgaaggaattggttgaatttgcccaggatgacgacaggcttcgtgaagagcgaaagaaagcaaagaagaacaaagacaagtatgttggggtttcctcagacagtgttggaggattcagatacagtgaaagatatgatcctgagcccaaatcaaaatgggatgaggagtgggataaaaacaagagtgcttttccattcagtgataaattaggtgagctgagtgataaaattggaagcacaattgatgacaccatcagcaagttccggaggaaagatagagaagactctccagaaagatgcagcgacagcgatgaggaaaagaaagcgagaagaggcagatctcccaaaggtgaattcaaagatgaagaggagactgtgacgacaaagcatattcatatcacacaggccacagagaccaccacaaccagacacaagcgcacagcaaatccttccaaaaccattgatcttggagcagcagcacattacacaggggacaaagcaagtccagatcagaatgcttcaacccacacacctcagtcttcagttaagacttcagtgcctagcagcaagtcatctggtgaccttgttgatctgtttgatggcaccagccagtcaacaggaggatcagctgatttattcggaggatttgctgactttggctcagctgctgcatcaggcagtttcccttcccaagtaacagcaacaagtgggaatggagactttggtgactggagtgccttcaaccaagccccatcaggccctgttgcttccagtggcgagttctttggcagtgcctcacagccagcggtagaacttgttagtggctcacaatcagctctaggcccacctcctgctgcctcaaattcttcagacctgtttgatcttatgggctcgtcccaggcaaccatgacatcttcccagagtatgaatttctctatgatgagcactaacactgtgggacttggtttgcctatgtcaagatcacagcctttgcaaaatgttagcacagtgctgcagaagcctaatcctctctataatcagaatacagatatggtccagaaatcagtcagcaaaaccttgccctctacttggtctgaccccagtgtaaacatcagcctagacaacttactacctggtatgcagccttccaaaccccagcagccatcactgaatacaatgattcagcaacagaatatgcagcagcctatgaatgtgatgactcaaagttttggagctgtgaacctcagttctccatcgaacatgcttcctgtccggccccaaactaatgctttgatagggggacccatgcctatgagcatgcccaatgtgatgactggcaccatgggaatggcccctcttggaaatactccgatgatgaaccagagcatgatgggcatgaacatgaacatagggatgtccgctgctgggatgggcttgacaggcacaatgggaatgggcatgcccaacatagccatgacttctggaactgtgcaacccaagcaagatgcctttgcaaatttcgccaattttagcaaataagagattgtaaaagaagcagattgaatgaagaatttttagctgtgcagataggtgatgttgggatggaaaatgctaatcaactaccctttcttttatcaagtaattaaaataaatctacataaagaaccaaaaaggctgttttataaaagtgaaatatccagtatttcagagggccaggcaagagcacttcagatgaggcagtcaaaatcatttttttccagtgaggatagaccacaagtgggtggtgagaccattgaaagcctttatcaactgaagagtccatttaacagcataatttgtgggaagactggaatagggctgaataaatgtgtttgaatctctaattttatactttcttttcctgaggaacttgatttttctgtccctggatcgccttgtcataattgggtctgttccttttactaccactcttgagtccatatatgaaatcattaaagttggatgatcagttttttataaaaatatatatttttgtccaagaaaaaaaaaagcatacatatgtgattatggctaaatcaaaggtaactggaatgtatatacttttgctaatgttccagcaacactgctattatactatccaaatttttattgtaacaaaacctctttaagcaattggtgattgccatgggacttttcccatgtcttctgctgtaattatcctgtgcagaactaggaagaaatttttttcaggactgctctatggtttcctttaaaagaaaaaaacttctgtttgtttttagcagtcattatttacaatttgcagtgattaacttggcaaggcttccttccgtgtttatccctgtagccatcatttaagtcaggaacagtcagaaaaatatttattttattttttttttgggtgtctgcaaaggtaaaaatccattaaaaccttaagttaaatataaatgttacaactcaatgtttgcttttagattttatacagtatttgttttgttttggttttgagtgtatataatgcagcattagcaatatggttccaatagaggagttaaatatatattgttaaaggagacctgtagcagtcaaagattttattgatttaatgacaaaggaaattaatgaaaatgtttttgtttttctgctgtaattctgcattaagctcacatgaaaatcatgattctagagtttggaatgcaaaattaattgttttaccctcaagctgggaatatttttcaaaataaatactataatatagatatcaaattattacctccccatgttatgttgaaaatttttttattaaattgataaaactttatttccattatattcataatgttctgttatacataacattaaaatgttcattaaaatcaa

SEQ ID NO: 6176 - DNA, 2346 bp, Homo sapiens
  source 1..2346: mol_type = unassigned DNA
gtctcgacgtgtcaccggcggcgccgctgctgtggcaaaggaaggagctgactgggggagttcgaggcggcgggcggcggtgaccccggcctggaactgccccggtacggaagtgttccggggtccgtggggagcaggagagggaggcggcggaccgtcccgcgcggggcacgatgttgaacatgtggaaggtgcgcgagctggtggacaaagccaccaatgttgttatgaattattcagagatcgagtctaaggttcgagaggcaacgaacgatgatccttggggaccttctgggcaactcatgggagagattgccaaggctacatttatgtatgaacaatttccagaacttatgaacatgctttggtcacgaatgttaaaagacaacaaaaagaattggagaagagtttataagtcgttgctgctcctagcttacctcataaggaatggatcagagcgtgttgttacaagtgccagagaacacatttatgatttacgatccctggaaaattaccactttgtagatgagcatggtaaggatcaaggtataaatattcgacagaaggtgaaggaattggttgaatttgcccaggatgacgacaggcttcgtgaagagcgaaagaaagcaaagaagaacaaagacaagtatgttggggtttcctcagacagtgttggaggattcagatacagtgaaagatatgatcctgagcccaaatcaaaatgggatgaggagtgggataaaaacaagagtgcttttccattcagtgataaattaggtgagctgagtgataaaattggaagcacaattgatgacaccatcagcaagttccggaggaaagatagagaagactctccagaaagatgcagcgacagcgatgaggaaaagaaagcgagaagaggcagatctcccaaaggtgaattcaaagatgaagaggagactgtgacgacaaagcatattcatatcacacaggccacagagaccaccacaaccagacacaagcgcacagcaaatccttccaaaaccattgatcttggagcagcagcacattacacaggggacaaagcaagtccagatcagaatgcttcaacccacacacctcagtcttcagttaagacttcagtgcctagcagcaagtcatctggtgaccttgttgatctgtttgatggcaccagccagtcaacaggaggatcagctgatttattcggaggatttgctgactttggctcagctgctgcatcaggcagtttcccttcccaagtaacagcaacaagtgggaatggagactttggtgactggagtgccttcaaccaagccccatcaggccctgttgcttccagtggcgagttctttggcagtgcctcacagccagcggtagaacttgttagtggctcacaatcagctctaggcccacctcctgctgcctcaaattcttcagacctgtttgatcttatgggctcgtcccaggcaaccatgacatcttcccagagtatgaatttctctatgatgagcactaacactgtgggacttggtttgcctatgtcaagatcacagcctttgcaaaatgttagcacagtgctgcagaagcctaatcctctctataatcagaatacagatatggtccagaaatcagtcagcaaaaccttgccctctacttggtctgaccccagtgtaaacatcagcctagacaacttactacctggtatgcagccttccaaaccccagcagccatcactgaatacaatgattcagcaacagaatatgcagcagcctatgaatgtgatgactcaaagttttggagctgtgaacctcagttctccatcgaacatgcttcctgtccggccccaaactaatgctttgatagggggacccatgcctatgagcatgcccaatgtgatgactggcaccatgggaatggcccctcttggaaatactccgatgatgaaccagagcatgatgggcatgaacatgaacatagggatgtccgctgctgggatgggcttgacaggcacaatgggaatgggcatgcccaacatagccatgacttctggaactgtgcaacccaagcaagatgcctttgcaaatttcgccaattttagcaaataagagattgtaaaagaagcagattgaatgaagaatttttagctgtgcagataggtgatgttgggatggaaaatgctaatcaactaccctttcttttatcaagtaattaaaataaatctacataaagaaccaaaaaggctgttttataaaagtgaaatatccagtatttcagagggccaggcaagagcacttcagatgaggcagtcaaaatcatttttttccagtgaggatagaccacaagtgg

SEQ ID NO: 6177 - DNA, 7760 bp, Homo sapiens
  source 1..7760: mol_type = unassigned DNA
ggcggagttctgtcgccgggatccttccgctgggctcagccgtttccggagtctgcgctgcgcccggttccgccattgcggctctcctggcccctggagcctccgcccccgacccgagctctttcgtctgcctgccagtttcctgcgtccccggagaggatcctgctgagcccagcctcccccctccccttctcctcctctcccttggagagcccgggcagccactgccccgcagccccagtgacaggaggagaccataacccccgacagcgccatggcccagattctgccaattcgttttcaggagcatctccagctccagaacctgggtatcaacccagcaaacattggcttcagtaccctgactatggagtctgacaaattcatctgcattagagaaaaagtaggagagcaggcccaggtggtaatcattgatatgaatgacccaagtaatccaattcgaagaccaatttcagcagacagcgccatcatgaatccagctagcaaagtaattgcactgaaagctgggaaaactcttcagatttttaacattgaaatgaaaagtaaaatgaaggctcataccatgactgatgatgtcaccttttggaaatggatctctttgaatacggttgctcttgttacggataatgcagtttatcactggagtatggaaggagagtctcagccagtgaaaatgtttgatcgccattctagccttgcagggtgccagattatcaattaccgtacagatgcaaaacaaaagtggttacttctgactggtatatctgcacagcaaaatcgtgtggtgggagctatgcagctatattctgtagataggaaagtgtctcagcccattgaaggacatgcagctagctttgcacagtttaagatggaaggaaatgcagaagaatcaacgttattttgttttgcagttcggggccaagctggagggaagttacatattattgaagttggcacaccacctacagggaaccagccctttccaaagaaggcagtggatgtcttctttcctccagaagcacaaaatgattttcctgttgcaatgcagatcagtgaaaagcatgatgtggtgttcttgataaccaagtatggttatatccacctctatgatcttgagactggtacctgcatctacatgaatagaatcagtggagaaacaatttttgttactgcacctcatgaagccacagctggaataattggagtaaacagaaagggacaagttctgtcagtgtgtgtggaagaagaaaacataattccttacatcaccaatgttctacaaaatcctgatttggctctgagaatggctgtacgtaataacttagccggtgctgaagaactctttgcccggaaatttaatgctctttttgcccagggaaattactcggaggcagcaaaggtggctgctaatgcaccaaagggaattcttcgtactccagacactatccgtcggttccagagtgtcccagcccagccaggtcaaacttctcctctacttcagtactttggtatccttttggaccagggacagctcaacaaatacgaatccttagagctttgtaggcctgtacttcagcaagggcgaaaacagcttttggagaaatggttaaaagaagataagctggaatgttctgaagaactgggtgatcttgtgaaatctgtggaccctacattggcacttagtgtgtacctaagggctaacgtcccaaataaagtcattcagtgctttgcagaaacaggtcaagtccaaaagattgttttatatgctaaaaaagttggatacactccagattggatatttctgctgagaaatgtaatgcgaatcagtccagatcagggacagcagtttgcccaaatgttagttcaagatgaagagcctcttgctgacatcacacagattgtagatgtctttatggaatacaatctaattcagcagtgtactgcattcttgcttgatgctctgaagaataatcgcccatctgaaggtcctttacagacgcggttacttgagatgaaccttatgcatgcgcctcaagttgcagatgctattctaggcaatcagatgttcacacattatgaccgggctcatattgctcaactgtgtgaaaaggctggcctactgcagcgtgcattagaacatttcactgatttatatgatataaaacgtgcagtggttcacacccatcttcttaaccctgagtggttagtcaactactttggttccttatcagtagaagactccctagaatgtctcagagccatgctgtctgccaacatccgtcagaatctgcagatttgtgttcaggtggcttctaaatatcatgaacaactgtcaactcagtctctgattgaactttttgaatctttcaagagttttgaaggtctcttttattttctgggatccattgttaactttagccaggacccagatgtgcactttaaatatattcaggcagcttgcaagactgggcaaatcaaagaagtagaaagaatctgtagagaaagcaactgctacgatcctgagcgagtcaagaattttcttaaggaagcaaaactaacagatcagctaccacttatcattgtgtgtgatcgatttgactttgtccatgatttggtgctctatttatatagaaataatcttcaaaagtatatagagatatatgtacagaaggtgaatccaagtcgacttcctgtagttattggaggattacttgatgttgactgttctgaagatgtcataaaaaacttgattcttgttgtaagaggtcaattctctactgatgagcttgttgctgaggttgaaaaaagaaacagattgaaactgcttctgccttggctagaggccagaattcatgagggctgtgaggagcctgctactcacaatgccttagccaaaatctacatagacagtaataacaacccggagagatttcttcgtgaaaatccctactatgacagtcgcgttgttggaaagtattgtgagaagagagatccacatctggcctgtgttgcttatgaacgtggccaatgtgatctggaacttattaatgtttgcaatgagaattccctcttcaaaagtctttctcgctacctggtacgtcgaaaggatccagaattgtggggcagcgtgctgctggaaagcaatccttacaggagacccctaattgaccaggttgtacaaacagctttgtctgagactcaggaccctgaagaagtgtcagtaactgtaaaggctttcatgactgcagaccttcctaatgaactcattgaactgctggagaaaattgtccttgataactctgtattcagtgaacacaggaatctgcaaaacctccttatcctcactgcaattaaggctgaccgtacacgtgttatggagtatattaaccgcctggataattatgatgccccagatattgccaatatcgccatcagcaatgagctgtttgaagaagcatttgccattttccggaaatttgatgtcaatacttcagcagttcaggtcttaattgagcatattggaaacttggatcgggcatatgagtttgctgaacgttgcaatgaacctgcggtctggagtcaacttgcaaaagcccagttgcagaaaggaatggtgaaagaagccattgattcttatatcaaagcagatgatccttcctcctacatggaagttgttcaggctgccaatactagtggaaactgggaagaactggtgaagtacttgcagatggcccgtaagaaggctcgagagtcctatgtggagacagaactgatattcgcactggctaaaacaaaccgccttgcagagttagaagaatttatcaatggaccaaataatgctcatatccaacaagttggtgaccgttgttatgatgaaaaaatgtatgatgctgctaagttgttgtacaataatgtttccaattttggacgtttggcatctaccctggttcacctgggtgaatatcaggcagctgttgatggggctaggaaagctaacagtactcgaacatggaaagaggtctgcttcgcctgtgtagatgggaaagaattccgtcttgctcagatgtgtggacttcatattgttgtacatgcagatgaattagaagaacttatcaactactatcaggatcgtggctattttgaagagctgatcaccatgttggaagcagcactgggacttgagcgagctcacatgggaatgtttactgaattagctattctatactctaaatttaagcctcagaaaatgagggagcacctggagctgttctggtctagagtgaatattcccaaggtgctaagagctgcagaacaagctcatctttgggcagaactggtgtttttgtatgacaagtatgaagaatatgataatgccataattaccatgatgaatcatccaactgatgcctggaaagaagggcaattcaaagatatcattaccaaggttgccaatgtggaactatactacagagcaatacagttctacttagaattcaagcctctgttgttaaatgatttgctgatggtgctgtctccacggttggatcacactcgtgcagtcaattatttcagcaaggttaaacagctaccactggtgaaaccgtatttgcgttcagttcagaaccataacaacaaatctgtgaatgaatcattgaacaatctttttattacagaagaagattatcaggctctgcgaacatcaatagatgcttatgacaactttgacaatatctcgcttgctcagcgtttggaaaaacatgaactcattgagttcaggagaattgctgcttatctcttcaaaggcaacaatcgctggaaacagagtgtagagctgtgcaagaaagacagcctttacaaggatgcaatgcagtatgcttctgaatctaaagatactgaattggctgaagaactcctgcagtggtttttgcaggaagaaaaaagagagtgctttggagcttgtctgtttacctgttacgatcttttaaggccagatgtcgtcctagaaactgcatggaggcacaatatcatggattttgccatgccctatttcatccaggtcatgaaggagtacttgacaaaggtggataaattagatgcttcagaatcactgagaaaagaagaagaacaagctacagagacacaacccattgtttatggtcagccccagttgatgctgacagcaggacccagtgttgccgtccctccccaggcaccttttggttatggttataccgcaccaccgtatggacagccacagcctggctttgggtacagcatgtgagatgaagcgctgatcctgtagtcacctattttcgtactgaaacatcgtctttacccacttctcagtttataatgggggaaaacaggcaacgtgttcttgtaacctttatttcatgaaggacttctttttgtttctaactataaacttggatcacctatgttaaaaccttatttcacattccacatcattttagaatttattttcgaaggggaatagtttcaatgttttattcacttgggctttttttcttccccctctttctttaaagaactgctcaatattcaatctgttgtgaagaacctgatttgcactctgtagtgtttaaagaaacaaagaaactctaatattgaatctcttaaatttagtgtatgtaaacagcttacaaatacgtattgtctaaatgcatttaaatctgttttattcaaagaaaagctaaagcaaaaacactggcatatgaccatgcaagactgtcagtgccaacaaagacaacactaatcagcacatcgtacactggattgcagtgcttcccagattattgaaaaatgttacagacaacttgcctgatttttaaatgagcgtaaaaggccctctaacctatgcaggtttccccattatgcatatagaaaatgctagtatgttttgctcacttcatatgtaacaggtgcccttatgttgtgctgtatcctgtgctttttctgtgggaccattccattcaggagcaaagagcaccatgattccaatcttgtgtgtgtttactaacccttccctgaggtttgtgtatgttggatattgtggtgttttagatcactgagtgtacagaagagagaaattcaaacaaaatattgctgttcttcagttttgtttgtggaatttgaaattactcaaatttaaaataaattactggactgtggaaataacatagaattgaagttttaattaaataccactcaaacgaaaagaacagtagtttttgtagttttatattggatactgaggcattagggaggcatgaaaggaagaggaatgaggattgagacatgtgaagacattgtgcattatatcaatgtgcattcctgtagttcattaacaaggtacatgcaatagtctaaagaaccagagtcactactatagtggcttaacatttaatctgtctccaatattttaaccaagtgacaccgaggtttttatcgaagcatttcacttaaatgaacaaatcatggctgttatattaacttgaaataaaatatatttaaacatgtagttaacatgctctttctcatcatgaattataaaggtgcccaaattatgggtatcttgatttttttcaaaaattggttgtgtgaatccagctcttgcttatggctgagaatgttcctaaagttcatttcactatcccttaatcctcaatagctacacatacccccttgcctagttagtcttgcactgctttacaactctcttaggcaaattacctaacataagctccacagaagagttttttaaaacttaaaatccctgtcccaccaggtgtggtggctcatgcctgtaatcccagcactttgggaggctgaggcaggcggattgcttgaggccaggagttcgagacaagcctgaccaacatggtgactccatctctactaaaaataaaaaatcagccaggtgtgatggtggatgcctataagatcctagctgctactcaggaggcaggaggctgaggcatgagaatcacttgaacctgtgaggcaaaggttgtagtgagccaagatcacgtcactgcactccatcctgggtgacagaatgagactcttgtctcaaaaaacaaaaaaacctatttagtttcatccaggacattaagtgaaagtgtttaatgtgagtgcaggtcagtgaagaatacaatggtgcccctgctttgatttgtgggaggtgccatcagttttccccaccactgcttttgcaccctcagtgcaaatatcaacacagagaaaaaaaaaataataatagtattatgaaaacattgactctgtggagaccctgtgggttctgcagagtatactttgaaaactataagattatgagttctataaaataccaagtacagatgaactagaaaacaagcatatatccacaattaccagaattttcatagtattccttttagtagatatgccatgacagttacttagccaccccatgccatcctgttgggaatgccactacctttgaatttggagccatcagtctatctgaggcaaacctcagaaattacctgagccagaatcatgcacttagcactgagttcaactcagtcttaacgttgcattttgttgcatcacttttgcagccagtaaacattctgtttagaaatagttgctattgtggcatcattcacagttgcaatttttctcctgtgctgtcatatgcctgtgcgaagtgtattaaatgaatcaaatattagaaa

SEQ ID NO: 6178 - DNA, 5513 bp, Homo sapiens
  source 1..5513: mol_type = unassigned DNA
cggtcagcccgcgcgaggggtcggcgttcattcctgccgctgccgccgccgccgccgaggtcccgcaccagccatggcgcagatcctccctgttcgctttcaggagcacttccagctccaaaaccttggaattaatccagctaacattggattcagcacactgaccatggaatctgacaagttcatatgtatccgagagaaagttggtgagcaggcacaggtcacgatcattgacatgagtgacccaatggctccgatccgacggcctatctctgcagagagtgccatcatgaatccagcctctaaggtgatagctctgaaagctgggaagacacttcagatctttaatattgagatgaagagtaaaatgaaggctcatactatggcagaagaagtgattttctggaaatgggtttctgtgaacactgttgccttggtgaccgagaccgcggtctaccactggagcatggaaggtgactcccagcccatgaagatgtttgatagacataccagtctggtgggctgccaggtgattcactaccggactgatgagtaccagaagtggctgctgctcgtaggcatctcggctcagcaaaaccgtgtggttggagcaatgcagctctactctgtggataggaaggtttcacaacccatagaaggccatgctgcggcttttgcagagttcaagatggaggggaatgccaagcctgccacccttttctgctttgctgtacgtaatcccacaggaggcaagttgcacatcattgaagttggacagcctgcagcgggaaaccaaccttttgtaaagaaagcagtagatgtgttttttcctccagaggcacagaatgattttccagtggctatgcagattggagctaaacatggtgttatttacttgatcacaaagtatggctatcttcatctgtacgacctagagtctggcgtgtgcatctgcatgaaccgtattagtgctgacacaatatttgtcactgctccacacaaaccaacctctggaattattggtgtcaacaaaaagggacaggtactgtcagtttgtgttgaggaagataacattgtgaattatgcaaccaacgtgcttcagaatccagaccttggtctgcgtttggccgttcgtagtaacctggctggggcagagaagttgtttgtgagaaaattcaataccctctttgcacagggcagctatgctgaagccgccaaagttgcagcgtctgcaccaaagggaatcctgcgtaccagagagacggtccagaaattccagagtatacccgctcagtctggccaggcttctccattgctgcagtacttcggaatcctgctcgaccagggtcagctcaataaacttgaatccttagaactttgccatctggttcttcagcaggggcgtaagcaactcctagagaagtggctgaaagaagataagctggagtgctcagaggagctcggagacttggtcaaaaccactgaccccatgctcgctctgagtgtgtaccttcgggcaaatgtgccaagcaaagtgatccagtgttttgcagaaacaggccaattccagaaaattgtgctctatgccaaaaaggttgggtacaccccagactggatctttctgctgaggggtgtaatgaagatcagtccggaacagggcctgcagttttctcgaatgctagtgcaggacgaggagccgctggccaacattagccagattgtggacattttcatggaaaacagtttaattcagcagtgtacttccttcttattggatgccttgaagaataatcgcccagctgagggactcctgcagacatggctgttggagatgaaccttgttcatgcaccccaggttgcagatgccatccttggaaataaaatgtttactcattacgaccgggcccacattgcccagctctgtgagaaggcaggcctcctgcagcaagcactggagcactacaccgacctctatgacatcaagagggctgtggtccacactcacctcctcaatcccgagtggcttgtcaatttctttggctccttatcggtggaggattctgtggagtgtctgcatgccatgctgtctgctaacatcagacagaaccttcagctgtgtgtgcaggtggcctctaagtaccacgagcagctgggcacgcaggccctggtggagctctttgaatccttcaagagttacaaaggcctcttctacttcctgggctcaatcgtgaacttcagccaagacccagatgtgcatctgaaatacattcaggctgcctgtaagacagggcagatcaaggaggtggagaggatatgccgagagagcagctgctacaacccagagcgtgtgaagaacttcctgaaggaggccaagctcacagaccagcttcccctcatcatcgtgtgtgatcgttttggctttgtccatgaccttgtcctatatttataccgcaacaacctgcagaggtacattgagatctacgtgcagaaggtcaaccctagccggaccccagctgtgattggagggctgcttgatgtggattgttctgaggaagtgattaaacacttaatcatggcagtgagaggacagttctctactgatgagttggtggctgaagtagaaaaaagaaataggctcaagctgctgcttccctggctggagtcccagattcaggaaggctgtgaggagcctgccactcacaatgcactggctaaaatctacatcgacagcaacaacagccccgagtgcttcctgagagagaatgcctactatgacagcagcgtggtgggccgctactgtgagaagcgagacccccatctggcctgtgttgcctatgagcgggggcagtgtgaccttgagctcatcaaggtgtgcaatgagaattctctgttcaaaagcgaggcccgctacctggtatgcagaaaggatccggagctctgggctcacgtccttgaggagaccaacccatccaggagacagctaattgaccaggtggtacagacagcattgtcagaaacacgggatcctgaagagatttcggtcactgtcaaagcctttatgacagccgacctgcctaatgaactgattgaactgctggagaagatagttctggataactctgtcttcagcgagcacaggaatctacagaatctgttgatcctgactgccatcaaggcagaccgcacacgggtcatggagtacatcagccgcctggacaactatgacgcactggacatcgcgagcatcgctgtcagcagcgcactgtatgaggaggccttcaccgttttccacaagtttgatatgaatgcctcagcaatccaggtcctgatcgagcacattggaaacctggaccgggcatatgagtttgcggagagatgcaatgagcctgctgtgtggagtcagctggcccaagcccagctccagaaagatttggtgaaggaagccatcaactcctatatcagaggggacgacccttcctcttacctggaagttgttcagtcagccagcaggagcaacaactgggaggatctagttaaatttctgcagatggccaggaaaaagggccgtgagtcctatatagagactgaacttatttttgccttggctaaaaccagccgtgtttctgagctagaagattttattaatggacccaacaatgcccacatccagcaggttggagaccgctgttacgaggagggaatgtacgaggctgccaagctgctctatagcaatgtttctaactttgcccgcctggcttccaccttggttcacctcggtgagtatcaggcagcagtggacaacagccgcaaggccagcagcacccggacgtggaaggaggtgtgctttgcctgcatggatggacaagagttccgcttcgcacagctgtgtggtcttcacatcgtcattcatgcagatgagctggaggagctgatgtgctattaccaggatcgtggctactttgaggagctgatcttgctgttggaagcggccctgggcctggagcgggcccacatgggcatgttcactgagctggccatcctctactccaaattcaagccacagaagatgctggagcatctggagcttttctggtcccgtgtcaacatcccaaaggtgctgagggctgcagagcaggcacacctgtgggctgagctggtgttcctctatgacaagtacgaggagtatgacaatgctgtgctcaccatgatgagccaccccactgaggcctggaaggagggtcagttcaaggacatcattaccaaggttgccaacgtcgagctctgttacagagccctgcagttctatttggattacaaaccactgctcatcaatgacctgctgctggtgctttcaccccggctggaccacacctggacagtcagtttcttttcaaaggcaggtcagctgcccctggtgaagccttacctgcggtcagtccagagccacaacaacaagagtgtgaatgaggcactcaaccacctgctgacagaggaggaggactatcagggcttaagggcatctatcgatgcctatgacaactttgacaacatcagcctggctcagcagctggagaagcatcagctgatggagttcaggtgcattgcggcctatctgtacaagggcaataactggtgggcccagagcgtggagctctgcaagaaggatcatctctacaaggatgccatgcagcatgctgcagagtcgcgggatgctgagctggcccagaagttgctgcagtggttcctggaggaaggcaagagggagtgcttcgcagcttgtctcttcacctgctatgacctgcttcgcccagacatggtgcttgagctggcctggaggcacaacctcgtggacttggccatgccctacttcatccaggtgatgagggagtacctgagcaaggtggacaaactggatgccttggagagtctgcgcaagcaagaggagcatgtgacagagcctgcccctctcgtgtttgattttgatgggcatgaatgagacccagctgattgcactaagccctgccgtgggcccagcccctgccagcttcccctatggatatgcctctgctcccaacttcgccagcctccaatgtacaacttccgcgtgtagtgggcgttgtcaccacccaccctacctgcagagttactaacttctccaaggagcatgtcactccagcagcacaggggacgcaatgggaggcagggacacctggacaatatttatttttgctgaaacccaatgacggcaacctctgagccatcccagagcctggggaggccagggtagaggctgacggcgcaagaccagctttagccgacaacagagactggactgtgggccctcctgctggagccaggccttcctcctgggcgcctccgactggctggagctgccccctccaggccagtttgaagactacatgaacacgtcttgtttggaggtaccggacctcataaaaggactctcagcctcttggcaatcataaatattaaagtcggtttatccaggcaaa

SEQ ID NO: 6179 - DNA, 5313 bp, Homo sapiens
  source 1..5313: mol_type = unassigned DNA
attcctgccgctgccgccgccgccgccgaggtcccgcaccagccatggcgcagatcctccctgttcgctttcaggagcacttccagctccaaaaccttggaattaatccagctaacattggattcagcacactgaccatggaatctgacaagttcatatgtatccgagagaaagttggtgagcaggcacaggtcacgatcattgacatgagtgacccaatggctccgatccgacggcctatctctgcagagagtgccatcatgaatccagcctctaaggtgatagctctgaaagctgggaagacacttcagatctttaatattgagatgaagagtaaaatgaaggctcatactatggcagaagaagtgattttctggaaatgggtttctgtgaacactgttgccttggtgaccgagaccgcggtctaccactggagcatggaaggtgactcccagcccatgaagatgtttgatagacataccagtctggtgggctgccaggtgattcactaccggactgatgagtaccagaagtggctgctgctcgtaggcatctcggctcagcaaaaccgtgtggttggagcaatgcagctctactctgtggataggaaggtttcacaacccatagaaggccatgctgcggcttttgcagagttcaagatggaggggaatgccaagcctgccacccttttctgctttgctgtacgtaatcccacaggaggcaagttgcacatcattgaagttggacagcctgcagcgggaaaccaaccttttgtaaagaaagcagtagatgtgttttttcctccagaggcacagaatgattttccagtggctatgcagattggagctaaacatggtgttatttacttgatcacaaagtatggctatcttcatctgtacgacctagagtctggcgtgtgcatctgcatgaaccgtattagtgctgacacaatatttgtcactgctccacacaaaccaacctctggaattattggtgtcaacaaaaagggacaggtactgtcagtttgtgttgaggaagataacattgtgaattatgcaaccaacgtgcttcagaatccagaccttggtctgcgtttggccgttcgtagtaacctggctggggcagagaagttgtttgtgagaaaattcaataccctctttgcacagggcagctatgctgaagccgccaaagttgcagcgtctgcaccaaagggaatcctgcgtaccagagagacggtccagaaattccagagtatacccgctcagtctggccaggcttctccattgctgcagtacttcggaatcctgctcgaccagggtcagctcaataaacttgaatccttagaactttgccatctggttcttcagcaggggcgtaagcaactcctagagaagtggctgaaagaagataagctggagtgctcagaggagctcggagacttggtcaaaaccactgaccccatgctcgctctgagtgtgtaccttcgggcaaatgtgccaagcaaagtgatccagtgttttgcagaaacaggccaattccagaaaattgtgctctatgccaaaaaggttgggtacaccccagactggatctttctgctgaggggtgtaatgaagatcagtccggaacagggcctgcagttttctcgaatgctagtgcaggacgaggagccgctggccaacattagccagattgtggacattttcatggaaaacagtttaattcagcagtgtacttccttcttattggatgccttgaagaataatcgcccagctgagggactcctgcagacatggctgttggagatgaaccttgttcatgcaccccaggttgcagatgccatccttggaaataaaatgtttactcattacgaccgggcccacattgcccagctctgtgagaaggcaggcctcctgcagcaagcactggagcactacaccgacctctatgacatcaagagggctgtggtccacactcacctcctcaatcccgagtggcttgtcaatttctttggctccttatcggtggaggattctgtggagtgtctgcatgccatgctgtctgctaacatcagacagaaccttcagctgtgtgtgcaggtggcctctaagtaccacgagcagctgggcacgcaggccctggtggagctctttgaatccttcaagagttacaaaggcctcttctacttcctgggctcaatcgtgaacttcagccaagacccagatgtgcatctgaaatacattcaggctgcctgtaagacagggcagatcaaggaggtggagaggatatgccgagagagcagctgctacaacccagagcgtgtgaagaacttcctgaaggaggccaagctcacagaccagcttcccctcatcatcgtgtgtgatcgttttggctttgtccatgaccttgtcctatatttataccgcaacaacctgcagaggtacattgagatctacgtgcagaaggtcaaccctagccggaccccagctgtgattggagggctgcttgatgtggattgttctgaggaagtgattaaacacttaatcatggcagtgagaggacagttctctactgatgagttggtggctgaagtagaaaaaagaaataggctcaagctgctgcttccctggctggagtcccagattcaggaaggctgtgaggagcctgccactcacaatgcactggctaaaatctacatcgacagcaacaacagccccgagtgcttcctgagagagaatgcctactatgacagcagcgtggtgggccgctactgtgagaagcgagacccccatctggcctgtgttgcctatgagcgggggcagtgtgaccttgagctcatcaaggtgtgcaatgagaattctctgttcaaaagcgaggcccgctacctggtatgcagaaaggatccggagctctgggctcacgtccttgaggagaccaacccatccaggagacagctaattgaccaggtggtacagacagcattgtcagaaacacgggatcctgaagagatttcggtcactgtcaaagcctttatgacagccgacctgcctaatgaactgattgaactgctggagaagatagttctggataactctgtcttcagcgagcacaggaatctacagaatctgttgatcctgactgccatcaaggcagaccgcacacgggtcatggagtacatcagccgcctggacaactatgacgcactggacatcgcgagcatcgctgtcagcagcgcactgtatgaggaggccttcaccgttttccacaagtttgatatgaatgcctcagcaatccaggtcctgatcgagcacattggaaacctggaccgggcatatgagtttgcggagagatgcaatgagcctgctgtgtggagtcagctggcccaagcccagctccagaaagatttggtgaaggaagccatcaactcctatatcagaggggacgacccttcctcttacctggaagttgttcagtcagccagcaggagcaacaactgggaggatctagttaaatttctgcagatggccaggaaaaagggccgtgagtcctatatagagactgaacttatttttgccttggctaaaaccagccgtgtttctgagctagaagattttattaatggacccaacaatgcccacatccagcaggttggagaccgctgttacgaggagggaatgtacgaggctgccaagctgctctatagcaatgtttctaactttgcccgcctggcttccaccttggttcacctcggtgagtatcaggcagcagtggacaacagccgcaaggccagcagcacccggacgtggaaggaggtgtgctttgcctgcatggatggacaagagttccgcttcgcacagctgtgtggtcttcacatcgtcattcatgcagatgagctggaggagctgatgtgctattaccaggatcgtggctactttgaggagctgatcttgctgttggaagcggccctgggcctggagcgggcccacatgggcatgttcactgagctggccatcctctactccaaattcaagccacagaagatgctggagcatctggagcttttctggtcccgtgtcaacatcccaaaggtgctgagggctgcagagcaggcacacctgtgggctgagctggtgttcctctatgacaagtacgaggagtatgacaatgctgtgctcaccatgatgagccaccccactgaggcctggaaggagggtcagttcaaggacatcattaccaaggttgccaacgtcgagctctgttacagagccctgcagttctatttggattacaaaccactgctcatcaatgacctgctgctggtgctttcaccccggctggaccacacctggacagtcagtttcttttcaaaggcaggtcagctgcccctggtgaagccttacctgcggtcagtccagagccacaacaacaagagtgtgaatgaggcactcaaccacctgctgacagaggaggaggactatcaggatgccatgcagcatgctgcagagtcgcgggatgctgagctggcccagaagttgctgcagtggttcctggaggaaggcaagagggagtgcttcgcagcttgtctcttcacctgctatgacctgcttcgcccagacatggtgcttgagctggcctggaggcacaacctcgtggacttggccatgccctacttcatccaggtgatgagggagtacctgagcaaggtggacaaactggatgccttggagagtctgcgcaagcaagaggagcatgtgacagagcctgcccctctcgtgtttgattttgatgggcatgaatgagacccagctgattgcactaagccctgccgtgggcccagcccctgccagcttcccctatggatatgcctctgctcccaacttcgccagcctccaatgtacaacttccgcgtgtagtgggcgttgtcaccacccaccctacctgcagagttactaacttctccaaggagcatgtcactccagcagcacaggggacgcaatgggaggcagggacacctggacaatatttatttttgctgaaacccaatgacggcaacctctgagccatcccagagcctggggaggccagggtagaggctgacggcgcaagaccagctttagccgacaacagagactggactgtgggccctcctgctggagccaggccttcctcctgggcgcctccgactggctggagctgccccctccaggccagtttgaagactacatgaacacgtcttgtttggaggtaccggacctcataaaaggactctcagcctcttggcaatcataaatattaaagtcggtttatccaggcaaa

SEQ ID NO: 6180 - DNA, 5512 bp, Homo sapiens
  source 1..5512: mol_type = unassigned DNA
accggtcagcccgcgcgaggggtcggcgttcattcctgccgctgccgccgccgccgccgaggtcccgcaccagccatggcgcagatcctccctgttcgctttcaggagcacttccagctccaaaaccttggaattaatccagctaacattggattcagcacactgaccatggaatctgacaagttcatatgtatccgagagaaagttggtgagcaggcacaggtcacgatcattgacatgagtgacccaatggctccgatccgacggcctatctctgcagagagtgccatcatgaatccagcctctaaggtgatagctctgaaagctgggaagacacttcagatctttaatattgagatgaagagtaaaatgaaggctcatactatggcagaagaagtgattttctggaaatgggtttctgtgaacactgttgccttggtgaccgagaccgcggtctaccactggagcatggaaggtgactcccagcccatgaagatgtttgatagacataccagtctggtgggctgccaggtgattcactaccggactgatgagtaccagaagtggctgctgctcgtaggcatctcggctcagcaaaaccgtgtggttggagcaatgcagctctactctgtggataggaaggtttcacaacccatagaaggccatgctgcggcttttgcagagttcaagatggaggggaatgccaagcctgccacccttttctgctttgctgtacgtaatcccacaggaggcaagttgcacatcattgaagttggacagcctgcagcgggaaaccaaccttttgtaaagaaagcagtagatgtgttttttcctccagaggcacagaatgattttccagtggctatgcagattggagctaaacatggtgttatttacttgatcacaaagtatggctatcttcatctgtacgacctagagtctggcgtgtgcatctgcatgaaccgtattagtgctgacacaatatttgtcactgctccacacaaaccaacctctggaattattggtgtcaacaaaaagggacaggtactgtcagtttgtgttgaggaagataacattgtgaattatgcaaccaacgtgcttcagaatccagaccttggtctgcgtttggccgttcgtagtaacctggctggggcagagaagttgtttgtgagaaaattcaataccctctttgcacagggcagctatgctgaagccgccaaagttgcagcgtctgcaccaaagggaatcctgcgtaccagagagacggtccagaaattccagagtatacccgctcagtctggccaggcttctccattgctgcagtacttcggaatcctgctcgaccagggtcagctcaataaacttgaatccttagaactttgccatctggttcttcagcaggggcgtaagcaactcctagagaagtggctgaaagaagataagctggagtgctcagaggagctcggagacttggtcaaaaccactgaccccatgctcgctctgagtgtgtaccttcgggcaaatgtgccaagcaaagtgatccagtgttttgcagaaacaggccaattccagaaaattgtgctctatgccaaaaaggttgggtacaccccagactggatctttctgctgaggggtgtaatgaagatcagtccggaacagggcctgcagttttctcgaatgctagtgcaggacgaggagccgctggccaacattagccagattgtggacattttcatggaaaacagtttaattcagcagtgtacttccttcttattggatgccttgaagaataatcgcccagctgagggactcctgcagacatggctgttggagatgaaccttgttcatgcaccccaggttgcagatgccatccttggaaataaaatgtttactcattacgaccgggcccacattgcccagctctgtgagaaggcaggcctcctgcagcaagcactggagcactacaccgacctctatgacatcaagagggctgtggtccacactcacctcctcaatcccgagtggcttgtcaatttctttggctccttatcggtggaggattctgtggagtgtctgcatgccatgctgtctgctaacatcagacagaaccttcagctgtgtgtgcaggtggcctctaagtaccacgagcagctgggcacgcaggccctggtggagctctttgaatccttcaagagttacaaaggcctcttctacttcctgggctcaatcgtgaacttcagccaagacccagatgtgcatctgaaatacattcaggctgcctgtaagacagggcagatcaaggaggtggagaggatatgccgagagagcagctgctacaacccagagcgtgtgaagaacttcctgaaggaggccaagctcacagaccagcttcccctcatcatcgtgtgtgatcgttttggctttgtccatgaccttgtcctatatttataccgcaacaacctgcagaggtacattgagatctacgtgcagaaggtcaaccctagccggaccccagctgtgattggagggctgcttgatgtggattgttctgaggaagtgattaaacacttaatcatggcagtgagaggacagttctctactgatgagttggtggctgaagtagaaaaaagaaataggctcaagctgctgcttccctggctggagtcccagattcaggaaggctgtgaggagcctgccactcacaatgcactggctaaaatctacatcgacagcaacaacagccccgagtgcttcctgagagagaatgcctactatgacagcagcgtggtgggccgctactgtgagaagcgagacccccatctggcctgtgttgcctatgagcgggggcagtgtgaccttgagctcatcaaggtgtgcaatgagaattctctgttcaaaagcgaggcccgctacctggtatgcagaaaggatccggagctctgggctcacgtccttgaggagaccaacccatccaggagacagctaattgaccaggtggtacagacagcattgtcagaaacacgggatcctgaagagatttcggtcactgtcaaagcctttatgacagccgacctgcctaatgaactgattgaactgctggagaagatagttctggataactctgtcttcagcgagcacaggaatctacagaatctgttgatcctgactgccatcaaggcagaccgcacacgggtcatggagtacatcagccgcctggacaactatgacgcactggacatcgcgagcatcgctgtcagcagcgcactgtatgaggaggccttcaccgttttccacaagtttgatatgaatgcctcagcaatccaggtcctgatcgagcacattggaaacctggaccgggcatatgagtttgcggagagatgcaatgagcctgctgtgtggagtcagctggcccaagcccagctccagaaagatttggtgaaggaagccatcaactcctatatcagaggggacgacccttcctcttacctggaagttgttcagtcagccagcaggagcaacaactgggaggatctagttaaatttctgcagatggccaggaaaaagggccgtgagtcctatatagagactgaacttatttttgccttggctaaaaccagccgtgtttctgagctagaagattttattaatggacccaacaatgcccacatccagcaggtcggggaccgctgttacgaggagggaatgtacgaggctgccaagctgctctatagcaatgtttctaactttgcccgcctggcttccaccttggttcacctcggtgagtatcaggcagcagtggacaacagccgcaaggccagcagcacccggacgtggaaggaggtgtgctttgcctgcatggatggacaagagttccgcttcgcacagctgtgtggtcttcacatcgtcattcatgcagatgagctggaggagctgatgtgctattaccaggatcgtggctactttgaggagctgatcttgctgttggaagcggccctgggcctggagcgggcccacatgggcatgttcactgagctggccatcctctactccaaattcaagccacagaagatgctggagcatctggagcttttctggtcccgtgtcaacatcccaaaggtgctgagggctgcagagcaggcacacctgtgggctgagctggtgttcctctatgacaagtacgaggagtatgacaatgctgtgctcaccatgatgagccaccccactgaggcctggaaggagggtcagttcaaggacatcattaccaaggttgccaacgtcgagctctgttacagagccctgcagttctatttggattacaaaccactgctcatcaatgacctgctgctggtgctttcaccccggctggaccacacctggacagtcagtttcttttcaaaggcaggtcagctgcccctggtgaagccttacctgcggtcagtccagagccacaacaacaagagtgtgaatgaggcactcaaccacctgctgacagaggaggaggactatcagggcttaagggcatctatcgatgcctatgacaactttgacaacatcagcctggctcagcagctggagaagcatcagctgatggagttcaggtgcattgcggcctatctgtacaagggcaataactggtgggcccagagcgtggagctctgcaagaaggatcatctctacaaggatgccatgcagcatgctgcagagtcgcgggatgctgagctggcccagaagttgctgcagtggttcctggaggaaggcaagagggagtgcttcgcagcttgtctcttcacctgctatgacctgcttcgcccagacatggtgcttgagctggcctggaggcacaacctcgtggacttggccatgccctacttcatccaggtgatgagggagtacctgagcaaggtggacaaactggatgccttggagagtctgcgcaagcaagaggagcatgtgacagagcctgcccctctcgtgtttgattttgatgggcatgaatgagacccagctgattgcactaagccctgccgtgggcccagcccctgccagcttcccctatggatatgcctctgctcccaacttcgccagcctccaatgtacaacttccgcgtgtagtgggcgttgtcaccacccaccctacctgcagagttactaacttctccaaggagcatgtcactccagcagcacaggggacgcaatgggaggcagggacacctggacaatatttatttttgctgaaacccaatgacggcaacctctgagccatcccagagcctggggaggccagggtagaggctgacggcgcaagaccagctttagccgacaacagagactggactgtgggccctcctgctggagccaggccttcctcctgggcgcctccgactggctggagctgccccctccaggccagtttgaagactacatgaacacgtcttgtttggaggtaccggacctcataaaaggactctcagcctcttggcaatcataaatattaaagtcggtttatccaggc

SEQ ID NO: 6181 - DNA, 1152 bp, Homo sapiens
  source 1..1152: mol_type = unassigned DNA
cctcctggcgcttgtcctcctctcccagtcggcaccacagcggtggctgccgggcgtggtgtcggtgggtcggttggtttttgtctcaccgttggtgtccgtgccgttcagttgcccgccatggctgagctggatccgttcggcgcccctgccggcgcccctggcggtcccgcgctggggaacggagtggccggcgccggcgaagaagacccggctgcggccttcttggcgcagcaagagagcgagattgcgggcatcgagaacgacgaggccttcgccatcctggacggcggcgcccccgggccccagccgcacggcgagccgccggggggtccggatgctgttgatggagtaatgaatggtgaatactaccaggaaagtaatggtccaacagacagttatgcagctatttcacaagtggatcgattgcagtcagagcctgaaagtatccgtaaatggagagaagaacaaatggaacgcttggaagcccttgatgccaattctcggaagcaagaagcagagtggaaagaaaaggcaataaaggagctagaagaatggtatgcaagacaggacgagcagctacagaaaacaaaagcaaacaacagggtggcagatgaagctttctacaaacaacccttcgctgacgtgattggttatgtcacaaacataaaccatccttgctacagcctagaacaggcagcagaagaagcctttgtaaatgacattgacgagtcgtccccaggcactgagtgggaacgggtggcccggctgtgtgactttaaccccaagtctagcaagcaggccaaagatgtctcccgcatgcgctcagtcctcatctccctcaagcaggccccgctggtgcactgaagagccaccctgtggaaacactacatctgcaatatcttaatcctactcagtgaagctcttcacagtcattggattaattatgttgagttcttttggaccaaacctttttgtctttagagttgttcattgtttgtgattgcatgtttccttccttcaactgtgttctccctggcattcagagaggagggagaggaggaagaggaaggggagggaagcttcccaagagtagcctcaacctgtgcttctgtgcattattctgagaataaatttctgtttcaaactgta

SEQ ID NO: 6182 - DNA, 1073 bp, Homo sapiens
  source 1..1073: mol_type = unassigned DNA
gctttacccgtctccctcctggcgcttgtcctcctctcccagtcggcaccacagcggtggctgccgggcgtggtgtcggtgggtcggttggtttttgtctcaccgttggtgtccgtgccgttcagttgcccgccatggctgagctggatccgttcggcgcccctgccggcgcccctggcggtcccgcgctggggaacggagtggccggcgccggcgaagaagacccggctgcggccttcttggcgcagcaagagagcgagattgcgggcatcgagaacgacgaggccttcgccatcctggacggcggcgcccccgggccccagccgcacggcgagccgccggggggtccggatgctgttgatggagtaatgaatggtgaatactaccaggaaagtaatggtccaacagacagttatgcagctatttcacaagtggatcgattgcagtcagagcctgaaagtatccgtaaatggagagaagaacaaatggaacgcttggaagcccttgatgccaattctcggaagcaagaagcagagtggaaagaaaaggcaataaaggagctagaagaatggtatgcaagacaggacgagcagctacagaaaacaaaagcaaacaacagggcagcagaagaagcctttgtaaatgacattgacgagtcgtccccaggcactgagtgggaacgggtggcccggctgtgtgactttaaccccaagtctagcaagcaggccaaagatgtctcccgcatgcgctcagtcctcatctccctcaagcaggccccgctggtgcactgaagagccaccctgtggaaacactacatctgcaatatcttaatcctactcagtgaagctcttcacagtcattggattaattatgttgagttcttttggaccaaacctttttgtctttagagttgttcattgtttgtgattgcatgtttccttccttcaactgtgttctccctggcattcagagaggagggagaggaggaagaggaaggggagggaagcttcccaagagtagcctcaacctgtgcttctgtgcattattctgagaataaatttctgtttcaaact

SEQ ID NO: 6183 - DNA, 1090 bp, Homo sapiens
  source 1..1090: mol_type = unassigned DNA
agtcggcaccacagcggtggctgccgggcgtggtgtcggtgggtcggttggtttttgtctcaccgttggtgtccgtgccgttcagttgcccgccatggctgagctggatccgttcggcgcccctgccggcgcccctggcggtcccgcgctggggaacggagtggccggcgccggcgaagaagacccggctgcggccttcttggcgcagcaagagagcgagattgcgggcatcgagaacgacgaggccttcgccatcctggacggcggcgcccccgggccccagccgcacggcgagccgccggggggtccggatgctgttgatggagtaatgaatggtgaatactaccaggaaagtaatggtccaacagacagttatgcagctatttcacaagtggatcgattgcagtcagagcctgaaagtatccgtaaatggagagaagaacaaatggaacgcttggaagcccttgatgccaattctcggaagcaagaagcagagtggaaagaaaaggcaataaaggagctagaagaatggtatgcaagacaggacgagcagctacagaaaacaaaagcaaacaacagggtggcagatgaagctttctacaaacaacccttcgctgacgtgattggttatgtggcagcagaagaagcctttgtaaatgacattgacgagtcgtccccaggcactgagtgggaacgggtggcccggctgtgtgactttaaccccaagtctagcaagcaggccaaagatgtctcccgcatgcgctcagtcctcatctccctcaagcaggccccgctggtgcactgaagagccaccctgtggaaacactacatctgcaatatcttaatcctactcagtgaagctcttcacagtcattggattaattatgttgagttcttttggaccaaacctttttgtctttagagttgttcattgtttgtgattgcatgtttccttccttcaactgtgttctccctggcattcagagaggagggagaggaggaagaggaaggggagggaagcttcccaagagtagcctcaacctgtgcttctgtgcattattctgagaataaatttctgtttcaaactgta

SEQ ID NO: 6184 - DNA, 1235 bp, Homo sapiens
  source 1..1235: mol_type = unassigned DNA
gattggttgttcccttttcggctctgcaacaccgcctagaccgaccggatacacgggtagggcttccgctttacccgtctccctcctggcgcttgtcctcctctcccagtcggcaccacagcggtggctgccgggcgtggtgtcggtgggtcggttggtttttgtctcaccgttggtgtccgtgccgttcagttgcccgccatggctgagctggatccgttcggcgcccctgccggcgcccctggcggtcccgcgctggggaacggagtggccggcgccggcgaagaagacccggctgcggccttcttggcgcagcaagagagcgagattgcgggcatcgagaacgacgaggccttcgccatcctggacggcggcgcccccgggccccagccgcacggcgagccgccggggggtccggatgctgttgatggagtaatgaatggtgaatactaccaggaaagtaatggtccaacagacagttatgcagctatttcacaagtggatcgattgcagtcagagcctgaaagtatccgtaaatggagagaagaacaaatggaacgcttggaagcccttgatgccaattctcggaagcaagaagcagagtggaaagaaaaggcaataaaggagctagaagaatggtatgcaagacaggacgagcagctacagaaaacaaaagcaaacaacagggtggcagatgaagctttctacaaacaacccttcgctgacgtgattggttatgtcacaaacataaaccatccttgctacagcctagaacaggcagcagaagaagcctttgtaaatgacattgacgagtcgtccccaggcactgagtgggaacgggtggcccggctgtgtgactttaaccccaagtctagcaagcaggccaaagatgtctcccgcatgcgctcagtcctcatctccctcaagcaggccccgctggtgcactgaagagccaccctgtggaaacactacatctgcaatatcttaatcctactcagtgaagctcttcacagtcattggattaattatgttgagttcttttggaccaaacctttttgtctttagagttgttcattgtttgtgattgcatgtttccttccttcaactgtgttctccctggcattcagagaggagggagaggaggaagaggaaggggagggaagcttcccaagagtagcctcaacctgtgcttctgtgcattattctgagaataaatttctgtttcaaactgtatt

SEQ ID NO: 6185 - DNA, 1102 bp, Homo sapiens
  source 1..1102: mol_type = unassigned DNA
gtctccctcctggcgcttgtcctcctctcccagtcggcaccacagcggtggctgccgggcgtggtgtcggtgggtcggttggtttttgtctcaccgttggtgtccgtgccgttcagttgcccgccatggctgagctggatccgttcggcgcccctgccggcgcccctggcggtcccgcgctggggaacggagtggccggcgccggcgaagaagacccggctgcggccttcttggcgcagcaagagagcgagattgcgggcatcgagaacgacgaggccttcgccatcctggacggcggcgcccccgggccccagccgcacggcgagccgccggggggtccggatgctgttgatggagtaatgaatggtgaatactaccaggaaagtaatggtccaacagacagttatgcagctatttcacaagtggatcgattgcagtcagagcctgaaagtatccgtaaatggagagaagaacaaatggaacgcttggaagcccttgatgccaattctcggaagcaagaagcagagtggaaagaaaaggcaataaaggagctagaagaatggtatgcaagacaggacgagcagctacagaaaacaaaagcaaacaacagcacaaacataaaccatccttgctacagcctagaacaggcagcagaagaagcctttgtaaatgacattgacgagtcgtccccaggcactgagtgggaacgggtggcccggctgtgtgactttaaccccaagtctagcaagcaggccaaagatgtctcccgcatgcgctcagtcctcatctccctcaagcaggccccgctggtgcactgaagagccaccctgtggaaacactacatctgcaatatcttaatcctactcagtgaagctcttcacagtcattggattaattatgttgagttcttttggaccaaacctttttgtctttagagttgttcattgtttgtgattgcatgtttccttccttcaactgtgttctccctggcattcagagaggagggagaggaggaagaggaaggggagggaagcttcccaagagtagcctcaacctgtgcttctgtgcattattctgagaataaatttctgtttcaaactgt

SEQ ID NO: 6186 - DNA, 1181 bp, Homo sapiens
  source 1..1181: mol_type = unassigned DNA
gattggttgttcccttttcggctctgcaacaccgcctagaccgaccggatacacgggtagggcttccgctttacccgtctccctcctggcgcttgtcctcctctcccagtcggcaccacagcggtggctgccgggcgtggtgtcggtgggtcggttggtttttgtctcaccgttggtgtccgtgccgttcagttgcccgccatggctgagctggatccgttcggcgcccctgccggcgcccctggcggtcccgcgctggggaacggagtggccggcgccggcgaagaagacccggctgcggccttcttggcgcagcaagagagcgagattgcgggcatcgagaacgacgaggccttcgccatcctggacggcggcgcccccgggccccagccgcacggcgagccgccggggggtccggatgctgttgatggagtaatgaatggtgaatactaccaggaaagtaatggtccaacagacagttatgcagctatttcacaagtggatcgattgcagtcagagcctgaaagtatccgtaaatggagagaagaacaaatggaacgcttggaagcccttgatgccaattctcggaagcaagaagcagagtggaaagaaaaggcaataaaggagctagaagaatggtatgcaagacaggacgagcagctacagaaaacaaaagcaaacaacagcacaaacataaaccatccttgctacagcctagaacaggcagcagaagaagcctttgtaaatgacattgacgagtcgtccccaggcactgagtgggaacgggtggcccggctgtgtgactttaaccccaagtctagcaagcaggccaaagatgtctcccgcatgcgctcagtcctcatctccctcaagcaggccccgctggtgcactgaagagccaccctgtggaaacactacatctgcaatatcttaatcctactcagtgaagctcttcacagtcattggattaattatgttgagttcttttggaccaaacctttttgtctttagagttgttcattgtttgtgattgcatgtttccttccttcaactgtgttctccctggcattcagagaggagggagaggaggaagaggaaggggagggaagcttcccaagagtagcctcaacctgtgcttctgtgcattattctgagaataaatttctgtttcaaactgtatt

SEQ ID NO: 6187 - DNA, 989 bp, Homo sapiens
  source 1..989: mol_type = unassigned DNA
gattggttgttcccttttcggctctgcaacaccgcctagaccgaccggatacacgggtagggcttccgctttacccgtctccctcctggcgcttgtcctcctctcccagtcggcaccacagcggtggctgccgggcgtggtgtcggtgggtcggttggtttttgtctcaccgttggtgtccgtgccgttcagttgcccgccatggctgagctggatccgttcggcgcccctgccggcgcccctggcggtcccgcgctggggaacggagtggccggcgccggcgaagaagacccggctgcggccttcttggcgcagcaagagagcgagattgcgggcatcgagaacgacgaggccttcgccatcctggacggcggcgcccccgggccccagccgcacggcgagccgccggggggtccggatgccaattctcggaagcaagaagcagagtggaaagaaaaggcaataaaggagctagaagaatggtatgcaagacaggacgagcagctacagaaaacaaaagcaaacaacagggcagcagaagaagcctttgtaaatgacattgacgagtcgtccccaggcactgagtgggaacgggtggcccggctgtgtgactttaaccccaagtctagcaagcaggccaaagatgtctcccgcatgcgctcagtcctcatctccctcaagcaggccccgctggtgcactgaagagccaccctgtggaaacactacatctgcaatatcttaatcctactcagtgaagctcttcacagtcattggattaattatgttgagttcttttggaccaaacctttttgtctttagagttgttcattgtttgtgattgcatgtttccttccttcaactgtgttctccctggcattcagagaggagggagaggaggaagaggaaggggagggaagcttcccaagagtagcctcaacctgtgcttctgtgcattattctgagaataaatttctgtttcaaactgtatt

SEQ ID NO: 6188 - DNA, 1215 bp, Homo sapiens
  source 1..1215: mol_type = unassigned DNA
ccgctcctcccgccgcggcgcccgcaccgcagtgacagccagccgggcccggtggcggagaggaagtgcggtccgcgccaagcccgtccccgccgacgccggctcccccgcggctcgggtgacagcgtcgcggccgccggacgcagcgcggggcaggcgcgggcagagccgagcgcagcggaggctccggcggaggcgcggggaaaatggctgatgactttggcttcttctcgtcgtcggagagcggtgccccggaggcggcggaggaggacccggcggccgccttcctggcccagcaggagagcgagattgcaggcatagagaacgacgagggcttcggggcacctgccggcagccatgcggcccccgcgcagccgggccccacgagtggggctggttctgaggacatggggaccacagtcaatggagatgtgtttcaggaggccaacggtcctgctgatggctacgcagccattgcccaggctgacaggctgacccaggagcctgagagcatccgcaagtggcgagaggagcagaggaaacggctgcaagagctggatgctgcatctaaggtcacggaacaggaatggcgggagaaggccaagaaggacctggaggagtggaaccagcgccagagtgaacaagtagagaagaacaagatcaacaaccggatcgctgacaaagcattctaccagcagccagatgctgatatcatcggctacgtggcatccgaggaggctttcgtgaaggaatccaaggaggagaccccaggcacagagtgggagaaggtggcccagctatgtgacttcaaccccaagagcagcaagcagtgcaaagatgtgtcccgcctgcgctcggtgctcatgtccctgaagcagacgccactgtcccgctaggtgcctgctaggtgcatggccacagagcatgggctgggcctgggcacaggaggagcagctgctttggtcggggtggagactcgcagcagctgctacccacagcctattccactcctccccatctccaggcgctgggaggggggccctcaccccatcacgcctcgctccctcctggccctctggtccagcccctcacgcctcctctcagtctactcaattgtgactgtccctcctgatgtattttttttcttggcttaaagggtgtgttgttgactctttttacacttatttattatcattctcacttctctggaagcca

SEQ ID NO: 6189 - DNA, 1161 bp, Homo sapiens
  source 1..1161: mol_type = unassigned DNA
ccgctcctcccgccgcggcgcccgcaccgcagtgacagccagccgggcccggtggcggagaggaagtgcggtccgcgccaagcccgtccccgccgacgccggctcccccgcggctcgggtgacagcgtcgcggccgccggacgcagcgcggggcaggcgcgggcagagccgagcgcagcggaggctccggcggaggcgcggggaaaatggctgatgactttggcttcttctcgtcgtcggagagcggtgccccggaggcggcggaggaggacccggcggccgccttcctggcccagcaggagagcgagattgcaggcatagagaacgacgagggcttcggggcacctgccggcagccatgcggcccccgcgcagccgggccccacgagtggggctggttctgaggacatggggaccacagtcaatggagatgtgtttcaggaggccaacggtcctgctgatggctacgcagccattgcccaggctgacaggctgacccaggagcctgagagcatccgcaagtggcgagaggagcagaggaaacggctgcaagagctggatgctgcatctaaggtcacggaacaggaatggcgggagaaggccaagaaggacctggaggagtggaaccagcgccagagtgaacaagtagagaagaacaagatcaacaaccgggcatccgaggaggctttcgtgaaggaatccaaggaggagaccccaggcacagagtgggagaaggtggcccagctatgtgacttcaaccccaagagcagcaagcagtgcaaagatgtgtcccgcctgcgctcggtgctcatgtccctgaagcagacgccactgtcccgctaggtgcctgctaggtgcatggccacagagcatgggctgggcctgggcacaggaggagcagctgctttggtcggggtggagactcgcagcagctgctacccacagcctattccactcctccccatctccaggcgctgggaggggggccctcaccccatcacgcctcgctccctcctggccctctggtccagcccctcacgcctcctctcagtctactcaattgtgactgtccctcctgatgtattttttttcttggcttaaagggtgtgttgttgactctttttacacttatttattatcattctcacttctctggaagcca

SEQ ID NO: 6190 - DNA, 1489 bp, Homo sapiens
  source 1..1489: mol_type = unassigned DNA
agtgacagccagccgggcccggtggcggagaggaagtgcggtccgcgccaagcccgtccccgccgacgccggctcccccgcggctcgggtgacagcgtcgcggccgccggacgcagcgcggggcaggcgcgggcagagccgagcgcagcggaggctccggcggaggcgcggggaaaatggctgatgactttggcttcttctcgtcgtcggagagcggtgccccggaggcggcggaggaggacccggcggccgccttcctggcccagcaggagagcgagattgcaggcatagagaacgacgagggcttcggggcacctgccggcagccatgcggcccccgcgcagccgggccccacgagtggggctggttctgaggacatggggaccacagtcaatggagatgtgtttcagcccgtgcaccaccagcgggtccagctacaaacccagttgccaatacagcctaaggacgagcctgcccacaactattccagttccatttggcacagccaggggcagggacagaagggccctgcaggactccgcctccccacctctgcacagatcctctctcctttcccctaatactcccatcatcctccttttagcttcttagaggaatcagcagctcagcttagcttagatttagctgatcaatcccaaagaaggatgtggctcatcctcttggccatccctggagtcgcagcacacgcttggctggtgtgggtccacagaggttctcatgggtgggcccagcagaggggcccctcaggagagggattctagggagctagactgagacaagcctggccctgactgtcgcctcctgccttctggtcctggccattcctgcccctttctctctccagagcttgggaggagtcagaacattgctctagccgctggtgatctctcctggttgccaaccctcctggccatgactgatctccccactgagatgctcaggaggccaacggtcctgctgatggctacgcagccattgcccaggctgacaggctgacccaggagcctgagagcatccgcaagtggcgagaggagcagaggaaacggctgcaagagctggatgctgcatctaaggtcacggaacaggaatggcgggagaaggccaagaaggacctggaggagtggaaccagcgccagagtgaacaagtagagaagaacaagatcaacaaccgggcatccgaggaggctttcgtgaaggaatccaaggaggagaccccaggcacagagtgggagaaggtggcccagctatgtgacttcaaccccaagagcagcaagcagtgcaaagatgtgtcccgcctgcgctcggtgctcatgtccctgaagcagacgccactgtcccgctaggtgcctgctaggtgcatggccacagagcatgggctgggcctgggcacaggaggagcagctgctttggtcggggtggagactcgcagcagctgctacccacagcctattccactcctccccatctc

SEQ ID NO: 6191 - DNA, 3481 bp, Homo sapiens
  source 1..3481: mol_type = unassigned DNA
ctttaaatcgcggcgcccagcggttctgcgtctcagttcccgagcctgggagcaaccgcagcttctagtatccagactccagcgccgccccgggcgcggaccccaaccccgacccagagcttctccagcggcggcgcagcgagcagggctccccgccttaacttcctccgcggggcccagccaccttcgggagtccgggttgcccacctgcaaactctccgccttctgcacctgccacccctgagccagcgcgggcgcccgagcgagtcatggccaacgcggggctgcagctgttgggcttcattctcgccttcctgggatggatcggcgccatcgtcagcactgccctgccccagtggaggatttactcctatgccggcgacaacatcgtgaccgcccaggccatgtacgaggggctgtggatgtcctgcgtgtcgcagagcaccgggcagatccagtgcaaagtctttgactccttgctgaatctgagcagcacattgcaagcaacccgtgccttgatggtggttggcatcctcctgggagtgatagcaatctttgtggccaccgttggcatgaagtgtatgaagtgcttggaagacgatgaggtgcagaagatgaggatggctgtcattgggggtgcgatatttcttcttgcaggtctggctattttagttgccacagcatggtatggcaatagaatcgttcaagaattctatgaccctatgaccccagtcaatgccaggtacgaatttggtcaggctctcttcactggctgggctgctgcttctctctgccttctgggaggtgccctactttgctgttcctgtccccgaaaaacaacctcttacccaacaccaaggccctatccaaaacctgcaccttccagcgggaaagactacgtgtgacacagaggcaaaaggagaaaatcatgttgaaacaaaccgaaaatggacattgagatactatcattaacattaggaccttagaattttgggtattgtaatctgaagtatggtattacaaaacaaacaaacaaacaaaaaacccatgtgttaaaatactcagtgctaaacatggcttaatcttattttatcttctttcctcaatataggagggaagatttttccatttgtattactgcttcccattgagtaatcatactcaactgggggaaggggtgctccttaaatatatatagatatgtatatatacatgtttttctattaaaaatagacagtaaaatactattctcattatgttgatactagcatacttaaaatatctctaaaataggtaaatgtatttaattccatattgatgaagatgtttattggtatattttctttttcgtctatatatacatatgtaacagtcaaatatcatttactcttcttcattagctttgggtgcctttgccacaagacctagcctaatttaccaaggatgaattctttcaattcttcatgcgtgcccttttcatatacttattttattttttaccataatcttatagcacttgcatcgttattaagcccttatttgttttgtgtttcattggtctctatctcctgaatctaacacatttcatagcctacattttagtttctaaagccaagaagaatttattacaaatcagaactttggaggcaaatctttctgcatgaccaaagtgataaattcctgttgaccttcccacacaatccctgtactctgacccatagcactcttgtttgctttgaaaatatttgtccaattgagtagctgcatgctgttcccccaggtgttgtaacacaactttattgattgaatttttaagctacttattcatagttttatatccccctaaactacctttttgttccccattccttaattgtattgttttcccaagtgtaattatcatgcgttttatatcttcctaataaggtgtggtctgtttgtctgaacaaagtgctagactttctggagtgataatctggtgacaaatattctctctgtagctgtaagcaagtcacttaatctttctacctcttttttctatctgccaaattgagataatgatacttaaccagttagaagaggtagtgtgaatattaattagtttatattactctcattctttgaacatgaactatgcctatgtagtgtctttatttgctcagctggctgagacactgaagaagtcactgaacaaaacctacacacgtaccttcatgtgattcactgccttcctctctctaccagtctatttccactgaacaaaacctacacacataccttcatgtggttcagtgccttcctctctctaccagtctatttccactgaacaaaacctacgcacataccttcatgtggctcagtgccttcctctctctaccagtctatttccattctttcagctgtgtctgacatgtttgtgctctgttccattttaacaactgctcttacttttccagtctgtacagaatgctatttcacttgagcaagatgatgtaatggaaagggtgttggcattggtgtctggagacctggatttgagtcttggtgctatcaatcaccgtctgtgtttgagcaaggcatttggctgctgtaagcttattgcttcatctgtaagcggtggtttgtaattcctgatcttcccacctcacagtgatgttgtggggatccagtgagatagaatacatgtaagtgtggttttgtaatttaaaaagtgctatactaagggaaagaattgaggaattaactgcatacgttttggtgttgcttttcaaatgtttgaaaacaaaaaaaatgttaagaaatgggtttcttgccttaaccagtctctcaagtgatgagacagtgaagtaaaattgagtgcactaaacaaataagattctgaggaagtcttatcttctgcagtgagtatggcccgatgctttctgtggctaaacagatgtaatgggaagaaataaaagcctacgtgttggtaaatccaacagcaagggagatttttgaatcataataactcataaggtgctatctgttcagtgatgccctcagagctcttgctgttagctggcagctgacgctgctaggatagttagtttggaaatggtacttcataataaactacacaaggaaagtcagccactgtgtcttatgaggaattggacctaataaattttagtgtgccttccaaacctgagaatatatgcttttggaagttaaaatttaaatggcttttgccacatacatagatcttcatgatgtgtgagtgtaattccatgtggatatcagttaccaaacattacaaaaaaattttatggcccaaaatgaccaacgaaattgttacaatagaatttatccaattttgatctttttatattcttctaccacacctggaaacagaccaatagacattttggggttttataataggaatttgtataaagcattactctttttcaataaattgttttttaatttaaaaaaaggatta

SEQ ID NO: 6192 - DNA, 1452 bp, Homo sapiens
  source 1..1452: mol_type = unassigned DNA
tcagttcccgagcctgggagcaaccgcagcttctagtatccagactccagcgccgccccgggcgcggaccccaaccccgacccagagcttctccagcggcggcgcagcgagcagggctccccgccttaacttcctccgcggggcccagccaccttcgggagtccgggttgcccacctgcaaactctccgccttctgcacctgccccagtggaggatttactcctatgccggcgacaacatcgtgaccgcccaggccatgtacgaggggctgtggatgtcctgcgtgtcgcagagcaccgggcagatccagtgcaaagtctttgactccttgctgaatctgagcagcacattgcaagcaacccgtgccttgatggtggttggcatcctcctgggagtgatagcaatctttgtggccaccgttggcatgaagtgtatgaagtgcttggaagacgatgaggtgcagaagatgaggatggctgtcattgggggtgcgatatttcttcttgcaggtctggctattttagttgccacagcatggtatggcaatagaatcgttcaagaattctatgaccctatgaccccagtcaatgccaggtacgaatttggtcaggctctcttcactggctgggctgctgcttctctctgccttctgggaggtgccctactttgctgttcctgtccccgaaaaacaacctcttacccaacaccaaggccctatccaaaacctgcaccttccagcgggaaagactacgtgtgacacagaggcaaaaggagaaaatcatgttgaaacaaaccgaaaatggacattgagatactatcattaacattaggaccttagaattttgggtattgtaatctgaagtatggtattacaaaacaaacaaacaaacaaaaaacccatgtgttaaaatactcagtgctaaacatggcttaatcttattttatcttctttcctcaatataggagggaagatttttccatttgtattactgcttcccattgagtaatcatactcaactgggggaaggggtgctccttaaatatatatagatatgtatatatacatgtttttctattaaaaatagacagtaaaatactattctcattatgttgatactagcatacttaaaatatctctaaaataggtaaatgtatttaattccatattgatgaagatgtttattggtatattttctttttcgtctatatatacatatgtaacagtcaaatatcatttactcttcttcattagctttgggtgcctttgccacaagacctagcctaatttaccaaggatgaattctttcaattcttcatgcgtgcccttttcatatacttattttattttttaccataatcttatagcacttgcatcgttattaagcccttatttgttttgtgtttcattggtctctatctcctgaatctaacacatttcatagcctacatttt

SEQ ID NO: 6193 - DNA, 2169 bp, Homo sapiens
  source 1..2169: mol_type = unassigned DNA
agcagcgctgctgtccccgccgtgcgcccttcgccgctgagctcgcagcctccggcgcccacctccacctccagtgtcccgcctcgggccgtcgccctccagcggctcgcgagcgtgggagacgtacctgggcaggcactgtccagcccaggcccaggcacagccgtgaggggcgaggcacggggacatcctggcggccaccatggtggccacgtgcctgcaggtggtgggcttcgtcacgagcttcgtgggctggatcggggtcatcgtgaccacctccaccaatgactgggtggtgacctgcggctacaccatccccacctgccgcaagctggatgagctgggctccaaggggctgtgggccgactgcgtcatggccacggggctgtaccactgcaagcccctggtggacatcctcatcctgccgggctacgtgcaggcctgccgcgccctgatgattgctgcctcggtcctgggtctgccggccattttactgctgctgactgttcttccctgcatccggatgggccaggagcccggtgtggctaagtacaggcgggcccagctggctggtgttttgctcattctgctggctctctgcgcccttgttgccaccatctggttccctgtgtgcgcccaccgtgagaccaccatcgtgagctttggctactccctgtatgcaggctggattggtgctgtgctgtgcctcgtgggtggctgtgtcatcctctgctgcgctggagatgcccaggcctttggtgaaaaccgtttctactacactgcgggctctagctccccgactcatgcgaagagtgcccacgtataagagggctgcccggctgcccacagaggtgctgtagatgctgggcccagggccctaggtttgctcgtcacagtgtggggaagcccattcctctgccaggctctaaagccaaaggtctagaaaagcatcctgtctggcattttgtagtcttaacttctccccatttcccccatcttttggttgccttaaaagaaatctctagctcagataatgcccagacatttttttcccttggtgttgcccctattagctcttttcttgggcattcttttgctgtttattaaaaatatattatatatattttgtttctttaaatttcaaatgttttgcaaacatcactgagttaggtgggggtggggaagagaaatacaagatacttttttttttttttttttttttttttttttaaatagggcctcactctgttgctcaggctggagtgcggtggtgtgatctcggctcatgtagcctcaacctccccggctcaagtgatcctcctgcctcagcctcccaagtagctgggactacaggcgttcactactacacccagctaatttttaagttttttatagagatgagggctccctatgttgcccaggttggtctcgaactcctggactcaaagtatcctcccgcctcggcctcccaaagtgttgggattataggagtgagccaccacaccggccaagatgcttttcaaactgatacagatgacaatgggagcctcataaagatggcttttgtttcttcccttcaaggtcatttacttgtacgagacagaaaaagatagcattggggacatgggatgggggagggagggcaatagtggaacgaactttccatgggaaactttcccttttgtaagttgagggccaggggtagggatattttttagtttgtgattttacatttatctgtacatactttttcaagattgatcatttttataaccatggttttcctgaaatcctcaattcatcaatatgaaggaaatgaaccacatagactttatgcaataaataacagtgcaagtgagtataactctaactgatgttccacaaaacatttttgatttcaggtttgtatgatgtagtttttaatcgtacattttcatatgcttcaaactaacacatttttaaagctttcccccacttttctctctatttgtattgttagccatcttgaagtgatgttgtttaacataaattgtactgttgaatttggctttacgggtgtaaacactgatggtatatcagtatctgagaccccaaactctccaaatactgatggtgcattttattcttgaagtgaaatctgtgcaataaaataacagactgtctgcaaaa

SEQ ID NO: 6194 - DNA, 498 bp, Homo sapiens
  source 1..498: mol_type = unassigned DNA
atggtggccacgtgcctgcaggtggtgggcttcgtcacgagcttcgtgggctggatcggggtcatcgtgaccacctccaccaatgactgggtggtgacctgcggctacaccatccccacctgccgcaagctggatgagctgggctccaaggggctgtgggccgactgcgtcatggccacggggctgtaccactgcaagcccctggtggacatcctcatcctgccgggctacgtgcaggcctgccgcgccctgatgattgctgcctcggtcctgggtctgccggccattttactgctgctgactgttcttccctgcatccggatgggccaggagcccggtgtggctaagtacaggcgggcccagctggctggtgttttgctcattctgctgggctgtcagcttctttgggcaaagactgagtcatctctgcattctcagcacctggtgcaatttaagcagaaatatcttgaagatttttcgtatcttcagggagattag

SEQ ID NO: 6195 - DNA, 1139 bp, Homo sapiens
  source 1..1139: mol_type = unassigned DNA
agcgctgctgtccccgccgtgcgcccttcgccgctgagctcgcagcctccggcgcccacctccacctccagtgtcccgcctcgggccgtcgccctccagcggctcgcgagcgtgggagacgtacctgggcaggcactgtccagcccaggcccaggcacagccgtgaggggcgaggcacggggacatcctggcggccaccatggtggccacgtgcctgcaggtggtgggcttcgtcacgagcttcgtgggctggatcggggtcatcgtgaccacctccaccaatgactgggtggtgacctgcggctacaccatccccacctgccgcaagctggatgagctgggctccaaggggctgtgggccgactgcgtcatggccacggggctgtaccactgcaagcccctggtggacatcctcatcctgccgggctacgtgcaggcctgccgcgccctgatgattgctgcctcggtcctgggtctgccggccattttactgctgctgactgttcttccctgcatccggatgggccaggagcccggtgtggctaagtacaggcgggcccagctggctggtgttttgctcattctgctgggctgtcagcttctttgggcaaagactgagtcatctctgcattctcagcacctggtgcaatttaagcagaaatatcttgaagatttttcgtatcttcagggagattaggaatgggaatggaatgggaacgccaatgcaggaaggatgagaagtctgcagatgcctccaaggagtccgaaaccaagtccgaagtcaacgacaagcaatgatggcgatggcgatcctagttaataaaaaggggggagatgtgggctgcaagccacccaggtgccgaggcaagagaccgaggacatgagctgttccagtataataaaatataaaacaagaatagttataccagatatagatcttagatatgattatatatgaatataattaatcattagtttgtggcaattactctttattccaatattataataatcctcgctctataatcataacctaggaaaaaccaggccatacagagataggagctgaggggacatagtgaggagtgaccagaagacaagagtgcgagccttctgttatgcccagacagggccaccag

SEQ ID NO: 6196 - DNA, 1453 bp, Homo sapiens
  source 1..1453: mol_type = unassigned DNA
ggggagggcaagctgggaaaagctgagagaggcaggcagcccagccaggcagaagtcacgagccaggcacctgccaagagagggagtaagatgttcaagaggagctccggaagaactttcagatatagcactggacttggctgaggacacagcagcacggggctgcaaggcccagagatctggacacaagccaagaagtcaagaactgttgaagccgcagtctccactctcctactgacaccagagaccacccagcccagccaaaccatatggcctcttgttttcctgatgtatgagggctccggctggcacctgaggagcggcgtgaccccgagggcccagggagctgcccggctggcctaggcaggcagccgcaccatggccagcacggccgtgcagcttctgggcttcctgctcagcttcctgggcatggtgggcacgttgatcaccaccatcctgccgcactggcggaggacagcgcacgtgggcaccaacatcctcacggccgtgtcctacctgaaagggctctggatggagtgtgtgtggcacagcacaggcatctaccagtgccagatctaccgatccctgctggcgctgccccaagacctccaggctgcccgcgccctcatggtcatctcctgcctgctctcgggcatagcctgcgcctgcgccgtcatcgggatgaagtgcacgcgctgcgccaagggcacacccgccaagaccacctttgccatcctcggcggcaccctcttcatcctggccggcctcctgtgcatggtggccgtctcctggaccaccaacgacgtggtgcagaacttctacaacccgctgctgcccagcggcatgaagtttgagattggccaggccctgtacctgggcttcatctcctcgtccctctcgctcattggtggcaccctgctttgcctgtcctgccaggacgaggcaccctacaggccctaccaggccccgcccagggccaccacgaccactgcaaacaccgcacctgcctaccagccaccagctgcctacaaagacaatcgggccccctcagtgacctcggccacgcacagcgggtacaggctgaacgactacgtgtgagtccccacagcctgcttctcccctgggctgctgtgggctgggtccccggcgggactgtcaatggaggcaggggttccagcacaaagtttacttctgggcaatttttgtatccaaggaaataatgtgaatgcgaggaaatgtctttagagcacagggacagagggggaaataagaggaggagaaagctctctataccaaagactgaaaaaaaaaatcctgtctgtttttgtatttattatatatatttatgtgggtgatttgataacaagtttaatataaagtgacttgggagtttggtcagtggggttggtttgtgatccaggaataaaccttgcggatgtggctgtttatgaaa

SEQ ID NO: 6197 - DNA, 1752 bp, Homo sapiens
  source 1..1752: mol_type = unassigned DNA
cgccaggtggtggctcagaggaggacacagtcgctgtgggcaggtggtcagggcgcaggagggaatgagctgtggatttttagtaatctacaacaatcaggcagttccaggacacagggaagtgagtgtgaacagccaatggacccggagccgagagcctgggcaggcgtaggctggactatggacgccctgcaaccctgccaggctgggaaggggaggcttgatcctgagcgcgtgttaggaaggagatgcccaggttcaggtgtatcgtgcattttttttccacagtgcagaaatgacatttctggttggtcttgaatgtctgctctggccaagccacctcctctcatgctagctaaccaagtggcacgtgtgcccacgcaggccattctaaggaacactgtaattgtctagacaattttctctcaaatactccgtcctggaagcgtctggttggcagaagagggaaggcaggagggtggcagcgtcccggctgagtcctcttgcacatgggagctggagtccagccaggctccagagcggctccggctggcaagggacctgaacaggaagatgagactcgaggttttctgcatggctccggctggcacctgaggagcggcgtgaccccgagggcccagggagctgcccggctggcctaggcaggcagccgcaccatggccagcacggccgtgcagcttctgggcttcctgctcagcttcctgggcatggtgggcacgttgatcaccaccatcctgccgcactggcggaggacagcgcacgtgggcaccaacatcctcacggccgtgtcctacctgaaagggctctggatggagtgtgtgtggcacagcacaggcatctaccagtgccagatctaccgatccctgctggcgctgccccaagacctccaggctgcccgcgccctcatggtcatctcctgcctgctctcgggcatagcctgcgcctgcgccgtcatcgggatgaagtgcacgcgctgcgccaagggcacacccgccaagaccacctttgccatcctcggcggcaccctcttcatcctggccggcctcctgtgcatggtggccgtctcctggaccaccaacgacgtggtgcagaacttctacaacccgctgctgcccagcggcatgaagtttgagattggccaggccctgtacctgggcttcatctcctcgtccctctcgctcattggtggcaccctgctttgcctgtcctgccaggacgaggcaccctacaggccctaccaggccccgcccagggccaccacgaccactgcaaacaccgcacctgcctaccagccaccagctgcctacaaagacaatcgggccccctcagtgacctcggccacgcacagcgggtacaggctgaacgactacgtgtgagtccccacagcctgcttctcccctgggctgctgtgggctgggtccccggcgggactgtcaatggaggcaggggttccagcacaaagtttacttctgggcaatttttgtatccaaggaaataatgtgaatgcgaggaaatgtctttagagcacagggacagagggggaaataagaggaggagaaagctctctataccaaagactgaaaaaaaaaatcctgtctgtttttgtatttattatatatatttatgtgggtgatttgataacaagtttaatataaagtgacttgggagtttggtcagtggggttggtttgtgatccaggaataaaccttgcggatgtggctgtttatgaaa

SEQ ID NO: 6198 - DNA, 1330 bp, Homo sapiens
  source 1..1330: mol_type = unassigned DNA
agcggccatgagctggtgtgcagccgcccaggaggggggctgcaaggcccagagatctggacacaagccaagaagtcaagaactgttgaagccgcagtctccactctcctactgacaccagagaccacccagcccagccaaaccatatggcctcttgttttcctgatgtatgagggctccggctggcacctgaggagcggcgtgaccccgagggcccagggagctgcccggctggcctaggcaggcagccgcaccatggccagcacggccgtgcagcttctgggcttcctgctcagcttcctgggcatggtgggcacgttgatcaccaccatcctgccgcactggcggaggacagcgcacgtgggcaccaacatcctcacggccgtgtcctacctgaaagggctctggatggagtgtgtgtggcacagcacaggcatctaccagtgccagatctaccgatccctgctggcgctgccccaagacctccaggctgcccgcgccctcatggtcatctcctgcctgctctcgggcatagcctgcgcctgcgccgtcatcgggatgaagtgcacgcgctgcgccaagggcacacccgccaagaccacctttgccatcctcggcggcaccctcttcatcctggccggcctcctgtgcatggtggccgtctcctggaccaccaacgacgtggtgcagaacttctacaacccgctgctgcccagcggcatgaagtttgagattggccaggccctgtacctgggcttcatctcctcgtccctctcgctcattggtggcaccctgctttgcctgtcctgccaggacgaggcaccctacaggccctaccaggccccgcccagggccaccacgaccactgcaaacaccgcacctgcctaccagccaccagctgcctacaaagacaatcgggccccctcagtgacctcggccacgcacagcgggtacaggctgaacgactacgtgtgagtccccacagcctgcttctcccctgggctgctgtgggctgggtccccggcgggactgtcaatggaggcaggggttccagcacaaagtttacttctgggcaatttttgtatccaaggaaataatgtgaatgcgaggaaatgtctttagagcacagggacagagggggaaataagaggaggagaaagctctctataccaaagactgaaaaaaaaaatcctgtctgtttttgtatttattatatatatttatgtgggtgatttgataacaagtttaatataaagtgacttgggagtttggtcagtggggttggtttgtgatccaggaataaaccttgcggatgtggctgtttatgaaa

SEQ ID NO: 6199 - DNA, 1942 bp, Homo sapiens
  source 1..1942: mol_type = unassigned DNA
cgccaggtggtggctcagaggaggacacagtcgctgtgggcaggtggtcagggcgcaggagggaatgagctgtggatttttagtaatctacaacaatcaggcagttccaggacacagggaagtgagtgtgaacagccaatggacccggagccgagagcctgggcaggcgtaggctggactatggacgccctgcaaccctgccaggctgggaaggggaggcttgatcctgagcgcgtgttaggaaggagatgcccaggttcaggtgtatcgtgcattttttttccacagtgcagaaatgacatttctggttggtcttgaatgtctgctctggccaagccacctcctctcatgctagctaaccaagtggcacgtgtgcccacgcaggccattctaaggaacactgtaattgtctagacaattttctctcaaatactccgtcctggaagcgtctggttggcagaagagggaaggcaggagggtggcagcgtcccggctgagtcctcttgcacatgggagctggagtccagccaggctccagagcggctccggctggcaagggacctgaacaggaagatgagactcgaggttttctgcatgcctggaagtgcacatgctcatctacagctttcttggaagaagaaagaaacaaaaactgagatttagaacaccaggtctgtttccactggcggccactcttgggcactggagaccagcaagagctttgtttttaaaaggctcttccatggcagatattcgcagaggcatcagggctacacttaaatgaagggctccggctggcacctgaggagcggcgtgaccccgagggcccagggagctgcccggctggcctaggcaggcagccgcaccatggccagcacggccgtgcagcttctgggcttcctgctcagcttcctgggcatggtgggcacgttgatcaccaccatcctgccgcactggcggaggacagcgcacgtgggcaccaacatcctcacggccgtgtcctacctgaaagggctctggatggagtgtgtgtggcacagcacaggcatctaccagtgccagatctaccgatccctgctggcgctgccccaagacctccaggctgcccgcgccctcatggtcatctcctgcctgctctcgggcatagcctgcgcctgcgccgtcatcgggatgaagtgcacgcgctgcgccaagggcacacccgccaagaccacctttgccatcctcggcggcaccctcttcatcctggccggcctcctgtgcatggtggccgtctcctggaccaccaacgacgtggtgcagaacttctacaacccgctgctgcccagcggcatgaagtttgagattggccaggccctgtacctgggcttcatctcctcgtccctctcgctcattggtggcaccctgctttgcctgtcctgccaggacgaggcaccctacaggccctaccaggccccgcccagggccaccacgaccactgcaaacaccgcacctgcctaccagccaccagctgcctacaaagacaatcgggccccctcagtgacctcggccacgcacagcgggtacaggctgaacgactacgtgtgagtccccacagcctgcttctcccctgggctgctgtgggctgggtccccggcgggactgtcaatggaggcaggggttccagcacaaagtttacttctgggcaatttttgtatccaaggaaataatgtgaatgcgaggaaatgtctttagagcacagggacagagggggaaataagaggaggagaaagctctctataccaaagactgaaaaaaaaaatcctgtctgtttttgtatttattatatatatttatgtgggtgatttgataacaagtttaatataaagtgacttgggagtttggtcagtggggttggtttgtgatccaggaataaaccttgcggatgtggctgtttatgaaa

SEQ ID NO: 6200 - DNA, 1231 bp, Homo sapiens
  source 1..1231: mol_type = unassigned DNA
tgtaaagaggatgtgtttgcttcaccttctgccaggattgtaagtttcctgaggcctccccagtcctgcggaactggctccggctggcacctgaggagcggcgtgaccccgagggcccagggagctgcccggctggcctaggcaggcagccgcaccatggccagcacggccgtgcagcttctgggcttcctgctcagcttcctgggcatggtgggcacgttgatcaccaccatcctgccgcactggcggaggacagcgcacgtgggcaccaacatcctcacggccgtgtcctacctgaaagggctctggatggagtgtgtgtggcacagcacaggcatctaccagtgccagatctaccgatccctgctggcgctgccccaagacctccaggctgcccgcgccctcatggtcatctcctgcctgctctcgggcatagcctgcgcctgcgccgtcatcgggatgaagtgcacgcgctgcgccaagggcacacccgccaagaccacctttgccatcctcggcggcaccctcttcatcctggccggcctcctgtgcatggtggccgtctcctggaccaccaacgacgtggtgcagaacttctacaacccgctgctgcccagcggcatgaagtttgagattggccaggccctgtacctgggcttcatctcctcgtccctctcgctcattggtggcaccctgctttgcctgtcctgccaggacgaggcaccctacaggccctaccaggccccgcccagggccaccacgaccactgcaaacaccgcacctgcctaccagccaccagctgcctacaaagacaatcgggccccctcagtgacctcggccacgcacagcgggtacaggctgaacgactacgtgtgagtccccacagcctgcttctcccctgggctgctgtgggctgggtccccggcgggactgtcaatggaggcaggggttccagcacaaagtttacttctgggcaatttttgtatccaaggaaataatgtgaatgcgaggaaatgtctttagagcacagggacagagggggaaataagaggaggagaaagctctctataccaaagactgaaaaaaaaaatcctgtctgtttttgtatttattatatatatttatgtgggtgatttgataacaagtttaatataaagtgacttgggagtttggtcagtggggttggtttgtgatccaggaataaaccttgcggatgtggctgtttatgaaa

SEQ ID NO: 6201 - DNA, 3273 bp, Homo sapiens
  source 1..3273: mol_type = unassigned DNA
cttcttccgagtggggaggagaatagctcactctccctagagggcctaagaaagatcagtttacaggttccagcatggggtgggacccttcctccttcccccgtcttggcactggcacttggtctggtgaccaccactagcccacagttgggtcagaaaacgttacagaactcctctctcccccacccgaaacacactcagcccttgcactgacctgccttctgattggaggctggttgcttcggataatgacctccaggaccccactgttggttacagcctgtttgtattattcttactgcaactcaagacacctgcagcagggcgtgagaaaaagtaaaagaccagtattttcacattgccaggtaccagaaacacagaagactgacacccgccacttaagtggggccagggctggtgtctgcccatgttgccatcctgatgggctgcttgccacaatgagggatcttcttcaatacatcgcttgcttctttgcctttttctctgctgggtttttgattgtggccacctggactgactgttggatggtgaatgctgatgactctctggaggtgagcacaaaatgccgaggcctctggtgggaatgcgtcacaaatgcttttgatgggattcgcacctgtgatgagtacgattccatacttgcggagcatcccttgaagctggtggtaactcgagcgttgatgattactgcagatattctagctgggtttggatttctcaccctgctccttggtcttgactgcgtgaaattcctccctgatgagccgtacattaaagtccgcatctgctttgttgctggagccacgttactaatagcaggtaccccaggaatcattggctctgtgtggtatgctgttgatgtgtatgtggaacgttctactttggttttgcacaatatatttcttggtatccaatataaatttggttggtcctgttggctcggaatggctgggtctctgggttgctttttggctggagctgttctcacctgctgcttatatctttttaaagatgttggacctgagagaaactatccttattccttgaggaaagcctattcagccgcgggtgtttccatggccaagtcatactcagcccctcgcacagagacggccaaaatgtatgctgtagacacaagggtgtaaaatgcacgtttcagggtgtgtttgcatatgatttaatcaatcagtatggttacattgataaaatagtaagtcaatccaggaacagttatttagaattcatattgaattaaattaattgctagcttaatcaaaatgtttgattctcctatactttttctttctattactcttatattttcccgtcattctctctgctaaccttccaccttatgcacacactttccctatattttaagataagtctgctaggatgtagaaatatttgtttgtgatttctatatagctattagagattatgacatagtaatattaaaatgaaatgatacttaaacagaaagcaatttccaaagaggccagggaccctaatctttgaagagatgaagaaacttacttttctccctggcttttggttcactttttgtacttttaacaagtgggtgaattatttgataattttgaggaagattattcttttaaattcaaactagtatgtcaatgcctaccattactctgattatattaaaacagaaaaaggaaataacaacttcgtataccagccactggtgagagttaaagacaagagctgcccccccacccccaaatgtcaaaggcaaatgctaaattgatactggagctcgtggtgactttctacctcactaacaacataagggatctccatattatttcaccactattctagctttgctgatatattgccaaatgattagactacagaatagttcaaccagagaatttactcatttattgattaaacatccaaatactattgtaatatactatgttaaaattcatcaattcaagtgcccacacaccactgaatcatcagcaccaagcaatatattagacatatggcaaaattcaacaaatatattttgatataaataaataaacgttcacgactttacttaaaaaatcaatgttgcggctgggcacggtagctcgcgtctgtaatccccgcactttgggaggccaaggcgggtggatcacgaggtcaagagacggagaccatcctggctaacatggtgaaaccctgtctctactaaaaatacaaaaattagccgggcgtggtggcggtgcctgtagtcccagctactcgggaggctgaggcaggagaatcgtttgaacccaggaggtggaggttgcagtgagcggagatcgcaccattgcactccagtctggcaacagagcgagactccatctcaaaaaacaaaaataaataaataaataaatattcttcataaaatgtgggttttggggaaaatatagaattacatatacatttaacgaagtcgctaatgacatttcattcatattcataatgtaaccatcttgaatttttttaattgtagcgattttaaaaatgtttgtaaaatttaatttccagttttctaattacttgtcagtcacattaataacattagtacctttatggtacccttgcagtacctgaaaagaatatcaacctgaaaagaatatcaactcacccagaaattagttctttgaaaaaaaagaaattaagttgtgaatttctaaagaccttgaaataagtgtttcaaatttaaagaacaaagaatgatgtgaaaatgagattatgattcctactacatgaattaacgtttcgagattgctgtttattacttcccagagtatctttaacagtattctctgaagcagttccaatctagttggagaattaacagcaattgatttaactatctcatttttattaactgtaatttactttaaaaatatttgcaaatcatactcattagttatttgatcattgttctatgcattttaaaattaattttgtgttgttcctctcaatatttgtttttaacatttattcccatttttattttatactattgtctgtcatgctttatgtattccaataagtgtcttgaaatccttgtggggaaaggcaggacaaaaataattagttaattagatttgaaaaatgtaatttttccattttaaatatttcatttgtataagaaaatatttcagagaaccatgatgataatggatatgtgtgactgttttgaatttttttctcaattaaaacattttgtatgtaatggga

SEQ ID NO: 6202 - DNA, 430 bp, Homo sapiens
  source 1..430: mol_type = unassigned DNA
atgacctccaggaccccactgttggttacagcctgtttgtattattcttactgcaactcaagacacctgcagcagggcgtgagaaaaagtaaaagaccagtattttcacattgccaggtaccagaaacacagaagactgacacccgccacttaagtggggccagggctggtgtctgcccatgttgccatcctgatgggctgcttgccacaatgagggatcttcttcaatacatcgcttgcttctttgcctttttctctgctgggtttttgattgtggccacctggactgactgttggatggtgaatgctgatgactctctggagatgttggacctgagagaaactatccttattccttgaggaaagcctattcagccgcgggtgtttccatggccaagtcatactcagcccctcgcacagagacggccaa

SEQ ID NO: 6203 - DNA, 2859 bp, Homo sapiens
  source 1..2859: mol_type = unassigned DNA
attctggagtccagagccactgcctttgctccagccgctgccgccgcaccacctctccttctctgcctctgaccctccttctcgctgctccccctgcccagctgctcctcccacctggccatgaccaaagcccctgctggcaccctggcccagctctgagtcctgggaccctcggtcctctctcctgggccatggccaactcaggcctccagctcctgggctacttcttggccctgggtggctgggtgggcatcattgctagcacagccctgccacagtggaagcagtcttcctacgcaggcgacgccatcatcactgccgtgggcctctatgaagggctctggatgtcctgcgcctcccagagcactgggcaagtgcagtgcaagctctacgactcgctgctcgccctggacggtcacatccaatcagcgcgggccctgatggtggtggccgtgctcctgggcttcgtggccatggtcctcagcgtagttggcatgaagtgtacgcgggtgggagacagcaaccccattgccaagggccgtgttgccatcgccgggggagccctcttcatcctggcaggcctctgcactttgactgctgtctcgtggtatgccaccctggtgacccaggagttcttcaacccaagcacacctgtcaatgccaggtatgaatttggcccagccctgttcgtgggctgggcctcagctggcctggccgtgctgggcggctccttcctctgctgcacatgcccggagccagagagacccaacagcagcccacagccctatcggcctggaccctctgctgctgcccgagaaccagttgttaaattgcccgcctccgccaagggccccctgggtgtgtaatgtccagtccccagccaggctctgtcccctgccatacctagactgtgtgtttcatatttttttggaaagagaagtgaacatccagccccaatcatggtatcattcggtctgtcctcagcgtggcttggacggggcctgtgtcagagtggtcagtgctgacccctggggctcttgggcagaaagatgaggagacagaggtccagggtgggttacatagcacatccagggctaagcaagaaataattcagaggtcctaccctctgtctagggacccccctcccaagcctggccttggccttggcacaaagtcctccttgataggagatcccactcactcctggaggctgcccctgaggcttggcccagctctaggagcagtccccagggtcagggagcccctggtgtggaaagaggccccaaggtagtaaaccctgcccctgttactgtgctccagagacctcctaagggaagggacagttcctggaaggccctccagctggatgctggggatcagcgataggtgaggggacacagtgtaggagctccccatgtagaaaagggaatgtggggagggcgttaggagcttgcaggcattaggactgtcctgagcaaggtctgcagcccccagctctgctcaccccgaatcctgccccttgtttccacacctaccattcctcctctcctgatccccagcatccagctgaggtccaaggtctttgtcctagaatcagagtggggaggggacagcctggggctgcccagagactgtgggtggagctgcctgctgcactcagcagtgcggtcagagaagggcttttggtcttgaagtccaggtaccatccccccttagcatacagggggaagggcctgagaggaatgtaaggaaaccagcccagatcagtcccaaggccagagtcctttgtcctacatctccctgaaccagagtgtgccctgcccctcatgctcagacctctcccaccccaaaccctctcccgggactcagtctccctggccactgcgtatcaggcttctggggaaagcatccatcacagaacctccccttccctgccacgcaccttccttggccagctccattctggcctcctccaccacctgccttgtgaccacatctcccaccacgtccccagatctcaagaacgcagctcagcttctccttcgagcttgactctgagagggaaagtgacggaaaccaagtcagatgagatgactgccatgtacactgcagtcaagggcagggaggggaggaatgacacaaatggcagggagctgctgggggactgacccctcggcgcctggcctggccggtgctgcacatccaccggggcacaacagggacttgtccagcctctggtcagaggatgtggccacctgaccctaaataggttccccagagtcctgcccctctaatgaatgagaactgcaggagtttctcctctgggtgcctgaagctatagtgcaatggttcccaaccctgcatgcacattcgaatcacctgggggcacaatgcctaggctccaaccccagacactcttatttcattggtctgggtggacctggcatcagaagtcatgtagctcctcaggggactgtagtgtgtggtcagcactgagggctcctctatgaggcctcaagcccaggtgactctgtgaggtctgcagagggagaaaagaacccacaagggaagaggtggaggtcaggcacggtggctcacgcttgtaatcccagcactttgggaggccgaggtgggtagatacctgaagtcaggagttcgagactagcctggccaatatggtaaaaccccgtgtctattaaaaatacaaaaattagctggctgtggtggtgggcacctgtaatcccagctactcgggaggctgaggcaggagaatcgcttgaactcgggaggtggaggttgcagtcagccaagatcgtgccactgcacaccatcctggatgacagagcaagactccatcac

SEQ ID NO: 6204 - DNA, 1586 bp, Homo sapiens
  source 1..1586: mol_type = unassigned DNA
ctggccatgaccaaagcccctgctggcaccctggcccagctctgagtcctgggaccctcggtcctctctcctgggccatggccaactcaggcctccagctcctgggctacttcttggccctgggtggctgggtgggcatcattgctagcacagccctgccacagtggaagcagtcttcctacgcaggcgacgccatcatcactgccgtgggcctctatgaagggctctggatgtcctgcgcctcccagagcactgggcaagtgcagtgcaagctctacgactcgctgctcgccctggacggtcacatccaatcagcgcgggccctgatggtggtggccgtgctcctgggcttcgtggccatggtcctcagcgtagttggcatgaagtgtacgcgggtgggagacagcaaccccattgccaagggccgtgttgccatcgccgggggagccctcttcatcctggcaggcctctgcactttgactgctgtctcgtggtatgccaccctggtgacccaggagttcttcaacccaagcacacctgtcaatgccaggtatgaatttggcccagccctgttcgtgggctgggcctcagctggcctggccgtgctgggcggctccttcctctgctgcacatgcccggagccagagagacccaacagcagcccacagccctatcggcctggaccctctgctgctgcccgagagtacgtctgagctccgcctgccctggccagccccccacccagtggcccccttgcccagcatccagccagcctcgcagcaccctgggcagggccactggggcataggatgggcataggtgctctgagcagcttgtcctcaacacaagcacccaccctgcaatctgagacccagatcctcagagagacaccagaggcaggacccagcccccaggcatacacacagatgcaggtccaggcacggtcttgtctgcacagcctggtgggcaccagcatgcatccctggagacaggccctcaggcaccagcccggctgtttactcactgaagagctgcttgggtgtctgctacgtgctgggccctagagatagagcagtggccaagacgtaccttagtacccaggtccttggggtgagcagaaaccttcaccctccccagtcccatgggctcctcacagcaaccccacaagggcagtgccgggatgctgaacgttcacacaaggacagggagggtctgagtttaggtctcaggttcttccagtgcgcccagggctgggggccacctacacagatggtgaggtcggaccatggcgcccctgcccccgggaatgggccccaggcagggctgctgtgagggccaaggtctggccacgctggccagtacccatgtccgggcctgaatgcacagcccctgcccccgaccccacagctcactccactaaccagctctctctcttttgactttcagaccagttgttaaattgcccgcctccgccaagggccccctgggtgtgtaatgtccagtccccagccaggctctgtcccctgccatacctagactgtgtgtttcatatttttttggaaagagaagtgaacatccagccccaa

SEQ ID NO: 6205 - DNA, 3517 bp, Homo sapiens
  source 1..3517: mol_type = unassigned DNA
attctggagtccagagccactgcctttgctccagccgctgccgccgcaccacctctccttctctgcctctgaccctccttctcgctgctccccctgcccagctgctcctcccacctggccatgaccaaagcccctgctggcaccctggcccagctctgagtcctgggaccctcggtcctctctcctgggccatggccaactcaggcctccagctcctgggctacttcttggccctgggtggctgggtgggcatcattgctagcacagccctgccacagtggaagcagtcttcctacgcaggcgacgccatcatcactgccgtgggcctctatgaagggctctggatgtcctgcgcctcccagagcactgggcaagtgcagtgcaagctctacgactcgctgctcgccctggacggtcacatccaatcagcgcgggccctgatggtggtggccgtgctcctgggcttcgtggccatggtcctcagcgtagttggcatgaagtgtacgcgggtgggagacagcaaccccattgccaagggccgtgttgccatcgccgggggagccctcttcatcctggcaggtatgaatttggcccagccctgttcgtgggctgggcctcagctggcctggccgtgctgggcggctccttcctctgctgcacatgcccggagccagagagacccaacagcagcccacagccctatcggcctggaccctctgctgctgcccgagagtacgtctgagctccgcctgccctggccagccccccacccagtggcccccttgcccagcatccagccagcctcgcagcaccctgggcagggccactggggcataggatgggcataggtgctctgagcagcttgtcctcaacacaagcacccaccctgcaatctgagacccagatcctcagagagacaccagaggcaggacccagcccccaggcatacacacagatgcaggtccaggcacggtcttgtctgcacagcctggtgggcaccagcatgcatccctggagacaggccctcaggcaccagcccggctgtttactcactgaagagctgcttgggtgtctgctacgtgctgggccctagagatagagcagtggccaagacgtaccttagtacccaggtccttggggtgagcagaaaccttcaccctccccagtcccatgggctcctcacagcaaccccacaagggcagtgccgggatgctgaacgttcacacaaggacagggagggtctgagtttaggtctcaggttcttccagtgcgcccagggctgggggccacctacacagatggtgaggtcggaccatggcgcccctgcccccgggaatgggccccaggcagggctgctgtgagggccaaggtctggccacgctggccagtacccatgtccgggcctgaatgcacagcccctgcccccgaccccacagctcactccactaaccagctctctctcttttgactttcagaccagttgttaaattgcccgcctccgccaagggccccctgggtgtgtaatgtccagtccccagccaggctctgtcccctgccatacctagactgtgtgtttcatatttttttggaaagagaagtgaacatccagccccaatcatggtatcattcggtctgtcctcagcgtggcttggacggggcctgtgtcagagtggtcagtgctgacccctggggctcttgggcagaaagatgaggagacagaggtccagggtgggttacatagcacatccagggctaagcaagaaataattcagaggtcctaccctctgtctagggacccccctcccaagcctggccttggccttggcacaaagtcctccttgataggagatcccactcactcctggaggctgcccctgaggcttggcccagctctaggagcagtccccagggtcagggagcccctggtgtggaaagaggccccaaggtagtaaaccctgcccctgttactgtgctccagagacctcctaagggaagggacagttcctggaaggccctccagctggatgctggggatcagcgataggtgaggggacacagtgtaggagctccccatgtagaaaagggaatgtggggagggcgttaggagcttgcaggcattaggactgtcctgagcaaggtctgcagcccccagctctgctcaccccgaatcctgccccttgtttccacacctaccattcctcctctcctgatccccagcatccagctgaggtccaaggtctttgtcctagaatcagagtggggaggggacagcctggggctgcccagagactgtgggtggagctgcctgctgcactcagcagtgcggtcagagaagggcttttggtcttgaagtccaggtaccatccccccttagcatacagggggaagggcctgagaggaatgtaaggaaaccagcccagatcagtcccaaggccagagtcctttgtcctacatctccctgaaccagagtgtgccctgcccctcatgctcagacctctcccaccccaaaccctctcccgggactcagtctccctggccactgcgtatcaggcttctggggaaagcatccatcacagaacctccccttccctgccacgcaccttccttggccagctccattctggcctcctccaccacctgccttgtgaccacatctcccaccacgtccccagatctcaagaacgcagctcagcttctccttcgagcttgactctgagagggaaagtgacggaaaccaagtcagatgagatgactgccatgtacactgcagtcaagggcagggaggggaggaatgacacaaatggcagggagctgctgggggactgacccctcggcgcctggcctggccggtgctgcacatccaccggggcacaacagggacttgtccagcctctggtcagaggatgtggccacctgaccctaaataggttccccagagtcctgcccctctaatgaatgagaactgcaggagtttctcctctgggtgcctgaagctatagtgcaatggttcccaaccctgcatgcacattcgaatcacctgggggcacaatgcctaggctccaaccccagacactcttatttcattggtctgggtggacctggcatcagaagtcatgtagctcctcaggggactgtagtgtgtggtcagcactgagggctcctctatgaggcctcaagcccaggtgactctgtgaggtctgcagagggagaaaagaacccacaagggaagaggtggaggtcaggcacggtggctcacgcttgtaatcccagcactttgggaggccgaggtgggtagatacctgaagtcaggagttcgagactagcctggccaatatggtaaaaccccgtgtctattaaaaatacaaaaattagctggctgtggtggtgggcacctgtaatcccagctactcgggaggctgaggcaggagaatcgcttgaactcgggaggtggaggttgcagtcagccaagatcgtgccactgcacaccatcctggatgacagagcaagactccatcac

SEQ ID NO: 6206 - DNA, 1273 bp, Homo sapiens
  source 1..1273: mol_type = unassigned DNA
agcccagtcgccgccgcccgcccacaaagccacaggcaggtgcaggcgcagccgcggcgagagcgtatggagccgagccgttagcgcgcgccgtcggtgagtcagtccgtccgtccgtccgtccgtcggggcgccgcagctcccgccaggcccagcggccccggcccctcgtctccccgcacccggagccacccggtggagcgggccttgccgcggcagccatgtccatgggcctggagatcacgggcaccgcgctggccgtgctgggctggctgggcaccatcgtgtgctgcgcgttgcccatgtggcgcgtgtcggccttcatcggcagcaacatcatcacgtcgcagaacatctgggagggcctgtggatgaactgcgtggtgcagagcaccggccagatgcagtgcaaggtgtacgactcgctgctggcactgccacaggaccttcaggcggcccgcgccctcatcgtggtggccatcctgctggccgccttcgggctgctagtggcgctggtgggcgcccagtgcaccaactgcgtgcaggacgacacggccaaggccaagatcaccatcgtggcaggcgtgctgttccttctcgccgccctgctcaccctcgtgccggtgtcctggtcggccaacaccattatccgggacttctacaaccccgtggtgcccgaggcgcagaagcgcgagatgggcgcgggcctgtacgtgggctgggcggccgcggcgctgcagctgctggggggcgcgctgctctgctgctcgtgtcccccacgcgagaagaagtacacggccaccaaggtcgtctactccgcgccgcgctccaccggcccgggagccagcctgggcacaggctacgaccgcaaggactacgtctaagggacagacgcagggagaccccaccaccaccaccaccaccaacaccaccaccaccaccgcgagctggagcgcgcaccaggccatccagcgtgcagccttgcctcggaggccagcccacccccagaagccaggaagcccccgcgctggactggggcagcttccccagcagccacggctttgcgggccgggcagtcgacttcggggcccagggaccaacctgcatggactgtgaaacctcacccttctggagcacggggcctgggtgaccgccaatacttgaccaccccgtcgagccccatcgggccgctgcccccatgctcgcgctgggcagggaccggcagccctggaaggggcacttgatatttttcaataaaagcctttcgttttgc

SEQ ID NO: 6207 - DNA, 1822 bp, Homo sapiens
  source 1..1822: mol_type = unassigned DNA
aaaagtgcctttgttggcctgggctcaggaatccagagaaactggtcaggaggaggccccagtgacaaaaacccctccctctgcccccgcccctctgccagagccatataactgctcaacctgtccccgagagagagtgccctggcagctgtcggctggaaggaactggtctgctcacacttgctggcttgcgcatcaggactggctttatctcctgactcacggtgcaaaggtgcactctgcgaacgttaagtccgtccccagcgcttggaatcctacggcccccacagccggatcccctcagccttccaggtcctcaactcccgtggacgctgaacaatggcctccatggggctacaggtaatgggcatcgcgctggccgtcctgggctggctggccgtcatgctgtgctgcgcgctgcccatgtggcgcgtgacggccttcatcggcagcaacattgtcacctcgcagaccatctgggagggcctatggatgaactgcgtggtgcagagcaccggccagatgcagtgcaaggtgtacgactcgctgctggcactgccgcaggacctgcaggcggcccgcgccctcgtcatcatcagcatcatcgtggctgctctgggcgtgctgctgtccgtggtggggggcaagtgtaccaactgcctggaggatgaaagcgccaaggccaagaccatgatcgtggcgggcgtggtgttcctgttggccggccttatggtgatagtgccggtgtcctggacggcccacaacatcatccaagacttctacaatccgctggtggcctccgggcagaagcgggagatgggtgcctcgctctacgtcggctgggccgcctccggcctgctgctccttggcggggggctgctttgctgcaactgtccaccccgcacagacaagccttactccgccaagtattctgctgcccgctctgctgctgccagcaactacgtgtaaggtgccacggctccactctgttcctctctgctttgttcttccctggactgagctcagcgcaggctgtgaccccaggagggccctgccacgggccactggctgctggggactggggactgggcagagactgagccaggcaggaaggcagcagccttcagcctctctggcccactcggacaacttcccaaggccgcctcctgctagcaagaacagagtccaccctcctctggatattggggagggacggaagtgacagggtgtggtggtggagtggggagctggcttctgctggccaggatagcttaaccctgactttgggatctgcctgcatcggcgttggccactgtccccatttacattttccccactctgtctgcctgcatctcctctgttccgggtaggccttgatatcacctctgggactgtgccttgctcaccgaaacccgcgcccaggagtatggctgaggccttgcccacccacctgcctgggaagtgcagagtggatggacgggtttagaggggaggggcgaaggtgctgtaaacaggtttgggcagtggtgggggagggggccagagaggcggctcaggttgcccagctctgtggcctcaggactctctgcctcacccgcttcagcccagggcccctggagactgatcccctctgagtcctctgccccttccaaggacactaatgagcctgggagggtggcagggaggaggggacagcttcacccttggaagtcctggggtttttcctcttccttctttgtggtttctgttttgtaatttaagaagagctattcatcactgtaattattattattttctacaataaatgggacctgtgcacagg

SEQ ID NO: 6208 - DNA, 4108 bp, Homo sapiens
  source 1..4108: mol_type = unassigned DNA
aaggctacctggctgggaccacagatggagtctcgctctatcacccaggctggagtgcaatggcgcgatcttggctcaccgcaacctccatctcccaggttaaagcgattctcctgcctcagtctcctgagtagctgtgattacaggcgtgcgccatcacacccagctaatttttgtattttttagtagagatggggtttcaccatgttggcctaactcctgacctcgtgatctgcccatcttggcctccgaaagtactgggattacaggtgtgagccactgcacccggcccaaacatttctttttcttttcttttgagacagagtcttgctctgttgcccgtggctggagtgaaatggtgcgattatagttcactgcagcctcaaactcctggccttaagcgatcctcccatcctggcctcccaaagtgctgggattataggcatgagccgcagcaaccactcctcacatttcttgagcatctgtgatgtatcaagccagatgctgggcactgaggttgcagaaggcattgttcctgtcttctaggagccccaggctagcagggaagacggatgtgtatagagttaaccacaataccaggcctcaacttcccgtctgtaacacaggtggaccatgctagattgtcccagcctgccctgtgcttcattagccggtcaacagatccatctcaaatacctcccatgggtactcactgattgctttaacccaaaccatggcactcttgaagactttccctcaggaagctcaaggactatgcatccttctgggtcagaactggacacacagccaccagtgctggacaatggcggcggctcagggacacactggagccctggcccctgcagagctcccagcatggttgggaagagagatgcaaaatgaccacacggcgggtgaggaggagctccctcggtgcggctgggatgagccctagacactctcaatcacccccacgatgaccccttcccagaggtcccctcagtcatctgccctgaaccaagctcttcctgatcctagaccctccaccctccctctatcttccagggcttggtgacattccaggcagaaatttctgacccttttactttggtccctccctccccagcccagtctctggtcaaactggattcctggctgttcccagaacgagctgcctttccccaccttgccacctctgcccttgttctctctgcctgaatgtcctccttcactagcctcgctgccttgcacatctctcctgagggctgtcatcccagaatgagctgcatttgtccagcctggcccaccgtctaccagaacgtcctccttcagcctgtcccactgccttgcaaaacttttctgggggacctgttcacgatgccttctgtagcatactccaagaatccggcgccccctggagttgtgccacacagcacccctttgcagtcaagctccctcagcaccaccacctccaccctggaagagttccccttccctttgaaatctcatgggactttgcacccactctggctttattggaaggctttgtatgtctccacagggtaaacacccatttactggggtgatgatgtctccaggatctagttcatgtttgtcgttggtgactggccccacccagttctgggcaagcaggctggatcccggcaggaacagagcccaccagcctaaacttccatggaggtggagaggggacaggcttctgtctctttttggctgaaggtgcatcatgtccaaggcccctcttctagccaagcagagaagctgggtgataaggatgggtgagagtgggtgatgtaccccggagtcctggcctcccggctcctcactcccctacacgtaactttatccggccaatgccgcaaagactgctggtgaggccagatgcatgagtgatcatactcacaacagtcgtgaaactgccagtgatgaaactggtaaggacaagaaatgacaataatcaaggtggggtttctcgtggacgtttccaagacttcattctcaaattctctccctcagggtccccaccctgtcctcccacctaagcctggaatgagggggcactggcctgtggggaccctggtcttcaggctcccaaacctggctgggtctggttgccccctggccttaacctgtgaacatccagctgtccctgggctgtgattcagtgtctgtctcccgggtgacctcagcatgggctttgaggaaggggagagagtagtttcttctgagactggatagtgactcagggacccggggctggggcctcaaaagtgcctttgttggcctgggctcaggaatccagagaaactggtcaggaggaggccccagtgacaaaaacccctccctctgcccccgcccctctgccagagccatataactgctcaacctgtccccgagagagagtgccctggcagctgtcggctggaaggaactggtctgctcacacttgctggcttgcgcatcaggactggctttatctcctgactcacggtgcaaaggtgcactctgcgaacgttaagtccgtccccagcgcttggaatcctacggcccccacagccggatcccctcagccttccaggtcctcaactcccgtggacgctgaacaatggcctccatggggctacaggtaatgggcatcgcgctggccgtcctgggctggctggccgtcatgctgtgctgcgcgctgcccatgtggcgcgtgacggccttcatcggcagcaacattgtcacctcgcagaccatctgggagggcctatggatgaactgcgtggtgcagagcaccggccagatgcagtgcaaggtgtacgactcgctgctggcactgccgcaggacctgcaggcggcccgcgccctcgtcatcatcagcatcatcgtggctgctctgggcgtgctgctgtccgtggtggggggcaagtgtaccaactgcctggaggatgaaagcgccaaggccaagaccatgatcgtggcgggcgtggtgttcctgttggccggccttatggtgatagtgccggtgtcctggacggcccacaacatcatccaagacttctacaatccgctggtggcctccgggcagaagcgggagatgggtgcctcgctctacgtcggctgggccgcctccggcctgctgctccttggcggggggctgctttgctgcaactgtccaccccgcacagacaagccttactccgccaagtattctgctgcccgctctgctgctgccagcaactacgtgtaaggtgccacggctccactctgttcctctctgctttgttcttccctggactgagctcagcgcaggctgtgaccccaggagggccctgccacgggccactggctgctggggactggggactgggcagagactgagccaggcaggaaggcagcagccttcagcctctctggcccactcggacaacttcccaaggccgcctcctgctagcaagaacagagtccaccctcctctggatattggggagggacggaagtgacagggtgtggtggtggagtggggagctggcttctgctggccaggatagcttaaccctgactttgggatctgcctgcatcggcgttggccactgtccccatttacattttccccactctgtctgcctgcatctcctctgttccgggtaggccttgatatcacctctgggactgtgccttgctcaccgaaacccgcgcccaggagtatggctgaggccttgcccacccacctgcctgggaagtgcagagtggatggacgggtttagaggggaggggcgaaggtgctgtaaacaggtttgggcagtggtgggggagggggccagagaggcggctcaggttgcccagctctgtggcctcaggactctctgcctcacccgcttcagcccagggcccctggagactgatcccctctgagtcctctgccccttccaaggacactaatgagcctgggagggtggcagggaggaggggacagcttcacccttggaagtcctggggtttttcctcttccttctttgtggtttctgttttgtaatttaagaagagctattcatcactgtaattattattattttctacaataaatgggacctgtgcacag

SEQ ID NO: 6209 - DNA, 4163 bp, Homo sapiens
  source 1..4163: mol_type = unassigned DNA
cacttgtgctgagctactggctgatccccaaggacatccttctggcctctccttcacacctgggtcccctagccctgcatggagtctcgctctatcacccaggctggagtgcaatggcgcgatcttggctcaccgcaacctccatctcccaggttaaagcgattctcctgcctcagtctcctgagtagctgtgattacaggcgtgcgccatcacacccagctaatttttgtattttttagtagagatggggtttcaccatgttggcctaactcctgacctcgtgatctgcccatcttggcctccgaaagtactgggattacaggtgtgagccactgcacccggcccaaacatttctttttcttttcttttgagacagagtcttgctctgttgcccgtggctggagtgaaatggtgcgattatagttcactgcagcctcaaactcctggccttaagcgatcctcccatcctggcctcccaaagtgctgggattataggcatgagccgcagcaaccactcctcacatttcttgagcatctgtgatgtatcaagccagatgctgggcactgaggttgcagaaggcattgttcctgtcttctaggagccccaggctagcagggaagacggatgtgtatagagttaaccacaataccaggcctcaacttcccgtctgtaacacaggtggaccatgctagattgtcccagcctgccctgtgcttcattagccggtcaacagatccatctcaaatacctcccatgggtactcactgattgctttaacccaaaccatggcactcttgaagactttccctcaggaagctcaaggactatgcatccttctgggtcagaactggacacacagccaccagtgctggacaatggcggcggctcagggacacactggagccctggcccctgcagagctcccagcatggttgggaagagagatgcaaaatgaccacacggcgggtgaggaggagctccctcggtgcggctgggatgagccctagacactctcaatcacccccacgatgaccccttcccagaggtcccctcagtcatctgccctgaaccaagctcttcctgatcctagaccctccaccctccctctatcttccagggcttggtgacattccaggcagaaatttctgacccttttactttggtccctccctccccagcccagtctctggtcaaactggattcctggctgttcccagaacgagctgcctttccccaccttgccacctctgcccttgttctctctgcctgaatgtcctccttcactagcctcgctgccttgcacatctctcctgagggctgtcatcccagaatgagctgcatttgtccagcctggcccaccgtctaccagaacgtcctccttcagcctgtcccactgccttgcaaaacttttctgggggacctgttcacgatgccttctgtagcatactccaagaatccggcgccccctggagttgtgccacacagcacccctttgcagtcaagctccctcagcaccaccacctccaccctggaagagttccccttccctttgaaatctcatgggactttgcacccactctggctttattggaaggctttgtatgtctccacagggtaaacacccatttactggggtgatgatgtctccaggatctagttcatgtttgtcgttggtgactggccccacccagttctgggcaagcaggctggatcccggcaggaacagagcccaccagcctaaacttccatggaggtggagaggggacaggcttctgtctctttttggctgaaggtgcatcatgtccaaggcccctcttctagccaagcagagaagctgggtgataaggatgggtgagagtgggtgatgtaccccggagtcctggcctcccggctcctcactcccctacacgtaactttatccggccaatgccgcaaagactgctggtgaggccagatgcatgagtgatcatactcacaacagtcgtgaaactgccagtgatgaaactggtaaggacaagaaatgacaataatcaaggtggggtttctcgtggacgtttccaagacttcattctcaaattctctccctcagggtccccaccctgtcctcccacctaagcctggaatgagggggcactggcctgtggggaccctggtcttcaggctcccaaacctggctgggtctggttgccccctggccttaacctgtgaacatccagctgtccctgggctgtgattcagtgtctgtctcccgggtgacctcagcatgggctttgaggaaggggagagagtagtttcttctgagactggatagtgactcagggacccggggctggggcctcaaaagtgcctttgttggcctgggctcaggaatccagagaaactggtcaggaggaggccccagtgacaaaaacccctccctctgcccccgcccctctgccagagccatataactgctcaacctgtccccgagagagagtgccctggcagctgtcggctggaaggaactggtctgctcacacttgctggcttgcgcatcaggactggctttatctcctgactcacggtgcaaaggtgcactctgcgaacgttaagtccgtccccagcgcttggaatcctacggcccccacagccggatcccctcagccttccaggtcctcaactcccgtggacgctgaacaatggcctccatggggctacaggtaatgggcatcgcgctggccgtcctgggctggctggccgtcatgctgtgctgcgcgctgcccatgtggcgcgtgacggccttcatcggcagcaacattgtcacctcgcagaccatctgggagggcctatggatgaactgcgtggtgcagagcaccggccagatgcagtgcaaggtgtacgactcgctgctggcactgccgcaggacctgcaggcggcccgcgccctcgtcatcatcagcatcatcgtggctgctctgggcgtgctgctgtccgtggtggggggcaagtgtaccaactgcctggaggatgaaagcgccaaggccaagaccatgatcgtggcgggcgtggtgttcctgttggccggccttatggtgatagtgccggtgtcctggacggcccacaacatcatccaagacttctacaatccgctggtggcctccgggcagaagcgggagatgggtgcctcgctctacgtcggctgggccgcctccggcctgctgctccttggcggggggctgctttgctgcaactgtccaccccgcacagacaagccttactccgccaagtattctgctgcccgctctgctgctgccagcaactacgtgtaaggtgccacggctccactctgttcctctctgctttgttcttccctggactgagctcagcgcaggctgtgaccccaggagggccctgccacgggccactggctgctggggactggggactgggcagagactgagccaggcaggaaggcagcagccttcagcctctctggcccactcggacaacttcccaaggccgcctcctgctagcaagaacagagtccaccctcctctggatattggggagggacggaagtgacagggtgtggtggtggagtggggagctggcttctgctggccaggatagcttaaccctgactttgggatctgcctgcatcggcgttggccactgtccccatttacattttccccactctgtctgcctgcatctcctctgttccgggtaggccttgatatcacctctgggactgtgccttgctcaccgaaacccgcgcccaggagtatggctgaggccttgcccacccacctgcctgggaagtgcagagtggatggacgggtttagaggggaggggcgaaggtgctgtaaacaggtttgggcagtggtgggggagggggccagagaggcggctcaggttgcccagctctgtggcctcaggactctctgcctcacccgcttcagcccagggcccctggagactgatcccctctgagtcctctgccccttccaaggacactaatgagcctgggagggtggcagggaggaggggacagcttcacccttggaagtcctggggtttttcctcttccttctttgtggtttctgttttgtaatttaagaagagctattcatcactgtaattattattattttctacaataaatgggacctgtgcacagg

SEQ ID NO: 6210 - DNA, 1650 bp, Homo sapiens
  source 1..1650: mol_type = unassigned DNA
gtgccctggcagctgtcggctggaaggaactggtctgctcacacttgctggcttgcgcatcaggactggctttatctcctgactcacggtgcaaaggtgcactctgcgaacgttaagtccgtccccagcgcttggaatcctacggcccccacagccggatcccctcagccttccaggtcctcaactcccgtggacgctgaacaatggcctccatggggctacaggtaatgggcatcgcgctggccgtcctgggctggctggccgtcatgctgtgctgcgcgctgcccatgtggcgcgtgacggccttcatcggcagcaacattgtcacctcgcagagcaccggccagatgcagtgcaaggtgtacgactcgctgctggcactgccgcaggacctgcaggcggcccgcgccctcgtcatcatcagcatcatcgtggctgctctgggcgtgctgctgtccgtggtggggggcaagtgtaccaactgcctggaggatgaaagcgccaaggccaagaccatgatcgtggcgggcgtggtgttcctgttggccggccttatggtgatagtgccggtgtcctggacggcccacaacatcatccaagacttctacaatccgctggtggcctccgggcagaagcgggagatgggtgcctcgctctacgtcggctgggccgcctccggcctgctgctccttggcggggggctgctttgctgcaactgtccaccccgcacagacaagccttactccgccaagtattctgctgcccgctctgctgctgccagcaactacgtgtaaggtgccacggctccactctgttcctctctgctttgttcttccctggactgagctcagcgcaggctgtgaccccaggagggccctgccacgggccactggctgctggggactggggactgggcagagactgagccaggcaggaaggcagcagccttcagcctctctggcccactcggacaacttcccaaggccgcctcctgctagcaagaacagagtccaccctcctctggatattggggagggacggaagtgacagggtgtggtggtggagtggggagctggcttctgctggccaggatagcttaaccctgactttgggatctgcctgcatcggcgttggccactgtccccatttacattttccccactctgtctgcctgcatctcctctgttccgggtaggccttgatatcacctctgggactgtgccttgctcaccgaaacccgcgcccaggagtatggctgaggccttgcccacccacctgcctgggaagtgcagagtggatggacgggtttagaggggaggggcgaaggtgctgtaaacaggtttgggcagtggtgggggagggggccagagaggcggctcaggttgcccagctctgtggcctcaggactctctgcctcacccgcttcagcccagggcccctggagactgatcccctctgagtcctctgccccttccaaggacactaatgagcctgggagggtggcagggaggaggggacagcttcacccttggaagtcctggggtttttcctcttccttctttgtggtttctgttttgtaatttaagaagagctattcatcactgtaattattattattttctacaataaatgggacctgtgcacaggagg

SEQ ID NO: 6211 - DNA, 2357 bp, Homo sapiens
  source 1..2357: mol_type = unassigned DNA
atcgccactggtgggagggcagggcacagcccctccgtgtccctttgtctctcctgtctgaaggccagagcaggctgctaggcctggggccaccactgcccctgggtgctacacccagtgtgctgggtcactgggaacttcctgaagtggtgtcacctgaactgggcccccaaggatggggtgcgggcagtaccgcaggaagaggagcagcccctgtgaagattgagaggtctgggaagcccctgcggcttgggagagtgggggtcgccaggcagggggaaagcccctgtgccaccgctttttgccagagactcaggctccagagaggcagtgagtggcatggggggtgaggctggggccctgggcctgacctccacacgcctgcctggcctctctgtttgccatgggatgagagagacagtgctgggactcagagcggggctggagagtgagagtgcgagaaagggcctgggtggggcttggaccccggggcgggctttctggagagcccccctacgagggcctctacggcggtgacggggtggggggcttctgcaaaccttggtcagggaagtggagctggctcgagtggaagagaccacccggctcagtcggggatgtgggagtggactgggtggtgcagactgggggtcgagcgccttctgaagtgacggggccgggacgcgcagggaggcggcccaagaagcgcgccctaggccagcccagaatgcgctcggccgcgactaggacaacggcgggtggggctgggggcggctgccgggcggggagcggtcccgcgccctcagctacccctcaagagccgttgtttccctaacttcagctgccagaggctctgtgattggctgcggcacgatgacccgcgcacggattggctgcttcgggccggggggccgggcccgggggacagaatccgcccccgaaccttcaaagagggtaccccccggcaggagctggcagacccaggaggtgcgacagacccgcggggcaaacggactggggccaagagccgggagcgcgggcgcaaaggcaccagggcccgcccagggcgccgcgcagcacggccttgggggttctgcgggccttcgggtgcgcgtctcgcctctagccatggggtccgcagcgttggagatcctgggcctggtgctgtgcctggtgggctgggggggtctgatcctggcgtgcgggctgcccatgtggcaggtgaccgccttcctggaccacaacatcgtgacggcgcagaccacctggaaggggctgtggatgtcgtgcgtggtgcagagcaccgggcacatgcagtgcaaagtgtacgactcggtgctggctctgagcaccgaggtgcaggcggcgcgggcgctcaccgtgagcgccgtgctgctggcgttcgttgcgctcttcgtgaccctggcgggcgcgcagtgcaccacctgcgtggccccgggcccggccaaggcgcgtgtggccctcacgggaggcgtgctctacctgttttgcgggctgctggcgctcgtgccactctgctggttcgccaacattgtcgtccgcgagttttacgacccgtctgtgcccgtgtcgcagaagtacgagctgggcgcagcgctgtacatcggctgggcggccaccgcgctgctcatggtaggcggctgcctcttgtgctgcggcgcctgggtctgcaccggccgtcccgacctcagcttccccgtgaagtactcagcgccgcggcggcccacggccaccggcgactacgacaagaagaactacgtctgagggcgctgggcacggccgggcccctcctgccagccacgcctgcgaggcgttggataagcctggggagccccgcatggaccgcggcttccgccgggtagcgcggcgcgcaggctcctcggaacgtccggctctgcgccccgacgcggctcctggatccgctcctgcctgcgcccgcagctgaccttctcctgccactagcccggccctgcccttaacagacggaatgaagtttccttttctgtgcgcggcgctgtttccataggcagagcgggtgtcagactgaggatttcgcttcccctccaagacgctgggggtcttggctgctgccttacttcccagaggctcctgctgacttcggaggggcggatgcagagcccagggcccccaccggaagatgtgtacagctggtctttactccatcggcagggcccgagcccagggaccagtgacttggcctggacctcccggtctcactccagcatctccccaggcaaggcttgtgggcaccggagcttgagagagggcgggagtgggaaggctaagaatctgcttagtaaatggtttgaactctc

SEQ ID NO: 6212 - DNA, 2548 bp, Homo sapiens
  source 1..2548: mol_type = unassigned DNA
aaagcagaacaatggctgggggtgagcaggtggccttggccagtgctctgccccaagggccctttaccagagatcaggggtttgtgtccctgcctaaccaggacacctccgatctccacctgcaggccctggaccactgtggcactgtggacacaaggccgcttctgccccttggacgccgagccccttcccacctctgggatcttgcactggctattgcttctgctctgcctggaacttcttccccggatccctgtgaaatgtcacctcttcagagaggccttcaccactgtctttcctgcccagttcttggttgataggttcctgtcagctccttctgggcaggagcttcttgtgctgtgtgctctgcctagagacagtgcttgccacgaagtaggtgagcagaccctccatgagtggcaggaaaggtgggtgcaccctcatgcccctccggagtctggcctgggctactcagaggccagcctccatctgaggtgggtttgtctggggtggcgtcagcccctgcggccctctctgggcctctctgcattggcattgttccactgcagcctggggcctcgaccaacatagtggggtcagggtagaaaccagattgtgaaaggtgaagcctgagactcctctgccacgtccctgagatgctgtgaggctgccgccaaagaaacatgagcttgctggggccaccctagggtgacagctaggagagaagaaaaacaggcagccaggtgagaagggagagccttgggctggctgcagctccaagctggctagagggcaacaggcagcctcctgtgcaggacagacgcatgaagacagccaccctgtggaggttattcctggatactaggtgggaaagtcggcaagcaaaaggacaggtccagctcaagcttctaaaagcaatgctgggggacggtgcagcaaggtgttcctggaaatgacctcggcaacacatcttagaagatgagcaggacccaacctgacagatacacgctgcgggcagaagaggccaagctgccagaggctctgtgattggctgcggcacgatgacccgcgcacggattggctgcttcgggccggggggccgggcccgggggacagaatccgcccccgaaccttcaaagagggtaccccccggcaggagctggcagacccaggaggtgcgacagacccgcggggcaaacggactggggccaagagccgggagcgcgggcgcaaaggcaccagggcccgcccagggcgccgcgcagcacggccttgggggttctgcgggccttcgggtgcgcgtctcgcctctagccatggggtccgcagcgttggagatcctgggcctggtgctgtgcctggtgggctgggggggtctgatcctggcgtgcgggctgcccatgtggcaggtgaccgccttcctggaccacaacatcgtgacggcgcagaccacctggaaggggctgtggatgtcgtgcgtggtgcagagcaccgggcacatgcagtgcaaagtgtacgactcggtgctggctctgagcaccgaggtgcaggcggcgcgggcgctcaccgtgagcgccgtgctgctggcgttcgttgcgctcttcgtgaccctggcgggcgcgcagtgcaccacctgcgtggccccgggcccggccaaggcgcgtgtggccctcacgggaggcgtgctctacctgttttgcgggctgctggcgctcgtgccactctgctggttcgccaacattgtcgtccgcgagttttacgacccgtctgtgcccgtgtcgcagaagtacgagctgggcgcagcgctgtacatcggctgggcggccaccgcgctgctcatggtaggcggctgcctcttgtgctgcggcgcctgggtctgcaccggccgtcccgacctcagcttccccgtgaagtactcagcgccgcggcggcccacggccaccggcgactacgacaagaagaactacgtctgagggcgctgggcacggccgggcccctcctgccagccacgcctgcgaggcgttggataagcctggggagccccgcatggaccgcggcttccgccgggtagcgcggcgcgcaggctcctcggaacgtccggctctgcgccccgacgcggctcctggatccgctcctgcctgcgcccgcagctgaccttctcctgccactagcccggccctgcccttaacagacggaatgaagtttccttttctgtgcgcggcgctgtttccataggcagagcgggtgtcagactgaggatttcgcttcccctccaagacgctgggggtcttggctgctgccttacttcccagaggctcctgctgacttcggaggggcggatgcagagcccagggcccccaccggaagatgtgtacagctggtctttactccatcggcagggcccgagcccagggaccagtgacttggcctggacctcccggtctcactccagcatctccccaggcaaggcttgtgggcaccggagcttgagagagggcgggagtgggaaggctaagaatctgcttagtaaatggtttgaactctctcc

SEQ ID NO: 6213 - DNA, 1760 bp, Homo sapiens
  source 1..1760: mol_type = unassigned DNA
ttccggagggtggcctgggggctggggtgccagggacaccatcgccactggtgggagggcagggcacagcccctccgtgtccctttgtctctcctgtctgaaggccagagcaggctgctaggcctggggccaccactgcccctgggtgctacacccagtgtgctgggtcactgggaacttcctgaagtggtgtcacctgaactgggcccccaaggatggggtgcgggcagtaccgcaggaagaggagcagcccctgtgaagattgagagctgccagaggctctgtgattggctgcggcacgatgacccgcgcacggattggctgcttcgggccggggggccgggcccgggggacagaatccgcccccgaaccttcaaagagggtaccccccggcaggagctggcagacccaggaggtgcgacagacccgcggggcaaacggactggggccaagagccgggagcgcgggcgcaaaggcaccagggcccgcccagggcgccgcgcagcacggccttgggggttctgcgggccttcgggtgcgcgtctcgcctctagccatggggtccgcagcgttggagatcctgggcctggtgctgtgcctggtgggctgggggggtctgatcctggcgtgcgggctgcccatgtggcaggtgaccgccttcctggaccacaacatcgtgacggcgcagaccacctggaaggggctgtggatgtcgtgcgtggtgcagagcaccgggcacatgcagtgcaaagtgtacgactcggtgctggctctgagcaccgaggtgcaggcggcgcgggcgctcaccgtgagcgccgtgctgctggcgttcgttgcgctcttcgtgaccctggcgggcgcgcagtgcaccacctgcgtggccccgggcccggccaaggcgcgtgtggccctcacgggaggcgtgctctacctgttttgcgggctgctggcgctcgtgccactctgctggttcgccaacattgtcgtccgcgagttttacgacccgtctgtgcccgtgtcgcagaagtacgagctgggcgcagcgctgtacatcggctgggcggccaccgcgctgctcatggtaggcggctgcctcttgtgctgcggcgcctgggtctgcaccggccgtcccgacctcagcttccccgtgaagtactcagcgccgcggcggcccacggccaccggcgactacgacaagaagaactacgtctgagggcgctgggcacggccgggcccctcctgccagccacgcctgcgaggcgttggataagcctggggagccccgcatggaccgcggcttccgccgggtagcgcggcgcgcaggctcctcggaacgtccggctctgcgccccgacgcggctcctggatccgctcctgcctgcgcccgcagctgaccttctcctgccactagcccggccctgcccttaacagacggaatgaagtttccttttctgtgcgcggcgctgtttccataggcagagcgggtgtcagactgaggatttcgcttcccctccaagacgctgggggtcttggctgctgccttacttcccagaggctcctgctgacttcggaggggcggatgcagagcccagggcccccaccggaagatgtgtacagctggtctttactccatcggcagggcccgagcccagggaccagtgacttggcctggacctcccggtctcactccagcatctccccaggcaaggcttgtgggcaccggagcttgagagagggcgggagtgggaaggctaagaatc

SEQ ID NO: 6214 - DNA, 1634 bp, Homo sapiens
  source 1..1634: mol_type = unassigned DNA
tttccggcgtgggtccgggcaagaaccgcttgtagtttggtttaaattctgcacgggaggaccttctgagtttacctgttgggctcctggctgcgcaggcacagcagctacacagaagagatgggagaagaggctaatgatgacaagaagccaaccactaaatttgaactagagcgagaaacagaacttcgctttgaggtggaggcatctcagtcagttcagttggagttgttgactggcatggcagagatctttggcacagagctgacccgaaacaagaaattcacctttgatgctggtgccaaggtggctgttttcacttggcatggctgttctgtgcaactgagcggccgcactgaggtggcttatgtctccaaggacactcctatgttgctttacctcaacactcacacagccttggaacagatgcggaggcaagcggaaaaggaagaagagcgaggtccccgagtgatggtagtgggccccactgatgtgggcaagtctacagtgtgtcgccttctgctcaactacgcaattacatctcgtttagcagatgtgttcaaccaaaggtgtgaggtgaaccgaagggcatctgtgagtggctgtgtcattaacacctgtggctgggtcaagggctctggttaccaggctctggtgcatgcagcctcagcttttgaggtggatgtcgttgttgttctggatcaagaacgactgtacaatgaactgaaacgggacctcccccactttgtacgcactgtgctgctccctaaatctgggggtgtggtggagcgctccaaggacttccggcgggaatgtagggatgagcgtatccgtgagtatttttatggattccgaggctgtttctatccccatgccttcaatgtcaaattttcagatgtgaaaatctacaaagttggggcacccaccatcccagactcctgtttacctttgggcatgtctcaagaggataatcagctcaagctagtacctgtcactcctgggcgagatatggtgcaccacctactgagtgttagcactgccgagggtacagaggagaacctgtccgagacaagtgtagctggcttcattgtggtgaccagtgtggacctggagcatcaggtgtttactgttctgtctccagcccctcgcccactgcctaagaacttccttctcatcatggatatccggttcatggatctgaagtagagatcagcaggaagccttgctgcctgggacatagagatcatctggccacccctagaggcagatgggctgagataaaagactgttggggccacctgaccagtaaactgtggactagtagaaagttcatattctacctctaaaaacaggtagtggtaacctgactcttctaatcttgaaccaaaaggaaaaccatgagactgtaattggtttcttagaccacctaagatgccactttgaattctctaagaccctggagaattgcatttctttcactgtgctactatgtggtttttaaaaaatcaatgctttatattccatatgtggttcttacccatttatctaggatgaaagtgtgaattagagggactccttccaataaagttcaaacttaaaaaaaatcattttaataaatatttttgccatatcat

SEQ ID NO: 6215 - DNA, 1691 bp, Homo sapiens
  source 1..1691: mol_type = unassigned DNA
cgccgccgccatgcaggaaatcatcgccagcgtggaccacatcaagtttgacttggagatcgcggtggagcagcagctgggggcgcagccgctgcccttccccggcatggacaagtcgggcgctgctgtctgtgaattctttttgaaagctgcctgcggcaaagggggcatgtgtccgtttcgccacatcagtggtgagaagacagttgtgtgcaaacactggctgcgtggcctatgcaagaaaggggaccagtgtgagttcctgcatgagtatgacatgaccaagatgcccgagtgctacttctactccaagttcggggagtgcagcaacaaggaatgtcccttcctgcacatcgaccccgagtccaagatcaaggactgtccttggtatgaccgtggcttctgcaagcacggtcccctctgcaggcaccggcacacacggagagtcatctgtgtgaattacctcgtgggattctgcccggaggggccctcgtgtaaattcatgcaccctcgatttgaactgcccatgggaaccaccgagcagcccccactgccgcagcagacacagcctccagcaaagcaaagtaacaatccgccattacaaaggtcgtcctccttgatccagttaacgagtcagaactcttctcccaatcagcagagaaccccgcaggtcatcggggtcatgcagagtcaaaacagcagcgcgggcaaccggggaccccggccactggagcaggtcacctgttacaagtgtggcgagaaaggacactacgccaacagatgcaccaaagggcacttggcctttctcagtggacagtgacagcagctggagccagctccgagcagcccgggggccccgctgttgggagtgtgcatttaactgtttcatgcgcttgttggcgcgactgtggctcgagctggcccgcagacacgtgggtttcatcactctgaggggccacgtctgttagtttcctatcattttgccttagtattttttgaaaaagggacatgtgtcctgtgggtccctgcagtcgacatcatgtttggctgggcatcgatgcctcctttctgggactcccggcacaactcccctcatccagggagggaggcagctgctggggaggggcttggctaggtagttctgtgtggcggtggtcattcccctcattaaacaccagttcttggtgacgccaggggctggtaggtcattcaaagctgtggccagctcacgcctgcttcctccctccctgccctgctgaatcctaaagctgtgcctatatctgtgatttgaatgagggagccctttggggcaaattcaggtgcccccattgcctcaggctggccctggtcccaggtggcagcggttgaggaggggtacagggctctcaagcctgaggttttcttctctgggcttaattttctcttggggtacgtgcctgacagtgtttaaggtgtccgttgaactggagttgcagacttttaaatagatgaccccttcagatcatctgtgcctacctcctgcccatcaggcgtctacactgtcactcagacacctgtggcatgtggaggagactgccctgtcctgagcctggaaaatgtgaaactgtctcctgcaacctgctgggcatgtgggcctggctgtgttcaattgcaagaacaatttttatgaaatggattaaagcttgtttttt

SEQ ID NO: 6216 - DNA, 1738 bp, Homo sapiens
  source 1..1738: mol_type = unassigned DNA
gcgcgggctccgggcgctcccggcatccctcgggcggcggcggcggcggcggcgaggcgaagcgaaggaggagtgtgtgcggcggggccggcggcgggtaaaggcgagaaggctgcaggagaccgagggggagccgggccggtggggccgccgccgccgccatgcaggaaatcatcgccagcgtggaccacatcaagtttgacttggagatcgcggtggagcagcagctgggggcgcagccgctgcccttccccggcatggacaagtcgggcgctgctgtctgtgaattctttttgaaagctgcctgcggcaaagggggcatgtgtccgtttcgccacatcagtggtgagaagacagttgtgtgcaaacactggctgcgtggcctatgcaagaaaggggaccagtgtgagttcctgcatgagtatgacatgaccaagatgcccgagtgctacttctactccaagttcggggagtgcagcaacaaggaatgtcccttcctgcacatcgaccccgagtccaagatcaaggactgtccttggtatgaccgtggcttctgcaagcacggtcccctctgcaggcaccggcacacacggagagtcatctgtgtgaattacctcgtgggattctgcccggaggggccctcgtgtaaattcatgcaccctcgatttgaactgcccatgggaaccaccgagcagcccccactgccgcagcagacacagcctccagcaaagcagagaaccccgcaggtcatcggggtcatgcagagtcaaaacagcagcgcgggcaaccggggaccccggccactggagcaggtcacctgttacaagtgtggcgagaaaggacactacgccaacagatgcaccaaagggcacttggcctttctcagtggacagtgacagcagctggagccagctccgagcagcccgggggccccgctgttgggagtgtgcatttaactgtttcatgcgcttgttggcgcgactgtggctcgagctggcccgcagacacgtgggtttcatcactctgaggggccacgtctgttagtttcctatcattttgccttagtattttttgaaaaagggacatgtgtcctgtgggtccctgcagtcgacatcatgtttggctgggcatcgatgcctcctttctgggactcccggcacaactcccctcatccagggagggaggcagctgctggggaggggcttggctaggtagttctgtgtggcggtggtcattcccctcattaaacaccagttcttggtgacgccaggggctggtaggtcattcaaagctgtggccagctcacgcctgcttcctccctccctgccctgctgaatcctaaagctgtgcctatatctgtgatttgaatgagggagccctttggggcaaattcaggtgcccccattgcctcaggctggccctggtcccaggtggcagcggttgaggaggggtacagggctctcaagcctgaggttttcttctctgggcttaattttctcttggggtacgtgcctgacagtgtttaaggtgtccgttgaactggagttgcagacttttaaatagatgaccccttcagatcatctgtgcctacctcctgcccatcaggcgtctacactgtcactcagacacctgtggcatgtggaggagactgccctgtcctgagcctggaaaatgtgaaactgtctcctgcaacctgctgggcatgtgggcctggctgtgttcaattgcaagaacaatt

SEQ ID NO: 6217 - DNA, 1644 bp, Homo sapiens
  source 1..1644: mol_type = unassigned DNA
atccctcgggcggcggcggcggcggcggcgaggcgaagcgaaggaggagtgtgtgcggcggggccggcggcgggtaaaggcgagaaggctgcaggagaccgagggggagccgggccggtggggccgccgccgccgccatgcaggaaatcatcgccagcgtggaccacatcaagtttgacttggagatcgcggtggagcagcagctgggggcgcagccgctgcccttccccggcatggacaagtcgggcgctgctgtctgtgaattctttttgaaagctgcctgcggcaaagggggcatgtgtccgtttcgccacatcagtggtgagaagacagttgtgtgcaaacactggctgcgtggcctatgcaagaaaggggaccagtgtgagttcctgcatgagtatgacatgaccaagatgcccgagtgctacttctactccaagttcggtcccctctgcaggcaccggcacacacggagagtcatctgtgtgaattacctcgtgggattctgcccggaggggccctcgtgtaaattcatgcaccctcgatttgaactgcccatgggaaccaccgagcagcccccactgccgcagcagacacagcctccagcaaagagaaccccgcaggtcatcggggtcatgcagagtcaaaacagcagcgcgggcaaccggggaccccggccactggagcaggtcacctgttacaagtgtggcgagaaaggacactacgccaacagatgcaccaaagggcacttggcctttctcagtggacagtgacagcagctggagccagctccgagcagcccgggggccccgctgttgggagtgtgcatttaactgtttcatgcgcttgttggcgcgactgtggctcgagctggcccgcagacacgtgggtttcatcactctgaggggccacgtctgttagtttcctatcattttgccttagtattttttgaaaaagggacatgtgtcctgtgggtccctgcagtcgacatcatgtttggctgggcatcgatgcctcctttctgggactcccggcacaactcccctcatccagggagggaggcagctgctggggaggggcttggctaggtagttctgtgtggcggtggtcattcccctcattaaacaccagttcttggtgacgccaggggctggtaggtcattcaaagctgtggccagctcacgcctgcttcctccctccctgccctgctgaatcctaaagctgtgcctatatctgtgatttgaatgagggagccctttggggcaaattcaggtgcccccattgcctcaggctggccctggtcccaggtggcagcggttgaggaggggtacagggctctcaagcctgaggttttcttctctgggcttaattttctcttggggtacgtgcctgacagtgtttaaggtgtccgttgaactggagttgcagacttttaaatagatgaccccttcagatcatctgtgcctacctcctgcccatcaggcgtctacactgtcactcagacacctgtggcatgtggaggagactgccctgtcctgagcctggaaaatgtgaaactgtctcctgcaacctgctgggcatgtgggcctggctgtgttcaattgcaagaacaatttttatgaaatggattaaagcttgtttttt

SEQ ID NO: 6218 - DNA, 2229 bp, Homo sapiens
  source 1..2229: mol_type = unassigned DNA
cggcggcggcggcggccgaggctgaaggaagatggcggacggcgtggaccacatagacatttacgcggatgtcggcgaagagttcaaccaggaagctgaatatggtgggcatgatcagatagatttgtatgacgatgtcatatctccatctgcaaataatggagatgccccagaagaccgagattacatggatactctcccaccaactgttggtgatgatgtgggtaaaggagcagcaccaaatgttgtctatacatatactggaaagagaattgcattatatattggaaatctaacatggtggacaacagatgaagacttaactgaagcagttcattctttgggagtaaatgatattttggagataaaattttttgaaaatcgggcaaatggccagtcaaaggggtttgcccttgttggtgttggatctgaagcatcttcaaaaaagttaatggatctgttacctaaaagagaacttcatggtcagaatcctgttgtaactccatgcaataaacagttcctgagtcaatttgaaatgcagtccaggaaaactacacaatcaggacaaatgtctggggaaggtaaagctggtcctccaggaggcagttcccgtgcagcatttccacaaggtggtagaggacggggccgttttccaggggctgttcctggtggggacagatttcctgggccagcaggaccaggagggccacccccaccttttccaggaaatttgatcaagcatcttgttaaaggaactcggcctttgttcctggaaactaggattccatggcatatggggcacagcatagaggaaatacccatttttggcctaaaagctggacagactccaccacgtccacccttaggtcctccaggcccacctggtccaccaggtcctccacctcctggtcaggttctgcctcctcctctagctgggcctcctaatcgaggagatcgccctccaccaccagttctttttcctggacaaccttttgggcagcctccattgggtccacttcctcctggccctccacctccagttccaggctacggcccccctcctggcccaccacctccacaacagggaccacctccacctccaggcccctttccacctcgtccacccggtccacttgggccaccccttacactagctcctcctccgcatcttcctggaccacctccaggtgccccaccgccagctccgcatgtgaacccagctttctttcctccaccaactaacagtggcatgcctacatcagatagccgaggtccaccaccaacagatccatatgggcgacctccaccatatgataggggtgactatggcccccctggaagggaaatggatactgcaagaacgccattgagtgaagctgaatttgaagaaatcatgaatagaaatagggcaatctcaagcagtgctatttcgagagctgtgtctgatgccagtgctggtgattatgggagtgctattgagacactggtaactgcaatttctttaattaaacaatccaaagtatctgctgatgatcgttgcaaagttcttattagttctttgcaagattgccttcatggaattgagtccaagtcttatggttctggatcaagacgtgaacgatcaagagagagggaccatagtagatcacgagaaaagagtcgacgtcataaatcccgtagtagagaccgtcatgacgattattacagagagagaagcagagaacgagagaggcaccgggatcgtgaccgagaccgtgaccgagagcgtgaccgagagcgcgaatatcgtcatcgttagaagctgaaggaagaggatcaccttccaagacaaaacagtcttcatgggggaaaaatgacgcttgtccagcagtttgcttcttgtgattgaactgaacctgtaaggattcatggataaaatgaacaggaatagatctgaataaagcaaatctgcataaatggtaaccagtagctctacttttattttttatgttgcttaactgttttatttgaaggaaacctgtgtgatttaaaaagttatagcttttgcaactttattactggttatatacatttggccattatgatgtgcaagcaattggaaaaaaagtcaagtaaatgcttgtttttgtagtagtttgttcttgttaaaaatgtttatatgataatgtctgtaaacagcatcactttgattacaatagatgtagtgttgtaataaactgtttaatgggg

SEQ ID NO: 6219 - DNA, 6616 bp, Homo sapiens
  source 1..6616: mol_type = unassigned DNA
ctcggaagtgacgcaagcgcccccccaccgccgctagatccgctgctgctgccgcggcgggcagacctgcaggaggcggcggcggcggcggcggccgaggctgaaggaagatggcggacggcgtggaccacatagacatttacgcggatgtcggcgaagagttcaaccaggaagctgaatatggtgggcatgatcagatagatttgtatgacgatgtcatatctccatctgcaaataatggagatgccccagaagaccgagattacatggatactctcccaccaactgttggtgatgatgtgggtaaaggagcagcaccaaatgttgtctatacatatactggaaagagaattgcattatatattggaaatctaacatggtggacaacagatgaagacttaactgaagcagttcattctttgggagtaaatgatattttggagataaaattttttgaaaatcgggcaaatggccagtcaaaggggtttgcccttgttggtgttggatctgaagcatcttcaaaaaagttaatggatctgttacctaaaagagaacttcatggtcagaatcctgttgtaactccatgcaataaacagttcctgagtcaatttgaaatgcagtccaggaaaactacacaatcaggacaaatgtctggggaaggtaaagctggtcctccaggaggcagttcccgtgcagcatttccacaaggtggtagaggacggggccgttttccaggggctgttcctggtggggacagatttcctgggccagcaggaccaggagggccacccccaccttttccagctggacagactccaccacgtccacccttaggtcctccaggcccacctggtccaccaggtcctccacctcctggtcaggttctgcctcctcctctagctgggcctcctaatcgaggagatcgccctccaccaccagttctttttcctggacaaccttttgggcagcctccattgggtccacttcctcctggccctccacctccagttccaggctacggcccccctcctggcccaccacctccacaacagggaccacctccacctccaggcccctttccacctcgtccacccggtccacttgggccaccccttacactagctcctcctccgcatcttcctggaccacctccaggtgccccaccgccagctccgcatgtgaacccagctttctttcctccaccaactaacagtggcatgcctacatcagatagccgaggtccaccaccaacagatccatatgggcgacctccaccatatgataggggtgactatggcccccctggaagggaaatggatactgcaagaacgccattgagtgaagctgaatttgaagaaatcatgaatagaaatagggcaatctcaagcagtgctatttcgagagctgtgtctgatgccagtgctggtgattatgggagtgctattgagacactggtaactgcaatttctttaattaaacaatccaaagtatctgctgatgatcgttgcaaagttcttattagttctttgcaagattgccttcatggaattgagtccaagtcttatggttctggatcaagacgtgaacgatcaagagagagggaccatagtagatcacgagaaaagagtcgacgtcataaatcccgtagtagagaccgtcatgacgattattacagagagagaagcagagaacgagagaggcaccgggatcgtgaccgagaccgtgaccgagagcgtgaccgagagcgcgaatatcgtcatcgttagaagctgaaggaagaggatcaccttccaagacaaaacagtcttcatgggggaaaaatgacgcttgtccagcagtttgcttcttgtgattgaactgaacctgtaaggattcatggataaaatgaacaggaatagatctgaataaagcaaatctgcataaatggtaaccagtagctctacttttattttttatgttgcttaactgttttatttgaaggaaacctgtgtgatttaaaaagttatagcttttgcaactttattactggttatatacatttggccattatgatgtgcaagcaattggaaaaaaagtcaagtaaatgcttgtttttgtagtagtttgttcttgttaaaaatgtttatatgataatgtctgtaaacagcatcactttgattacaatagatgtagtgttgtaataaactgtttaatggggctgatgtgtaaagctgttcaagttatttgatgtttacacctcagggaaagtcttgtgttcagcaatatctaaagataatgttactatgacaacatttttactgtcctttaaagcattgcaatagcgtttttggatatgcctcaatctaatcttgcgttcagtgaattaaacatagtaattaagtgtcttttgcccttgattttgatattagaataggtgattacatggatatttaatatttctatattctgcttttctagctgtttttacctagttagcttgtgactttgctgaatggtatgtaaacttgtaaaaatagagatttgacagacatagcaatctagtcaatgtgtaaggggtcaaaaaaacagaggttttaacacataagtaaaaacccgtacatatttgatgtgtaatgcaggttaattacaacacagatgtaccgaaacacttaattgtgaaccgctaacattgaagaaattttgacaattccgatttgatgctgcaattacttgctgtttttattgatcttatggtttatttcttaagccatagtcagtgtaaatacagccctgcagcaggtaaatgtgagtaaagagagccttatattttccaattggtataaatttttgaaggatgtgatgttcattaacattcggttgtattccccagtatttgtaatgggaaattacagataaaccgtgtctgcacagtttaaggaatactatgtatattcatgcaccgtattgattcatgctatagttacttaatcaaagatttttttcaaacctgccttacatataggcccactttaaaagcacctgactagcatgtgttcttgattgcaaaattggcagaggcagggtgtcaacttgattaggtgtttttatgggaatgtaatttgaaatcactacttcagaaatttgacttaaaattcttgagcacgttaatatgtttttaagatctgattatctttgagagatcttctgttaatacacattggttgttaaagagtacccaaattctaggacaatgcttaaagtgttaaaataccctagatactgtgttatgtgcaactgtagaaaccctccagaaatttccactgctgttcttcactttcatcttgtctgctatcaaaccacttctgacaaaattagctgttttgaattacccatatcactgccagttttattttaaaatattttgtgtttgaagtatctgtgcatgggatcgttgatgtttatcagaactgttcactttcagaaatgattttttaaagcattttgttgaaaatgcggttgcttttttaacattattttagagttgtatcaaaattttcctgttttctgtatattgttgtgtcatttcttggctttttaatattttgactacaatgccctaatgcgaagaagtatggacatataaatattacaagagaaattagttaatagtaaagggttaaaaggtaagtaaaatgtccatgaaaataaaattttctttgaacagtttaaaaatggaatcacaaaaatctaactgcacttgaaatgaaactggaaattttatactaattaaatcctttatttaccttttcatattttatcaatggaaccttttaattgctccttctatatcactcttctccttgcttggctgatctcattacatgactttcgttacagacagtgtgagtgtactagatttgtttgctgctaatccgttattttaagtgttgtcagaaggaaataacttcttggtttgaccaagtaattttgcaaagtccttctctacctgataacacgtgaatgtatagcagtaaaggtgaaaattgcaggccttgttttgttcttcatacccccttcagttgtttatgggttaatgttatttgaaaactcttcctttttttaatgtgtaaaaacaatccaaagagataaatccttgcatagacaccaaaaacagtgtctcagagaccttttcattttttccttagttaataactgtagtggatgtgaaaacaaacgagttgaattttaaaacatagcatttattagtgctatacagtcacattcctttcagccagtagtaaagttaaacagatgagtgatacagtacctgaatggtactgcttctgaggcaacactttggattgaaagtgctgcttttggttaaaggaactatgttgtggaaagcatattccagtgtaaatttgcagatgtgtgttttttttttttgtcacttttcataaggtttggagtaagttgcagtggcttttgatcatagtttagcccatttaatggtccttttacctagaatgttcttaagcagttaatgacaatttggaatacacagataacttgtagcttaagatactattttcatttaattctcctgtggagaatattgctttattttttactagtttcaggtcagttattaaaataaacatggaggttttaatgaatgttgtataatattttatagtgaaggaaaattgtggaaagggcaaagactttctctttcccttatgtatttaactgtgccaatctaaatacatactgttttatacaatgagatgcattacaagacttttctgttggagtgctctcgacattttggttttcatacctgaatgatcattgcattttctgtattttctaaaatggctccaattttgtgttttaagcttcagcttaagaggaagtttatgttctaattcttgactgagaatacagtattgagattctctgttttacagataacaactggtttttattactcattaagttcatttgcatcccgtagccctctgtaaatgtttcccctagttgtatgtacgtaaatgcacgcttatccagtgtatattagacatttttgtgctaaaatatattaagtgggatttttgtagcaaagcattctatttttctgttcttacagtgtgtgtgtgtgtgtgtgtgtgtgtgtatgcgtttttttaaccttaacttcagtttaaacactggtgtatttatttttttaagcaacttgactcttagaagccttagactgattttttcaataaatattcaaccaaaaattataaatttattaagatgtggccttacatatggcattccttgtgttcgtaatgtgagatttttgatttagataaatcaagattcaggattaaagtttcattgtaagttgaaatagaaaatgtattaaaatgtctaggcttctgggaggaagttcttatactcttctttcttggcattagaaagaagcaatatgaatttttgtgaatattctaaatattcaggcaacactgttcagattgatttaggtttgtcttaaccaatgttctttttttagaatttcaggttgtggcattcactgagtatgcagctactatggtttttgtatgggacgtataaatacttgattatatacgacagattttaatgtctttaaagacttcctgctgtattaacatattgtaatggagtcttttaaatactaggttgaatttaattgaagtcacacacatcttgaagtggtaactgcatagtaaatactaccaagagtttttttcacgtgggagtatcctaaaactctgccatgggtgtaaatgttttacattaatttcataattggacagaccctgcatttagcgaaaacattttgttttgaaagtgtgttctttttgtcgcactgttactgcgtaacacttctcaacattctgtaagttaaattattttaaaataactatggtgaattcatgtttatttttttactttgaaaattgtagtactcaggtggtatttaatgggaaaggatcctttgggtataaatcataatgtattttaaggaatgcatctataacattgataactttagccttaaaaaaaaggtctattattccttcctctgcatcccatggtatattagcaaagtagtttacagccctgtacagccttacaaagttgttttacaatttttaatggaaagcccttaacaacaacaacaaaaaattgtatcattttaccaatatccacgaattactgatcacagtttgtaaataatttgtttaatatcagaaggccaaagaaagtcttaaaattttagctattgactctatggtgacttcacaataagatttctgtgcaaaaaggtaaggtgataattgatctaatagacttttttttttttttttttgctgtccatgagaattagacttcatattagcttcaattaaaaagctcattccattttattaaaatgtttgtaattgcaattttgtgtttaatgtttactttgtctttcctttctttagcatttaggtgactgttcggcagtttgatatatggccattgtcggccttaaactgcactagtaacaagcatggtatttatcttgtattgaaaataaaacaaacttttgataaga

SEQ ID NO: 6220 - DNA, 1915 bp, Homo sapiens
  source 1..1915: mol_type = unassigned DNA
gacctgcaggaggcggcggcggcggcggcggccgaggctgaaggaagatggcggacggcgtggaccacatagacatttacgcggatgtcggcgaagagttcaaccaggaagctgaatatggtgggcatgatcagatagatttgtatgacgatgtcatatctccatctgcaaataatggagatgccccagaagaccgagattacatggatactctcccaccaactgttggtgatgatgtgggtaaaggagcagcaccaaatgttgtctatacatatactggaaagagaattgcattatatattggaaatctaacatggtggacaacagatgaagacttaactgaagcagttcattctttgggagtaaatgatattttggagataaaattttttgaaaatcgggcaaatggccagtcaaaggggtttgcccttgttggtgttggatctgaagcatcttcaaaaaagttaatggatctgttacctaaaagagaacttcatggtcagaatcctgttgtaactccatgcaataaacagttcctgagtcaatttgaaatgcagtccaggaaaactacacaatcaggacaaatgtctggggaaggtaaagctggtcctccaggagctgggcctcctaatcgaggagatcgccctccaccaccagttctttttcctggacaaccttttgggcagcctccattgggtccacttcctcctggccctccacctccagttccaggctacggcccccctcctggcccaccacctccacaacagggaccacctccacctccaggcccctttccacctcgtccacccggtccacttgggccaccccttacactagctcctcctccgcatcttcctggaccacctccaggtgccccaccgccagctccgcatgtgaacccagctttctttcctccaccaactaacagtggcatgcctacatcagatagccgaggtccaccaccaacagatccatatgggcgacctccaccatatgataggggtgactatggcccccctggaagggaaatggatactgcaagaacgccattgagtgaagctgaatttgaagaaatcatgaatagaaatagggcaatctcaagcagtgctatttcgagagctgtgtctgatgccagtgctggtgattatgggagtgctattgagacactggtaactgcaatttctttaattaaacaatccaaagtatctgctgatgatcgttgcaaagttcttattagttctttgcaagattgccttcatggaattgagtccaagtcttatggttctggatcaagacgtgaacgatcaagagagagggaccatagtagatcacgagaaaagagtcgacgtcataaatcccgtagtagagaccgtcatgacgattattacagagagagaagcagagaacgagagaggcaccgggatcgtgaccgagaccgtgaccgagagcgtgaccgagagcgcgaatatcgtcatcgttagaagctgaaggaagaggatcaccttccaagacaaaacagtcttcatgggggaaaaatgacgcttgtccagcagtttgcttcttgtgattgaactgaacctgtaaggattcatggataaaatgaacaggaatagatctgaataaagcaaatctgcataaatggtaaccagtagctctacttttattttttatgttgcttaactgttttatttgaaggaaacctgtgtgatttaaaaagttatagcttttgcaactttattactggttatatacatttggccattatgatgtgcaagcaattggaaaaaaagtcaagtaaatgcttgtttttgtagtagtttgttcttgttaaaaatgtttatatgataatgtctgtaaacagcatcactttgattacaatagatgtagtgttgtaataaactgtttaatgggg

SEQ ID NO: 6221 - DNA, 4109 bp, Homo sapiens
  source 1..4109: mol_type = unassigned DNA
agacgcctcgaagaatccgctatcggctgtctgcacaaccggaatcatgtcgagtttggcggtgagagacccggcaatggatcgatcactgcgttccgtgttcgtggggaacattccatatgaggcaactgaggagcagttaaaggacattttctcggaggttggttctgttgtcagtttccggctggtatacgatagagagacgggaaaacccaagggctatggcttctgcgaataccaagaccaggagaccgcgcttagtgccatgcggaacctcaatgggcgggagttcagtgggagagcgcttcgggtggacaatgctgccagtgaaaagaataaggaggagttaaagagccttgggcctgcagcgcccattattgactcaccctatggggatcccatcgatccagaagatgcccctgaatcgattaccagagcagtagccagtctccccccggagcagatgtttgagctgatgaagcagatgaagctctgtgtccaaaacagccaccaggaagctcgaaacatgttacttcaaaatccacaactggcttatgcactgttgcaggcacaagtagtgatgagaatcatggatccagagattgctctgaaaattctgcatcggaagatacatgtcacaccactgatcccaggcaaatctcagtctgtgtctgtctctggccctggccctggccctggccctgggctctgcccaggacctaatgttctgctgaaccagcagaatcctccagctcctcagcctcagcatttggctagaagacctgtgaaggacattcctcctctgatgcagactcctatccagggtggaattccagctccagggccaataccagctgcagttcccggagctggtcctggttccttaactcctggaggagcaatgcagccccaacttggaatgccaggggttggcccagtgcctttagagcggggacaagtgcagatgtcagatcctagagctcctatacctcgcggacccgtgactcctggtggtctgcctcctcgaggactgttaggagatgctccaaatgacccacgtggagggactttgctttcagtcactggagaagtggagcccagaggttatctgggtccaccccatcagggtccccccatgcatcatgcctctggtcatgacactcgtggcccttcctcacatgagatgaggggagggccattaggagatcccagactgctaattggagagcccagaggccccatgatagatcaaaggggtctacctatggatggtagaggtggtagagattctcgagcgatggagactcgtgccatggaaactgaggtcttagagacacgtgtaatggagaggagaggaatggagacctgtgcgatggaaaccagagggatggaagcaaggggcatggatgcaagaggattggagatgaggggccctgtccccagttcaagaggccctatgactggtggaattcagggtcctggtcccattaatataggggcaggtggccctcctcagggacccagacaggtcccaggcatttcaggggtggggaatcctggagctggtatgcagggtacaggcatacaaggaacaggcatgcagggagcaggcatacaaggaggagggatgcagggggcaggcatacaaggagtcagtatacaaggaggaggtatacaaggaggaggtatacagggggcaagcaagcaaggtggaagccagcctagcagttttagtcctgggcagagccaggtcactccacaggatcaggagaaggcagctttgatcatgcaggttcttcaactgactgcagatcagattgccatgctgccccctgagcaaaggcagagtatcctgattttaaaggaacaaatccagaaatccactggagcgtcttgaaaggttttagaaaatatttggctgtagtctcaaattttattctgtagcatggagaatgggtgcaaaaagctgacttctgtatccccacacttggattagggtttccctcctcctagaacctaatcttattttttgttctttttctttctttctgttttccttttttttttaattgagggtggggggaggagggagtgcgtctgttcactttaagttactttaaaataactctgaacatgattatattatgccaaataagattacaaagaataagcagcaatattgaagcatctacagtatgttaactacattttttaaatgtcgagtaaaacttcgtgaaaactgctcataaagactaaaagttgacctgttaaaacgttaatgtactaagatagttttaagatttttggttgtataacaaaataaaagtttacccaaaagtataagatacattttttggtaaaccatttaaaatacaaaatcctattttggaggcaataggataagcattgtcttagtgttttagaattatttttgaaacagagttaacaggataaggttacacttgtattagaattgtttttttctaaagttatgttacctgaaaaatcaaggagtgcacctgatttactgttgcttcatttatcccatccttcagagaccagcaaggttctgccaggccccaagcatctgagcatgatgattttgctgtgacaattctaagatcaaccaggttacttaagtccgctctgatgaaacccagtctctcaataccttcctatttctcaatagtctttaagccctaaatctgagtcagtaattctctaaaaatccttcccaaaaatcagtgtctagggactggttgatctagatgagttataaatggtatttgacttttcataagtagtggaaggtttcactaagtaaagatctgagtttcttggtatctgacgtttgtatacagatggtgtccatttgctcaaccagacaggagttaacttgtattagaattgttttttctaaagttatgttacctgagaaattaaggactgcacctggtttaatgttgcttcacttatcccaccctacagagaccagcaaggttctgccaggcctcgagcatccaagcatgattttgctgtgacaaatctaaaatcaaccaggctacttaagtctgctctgatgaaacccaataatctctcaataccttcctatttctcaatagtctttaaaccctaaatctgagtcagtaattctcttacatccttcccaaaaatcagtgtctagggactagttgatctggatgagttatacatgatatttgacttttcataagtagtggaaggtttcactaagtaaaactctcagtttcttggtatctggctttcttatacagatggtgtccatttgctccaccagacaggagttaaaaacctttaaagagcatttaacatgccttttagttttcttatttcataatctacttttctatcattaatcatcttaccaggaataatcaaggcccaggtaggtagaagtttttatatagcctgaatactcacttgacttactgctcattttactttttgcatggaatacagccatttagtcctaatatacataccaatgagacaattaaaaattggttggaagatggagcttatcacattgtgctactacgactttattttttcttgaaaataaagccttgaggatgtgaacataaatgttggtatcataaaacaagtagtaataaaagcataaattatcaaatatcaggtgatcttactatggagaagaaaaaccaatatctagttacagatgaaaaaatgtttaatacaaagagctgaaaatgtagaaattgagttatcttccctttgcaaaatttttacactttaaattagtaattctttgtttgcaaggttttcatccctatgctgttgttttctactacctgttttactcttgttcatactgctactttcccatgtttcctatatgcctcccctatattggagaggataactcgcgtttacatatgtgatagttatgcttaatactaattcacagagttggctcgatcattttgagattctagttgctttatctcaaagctttcactgaagggctgtaactgaaaattattaaatgttagtctttagtcaaatctctgcattgtttcatgcagaaaataaagatacaattaaggctg

SEQ ID NO: 6222 - DNA, 3580 bp, Homo sapiens
  source 1..3580: mol_type = unassigned DNA
tttctagtaaccggcgccgttcccggccggggcagggaacggtgcgcctgcagagccagatttcggcccaaggggcgcgggagtctcttcgggcgtccgggatcccctggcgcggctccgtgctgcctaacggggcaagtcgcatgcgcaccgagccgcgctggggaaagggagagtgaggggaggggcgagcgcagagcctccgccggccgtctgagcccgcggggtcgctgacgacgcatgcgccgggagggggcgcaatcacggactcggcttgcggctgccggtttaaaaaaggaaaccccggagagcgagagcgcgaaggaaatctggccgccgccgccgcgagcgctcccgaatttttacttgttcctgcaaagctgctggagctcagaagctgattctatcacattgtaagatgcctttggataattctacagtcctcttaaatgaatctttagaacttggcaagtctcactagataccttcaatcatcattttgagctcaaagaattctgagacttatggttggtcatatagaagagtaccttgaacctatagtttcctgaagaatcagtttaaaagatccaaggagtacaaaaggagaagtacaaatgtctactacaagacgaaaacgtagtatgttatgttgtttaccgtaagctgtagtaaaatgagctcgattgttgacagagatgacagtagtatttttgatgggttggtggaagaagatgacaaggacaaagcgaaaagagtatctagaaacaaatctgaaaagaaacgtagagatcaatttaatgttctcattaaagaactgggatccatgcttcctggtaatgctagaaagatggacaaatctactgttctgcagaaaagcattgattttttacgaaaacataaagaaatcactgcacagtcagatgctagtgaaattcgacaggactggaaacctacattccttagtaatgaagagtttacacaattaatgttagaggctcttgatggtttttttttagcaatcatgacagatggaagcataatatatgtgtctgagagtgtaacttcattacttgaacatttaccatctgatcttgtggatcaaagtatatttaattttatcccagaaggggaacattcagaggtttataaaatactctctactcatctgctggaaagtgattcattaaccccagaatatttaaaatcaaaaaatcagttagaattctgttgtcacatgctgcgaggaacaatagacccaaaggagccatctacctatgaatatgtaaaatttataggaaatttcaaatctttaaacagtgtatcctcttcagcacacaatggttttgaaggaactatacaacgcacacataggccatcttatgaagatagagtttgttttgtagctactgtcaggttagctacacctcagttcatcaaggaaatgtgcactgttgaagaacccaatgaagagtttacatctagacatagtttagaatggaagtttctgtttctagatcacagggcaccacccataatagggtatttgccatttgaagttctgggaacatcaggctatgattactatcatgtggatgacctagaaaatttggcaaaatgtcatgagcacttaatgcaatatgggaaaggcaaatcatgttattataggttcctgactaaggggcaacagtggatttggcttcagactcattattatatcacttaccatcagtggaattcaaggccagagtttattgtttgtactcacactgtagtaagttatgcagaagttagggctgaaagacgacgagaacttggcattgaagagtctcttcctgagacagctgctgacaaaagccaagattctgggtcagataatcgtataaacacagtcagtctcaaggaagcattggaaaggtttgatcacagcccaaccccttctgcctcttctcggagttcaagaaaatcatctcacacggccgtctcagacccttcctcaacaccaaccaagatcccgacggatacgagcactccacccaggcagcatttaccagctcatgagaagatggtgcaaagaaggtcatcatttagtagtcagtccataaattcccagtctgttggttcatcattaacacagccagtgatgtctcaagctacaaatttaccaattccacaaggcatgtcccagtttcagttttcagctcaattaggagccatgcaacatctgaaagaccaattggaacaacggacacgcatgatagaagcaaatattcatcggcaacaagaagaactaagaaaaattcaagaacaacttcagatggtccatggtcaggggctgcagatgtttttgcaacaatcaaatcctgggttgaattttggttccgttcaactttcttctggaaattcatctaatatccagcaacttgcacctataaatatgcaaggccaagttgttcctactaaccagattcaaagtggaatgaatactggacacattggcacaactcagcacatgatacaacaacagactttacagagtacatcaactcagagtcaacaaaatgtactgagtgggcacagtcagcaaacatctctacccagtcagacacagagcactcttacagccccactgtataacactatggtgatttctcagcctgcagccggaagcatggtccagattccatctagtatgccacaaaacagcacccagagtgctgcagtaactacattcactcaggacaggcagataagattttctcaaggtcaacaacttgtgaccaaattagtgactgctcctgtagcttgtggggcagtcatggtacctagtactatgcttatgggccaggtggtgactgcatatcctacttttgctacacaacagcaacagtcacagacattgtcagtaacgcagcagcagcagcagcagagctcccaggagcagcagctcacttcagttcagcaaccatctcaggctcagctgacccagccaccgcaacaatttttacagacttctaggttgctccatgggaatccctcaactcaactcattctctctgctgcatttcctctacaacagagcaccttccctcagtcacatcaccagcaacatcagtctcagcaacagcagcaactcagccggcacaggactgacagcttgcccgacccttccaaggttcaaccacagtagcacacgtgcttcctctcttgacatcaagggaggaaggggatggcccattaagagttactcagatgacctgaggaaaggagggaaagttccagcagtttcatgagatgcagtattgagtgttctagttcctggaattagttggcagagaaaatgctgcctagtgctacagatgtacattaaataccagccagcaggaggtgatcataggggcatagccagttctgacagtgttttaggtgcctggatattttttgatggaaaaagaatatattgccaaatattaagaagctcagctatgaaatgacctccagggaatcagaaaggcactaatgatgttagtaacttttagtggttctgtgcctcttatcaagtgttacagaggacataccactg

SEQ ID NO: 6223 - DNA, 1392 bp, Homo sapiens
  source 1..1392: mol_type = unassigned DNA
ttgtttccggcgtgggtccgggcaagaaccgcttgtagtttggtttaaattctgcacgggaggaccttctgagtttacctgttgggctcctggctgcgcagctacacagaagagatgggagaagaggctaatgatgacaagaagccaaccactaaatttgaactagagcgagaaacagaacttcgctttgaggtggaggcatctcagtcagttcagttggagttgttgactggcatggcagagatctttggcacagagctgacccgaaacaagaaattcacctttgatgctggtgccaaggtggctgttttcacttggcatggctgttctgtgcaactgagcggccgcactgaggtggcttatgtctccaaggacactcctatgttgctttacctcaacactcacacagccttggaacagatgcggaggcaagcggaaaaggaagaagagcgaggtccccgagtgatggtagtgggccccactgatgtgggcaagtctacagtgtgtcgccttctgctcaactacgcagtgcgtttgggccgccgtcccacttatgtggagctggatgtgggccagggttctgtgtccatccctggtaccatgggggccctctacatcgagcggcctgcagatgtcgaagagggtttctctatccaggcccctctggtgtatcattttggttccaccactcctggcactaacatcaagctttataataagattacatctcgtttagcagatgtgttcaaccaaaggtgtgaggtgaaccgaagggcatctgtgagtggctgtgtcattaacacctgtggctgggtcaagggctctggttaccaggctctggtgcatgcagcctcagcttttgaggtggatgtcgttgttgttctggatcaagaacgactgtacaatgaactgaaacgggacctcccccactttgtacgcactgtgctgctccctaaatctgggggtgtggtggagcgctccaaggacttccggcgggaatgtagggatgagcgtatccgtgagtatttttatggattccgaggctgtttctatccccatgccttcaatgtcaaattttcagatgtgaaaatctacaaagttggggcacccaccatcccagactcctgtttacctttgggcatgtctcaagaggataatcagctcaagctagtacctgtcactcctgggcgagatatggtgcaccacctactgagtgttagcactgccgagggtacagaggagaacctgtccgagacaagtgtagctggcttcattgtggtgaccagtgtggacctggagcatcaggtgtttactgttctgtctccagcccctcgcccactgcctaagaacttccttctcatcatggatatccggttcatggatctgaagtag

SEQ ID NO: 6224 - DNA, 1778 bp, Homo sapiens
  source 1..1778: mol_type = unassigned DNA
aaggtagtaaaaagaggattatagacgtggtggaacctgttggctgcggggcaaatgactgacctgcacagcagctacacagaagagatgggagaagaggctaatgatgacaagaagccaaccactaaatttgaactagagcgagaaacagaacttcgctttgaggtggaggcatctcagtcagttcagttggagttgttgactggcatggcagagatctttggcacagagctgacccgaaacaagaaattcacctttgatgctggtgccaaggtggctgttttcacttggcatggctgttctgtgcaactgagcggccgcactgaggtggcttatgtctccaaggacactcctatgttgctttacctcaacactcacacagccttggaacagatgcggaggcaagcggaaaaggaagaagagcgaggtccccgagtgatggtagtgggccccactgatgtgggcaagtctacagtgtgtcgccttctgctcaactacgcagtgcgtttgggccgccgtcccacttatgtggagctggatgtgggccagggttctgtgtccatccctggtaccatgggggccctctacatcgagcggcctgcagatgtcgaagagggtttctctatccaggcccctctggtgtatcattttggttccaccactcctggcactaacatcaagctttataataagattacatctcgtttagcagatgtgttcaaccaaaggtgtgaggtgaaccgaagggcatctgtgagtggctgtgtcattaacacctgtggctgggtcaagggctctggttaccaggctctggtgcatgcagcctcagcttttgaggtggatgtcgttgttgttctggatcaagaacgactgtacaatgaactgaaacgggacctcccccactttgtacgcactgtgctgctccctaaatctgggggtgtggtggagcgctccaaggacttccggcgggaatgtagggatgagcgtatccgtgagtatttttatggattccgaggctgtttctatccccatgccttcaatgtcaaattttcagatgtgaaaatctacaaagttggggcacccaccatcccagactcctgtttacctttgggcatgtctcaagaggataatcagctcaagctagtacctgtcactcctgggcgagatatggtgcaccacctactgagtgttagcactgccgagggtacagaggagaacctgtccgagacaagtgtagctggcttcattgtggtgaccagtgtggacctggagcatcaggtgtttactgttctgtctccagcccctcgcccactgcctaagaacttccttctcatcatggatatccggttcatggatctgaagtagagatcagcaggaagccttgctgcctgggacatagagatcatctggccacccctagaggcagatgggctgagataaaagactgttggggccacctgaccagtaaactgtggactagtagaaagttcatattctacctctaaaaacaggtagtggtaacctgactcttctaatcttgaaccaaaaggaaaaccatgagactgtaattggtttcttagaccacctaagatgccactttgaattctctaagaccctggagaattgcatttctttcactgtgctactatgtggtttttaaaaaatcaatgctttatattccatatgtggttcttacccatttatctaggatgaaagtgtgaattagagggactccttccaataaagttcaaacttaaaaaaaatcattttaataaata

SEQ ID NO: 6225 - DNA, 566 bp, Homo sapiens
  source 1..566: mol_type = unassigned DNA
attcccagtcaagccaaggaaaggctgcacagaaggccagagaatcacaaaggggagtaggggtcattttttcacccatctcggatcacagggagaagcaagttgggcaaatgactggagaaaaaacaaaggcaagccgagtgctggggagagatgttcccctgaagtgagacggggctggaccgtaggagaaaggggagagggagggctggcgggggcaactgacagctgacagcagaggcgccgaggcggaggctggaggaaccaggcacagcagctacacagaagagatgggagaagaggctaatgatgacaagaagccaaccactaaatttgaactagagcgagaaacagaacttcgctttgaggtggaggcatctcagtcagttcagttggagttgttgactggcatggcagagatctttggcacagagctgacccgaaacaagaaattcacctttgatgctggtgccaaggtggctgttttcacttggcatggctgttctgtgcaactgagcggccgcactgaggtggcttatgtctccaaggacactcctatgttgctt

SEQ ID NO: 6226 - DNA, 2435 bp, Homo sapiens
  source 1..2435: mol_type = unassigned DNA
atgactgacttgtagctggaagaaatcatcggatttttattcttttattaaagaaaaaaaatttgaaatgccttccatgtgccaagcactgtgtcaggtgggagatgacagcttggtgaaacctctgtcaggctgtcttcctccgctttctctatccctgggtttccccctgcctaaaaaggattttgtgcttcgtggcttgtccaggcaagcaggccgtcgcgggacctagaccgagacagtgagtctctctttctcccgggcctcccttctgtttcctgggctgcaggggagcaggaaatctggggcgagattcccgccgcggacgcgcactgccgaagcctggtccctcgacctgtccctgcccagcgcgggggcgcaaccgccacgcctcctcacccctccctccggctgcacgaataatgacaacagccgcccctcccacctttggcgtcacgttcaaaacaatcctttgactacaactcccagaaggccgagcggcttagcgagtgcacccgctctcggctgctccggcaaactacacatcccaaagggcagcgcgcgaccgcgtgtcctttcacagcgcaagtgcggaactgcgtttgtttccggcgtgggtccgggcaagaaccgcttgtagtttggtttaaattctgcacgggaggaccttctgagtttacctgttgggctcctggctgcgcaggcacagcagctacacagaagagatgggagaagaggctaatgatgacaagaagccaaccactaaatttgaactagagcgagaaacagaacttcgctttgaggtggaggcatctcagtcagttcagttggagttgttgactggcatggcagagatctttggcacagagctgacccgaaacaagaaattcacctttgatgctggtgccaaggtggctgttttcacttggcatggctgttctgtgcaactgagcggccgcactgaggtggcttatgtctccaaggacactcctatgttgctttacctcaacactcacacagccttggaacagatgcggaggcaagcggaaaaggaagaagagcgaggtccccgagtgatggtagtgggccccactgatgtgggcaagtctacagtgtgtcgccttctgctcaactacgcagtgcgtttgggccgccgtcccacttatgtggagctggatgtgggccagggttctgtgtccatccctggtaccatgggggccctctacatcgagcggcctgcagatgtcgaagagggtttctctatccaggcccctctggtgtatcattttggttccaccactcctggcactaacatcaagctttataataagattacatctcgtttagcagatgtgttcaaccaaaggtgtgaggtgaaccgaagggcatctgtgagtggctgtgtcattaacacctgtggctgggtcaagggctctggttaccaggctctggtgcatgcagcctcagcttttgaggtggatgtcgttgttgttctggatcaagaacgactgtacaatgaactgaaacgggacctcccccactttgtacgcactgtgctgctccctaaatctgggggtgtggtggagcgctccaaggacttccggcgggaatgtagggatgagcgtatccgtgagtatttttatggattccgaggctgtttctatccccatgccttcaatgtcaaattttcagatgtgaaaatctacaaagttggggcacccaccatcccagactcctgtttacctttgggcatgtctcaagaggataatcagctcaagctagtacctgtcactcctgggcgagatatggtgcaccacctactgagtgttagcactgccgagggtacagaggagaacctgtccgagacaagtgtagctggcttcattgtggtgaccagtgtggacctggagcatcaggtgtttactgttctgtctccagcccctcgcccactgcctaagaacttccttctcatcatggatatccggttcatggatctgaagtagagatcagcaggaagccttgctgcctgggacatagagatcatctggccacccctagaggcagatgggctgagataaaagactgttggggccacctgaccagtaaactgtggactagtagaaagttcatattctacctctaaaaacaggtagtggtaacctgactcttctaatcttgaaccaaaaggaaaaccatgagactgtaattggtttcttagaccacctaagatgccactttgaattctctaagaccctggagaattgcatttctttcactgtgctactatgtggtttttaaaaaatcaatgctttatattccatatgtggttcttacccatttatctaggatgaaagtgtgaattagagggactccttccaataaagttcaaacttaaaaaaaatcattttaataaatatttttgccatatcatagaa

SEQ ID NO: 6227 - DNA, 553 bp, Homo sapiens
  source 1..553: mol_type = unassigned DNA
aactgcgtttgtttccggcgtgggtccgggcaagaaccgcttgtagtttggtttaaattctgcacgggaggaccttctgagtttacctgttgggctcctggctgcgcagatctgatatttaatttgtgttctaggcacagcagctacacagaagagatgggagaagaggctaatgatgacaagaagccaaccactaaatttgaactagagcgagaaacagaacttcgctttgaggtggaggcatctcagtcagttcagttggagttgttgactggcatggcagagatctttggcacagagctgacccgaaacaagaaattcacctttgatgctggtgccaaggtggctgttttcacttggcatggctgttctgtgcaactgagcggccgcactgaggtggcttatgtctccaaggacactcctatgttgctttacctcaacactcacacagccttggaacagatgcggaggcaagcggaaaaggaagaagagcgaggtccccgagtgatggtagtgggccccactgatgtgggcaagtctacagtgtgtcgcc

SEQ ID NO: 6228 - DNA, 1151 bp, Homo sapiens
  source 1..1151: mol_type = unassigned DNA
ccttaatggcgcccgcccagactcctggaagtgagcggcctagcgagcgagctcccaggcgcaaagcacgccggaagctgtagttccgccatcggacggaagccgaccggggcgtgcggagggatgtggcccggaatattggtagggggggcccgggtggcgtcatgcaggtaccccgcgctggggcctcgcctcgccgctcactttccagcgcagcggccgccgcagcggacactccagaacggcctggccctgcagcggtgcctgcacgcgacggcgacccgggctctcccgctcattcccatcgtggtggagcagacgggtcgcggcgagcgcgcctatgacatctactcgcggctgctgcgggagcgcatcgtgtgcgtcatgggcccgatcgatgacagcgttgccagccttgttatcgcacagctcctcttcctgcaatccgagagcaacaagaagcccatccacatgtacatcaacagccctggtggtgtggtgaccgcgggcctggccatctacgacacgatgcagtacatcctcaacccgatctgcacctggtgcgtgggccaggccgccagcatgggctccctgcttctcgccgccggcaccccaggcatgcgccactcgctccccaactcccgtatcatgatccaccagccctcaggaggcgcccggggccaagccacagacattgccatccaggcagaggagatcatgaagctcaagaagcagctctataacatctacgccaagcacaccaaacagagcctgcaggtgatcgagtccgccatggagagggaccgctacatgagccccatggaggcccaggagtttggcatcttagacaaggttctggtccaccctccccaggacggtgaggatgagcccacgctggtgcagaaggagcctgtagaagcagcgccggcagcagaacctgtcccagctagcacctgagagctgggcctcctctccagaatcatgtggaggggccagaggcctgccagacccccagctgggccctgctcaccccttgttgctgggcttggaggggcctcttgaggaacttttaatttgcaggggtgcccgctatggacggggcattccagctgagacactgtgattttaaattaaatctttgtggtctttgc

SEQ ID NO: 6229 - DNA, 2500 bp, Homo sapiens
  source 1..2500: mol_type = unassigned DNA
acttccggcaggcggcggggcccggaagcggcgcgcggggccggcgaatcccgcggcgccaggtgggagcggggccggagcatgcggggcggccggcggtctgcggcgcgcggcgcattcgttcccccgcggcggtggcggtggcgcgcggcggctctccagtgagcggcggagcccggagcggcgggctgggcgccgggcgggcggggctcgcggctgagaggcgggcgggccgggggcgccgggcgcggggccgccatgtggagcggccgcagctccttcaccagcttggtggtgggcgtgttcgtggtctacgtggtgcacacctgctgggtcatgtacggcatcgtctacacccgcccgtgctccggcgacgccaactgcatccagccctacctggcgcggcggcccaagctgcagctgagcgtgtacaccacgacgaggtcccacctgggtgctgagaacaacatcgacctggtcttgaatgtggaagactttgatgtggagtccaaatttgaaaggacagttaatgtttctgtaccaaagaaaacgagaaacaatgggacgctgtatgcctacatcttcctccatcacgctggggtcctgccgtggcacgacgggaagcaggtgcacctggtcagtcctctgaccacctacatggtccccaagccagaagaaatcaacctgctcaccggggagtctgatacacagcagatcgaggcggagaagaagccgacgagtgccctggatgagccagtgtcccactggcgaccgcggctggcgctgaacgtgatggcggacaactttgtctttgacgggtcctccctgcctgccgatgtgcatcggtacatgaagatgatccagctggggaaaaccgtgcattacctgcccatcctgttcatcgaccagctcagcaaccgcgtgaaggacctgatggtcataaaccgctccaccaccgagctgcccctcaccgtgtcctacgacaaggtctcactggggcggctgcgcttctggatccacatgcaggacgccgtgtactccctgcagcagttcgggttttcagagaaagatgctgatgaggtgaaaggaatttttgtagataccaacttatacttcctggcgctgaccttctttgtcgcagcgttccatcttctctttgatttcctggcctttaaaaatgacatcagtttctggaagaagaagaagagcatgatcggcatgtccaccaaggcagtgctctggcgctgcttcagcaccgtggtcatctttctgttcctgctggacgagcagacgagcctgctggtgctggtcccggcgggtgttggagccgccattgagctgtggaaagtgaagaaggcattgaagatgactattttttggagaggcctgatgcccgaatttcagtttggcacttacagcgaatctgagaggaaaaccgaggagtacgatactcaggccatgaagtacttgtcatacctgctgtaccctctctgtgtcgggggtgctgtctattcactcctgaatatcaaatataagagctggtactcctggttaatcaacagcttcgtcaacggggtctatgcctttggtttcctcttcatgctgccccagctctttgtgaactacaagttgaagtcagtggcacatctgccctggaaggccttcacctacaaggctttcaacaccttcattgatgacgtctttgccttcatcatcaccatgcccacgtctcaccggctggcctgcttccgggacgacgtggtgtttctggtctacctgtaccagcggtggctttatcctgtggataaacgcagagtgaacgagtttggggagtcctacgaggagaaggccacgcgggcgccccacacggactgaaggccgcccgggctgccgccagccaagtgcaacttgaattgtcaatgagtatttttggaagcatttggaggaattcctagacattgcgttttctgtgttgccaaaatcccttcggacatttctcagacatctcccaagttcccatcacgtcagatttggagctggtagcgcttacgatgcccccacgtgtgaacatctgtcttggtcacagagctgggtgctgccggtcaccttgagctgtggtggctcccggcacacgagtgtccggggttcggccatgtcctcacgcgggcaggggtgggagccctcacaggcaagggggctgttggatttccatttcaggtggttttctaagtgctccttatgtgaatttcaaacacgtatggaattcattccgcatggactctgggatcaaaggctctttcctcttttgtttgagagttggttgttttaaagcttaatgtatgtttctattttaaaataaatttttctggctgtggcatttttcttgacctggtataatgaaagtatttcggatatttgagtttaacccttttccagaaagtaatacatgatatggatttatttatgcattaaaagagcaaatttaaagagccctttgcaa

SEQ ID NO: 6230 - DNA, 2053 bp, Homo sapiens
  source 1..2053: mol_type = unassigned DNA
gctgagaggcgggcgggccgggggcgccgggcgcggggccgccatgtggagcggccgcagctccttcaccagcttggtggtgggcgtgttcgtggtctacgtggtgcacacctgctgggtcatgtacggcatcgtctacacccgcccgtgctccggcgacgccaactgcatccagccctacctggcgcggcggcccaagctgcagctgagcgtgtacaccacgacgaggtcccacctgggtgctgagaacaacatcgacctggtcttgaatgtggaagactttgatgtggagtccaaatttgaaaggacagttaatgtttctgtaccaaagaaaacgagaaacaatgggacgctgtatgcctacatcttcctccatcacgctggggtcctgccgtggcacgacgggaagcaggtgcacctggtcagtcctctgaccacctacatggtccccaagccagaagaaatcaacctgctcaccggggagtctgatacacagcagatcgaggcggagaagaagccgacgagtgccctggatgagccagtgtcccactggcgaccgcggctggcgctgaacgtgatggcggacaactttgtctttgacgggtcctccctgcctgccgatgtgcatcggtacatgaagatgatccagctggggaaaaccgtgcattacctgcccatcctgttcatcgaccagctcagcaaccgcgtgaaggacctgatggtcataaaccgctccaccaccgagctgcccctcaccgtgtcctacgacaaggtctcactggggcggctgcgcttctggatccacatgcaggacgccgtgtactccctgcagcagttcgggttttcagagaaagatgctgatgaggtgaaaggaatttttgtagataccaacttatacttcctggcgctgaccttctttgtcgcagcgttccatcttctctttgatttcctggcctttaaaaatgacatcagtttctggaagaagaagaagagcatgatcggcatgtccaccaagctgtggaaagtgaagaaggcattgaagatgactattttttggagaggcctgatgcccgaatttcagtttggcacttacagcgaatctgagaggaaaaccgaggagtacgatactcaggccatgaagtacttgtcatacctgctgtaccctctctgtgtcgggggtgctgtctattcactcctgaatatcaaatataagagctggtactcctggttaatcaacagcttcgtcaacggggtctatgcctttggtttcctcttcatgctgccccagctctttgtgaactacaagttgaagtcagtggcacatctgccctggaaggccttcacctacaaggctttcaacaccttcattgatgacgtctttgccttcatcatcaccatgcccacgtctcaccggctggcctgcttccgggacgacgtggtgtttctggtctacctgtaccagcggtggctttatcctgtggataaacgcagagtgaacgagtttggggagtcctacgaggagaaggccacgcgggcgccccacacggactgaaggccgcccgggctgccgccagccaagtgcaacttgaattgtcaatgagtatttttggaagcatttggaggaattcctagacattgcgttttctgtgttgccaaaatcccttcggacatttctcagacatctcccaagttcccatcacgtcagatttggagctggtagcgcttacgatgcccccacgtgtgaacatctgtcttggtcacagagctgggtgctgccggtcaccttgagctgtggtggctcccggcacacgagtgtccggggttcggccatgtcctcacgcgggcaggggtgggagccctcacaggcaagggggctgttggatttccatttcaggtggttttctaagtgctccttatgtgaatttcaaacacgtatggaattcattccgcatggactctgggatcaaaggctctttcctcttttgtttgagagttggttgttttaaagcttaatgtatgtttctattttaaaataaatttttctggctgtggc

SEQ ID NO: 6231 - DNA, 3080 bp, Homo sapiens
  source 1..3080: mol_type = unassigned DNA
tgtgtcttggactgggacagacagccgggctaaccgcgtgagaggggctcccagatgggcacgcgagttcaggctcttccctactggaagcgccgagcggccgcacctcagggtctctcctggagccagcacagctattcgtggtgatgatgcgccccccggcgcccccagcccggtgctgcaccggcccccacctcccggcttccagaaagctccccttgctttccgcggcattctttgggcgtgagtcatgcaggtttgcagccagccccaaagggggtgtgtgcgcgagcagagcgctataaatacggcgcctcccagtgcccacaacgcggcgtcgccaggaggagcgcgcgggcacagggtgccgctgaccgaggcgtgcaaagactccagaattggaggcatgatgaagactctgctgctgtttgtggggctgctgctgacctgggagagtgggcaggtcctgggggaccagacggtctcagacaatgagctccaggaaatgtccaatcagggaagtaagtacgtcaataaggaaattcaaaatgctgtcaacggggtgaaacagataaagactctcatagaaaaaacaaacgaagagcgcaagacactgctcagcaacctagaagaagccaagaagaagaaagaggatgccctaaatgagaccagggaatcagagacaaagctgaaggagctcccaggagtgtgcaatgagaccatgatggccctctgggaagagtgtaagccctgcctgaaacagacctgcatgaagttctacgcacgcgtctgcagaagtggctcaggcctggttggccgccagcttgaggagttcctgaaccagagctcgcccttctacttctggatgaatggtgaccgcatcgactccctgctggagaacgaccggcagcagacgcacatgctggatgtcatgcaggaccacttcagccgcgcgtccagcatcatagacgagctcttccaggacaggttcttcacccgggagccccaggatacctaccactacctgcccttcagcctgccccaccggaggcctcacttcttctttcccaagtcccgcatcgtccgcagcttgatgcccttctctccgtacgagcccctgaacttccacgccatgttccagcccttccttgagatgatacacgaggctcagcaggccatggacatccacttccatagcccggccttccagcacccgccaacagaattcatacgagaaggcgacgatgaccggactgtgtgccgggagatccgccacaactccacgggctgcctgcggatgaaggaccagtgtgacaagtgccgggagatcttgtctgtggactgttccaccaacaacccctcccaggctaagctgcggcgggagctcgacgaatccctccaggtcgctgagaggttgaccaggaaatacaacgagctgctaaagtcctaccagtggaagatgctcaacacctcctccttgctggagcagctgaacgagcagtttaactgggtgtcccggctggcaaacctcacgcaaggcgaagaccagtactatctgcgggtcaccacggtggcttcccacacttctgactcggacgttccttccggtgtcactgaggtggtcgtgaagctctttgactctgatcccatcactgtgacggtccctgtagaagtctccaggaagaaccctaaatttatggagaccgtggcggagaaagcgctgcaggaataccgcaaaaagcaccgggaggagtgagatgtggatgttgcttttgcacctacgggggcatctgagtccagctccccccaagatgagctgcagccccccagagagagctctgcacgtcaccaagtaaccaggccccagcctccaggcccccaactccgcccagcctctccccgctctggatcctgcactctaacactcgactctgctgctcatgggaagaacagaattgctcctgcatgcaactaattcaataaaactgtcttgtgagctgatcgcttggagggtcctctttttatgttgagttgctgcttcccggcatgccttcattttgctatggggggcaggcaggggggatggaaaataagtagaaacaaaaaagcagtggctaagatggtatagggactgtcataccagtgaagaataaaagggtgaagaataaaagggatatgatgacaaggttgatccacttcaagaattgcttgctttcaggaagagagatgtgtttcaacaagccaactaaaatatattgctgcaaatggaagcttttctgttctattataaaactgtcgatgtattctgaccaaggtgcgacaatctcctaaaggaatacactgaaagttaaggagaagaatcagtaagtgtaaggtgtacttggtattataatgcataattgatgttttcgttatgaaaacatttggtgcccagaagtccaaattatcagttttatttgtaagagctattgcttttgcagcggttttatttgtaaaagctgttgatttcgagttgtaagagctcagcatcccaggggcatcttcttgactgtggcatttcctgtccaccgccggtttatatgatcttcatacctttccctggaccacaggcgtttctcggcttttagtctgaaccatagctgggctgcagtaccctacgctgccagcaggtggccatgactacccgtggtaccaatctcagtcttaaagctcaggcttttcgttcattaacattctctgatagaattctggtcatcagatgtactgcaatggaacaaaactcatctggctgcatcccaggtgtgtagcaaagtccacatgtaaatttatagcttagaatattcttaagtcactgtcccttgtctctctttgaagttataaacaacaaacttaaagcttagcttatgtccaaggtaagtattttagcatggctgtcaaggaaattcagagtaaagtcagtgtgattcacttaatgatatacattaattagaattatggggtcagaggtatttgcttaagtgatcataattgtaaagtatatgtcacattgtcacattaatgtcacactgtttcaaaagtta

SEQ ID NO: 6232 - DNA, 1530 bp, Homo sapiens
  source 1..1530: mol_type = unassigned DNA
aacgcggcgtcgccaggaggagcgcgcgggcacagggtgccgctgaccgaggcgtgcaaagactccagaattggaggcatgatgaagactctgctgctgtttgtggggctgctgctgacctgggagagtgggcaggtcctgggggaccagacggtctcagacaatgagctccaggaaatgtccaatcagggaagtaagtacgtcaataaggaaattcaaaatgctgtcaacggggtgaaacagataaagactctcatagaaaaaacaaacgaagagcgcaagacactgctcagcaacctagaagaagccaagaagaagaaagaggatgccctaaatgagaccagggaatcagagacaaagctgaaggagctcccaggagtgtgcaatgagaccatgatggccctctgggaagagtgtaagccctgcctgaaacagagctcgcccttctacttctggatgtcatgcaggaccacttcagccgcgcgtccagcatcatagacgagctcttccaggacaggttcttcacccgggagccccaggatacctaccactacctgcccttcagcctgccccaccggaggcctcacttcttctttcccaagtcccgcatcgtccgcagcttgatgcccttctctccgtacgagcccctgaacttccacgccatgttccagcccttccttgagatgatacacgaggctcagcaggccatggacatccacttccatagcccggccttccagcacccgccaacagaattcatacgagaaggcgacgatgaccggactgtgtgccgggagatccgccacaactccacgggctgcctgcggatgaaggaccagtgtgacaagtgccgggagatcttgtctgtggactgttccaccaacaacccctcccaggctaagctgcggcgggagctcgacgaatccctccaggtcgctgagaggttgaccaggaaatacaacgagctgctaaagtcctaccagtggaagatgctcaacacctcctccttgctggagcagctgaacgagcagtttaactgggtgtcccggctggcaaacctcacgcaaggcgaagaccagtactatctgcgggtcaccacggtggcttcccacacttctgactcggacgttccttccggtgtcactgaggtggtcgtgaagctctttgactctgatcccatcactgtgacggtccctgtagaagtctccaggaagaaccctaaatttatggagaccgtggcggagaaagcgctgcaggaataccgcaaaaagcaccgggaggagtgagatgtggatgttgcttttgcacctacgggggcatctgagtccagctccccccaagatgagctgcagccccccagagagagctctgcacgtcaccaagtaaccaggccccagcctccaggcccccaactccgcccagcctctccccgctctggatcctgcactctaacactcgactctgctgctcatgggaagaacagaattgctcctgcatgcaactaattcaataaaactgtcttgtgagctg

SEQ ID NO: 6233 - DNA, 2098 bp, Homo sapiens
  source 1..2098: mol_type = unassigned DNA
aacactggcagggcagcctgctgtcggcttagaggggatgggcagtgtggagggcctggcagagcaagaggactcatccttccaaagggactttctctgggaagcctgctcctcgggccactgcgaaccctctctactctccgaagggaattgtccttcctggcttccactacttccacccctgaatgcacaggcagcccggcccaagtctcccactagggatgcagatggattcggtgtgaagggctggctgctgttgcctccggctcttgaaagtcaagttcagaggcgtgcaaagactccagaattggaggcatgatgaagactctgctgctgtttgtggggctgctgctgacctgggagagtgggcaggtcctgggggaccagacggtctcagacaatgagctccaggaaatgtccaatcagggaagtaagtacgtcaataaggaaattcaaaatgctgtcaacggggtgaaacagataaagactctcatagaaaaaacaaacgaagagcgcaagacactgctcagcaacctagaagaagccaagaagaagaaagaggatgccctaaatgagaccagggaatcagagacaaagctgaaggagctcccaggagtgtgcaatgagaccatgatggccctctgggaagagtgtaagccctgcctgaaacagacctgcatgaagttctacgcacgcgtctgcagaagtggctcaggcctggttggccgccagcttgaggagttcctgaaccagagctcgcccttctacttctggatgaatggtgaccgcatcgactccctgctggagaacgaccggcagcagacgcacatgctggatgtcatgcaggaccacttcagccgcgcgtccagcatcatagacgagctcttccaggacaggttcttcacccgggagccccaggatacctaccactacctgcccttcagcctgccccaccggaggcctcacttcttctttcccaagtcccgcatcgtccgcagcttgatgcccttctctccgtacgagcccctgaacttccacgccatgttccagcccttccttgagatgatacacgaggctcagcaggccatggacatccacttccatagcccggccttccagcacccgccaacagaattcatacgagaaggcgacgatgaccggactgtgtgccgggagatccgccacaactccacgggctgcctgcggatgaaggaccagtgtgacaagtgccgggagatcttgtctgtggactgttccaccaacaacccctcccaggctaagctgcggcgggagctcgacgaatccctccaggtcgctgagaggttgaccaggaaatacaacgagctgctaaagtcctaccagtggaagatgctcaacacctcctccttgctggagcagctgaacgagcagtttaactgggtgtcccggctggcaaacctcacgcaaggcgaagaccagtactatctgcgggtcaccacggtggcttcccacacttctgactcggacgttccttccggtgtcactgaggtggtcgtgaagctctttgactctgatcccatcactgtgacggtccctgtagaagtctccaggaagaaccctaaatttatggagaccgtggcggagaaagcgctgcaggaataccgcaaaaagcaccgggaggagtgagatgtggatgttgcttttgcacctacgggggcatctgagtccagctccccccaagatgagctgcagccccccagagagagctctgcacgtcaccaagtaaccaggccccagcctccaggcccccaactccgcccagcctctccccgctctggatcctgcactctaacactcgactctgctgctcatgggaagaacagaattgctcctgcatgcaactaattcaataaaactgtcttgtgagctgatcgcttggagggtcctctttttatgttgagttgctgcttcccggcatgccttcattttgctatggggggcaggcaggggggatggaaaataagtagaaacaaaaaagcagtggctaagatggtatagggactgtcataccagtgaagaataaaagggtgaagaataaaagggatatgatgacaaggtt

SEQ ID NO: 6234 - DNA, 737 bp, Homo sapiens
  source 1..737: mol_type = unassigned DNA
gatggattcggtgtgaagggctggctgctgttgcctccggctcttgaaagtcaagttcaggtggtgctgagactccctgggggctgcagcgctgtgaggcgtgcaaagactccagaattggaggcatgatgaagactctgctgctgtttgtggggctgctgctgacctgggagagtgggcaggtcctgggggaccagacggtctcagacaatgagctccaggaaatgtccaatcagggaagtaagtacgtcaataaggaaattcaaaatgctgtcaacggggtgaaacagataaagactctcatagaaaaaacaaacgaagagcgcaagacactgctcagcaacctagaagaagccaagaagaagaaagaggatgccctaaatgagaccagggaatcagagacaaagctgaaggagctcccaggagtgtgcaatgagaccatgatggccctctgggaagagtgtaagccctgcctgaaacagacctgcatgaagttctacgcacgcgtctgcagaagtggctcaggcctggttggccgccagcttgaggagttcctgaaccagagctcgcccttctacttctggatgaatggtgaccgcatcgactccctgctggagaacgaccggcagcagacgcacatgctggatgtcatgcaggaccacttcagccgcgcgtccagcatcatagacgagctcttccaggacaggttcttcacccgggagccccaggatacctac

SEQ ID NO: 6235 - DNA, 2381 bp, Homo sapiens
  source 1..2381: mol_type = unassigned DNA
catccttccaaagggactttctctgggaagcctgctcctcgggccactgcgaaccctctctactctccgaagggaattgtccttcctggcttccactacttccacccctgaatgcacaggcagcccggcccaagtctcccactagggatgcagatggattcggtgtgaagggctggctgctgttgcctccggctcttgaaagtcaagttcaggtggtgctgagactccctgggggctgcagcgctgtggtgaatggggagcgtctgctggggtgaaggtttaggtgcacattgcagaggacgtggctggtctctgggatgcagtccctctgtggaggtggcatggggagggacggatgcatgacctaaggggggtattttcagtgtctgacatgatcgataccactctggacaaggaggccaggatgcagaaagcctgtgtgcctcgctgattgtcggggaggatgtggcttggacaagagcctggttcctccgatgccagggttcttgtttcttccactcaacattgctgtcctgcagtccctccctccctgcacctcctgccttcgctttcattcgaggtgtccatggcaagtctggtcatttccccccatttcctcaggaataaaagtgcagcagtgcctgctgtggggacagctgagggcagtgaggccctggggagctgctgcaggcagcaggtgggcgggacgccagcaggctgtctagctgttcccatgatggtctcctgttctctgcagaggcgtgcaaagactccagaattggaggcatgatgaagactctgctgctgtttgtggggctgctgctgacctgggagagtgggcaggtcctgggggaccagacggtctcagacaatgagctccaggaaatgtccaatcagggaagtaagtacgtcaataaggaaattcaaaatgctgtcaacggggtgaaacagataaagactctcatagaaaaaacaaacgaagagcgcaagacactgctcagcaacctagaagaagccaagaagaagaaagaggatgccctaaatgagaccagggaatcagagacaaagctgaaggagctcccaggagtgtgcaatgagaccatgatggccctctgggaagagtgtaagccctgcctgaaacagacctgcatgaagttctacgcacgcgtctgcagaagtggctcaggcctggttggccgccagcttgaggagttcctgaaccagagctcgcccttctacttctggatgaatggtgaccgcatcgactccctgctggagaacgaccggcagcagacgcacatgctggatgtcatgcaggaccacttcagccgcgcgtccagcatcatagacgagctcttccaggacaggttcttcacccgggagccccaggatacctaccactacctgcccttcagcctgccccaccggaggcctcacttcttctttcccaagtcccgcatcgtccgcagcttgatgcccttctctccgtacgagcccctgaacttccacgccatgttccagcccttccttgagatgatacacgaggctcagcaggccatggacatccacttccatagcccggccttccagcacccgccaacagaattcatacgagaaggcgacgatgaccggactgtgtgccgggagatccgccacaactccacgggctgcctgcggatgaaggaccagtgtgacaagtgccgggagatcttgtctgtggactgttccaccaacaacccctcccaggctaagctgcggcgggagctcgacgaatccctccaggtcgctgagaggttgaccaggaaatacaacgagctgctaaagtcctaccagtggaagatgctcaacacctcctccttgctggagcagctgaacgagcagtttaactgggtgtcccggctggcaaacctcacgcaaggcgaagaccagtactatctgcgggtcaccacggtggcttcccacacttctgactcggacgttccttccggtgtcactgaggtggtcgtgaagctctttgactctgatcccatcactgtgacggtccctgtagaagtctccaggaagaaccctaaatttatggagaccgtggcggagaaagcgctgcaggaataccgcaaaaagcaccgggaggagtgagatgtggatgttgcttttgcacctacgggggcatctgagtccagctccccccaagatgagctgcagccccccagagagagctctgcacgtcaccaagtaaccaggccccagcctccaggcccccaactccgcccagcctctccccgctctggatcctgcactctaacactcgactctgctgctcatgggaagaacagaattgctcctgcatgcaactaattcaataaaactgtcttgtgagctga

SEQ ID NO: 6236 - DNA, 878 bp, Homo sapiens
  source 1..878: mol_type = unassigned DNA
caggaggagcgcgcgggcacagggtgccgctgaccgaggcgtgcaaagactccagaattggaggcatgatgaagactctgctgctgtttgtggggctgctgctgacctgggagagtgggcaggtcctgggggaccagacggtctcagacaatgagctccaggaaatgtccaatcagggaagtaagtacgtcaataaggaaattcaaaatgctgtcaacggggtgaaacagataaagactctcatagaaaaaacaaacgaagagcgcaagacactgctcagcaacctagaagaagccaagaagaagaaagaggatgccctaaatgagaccagggaatcagagacaaagctgaaggagctcccaggagtgtgcaatgagaccatgatggccctctgggaagagtgtaagccctgcctgaaacagacctgcatgaagttctacgcacgcgtctgcagaagtggctcaggcctggttggccgccagcttgaggagttcctgaaccagagctcgcccttctacttctggatgaatggtgaccgcatcgactccctgctggagaacgaccggcagcagacgcacatgctggatgtcatgcaggaccacttcagccgcgcgtccagcatcatagacgagctcttccaggacagcttgatgcccttctctccgtacgagcccctgaacttccacgccatgttccagcccttccttgagatgatacacgaggctcagcaggccatggacatccacttccatagcccggccttccagcacccgccaacagaattcatacgagaaggcgacgatgaccggactgtgtgccgggagatccgccacaactccacgggctgcctgcggatgaaggaccagtgtgacaagtgc

SEQ ID NO: 6237 - DNA, 2836 bp, Homo sapiens
  source 1..2836: mol_type = unassigned DNA
tctttgcgcctgattacttctcatgagaggcactccttgttaatgtgctactgagtgtccagatgggcctgctgggctgagcgggctttggatgtgaaccatttcaggaaggggaaccccatcgtcctgttggttctgtgatggcaaatggaggcgtgcaaagactccagaattggaggcatgatgaagactctgctgctgtttgtggggctgctgctgacctgggagagtgggcaggtcctgggggaccagacggtctcagacaatgagctccaggaaatgtccaatcagggaagtaagtacgtcaataaggaaattcaaaatgctgtcaacggggtgaaacagataaagactctcatagaaaaaacaaacgaagagcgcaagacactgctcagcaacctagaagaagccaagaagaagaaagaggatgccctaaatgagaccagggaatcagagacaaagctgaaggagctcccaggagtgtgcaatgagaccatgatggccctctgggaagagtgtaagccctgcctgaaacagacctgcatgaagttctacgcacgcgtctgcagaagtggctcaggcctggttggccgccagcttgaggagttcctgaaccagagctcgcccttctacttctggatgaatggtgaccgcatcgactccctgctggagaacgaccggcagcagacgcacatgctggatgtcatgcaggaccacttcagccgcgcgtccagcatcatagacgagctcttccaggacaggttcttcacccgggagccccaggatacctaccactacctgcccttcagcctgccccaccggaggcctcacttcttctttcccaagtcccgcatcgtccgcagcttgatgcccttctctccgtacgagcccctgaacttccacgccatgttccagcccttccttgagatgatacacgaggctcagcaggccatggacatccacttccatagcccggccttccagcacccgccaacagaattcatacgagaaggcgacgatgaccggactgtgtgccgggagatccgccacaactccacgggctgcctgcggatgaaggaccagtgtgacaagtgccgggagatcttgtctgtggactgttccaccaacaacccctcccaggctaagctgcggcgggagctcgacgaatccctccaggtcgctgagaggttgaccaggaaatacaacgagctgctaaagtcctaccagtggaagatgctcaacacctcctccttgctggagcagctgaacgagcagtttaactgggtgtcccggctggcaaacctcacgcaaggcgaagaccagtactatctgcgggtcaccacggtggcttcccacacttctgactcggacgttccttccggtgtcactgaggtggtcgtgaagctctttgactctgatcccatcactgtgacggtccctgtagaagtctccaggaagaaccctaaatttatggagaccgtggcggagaaagcgctgcaggaataccgcaaaaagcaccgggaggagtgagatgtggatgttgcttttgcacctacgggggcatctgagtccagctccccccaagatgagctgcagccccccagagagagctctgcacgtcaccaagtaaccaggccccagcctccaggcccccaactccgcccagcctctccccgctctggatcctgcactctaacactcgactctgctgctcatgggaagaacagaattgctcctgcatgcaactaattcaataaaactgtcttgtgagctgatcgcttggagggtcctctttttatgttgagttgctgcttcccggcatgccttcattttgctatggggggcaggcaggggggatggaaaataagtagaaacaaaaaagcagtggctaagatggtatagggactgtcataccagtgaagaataaaagggtgaagaataaaagggatatgatgacaaggttgatccacttcaagaattgcttgctttcaggaagagagatgtgtttcaacaagccaactaaaatatattgctgcaaatggaagcttttctgttctattataaaactgtcgatgtattctgaccaaggtgcgacaatctcctaaaggaatacactgaaagttaaggagaagaatcagtaagtgtaaggtgtacttggtattataatgcataattgatgttttcgttatgaaaacatttggtgcccagaagtccaaattatcagttttatttgtaagagctattgcttttgcagcggttttatttgtaaaagctgttgatttcgagttgtaagagctcagcatcccaggggcatcttcttgactgtggcatttcctgtccaccgccggtttatatgatcttcatacctttccctggaccacaggcgtttctcggcttttagtctgaaccatagctgggctgcagtaccctacgctgccagcaggtggccatgactacccgtggtaccaatctcagtcttaaagctcaggcttttcgttcattaacattctctgatagaattctggtcatcagatgtactgcaatggaacaaaactcatctggctgcatcccaggtgtgtagcaaagtccacatgtaaatttatagcttagaatattcttaagtcactgtcccttgtctctctttgaagttataaacaacaaacttaaagcttagcttatgtccaaggtaagtattttagcatggctgtcaaggaaattcagagtaaagtcagtgtgattcacttaatgatatacattaattagaattatggggtcagaggtatttgcttaagtgatcataattgtaaagtatatgtcacattgtcacattaatgtc

SEQ ID NO: 6238 - DNA, 2841 bp, Homo sapiens
  source 1..2841: mol_type = unassigned DNA
ctttccgcggcattctttgggcgtgagtcatgcaggtttgcagccagccccaaagggggtgtgtgcgcgagcagagcgctataaatacggcgcctcccagtgcccacaacgcggcgtcgccaggaggagcgcgcgggcacagggtgccgctgaccgaggcgtgcaaagactccagaattggaggcatgatgaagactctgctgctgtttgtggggctgctgctgacctgggagagtgggcaggtcctgggggaccagacggtctcagacaatgagctccaggaaatgtccaatcagggaagtaagtacgtcaataaggaaattcaaaatgctgtcaacggggtgaaacagataaagactctcatagaaaaaacaaacgaagagcgcaagacactgctcagcaacctagaagaagccaagaagaagaaagaggatgccctaaatgagaccagggaatcagagacaaagctgaaggagctcccaggagtgtgcaatgagaccatgatggccctctgggaagagtgtaagccctgcctgaaacagacctgcatgaagttctacgcacgcgtctgcagaagtggctcaggcctggttggccgccagcttgaggagttcctgaaccagagctcgcccttctacttctggatgaatggtgaccgcatcgactccctgctggagaacgaccggcagcagacgcacatgctggatgtcatgcaggaccacttcagccgcgcgtccagcatcatagacgagctcttccaggacaggttcttcacccgggagccccaggatacctaccactacctgcccttcagcctgccccaccggaggcctcacttcttctttcccaagtcccgcatcgtccgcagcttgatgcccttctctccgtacgagcccctgaacttccacgccatgttccagcccttccttgagatgatacacgaggctcagcaggccatggacatccacttccatagcccggccttccagcacccgccaacagaattcatacgagaaggcgacgatgaccggactgtgtgccgggagatccgccacaactccacgggctgcctgcggatgaaggaccagtgtgacaagtgccgggagatcttgtctgtggactgttccaccaacaacccctcccaggctaagctgcggcgggagctcgacgaatccctccaggtcgctgagaggttgaccaggaaatacaacgagctgctaaagtcctaccagtggaagatgctcaacacctcctccttgctggagcagctgaacgagcagtttaactgggtgtcccggctggcaaacctcacgcaaggcgaagaccagtactatctgcgggtcaccacggtggcttcccacacttctgactcggacgttccttccggtgtcactgaggtggtcgtgaagctctttgactctgatcccatcactgtgacggtccctgtagaagtctccaggaagaaccctaaatttatggagaccgtggcggagaaagcgctgcaggaataccgcaaaaagcaccgggaggagtgagatgtggatgttgcttttgcacctacgggggcatctgagtccagctccccccaagatgagctgcagccccccagagagagctctgcacgtcaccaagtaaccaggccccagcctccaggcccccaactccgcccagcctctccccgctctggatcctgcactctaacactcgactctgctgctcatgggaagaacagaattgctcctgcatgcaactaattcaataaaactgtcttgtgagctgatcgcttggagggtcctctttttatgttgagttgctgcttcccggcatgccttcattttgctatggggggcaggcaggggggatggaaaataagtagaaacaaaaaagcagtggctaagatggtatagggactgtcataccagtgaagaataaaagggtgaagaataaaagggatatgatgacaaggttgatccacttcaagaattgcttgctttcaggaagagagatgtgtttcaacaagccaactaaaatatattgctgcaaatggaagcttttctgttctattataaaactgtcgatgtattctgaccaaggtgcgacaatctcctaaaggaatacactgaaagttaaggagaagaatcagtaagtgtaaggtgtacttggtattataatgcataattgatgttttcgttatgaaaacatttggtgcccagaagtccaaattatcagttttatttgtaagagctattgcttttgcagcggttttatttgtaaaagctgttgatttcgagttgtaagagctcagcatcccaggggcatcttcttgactgtggcatttcctgtccaccgccggtttatatgatcttcatacctttccctggaccacaggcgtttctcggcttttagtctgaaccatagctgggctgcagtaccctacgctgccagcaggtggccatgactacccgtggtaccaatctcagtcttaaagctcaggcttttcgttcattaacattctctgatagaattctggtcatcagatgtactgcaatggaacaaaactcatctggctgcatcccaggtgtgtagcaaagtccacatgtaaatttatagcttagaatattcttaagtcactgtcccttgtctctctttgaagttataaacaacaaacttaaagcttagcttatgtccaaggtaagtattttagcatggctgtcaaggaaattcagagtaaagtcagtgtgattcacttaatgatatacattaattagaattatggggtcagaggtatttgcttaagtgatcataattgtaaagtatatgtcacattgtcacattaatgtc

SEQ ID NO: 6239 - DNA, 1039 bp, Homo sapiens
  source 1..1039: mol_type = unassigned DNA
tctttgcgcctgattacttctcatgagaggcactccttgttaatgtgctactgagtgtccagatgggcctgctgggctgagcgggctttggatgtgaaccatttcaggaaggggaaccccatcgtcctgttggttctgtgatggcaaatggaggcgtgcaaagactccagaattggaggcatgatgaagactctgctgctgtttgtggggctgctgctgacctgggagagtgggcaggtcctgggggaccagacggtctcagacaatgagctccaggaaatgtccaatcagggaagtaagtacgtcaataaggaaattcaaaatgctgtcaacggggtgaaacagataaagactctcatagaaaaaacaaacgaagagcgcaagacactgctcagcaacctagaagaagccaagaagaagaaagaggatgccctaaatgagaccagggaatcagagacaaagctgaaggagctcccaggagtgtgcaatgagaccatgatggccctctgggaagagtgtaagccctgcctgaaacagacctgcatgaagttctacgcacgcgtctgcagaagtggctcaggcctggttggccgccagcttgaggagttcctgaaccagagctcgcccttctacttctggatgaatggtgaccgcatcgactccctgctggagaacgaccggcagcagacgcacatgctggatgtcatgcaggaccacttcagccgcgcgtccagcatcatagacgagctcttccaggacaggttcttcacccgggagccccaggatacctaccactacctgcccttcagcctgccccaccggaggcctcacttcttctttcccaagtcccgcatcgtccgcagcttgatgcccttctctccgtacgagcccctgaacttccacgccatgttccagcccttccttgagatgatacacgaggctcagcaggccatggacatccacttccatagcccggccttccagcacccgccaacagaattcatacgagaaggcgacgatgaccggactgtgtgccggg

SEQ ID NO: 6240 - DNA, 4003 bp, Homo sapiens
  source 1..4003: mol_type = unassigned DNA
ttaggacagtttgagcagccaactgggtacatggaaaactcagtctcctacagcgcaattgaagacgttcagctgctgtcctgggagaatgccccgaagtactgtttacagctcacgattcctgggggaactgtcttactgcaggctgccaatagctacctgcgagaccagtggttccattctctgcaatggaagaaaaagatttacaaatataagaaagtgctgagtaacccaagccgctgggaagttgtcttgaaagagatccggaccctggtggacatggccctgacatcccccctgcaggatgactccatcaaccaggccccactggaaatcgtctcgaaactgctctcagagaacacaaacttgaccacccaggagcatgaaaacatcattgtggcaatcgctcctttgctggaaaacaaccacccaccaccagatctctgtgaattcttttgcaagcactgcagagagcggccccggtccatggtggtcatcgaggtgttcacccccgtggtgcagcgaatcctcaagcataacatggactttgggaagtgcccgcgactgaggctgtttactcaggagtacatccttgccttgaacgagctcaacgcggggatggaagtggtgaagaagttcattcagagcatgcacggccccacagggcactgcccccacccccgggtcctgcccaacctggtggccgtgtgcctggctgccatctactcctgctatgaagagttcatcaacagccgcgacaattccccaagcctgaaggaaatccggaacggctgccagcagccgtgcgaccggaagcccactttacctctgcgccttctgcaccccagcccggacctggtgtctcaggaagccacgctgtctgaggcccggctcaagtcggtggtcgtggcctccagtgagatccacgtggaggtggaacgcaccagcactgccaagccggcgctgacggccagcgcaggcaacgacagcgagcccaacctcatcgactgcctcatggtcagccccgcctgcagcaccatgagcatcgagctgggcccccaggccgaccgcacgctcggctgctacgtggaaatcctcaagctgctgtcagactatgatgactggagaccgtctctggccagtttgcttcaacccattccattccccaaagaagctctcgcacatgagaagttcaccaaggaactgaagtacgtgattcagaggttcgccgaagaccccaggcaagaggtccactcatgcctgctgagcgtgcgggccggcaaagatggctggttccagctctacagccccggaggggtggcctgcgacgatgacggggagctgttcgccagcatggtgcacatcctcatgggctcctgttacaagaccaaaaaattcctgctctccctggcagaaaacaagctgggtccctgcatgctcctggcactgagggggaaccagaccatggtggagatcctgtgcttgatgctggaatacaacatcatcgacaacaacgacacccaactgcagatcatctcaaccctggagagcacagacgtggggaagcgcatgtacgagcagctgtgtgaccggcagcgggagctgaaggagctgcaaaggaaaggcgggcccaccaggctaacactgccctccaagtccacagacgctgacttggctcgtttgctgagctccggctccttcggaaacctggagaacctcagtttggccttcaccaatgtaaccagtgcctgcgccgagcacctcatcaaactgccttcgctcaagcagctgaacctgtggtccactcagtttggagacgctggccttcggctcctgtcggaacacctcaccatgctccaggtgctgaacctgtgcgagaccccggtcacagacgctggcctgctggccctgagctccatgaagagtctctgcagtttaaacatgaacagcaccaagctctcagctgacacctacgaagatctgaaggccaagcttcccaatttgaaggaagtggacgtccgctacaccgaagcctggtgaagctcccagctcaaggcaggaagacgtttgcaaccgcgacaaaataactcttgactaacagccgcagagcagccggtcctggggtcccaccctggtgccctggctgtgagatagatggggagtctttctgggggcggaggggggagggggtggggagggggcccacaagcacgcccagcccccgccgaattcttttagcttcgtaattggaacctttgacctgatctaaagtggactttgtagcaacaagaggagcatcagcgggtcggggaggggtttgggggtgggctggggggtgggggaccctttgtggattttctttgcctttgtgtttgatgccgtcgtgtgggaaaagtcaactccgatgccaccattgcgggccggacgaaggatgctttcttcctagaggctccgagctgagctgcgaactcgccccccgcccttgggacaagaagacccagtcacatcactgcacccgtcctgtgtcctcaccattgctatgcaaagtgattcttgttgtacataagatttaaataatgcacctatttaagacatgttgacaaattgcgggtctgggacccgcctcttatttatgaagtctttgaccgtcccccccgcccgaccccaccgccctcccgcccccacctggcgtgtagtactgtataaaccagtcagctgtcgggttagtggtagtattattgttatttttttaaaggaaacaaacagacaacaaaaagaagaaaaaaaaaaagaacctccttggaaaaattaattgctttttcgtaatggattctctatgctaatgctctctcgtctgtctgtctgtctgcccactcccccacccaccactgtgcgtttctgatttccaaatgtctccaactccctcacgaggtggggctcaggctggaggaggagggattaagatccccttgctccactaaggcccaagctctttctctcggcaccttttagacttgaatgggaggctgctaacccgccctctccagtccaccccggtaaaagagctgttccccacccccagggagctcctgtccctgtcagcctttgctgtcccctgtccccaacggagactctgtcacccctgggctccccctgccatcgtgtgcttcacgtggccccatgcatgcccgcctctctgcatggtctcttgggaaaagagagatgtgtcgcctccgccagtccgactgccctccccaccccacccccgccaccccccacatgtgaccactgcaacgaagacactccttctgtccccacctgctccgaagacaaaccaacctccgtttcttttataaacagtcggctttttcttaataagccctcactgtacagaacagcccgttgatggtttatttggggtccccctctccccccagcccttttttctgttggtttagcacaaatacttccctcctccggcacctccaaacctaccccacagtcagtgtacttgttttatatatatttaatcttattcaatggaaaccatgcttttgtcgttttatactttgctaggtagactttattacccccccactatgccctcatttttttaaaaaaggaaaaaaaaaagaaactgggttccagtcttaattcattttccgtgccaggttttatttcgtgtgtgtgtgagtgtgttctgttttgtgttttgttttttgttgttgtttttagttgtttggttttcttttctttcccccctccggtcccatacttcacagcactctggtgcgggaagaagcagaagcaaaaaaaataaaaataaaaaaataaataaaaataaaaaaaataaaaaaggaaaaaaaaaaaagaagaaacaagacatgccacctttcccctcgcactgttgcttttcctgatggttaatactactgtcacgtagctgtgtacaaagagatgtgaaatactttcaggcaaaaataaactgtaagtgactcatcaa

SEQ ID NO: 6241 - DNA, 4357 bp, Homo sapiens
  source 1..4357: mol_type = unassigned DNA
gggggccccgccgccccagcagcccaggacagccccctctccccgcccccagccccctcccccggcgcggccatggatgtgaccagcagctcgggcggcggcggcgacccccggcagatcgaggagaccaagccgctgctggggggcgacgtgtcggcccccgaaggcacgaagatgggcgccgtgccctgccgccgggctcttctgctttgcaacgggatgaggtacaaactgctgcaggagggcgacattcaggtctgtgtcatccggcacccgcggacctttctcagcaagatcctcacctcgaaattcctgaggcgctgggagccgcaccacctaacgctggccgacaacagcctggcgtccgccacgccaactgggtacatggaaaactcagtctcctacagcgcaattgaagacgttcagctgctgtcctgggagaatgccccgaagtactgtttacagctcacgattcctgggggaactgtcttactgcaggctgccaatagctacctgcgagaccagtggttccattctctgcaatggaagaaaaagatttacaaatataagaaagtgctgagtaacccaagccgctgggaagttgtcttgaaagagatccggaccctggtggacatggccctgacatcccccctgcaggatgactccatcaaccaggccccactggaaatcgtctcgaaactgctctcagagaacacaaacttgaccacccaggagcatgaaaacatcattgtggcaatcgctcctttgctggaaaacaaccacccaccaccagatctctgtgaattcttttgcaagcactgcagagagcggccccggtccatggtggtcatcgaggtgttcacccccgtggtgcagcgaatcctcaagcataacatggactttgggaagtgcccgcgactgaggctgtttactcaggagtacatccttgccttgaacgagctcaacgcggggatggaagtggtgaagaagttcattcagagcatgcacggccccacagggcactgcccccacccccgggtcctgcccaacctggtggccgtgtgcctggctgccatctactcctgctatgaagagttcatcaacagccgcgacaattccccaagcctgaaggaaatccggaacggctgccagcagccgtgcgaccggaagcccactttacctctgcgccttctgcaccccagcccggacctggtgtctcaggaagccacgctgtctgaggcccggctcaagtcggtggtcgtggcctccagtgagatccacgtggaggtggaacgcaccagcactgccaagccggcgctgacggccagcgcaggcaacgacagcgagcccaacctcatcgactgcctcatggtcagccccgcctgcagcaccatgagcatcgagctgggcccccaggccgaccgcacgctcggctgctacgtggaaatcctcaagctgctgtcagactatgatgactggagaccgtctctggccagtttgcttcaacccattccattccccaaagaagctctcgcacatgagaagttcaccaaggaactgaagtacgtgattcagaggttcgccgaagaccccaggcaagaggtccactcatgcctgctgagcgtgcgggccggcaaagatggctggttccagctctacagccccggaggggtggcctgcgacgatgacggggagctgttcgccagcatggtgcacatcctcatgggctcctgttacaagaccaaaaaattcctgctctccctggcagaaaacaagctgggtccctgcatgctcctggcactgagggggaaccagaccatggtggagatcctgtgcttgatgctggaatacaacatcatcgacaacaacgacacccaactgcagatcatctcaaccctggagagcacagacgtggggaagcgcatgtacgagcagctgtgtgaccggcagcgggagctgaaggagctgcaaaggaaaggcgggcccaccaggctaacactgccctccaagtccacagacgctgacttggctcgtttgctgagctccggctccttcggaaacctggagaacctcagtttggccttcaccaatgtaaccagtgcctgcgccgagcacctcatcaaactgccttcgctcaagcagctgaacctgtggtccactcagtttggagacgctggccttcggctcctgtcggaacacctcaccatgctccaggtgctgaacctgtgcgagaccccggtcacagacgctggcctgctggccctgagctccatgaagagtctctgcagtttaaacatgaacagcaccaagctctcagctgacacctacgaagatctgaaggccaagcttcccaatttgaaggaagtggacgtccgctacaccgaagcctggtgaagctcccagctcaaggcaggaagacgtttgcaaccgcgacaaaataactcttgactaacagccgcagagcagccggtcctggggtcccaccctggtgccctggctgtgagatagatggggagtctttctgggggcggaggggggagggggtggggagggggcccacaagcacgcccagcccccgccgaattcttttagcttcgtaattggaacctttgacctgatctaaagtggactttgtagcaacaagaggagcatcagcgggtcggggaggggtttgggggtgggctggggggtgggggaccctttgtggattttctttgcctttgtgtttgatgccgtcgtgtgggaaaagtcaactccgatgccaccattgcgggccggacgaaggatgctttcttcctagaggctccgagctgagctgcgaactcgccccccgcccttgggacaagaagacccagtcacatcactgcacccgtcctgtgtcctcaccattgctatgcaaagtgattcttgttgtacataagatttaaataatgcacctatttaagacatgttgacaaattgcgggtctgggacccgcctcttatttatgaagtctttgaccgtcccccccgcccgaccccaccgccctcccgcccccacctggcgtgtagtactgtataaaccagtcagctgtcgggttagtggtagtattattgttatttttttaaaggaaacaaacagacaacaaaaagaagaaaaaaaaaaagaacctccttggaaaaattaattgctttttcgtaatggattctctatgctaatgctctctcgtctgtctgtctgtctgcccactcccccacccaccactgtgcgtttctgatttccaaatgtctccaactccctcacgaggtggggctcaggctggaggaggagggattaagatccccttgctccactaaggcccaagctctttctctcggcaccttttagacttgaatgggaggctgctaacccgccctctccagtccaccccggtaaaagagctgttccccacccccagggagctcctgtccctgtcagcctttgctgtcccctgtccccaacggagactctgtcacccctgggctccccctgccatcgtgtgcttcacgtggccccatgcatgcccgcctctctgcatggtctcttgggaaaagagagatgtgtcgcctccgccagtccgactgccctccccaccccacccccgccaccccccacatgtgaccactgcaacgaagacactccttctgtccccacctgctccgaagacaaaccaacctccgtttcttttataaacagtcggctttttcttaataagccctcactgtacagaacagcccgttgatggtttatttggggtccccctctccccccagcccttttttctgttggtttagcacaaatacttccctcctccggcacctccaaacctaccccacagtcagtgtacttgttttatatatatttaatcttattcaatggaaaccatgcttttgtcgttttatactttgctaggtagactttattacccccccactatgccctcatttttttaaaaaaggaaaaaaaaaagaaactgggttccagtcttaattcattttccgtgccaggttttatttcgtgtgtgtgtgagtgtgttctgttttgtgttttgttttttgttgttgtttttagttgtttggttttcttttctttcccccctccggtcccatacttcacagcactctggtgcgggaagaagcagaagcaaaaaaaataaaaataaaaaaataaataaaaataaaaaaaataaaaaaggaaaaaaaaaaaagaagaaacaagacatgccacctttcccctcgcactgttgcttttcctgatggttaatactactgtcacgtagctgtgtacaaagagatgtgaaatactttcaggcaaaaataaactgtaagtgactcatcaa

SEQ ID NO: 6242 - DNA, 4131 bp, Homo sapiens
  source 1..4131: mol_type = unassigned DNA
ggcttcttggatgggctgggcgtgcatggcataaccgtttgagaacaacaaaccaagccggccgggctgccgctctgtttcctgcgaggagggaagttacagatctccgccctggcgtccggggaaggatgggacaggctgctgagccaactgggtacatggaaaactcagtctcctacagcgcaattgaagacgttcagctgctgtcctgggagaatgccccgaagtactgtttacagctcacgattcctgggggaactgtcttactgcaggctgccaatagctacctgcgagaccagtggttccattctctgcaatggaagaaaaagatttacaaatataagaaagtgctgagtaacccaagccgctgggaagttgtcttgaaagagatccggaccctggtggacatggccctgacatcccccctgcaggatgactccatcaaccaggccccactggaaatcgtctcgaaactgctctcagagaacacaaacttgaccacccaggagcatgaaaacatcattgtggcaatcgctcctttgctggaaaacaaccacccaccaccagatctctgtgaattcttttgcaagcactgcagagagcggccccggtccatggtggtcatcgaggtgttcacccccgtggtgcagcgaatcctcaagcataacatggactttgggaagtgcccgcgactgaggctgtttactcaggagtacatccttgccttgaacgagctcaacgcggggatggaagtggtgaagaagttcattcagagcatgcacggccccacagggcactgcccccacccccgggtcctgcccaacctggtggccgtgtgcctggctgccatctactcctgctatgaagagttcatcaacagccgcgacaattccccaagcctgaaggaaatccggaacggctgccagcagccgtgcgaccggaagcccactttacctctgcgccttctgcaccccagcccggacctggtgtctcaggaagccacgctgtctgaggcccggctcaagtcggtggtcgtggcctccagtgagatccacgtggaggtggaacgcaccagcactgccaagccggcgctgacggccagcgcaggcaacgacagcgagcccaacctcatcgactgcctcatggtcagccccgcctgcagcaccatgagcatcgagctgggcccccaggccgaccgcacgctcggctgctacgtggaaatcctcaagctgctgtcagactatgatgactggagaccgtctctggccagtttgcttcaacccattccattccccaaagaagctctcgcacatgagaagttcaccaaggaactgaagtacgtgattcagaggttcgccgaagaccccaggcaagaggtccactcatgcctgctgagcgtgcgggccggcaaagatggctggttccagctctacagccccggaggggtggcctgcgacgatgacggggagctgttcgccagcatggtgcacatcctcatgggctcctgttacaagaccaaaaaattcctgctctccctggcagaaaacaagctgggtccctgcatgctcctggcactgagggggaaccagaccatggtggagatcctgtgcttgatgctggaatacaacatcatcgacaacaacgacacccaactgcagatcatctcaaccctggagagcacagacgtggggaagcgcatgtacgagcagctgtgtgaccggcagcgggagctgaaggagctgcaaaggaaaggcgggcccaccaggctaacactgccctccaagtccacagacgctgacttggctcgtttgctgagctccggctccttcggaaacctggagaacctcagtttggccttcaccaatgtaaccagtgcctgcgccgagcacctcatcaaactgccttcgctcaagcagctgaacctgtggtccactcagtttggagacgctggccttcggctcctgtcggaacacctcaccatgctccaggtgctgaacctgtgcgagaccccggtcacagacgctggcctgctggccctgagctccatgaagagtctctgcagtttaaacatgaacagcaccaagctctcagctgacacctacgaagatctgaaggccaagcttcccaatttgaaggaagtggacgtccgctacaccgaagcctggtgaagctcccagctcaaggcaggaagacgtttgcaaccgcgacaaaataactcttgactaacagccgcagagcagccggtcctggggtcccaccctggtgccctggctgtgagatagatggggagtctttctgggggcggaggggggagggggtggggagggggcccacaagcacgcccagcccccgccgaattcttttagcttcgtaattggaacctttgacctgatctaaagtggactttgtagcaacaagaggagcatcagcgggtcggggaggggtttgggggtgggctggggggtgggggaccctttgtggattttctttgcctttgtgtttgatgccgtcgtgtgggaaaagtcaactccgatgccaccattgcgggccggacgaaggatgctttcttcctagaggctccgagctgagctgcgaactcgccccccgcccttgggacaagaagacccagtcacatcactgcacccgtcctgtgtcctcaccattgctatgcaaagtgattcttgttgtacataagatttaaataatgcacctatttaagacatgttgacaaattgcgggtctgggacccgcctcttatttatgaagtctttgaccgtcccccccgcccgaccccaccgccctcccgcccccacctggcgtgtagtactgtataaaccagtcagctgtcgggttagtggtagtattattgttatttttttaaaggaaacaaacagacaacaaaaagaagaaaaaaaaaaagaacctccttggaaaaattaattgctttttcgtaatggattctctatgctaatgctctctcgtctgtctgtctgtctgcccactcccccacccaccactgtgcgtttctgatttccaaatgtctccaactccctcacgaggtggggctcaggctggaggaggagggattaagatccccttgctccactaaggcccaagctctttctctcggcaccttttagacttgaatgggaggctgctaacccgccctctccagtccaccccggtaaaagagctgttccccacccccagggagctcctgtccctgtcagcctttgctgtcccctgtccccaacggagactctgtcacccctgggctccccctgccatcgtgtgcttcacgtggccccatgcatgcccgcctctctgcatggtctcttgggaaaagagagatgtgtcgcctccgccagtccgactgccctccccaccccacccccgccaccccccacatgtgaccactgcaacgaagacactccttctgtccccacctgctccgaagacaaaccaacctccgtttcttttataaacagtcggctttttcttaataagccctcactgtacagaacagcccgttgatggtttatttggggtccccctctccccccagcccttttttctgttggtttagcacaaatacttccctcctccggcacctccaaacctaccccacagtcagtgtacttgttttatatatatttaatcttattcaatggaaaccatgcttttgtcgttttatactttgctaggtagactttattacccccccactatgccctcatttttttaaaaaaggaaaaaaaaaagaaactgggttccagtcttaattcattttccgtgccaggttttatttcgtgtgtgtgtgagtgtgttctgttttgtgttttgttttttgttgttgtttttagttgtttggttttcttttctttcccccctccggtcccatacttcacagcactctggtgcgggaagaagcagaagcaaaaaaaataaaaataaaaaaataaataaaaataaaaaaaataaaaaaggaaaaaaaaaaaagaagaaacaagacatgccacctttcccctcgcactgttgcttttcctgatggttaatactactgtcacgtagctgtgtacaaagagatgtgaaatactttcaggcaaaaataaactgtaagtgactcatcaa

SEQ ID NO: 6243 - DNA, 2477 bp, Homo sapiens
  source 1..2477: mol_type = unassigned DNA
gtggtgctgaggagccgagcgggcggggagcctctagctgctccagcatcccacttgctcactgccccctgatcccgtggacagcgcagtcagaggcaggagcaggagaggaggaagcagaggaaaaggaggaggaggaggcggcttgcaactcctcagatccagagccggactccgagctaatgagggagcagcagacacggcctcccaacccttcccccaaggggaacccaggctgccaatagctacctgcgagaccagtggttccattctctgcaatggaagaaaaagatttacaaatataagaaagtgctgagtaacccaagccgctgggaagttgtcttgaaagagatccggaccctggtggacatggccctgacatcccccctgcaggatgactccatcaaccaggccccactggaaatcgtctcgaaactgctctcagagaacacaaacttgaccacccaggagcatgaaaacatcattgtggcaatcgctcctttgctggaaaacaaccacccaccaccagatctctgtgaattcttttgcaagcactgcagagagcggccccggtccatggtggtcatcgaggtgttcacccccgtggtgcagcgaatcctcaagcataacatggactttgggaagtgcccgcgactgaggctgtttactcaggagtacatccttgccttgaacgagctcaacgcggggatggaagtggtgaagaagttcattcagagcatgcacggccccacagggcactgcccccacccccgggtcctgcccaacctggtggccgtgtgcctggctgccatctactcctgctatgaagagttcatcaacagccgcgacaattccccaagcctgaaggaaatccggaacggctgccagcagccgtgcgaccggaagcccactttacctctgcgccttctgcaccccagcccggacctggtgtctcaggaagccacgctgtctgaggcccggctcaagtcggtggtcgtggcctccagtgagatccacgtggaggtggaacgcaccagcactgccaagccggcgctgacggccagcgcaggcaacgacagcgagcccaacctcatcgactgcctcatggtcagccccgcctgcagcaccatgagcatcgagctgggcccccaggccgaccgcacgctcggctgctacgtggaaatcctcaagctgctgtcagactatgatgactggagaccgtctctggccagtttgcttcaacccattccattccccaaagaagctctcgcacatgagaagttcaccaaggaactgaagtacgtgattcagaggttcgccgaagaccccaggcaagaggtccactcatgcctgctgagcgtgcgggccggcaaagatggctggttccagctctacagccccggaggggtggcctgcgacgatgacggggagctgttcgccagcatggtgcacatcctcatgggctcctgttacaagaccaaaaaattcctgctctccctggcagaaaacaagctgggtccctgcatgctcctggcactgagggggaaccagaccatggtggagatcctgtgcttgatgctggaatacaacatcatcgacaacaacgacacccaactgcagatcatctcaaccctggagagcacagacgtggggaagcgcatgtacgagcagctgtgtgaccggcagcgggagctgaaggagctgcaaaggaaaggcgggcccaccaggctaacactgccctccaagtccacagacgctgacttggctcgtttgctgagctccggctccttcggaaacctggagaacctcagtttggccttcaccaatgtaaccagtgcctgcgccgagcacctcatcaaactgccttcgctcaagcagctgaacctgtggtccactcagtttggagacgctggccttcggctcctgtcggaacacctcaccatgctccaggtgctgaacctgtgcgagaccccggtcacagacgctggcctgctggccctgagctccatgaagagtctctgcagtttaaacatgaacagcaccaagctctcagctgacacctacgaagatctgaaggccaagcttcccaatttgaaggaagtggacgtccgctacaccgaagcctggtgaagctcccagctcaaggcaggaagacgtttgcaaccgcgacaaaataactcttgactaacagccgcagagcagccggtcctggggtcccaccctggtgccctggctgtgagatagatggggagtctttctgggggcggaggggggagggggtggggagggggctcaggctggaggaggagggattaagatccccttgctccactaaggcccaagctctttctctcggcaccttttagacttgaatgggaggctgctaacccgccctctccagtccaccccggtaaaagagctgttccccacccccagggagctcctgtccctgtcagcctttgctgtcccctgtcccc

SEQ ID NO: 6244 - DNA, 2818 bp, Homo sapiens
  source 1..2818: mol_type = unassigned DNA
cacatgttgctacctagtaaataaaatcttaagaagatccgtggctttccttcaccagttcatagcatcgtgattcattgcccggattggactcgactctactcactggacatctaaccactccacttaattaacaatacccaccctacaggggtgttgtaaggattaaaatttaaaatacccgtgttttctacagtgcctggctcaaaagctactgcaagctcgttactgctcatcctccagaggcccacatcaagtcagccacgactcaaggagactccaaagataaaagctgaagccaaaatatatgattctaaacaccctcctcggctactgcaaagcactgtgagcactttctcaggacgagagccaagaagcccagcacctatgggtcaccacagtttccgaggtcccagatgaaaaagatgcgctcgctaccaccgtgcggcggtcctttctctcgcaatagtctcaatgctcccgggccctgcctccggacgccaggacagaggtaccaaaatctcacctcctgcaaagaaacctaattgctacgggggccggaagaggaagaggtgcggctccgacagccagaggggcgggcatacgcagcctccctcggctcagcctgctactggggatgcagagcgtcctggtcgccatgaaaacaggccacacctcggcgatcccggccggtggtttgcaagtgcgcaggcgcgcgcccccttccgcgcatgagcagtgctgctcccaacccgccagtcgcggtctccggcgccagctacgccgctgccgctgtcactatggcccattacaaagccgccgactcgaagcgtgagcagttccggaggtacttggagaagtcgggggtgctggacacgctgaccaaggtgttggtagccttatatgaagaaccagagaaacctaacagtgctttggattttttaaagcatcacttaggagctgctactccagaaaatccagaaatagagctgcttcgcctagaactggccgaaatgaaagagaagtatgaagctattgtagaagaaaataaaaaactgaaagcaaagcttgctcagtatgaaccacctcaggaggagaagcgtgctgaataggattcttctcagtttgaaagacaatgaaaaatggttttgtatgacttgaatagtttgtatagtatataatcttttctgaacagatgctatagaactcttttaatatgtttaattcacctatcacactctgttaaaaacacatagaatcatcaataaaaactcaatataactttctttgggtcttaaagcaggagaatccaaagtaaatcctgaacaaaacctaaacacagccatctaactcattaccttaaaagacattctgtttattagtctgattaggaatgatggcactggttgtattttagccaagacagtttagcatggagctattccttggtgcagttcaggatatgaacacaggtacagtcattctttgaaggtgacactgttctgtatattccctataggcagctggagagatctgtgtgacacaagatgcttttgtacgggttcccatgaatcttctgctcttgtttgtgtgacatggaacaaataacttctttgccaccactttgccttagataactgtgtgtgtgtgtgccagtttgaactctgacaccacattttccttctatgcaatcatgcctgtctgataatcttgcattgctttcctctgagctttagtgggtcctagttgcacactggcctttctgtgctgtttttcaatttgcctaataatagcagttaccctgattgtaatttatgtaactttaaacaggatcacactgtaccccctgcctgccttatttgcttactgagcacaggacagaggcaatatacaactctgggttcacacacaagctgagatgagaagaggaatgagccatatattggggaaaatcatagtttgtaggtataattatatagtgcttttctccctcaaagtatttttctagccttgaattcattttatcttcattatccctgtgaagtaggtgggacaagtataaggggaagaggggtgctgaatttttaggccaaagactgatattaatacaaatcactcactaactgtagagccttgggcattatcagtgaactactctgagatttactgtcttcatctgtttaatgagtagaatgtccgtgatgcctacctcacagggttgttgtgagggtcaaatgagaatgtatgtgaaagatttgtaaatggtaaagcactatattcttgtttgttagtcctttttcctttctttgggtagacctacagtcagatgttttgttttatggatcacttattttccttactggtagactgtcgttttatagacatattcctatttcatatattctctccctgttgttagagaacctatctttgtttttggtcaaaacacacatagaaaacaaaatgatccaatgaaaactggtttaactagcaaaagccttggcacctgttggagactatgaccaagccaataaaaagggcatttaaatcagccctgttagtaggaatgtggctatggctggtgcctcttctagtcacaagtttgtttttggagggggtccagaagatcattcccttgcatagatttctcttttaccaatttgagtgcctcctacatgggcagcagtggactaagtgctgggtgtgataaagaggaatgacttaattatgagactgtatataatcaaatacagtgtgggttaggacctgtggcagaccattataataaagcatggccccgtgagggttttgaaagaga

SEQ ID NO: 6245 - DNA, 2553 bp, Homo sapiens
  source 1..2553: mol_type = unassigned DNA
agaatcccgcgctgaagcgaagtcgagacgtttgaccttcctccgtttccgtagttccgagttgcggtttctccgttagtgcttccgggttgcagccagggaagcctccgcggtggtgcaagtggaacccaagccttgaggtttcagtgagtagggggccgacgtgagctttagcgtccccctttagcctccctcttcgattccttgaagaccctggtgcagcttagcaagagggcccaggatttttggatccccagccctgtgacaagggttcctgtccagtttccccctcccaggatttcgactcagttcagcgaagtcaccgccccgtctgagaaatgaggacaccaaggcttagagcacagccccgaggcgccgtctaccaggccccgtcccctcccccggctcctgtcggtcagcactgaaaccccgtccctgctccaggcctccttctctggggtccaaggtcccatacaggcctctgcctcggccgcaggcccttcagtcaccgtcgcctcgtctccctgactgtccgcaggcctgggcagcatggccgtattccggtcgggtctcctggtgctgacgacgccgctggcctccctagcccctcgcctggcctccatcctgacctcggcggcccggctggtgaatcacacactctatgttcacctgcagccgggcatgagcctggagggcccggctcagccccagtccagccccgtgcaggccacgtttgaggttcttgatttcatcacgcacctctatgctggcgccgacgtccacaggcacttggacgtcagaatcctactgaccaatatccgaaccaagagcacctttctccctcccctgcccacctcagtccagaatctcgcccacccgccagaagtcgtgttgacagatttccagaccctggatggaagccagtacaacccggtcaaacagcagctagtgcgttacgccaccagctgttacagctgttgtccgcgactggcctcggtgctgctatactccgattatgggataggagaagtgcccgtggagcccctggatgtccccttaccctccacgatcaggccagcttcccccgtggccgggtctccaaagcagccggtgcgtggctactaccgtggcgctgtcggtggcacgtttgaccgcctgcacaacgcccacaaggtgttgctcagtgtcgcgtgcatcctggcccaggagcagcttgtggtgggagtagcagacaaagatctgttgaagagcaagttgctccctgagctgctccaaccttatacagaacgtgtggaacatctgagtgaattcctggtggacatcaagccctccttgacttttgatgtcatccccctgctggacccctatgggcccgctggctctgacccctccctggagttcctggtggtcagcgaggagacctatcgtggggggatggccatcaaccgcttccgccttgagaatgacctggaggaacttgctttgtaccagatccagctgctgaaggacctcagacatacagagaatgaagaggacaaagtcagctcctccagcttccgccagcgaatgttggggaacctgcttcggcctccatatgaaaggccagagctccccacatgtctctatgtaattgggctgactggcatcagtggctctgggaagagctcaatagctcagcgactgaagggcctgggggcgtttgtcattgacagtgaccacctgggtcatcgggcctatgccccaggtggccctgcctaccagcctgtggtggaggcctttggaacagatattctccataaagatggcatcatcaacaggaaggtcctaggcagccgggtgtttgggaataagaagcagctgaagatactcacggacattatgtggccaattatcgcaaagctggcccgagaggagatggatcgggctgtggctgagggaaagcgtgtgtgtgtgattgatgccgctgtgttgcttgaagccggctggcagaacctggtccatgaggtgtggactgctgtcatcccagagactgaggctgtaagacgcattgtggagagggatggcctcagtgaagccgcggctcaaagccggctgcagagccagatgagcgggcagcagcttgtggaacagagccacgtggtgctcagcaccttgtgggagccgcatatcacccaacgccaggtggagaaagcctgggccctcttgcagaagcgcattcccaagactcatcaggccctcgactgaaaagttctcagtggggccagactggctcctggagctgacaagcgaccccgtggtgaggagaaatgggggccttgatgctcaccctggttcaggcccagaggtccaagctatactgtgcaggacatggccaggcctggtggacacaggaagcctacccaacacgctggtatttggccaacactgaggatgtggttcatgggggagcagtcccctccccactcttgcccatgggtgactcttacccacagctgactagggccagcgcaaatactggaacctgtaacagaattaaaggtgaatgttctgaga

SEQ ID NO: 6246 - DNA, 2417 bp, Homo sapiens
  source 1..2417: mol_type = unassigned DNA
agaatcccgcgctgaagcgaagtcgagacgtttgaccttcctccgtttccgtagttccgagttgcggtttctccgttagtgcttccgggttgcagccagggaagcctccgcggtggtgcaagtggaacccaagccttgaggtttcatttccccctcccaggatttcgactcagttcagcgaagtcaccgccccgtctgagaaatgaggacaccaaggcttagagcacagccccgaggcgccgtctaccaggccccgtcccctcccccggctcctgtcggtcagcactgaaaccccgtccctgctccaggcctccttctctggggtccaaggtcccatacaggcctctgcctcggccgcaggcccttcagtcaccgtcgcctcgtctccctgactgtccgcaggcctgggcagcatggccgtattccggtcgggtctcctggtgctgacgacgccgctggcctccctagcccctcgcctggcctccatcctgacctcggcggcccggctggtgaatcacacactctatgttcacctgcagccgggcatgagcctggagggcccggctcagccccagtccagccccgtgcaggccacgtttgaggttcttgatttcatcacgcacctctatgctggcgccgacgtccacaggcacttggacgtcagaatcctactgaccaatatccgaaccaagagcacctttctccctcccctgcccacctcagtccagaatctcgcccacccgccagaagtcgtgttgacagatttccagaccctggatggaagccagtacaacccggtcaaacagcagctagtgcgttacgccaccagctgttacagctgttgtccgcgactggcctcggtgctgctatactccgattatgggataggagaagtgcccgtggagcccctggatgtccccttaccctccacgatcaggccagcttcccccgtggccgggtctccaaagcagccggtgcgtggctactaccgtggcgctgtcggtggcacgtttgaccgcctgcacaacgcccacaaggtgttgctcagtgtcgcgtgcatcctggcccaggagcagcttgtggtgggagtagcagacaaagatctgttgaagagcaagttgctccctgagctgctccaaccttatacagaacgtgtggaacatctgagtgaattcctggtggacatcaagccctccttgacttttgatgtcatccccctgctggacccctatgggcccgctggctctgacccctccctggagttcctggtggtcagcgaggagacctatcgtggggggatggccatcaaccgcttccgccttgagaatgacctggaggaacttgctttgtaccagatccagctgctgaaggacctcagacatacagagaatgaagaggacaaagtcagctcctccagcttccgccagcgaatgttggggaacctgcttcggcctccatatgaaaggccagagctccccacatgtctctatgtaattgggctgactggcatcagtggctctgggaagagctcaatagctcagcgactgaagggcctgggggcgtttgtcattgacagtgaccacctgggtcatcgggcctatgccccaggtggccctgcctaccagcctgtggtggaggcctttggaacagatattctccataaagatggcatcatcaacaggaaggtcctaggcagccgggtgtttgggaataagaagcagctgaagatactcacggacattatgtggccaattatcgcaaagctggcccgagaggagatggatcgggctgtggctgagggaaagcgtgtgtgtgtgattgatgccgctgtgttgcttgaagccggctggcagaacctggtccatgaggtgtggactgctgtcatcccagagactgaggctgtaagacgcattgtggagagggatggcctcagtgaagccgcggctcaaagccggctgcagagccagatgagcgggcagcagcttgtggaacagagccacgtggtgctcagcaccttgtgggagccgcatatcacccaacgccaggtggagaaagcctgggccctcttgcagaagcgcattcccaagactcatcaggccctcgactgaaaagttctcagtggggccagactggctcctggagctgacaagcgaccccgtggtgaggagaaatgggggccttgatgctcaccctggttcaggcccagaggtccaagctatactgtgcaggacatggccaggcctggtggacacaggaagcctacccaacacgctggtatttggccaacactgaggatgtggttcatgggggagcagtcccctccccactcttgcccatgggtgactcttacccacagctgactagggccagcgcaaatactggaacctgtaacagaattaaaggtgaatgttctgaga

SEQ ID NO: 6247 - DNA, 2290 bp, Homo sapiens
  source 1..2290: mol_type = unassigned DNA
agaatcccgcgctgaagcgaagtcgagacgtttgaccttcctccgtttccgtagttccgagttgcggtttctccgttagtgcttccgggttgcagccagggaagcctccgcggtggtgcaagtggaacccaagccttgaggtttcatttccccctcccaggatttcgactcagttcagcgaagtcaccgccccgtctgagaaatgaggacaccaaggcttagagcacagccccgaggcgccgtctaccaggccccgtcccctcccccggctcctgtcggcctgggcagcatggccgtattccggtcgggtctcctggtgctgacgacgccgctggcctccctagcccctcgcctggcctccatcctgacctcggcggcccggctggtgaatcacacactctatgttcacctgcagccgggcatgagcctggagggcccggctcagccccagtccagccccgtgcaggccacgtttgaggttcttgatttcatcacgcacctctatgctggcgccgacgtccacaggcacttggacgtcagaatcctactgaccaatatccgaaccaagagcacctttctccctcccctgcccacctcagtccagaatctcgcccacccgccagaagtcgtgttgacagatttccagaccctggatggaagccagtacaacccggtcaaacagcagctagtgcgttacgccaccagctgttacagctgttgtccgcgactggcctcggtgctgctatactccgattatgggataggagaagtgcccgtggagcccctggatgtccccttaccctccacgatcaggccagcttcccccgtggccgggtctccaaagcagccggtgcgtggctactaccgtggcgctgtcggtggcacgtttgaccgcctgcacaacgcccacaaggtgttgctcagtgtcgcgtgcatcctggcccaggagcagcttgtggtgggagtagcagacaaagatctgttgaagagcaagttgctccctgagctgctccaaccttatacagaacgtgtggaacatctgagtgaattcctggtggacatcaagccctccttgacttttgatgtcatccccctgctggacccctatgggcccgctggctctgacccctccctggagttcctggtggtcagcgaggagacctatcgtggggggatggccatcaaccgcttccgccttgagaatgacctggaggaacttgctttgtaccagatccagctgctgaaggacctcagacatacagagaatgaagaggacaaagtcagctcctccagcttccgccagcgaatgttggggaacctgcttcggcctccatatgaaaggccagagctccccacatgtctctatgtaattgggctgactggcatcagtggctctgggaagagctcaatagctcagcgactgaagggcctgggggcgtttgtcattgacagtgaccacctgggtcatcgggcctatgccccaggtggccctgcctaccagcctgtggtggaggcctttggaacagatattctccataaagatggcatcatcaacaggaaggtcctaggcagccgggtgtttgggaataagaagcagctgaagatactcacggacattatgtggccaattatcgcaaagctggcccgagaggagatggatcgggctgtggctgagggaaagcgtgtgtgtgtgattgatgccgctgtgttgcttgaagccggctggcagaacctggtccatgaggtgtggactgctgtcatcccagagactgaggctgtaagacgcattgtggagagggatggcctcagtgaagccgcggctcaaagccggctgcagagccagatgagcgggcagcagcttgtggaacagagccacgtggtgctcagcaccttgtgggagccgcatatcacccaacgccaggtggagaaagcctgggccctcttgcagaagcgcattcccaagactcatcaggccctcgactgaaaagttctcagtggggccagactggctcctggagctgacaagcgaccccgtggtgaggagaaatgggggccttgatgctcaccctggttcaggcccagaggtccaagctatactgtgcaggacatggccaggcctggtggacacaggaagcctacccaacacgctggtatttggccaacactgaggatgtggttcatgggggagcagtcccctccccactcttgcccatgggtgactcttacccacagctgactagggccagcgcaaatactggaacctgtaacagaattaaaggtgaatgttctg

SEQ ID NO: 6248 - DNA, 1179 bp, Homo sapiens
  source 1..1179: mol_type = unassigned DNA
agtgcttccgggttgcagccagggaagcctccgcggtggtgcaagtggaacccaagccttgaggtttcagcctgggcagcatggccgtattccggtcgggtctcctggtgctgacgacgccgctggcctccctagcccctcgcctggcctccatcctgacctcggcggcccggctggtgaatcacacactctatgttcacctgcagccgggcatgagcctggagggcccggctcagccccagtccagccccgtgcaggccacgtttgaggttcttgatttcatcacgcacctttctccctcccctgcccacctcagtccagaatctcgcccacccgccagaagtcgtgttgacagatttccagaccctggatggaagccagtacaacccggtcaaacagcagctagtgcgttacgccaccagctgttacagctgttgtccgcgactggcctcggtgctgctatactccgattatgggataggagaagtgcccgtggagcccctggatgtccccttaccctccacgatcaggccagcttcccccgtggccgggtctccaaagcagccggtgcgtggctactaccgtggcgctgtcggtggcacgtttgaccgcctgcacaacgcccacaaggtgttgctcagtgtcgcgtgcatcctggcccaggagcagcttgtggtgggagtagcagacaaagatctgttgaagagcaagttgctccctgagctgctccaaccttatacagaacgtgtggaacatctgagtgaattcctggtggacatcaagccctccttgacttttgatgtcatccccctgctggacccctatgggcccgctggctctgacccctccctggagttcctggtggtcagcgaggagacctatcgtggggggatggccatcaaccgcttccgccttgagaatgacctggaggaacttgctttgtaccagatccagctgctgaaggacctcagacatacagagaatgaagaggacaaagtcagctcctccagcttccgccagcgaatgttggggaacctgcttcggcctccatatgaaaggccagagctccccacatgtctctatgtaattgggctgactggcatcagtggctctgggaagagctcaatagctcagcgactgaagggcctgggggcgtttgtcattgacagtgaccacctg

SEQ ID NO: 6249 - DNA, 1840 bp, Homo sapiens
  source 1..1840: mol_type = unassigned DNA
agaatcccgcgctgaagcgaagtcgagacgtttgaccttcctccgtttccgtagttccgagttgcggtttctccgttagtgcttccgggttgcagccagggaagcctccgcggtggtgcaagtggaacccaagccttgaggtttcatccagaatctcgcccacccgccagaagtcgtgttgacagatttccagaccctggatggaagccagtacaacccggtcaaacagcagctagtgcgttacgccaccagctgttacagctgttgtccgcgactggcctcggtgctgctatactccgattatgggataggagaagtgcccgtggagcccctggatgtccccttaccctccacgatcaggccagcttcccccgtggccgggtctccaaagcagccggtgcgtggctactaccgtggcgctgtcggtggcacgtttgaccgcctgcacaacgcccacaaggtgttgctcagtgtcgcgtgcatcctggcccaggagcagcttgtggtgggagtagcagacaaagatctgttgaagagcaagttgctccctgagctgctccaaccttatacagaacgtgtggaacatctgagtgaattcctggtggacatcaagccctccttgacttttgatgtcatccccctgctggacccctatgggcccgctggctctgacccctccctggagttcctggtggtcagcgaggagacctatcgtggggggatggccatcaaccgcttccgccttgagaatgacctggaggaacttgctttgtaccagatccagctgctgaaggacctcagacatacagagaatgaagaggacaaagtcagctcctccagcttccgccagcgaatgttggggaacctgcttcggcctccatatgaaaggccagagctccccacatgtctctatgtaattgggctgactggcatcagtggctctgggaagagctcaatagctcagcgactgaagggcctgggggcgtttgtcattgacagtgaccacctgggtcatcgggcctatgccccaggtggccctgcctaccagcctgtggtggaggcctttggaacagatattctccataaagatggcatcatcaacaggaaggtcctaggcagccgggtgtttgggaataagaagcagctgaagatactcacggacattatgtggccaattatcgcaaagctggcccgagaggagatggatcgggctgtggctgagggaaagcgtgtgtgtgtgattgatgccgctgtgttgcttgaagccggctggcagaacctggtccatgaggtgtggactgctgtcatcccagagactgaggctgtaagacgcattgtggagagggatggcctcagtgaagccgcggctcaaagccggctgcagagccagatgagcgggcagcagcttgtggaacagagccacgtggtgctcagcaccttgtgggagccgcatatcacccaacgccaggtggagaaagcctgggccctcttgcagaagcgcattcccaagactcatcaggccctcgactgaaaagttctcagtggggccagactggctcctggagctgacaagcgaccccgtggtgaggagaaatgggggccttgatgctcaccctggttcaggcccagaggtccaagctatactgtgcaggacatggccaggcctggtggacacaggaagcctacccaacacgctggtatttggccaacactgaggatgtggttcatgggggagcagtcccctccccactcttgcccatgggtgactcttacccacagctgactagggccagcgcaaatactggaacctgtaacagaattaaaggtgaatgttctgaga

SEQ ID NO: 6250 - DNA, 1976 bp, Homo sapiens
  source 1..1976: mol_type = unassigned DNA
agtgcttccgggttgcagccagggaagcctccgcggtggtgcaagtggaacccaagccttgaggtttcatttccccctcccaggatttcgactcagttcagcgaagtcaccgccccgtctgagaaatgaggacaccaaggcttagagcacagccccgaggcgccgtctaccaggccccgtcccctcccccggctcctgtcggcctgggcagcatggccgtattccggtcgggtctcctggtgctgacgacgccgctggcctccctagcccctcgcctggcctccatcctgacctcggcggcccggctggtgaatcacacactctatgttcacctgcagccgggcatgagcctggagggcccggctcagccccagtccagccccgtgcaggccacgtttgaggttcttgatttcatcacgcacctctatgctggcgccgacgtccacaggcacttggacgtcagaatcctactgaccaatatccgaaccaagagcacctttctccctcccctgcccacctcagtccagaatctcgcccacccgccagaagtcgtgttgacagatttccagaccctggatggaagccagtacaacccggtcaaacagcagctagtgcgttacgccaccagctgttacagctgttgtccgcgactggcctcggtgctgctatactccgattatgggataggagaagtgcccgtggagcccctggatgtccccttaccctccacgatcaggccagcttcccccgtggccgggtctccaaagcagccggtgcgtggctactaccgtggcgctgtcggtggcacgtttgaccgcctgcacaacgcccacaaggtgttgctcagtgtcgcgtgcatcctggcccaggagcagcttgtggtgggagtagcagacaaagatctgttgaagagcaagttgctccctgagctgctccaaccttatacagaacgtgtggaacatctgagtgaattcctggtggacatcaagccctccttgacttttgatgtcatccccctgctggacccctatgggcccgctggctctgacccctccctggagttcctggtggtcagcgaggagacctatcgtggggggatggccatcaaccgcttccgccttgagaatgacctggaggaacttgctttgtaccagatccagctgctgaaggacctcagacatacagagaatgaagaggacaaagtcagctcctccagcttccgccagcgaatgttggggaacctgcttcggcctccatatgaaaggccagagctccccacatgtctctatgtaattgggctgactggcatcagtggctctgggaagagctcaatagctcagcgactgaagggcctgggggcgtttgtcattgacagtgaccacctgggtcatcgggcctatgccccaggtggccctgcctaccagcctgtggtggaggcctttggaacagatattctccataaagatggcatcatcaacaggaaggtcctaggcagccgggtgtttgggaataagaagcagctgaagatactcacggacattatgtggccaattatcgcaaagctggcccgagaggagatggatcgggctgtggctgagggaaagcgtgtgtgtgtgattgatgccgctgtgttgcttgaagccggctggcagaacctggtccatgaggtgtggactgctgtcatcccagagactgaggctgtaagacgcattgtggagagggatggcctcagtgaagccgcggctcaaagccggctgcagagccagatgagcgggcagcagcttgtggaacagagccacgtggtgctcagcaccttgtgggagccgcatatcacccaacgccaggtggagaaagcctgggccctcttgcagaagcgcattcccaagactcatcaggccctcgactgaaaagttctcagtggggccagactggctcctggagctgacaagcgaccccgtggtgaggagaaatggggg

SEQ ID NO: 6251 - DNA, 1843 bp, Homo sapiens
  source 1..1843: mol_type = unassigned DNA
gtggaagccgccgccgcgctcgcagcttgcaggcgccgcgtagccgtcgccaccgccgccagcccgtgcgccctcggcgcgtacccgccgcgctcccatccccgccgccggccaggggcgcgctcggccgccccggacagtgtcccgctgcggctccgcggcgatggccaccaagatcgacaaagaggcttgccgggcggcgtacaacctggtgcgcgacgacggctcggccgtcatctgggtgacttttaaatatgacggctccaccatcgtccccggcgagcagggagcggagtaccagcacttcatccagcagtgcacagatgacgtccggttgtttgccttcgtgcgcttcaccaccggggatgccatgagcaagaggtccaagtttgccctcatcacgtggatcggtgagaacgtcagcgggctgcagcgcgccaaaaccgggacggacaagaccctggtgaaggaggtcgtacagaatttcgctaaggagtttgtgatcagtgatcggaaggagctggaggaagatttcatcaagagcgagctgaagaaggcggggggagccaattacgacgcccagacggagtaaccccagcccccgccacaccaccccttgccaaagtcatctgcctgctccccgggggagaggaccgccggcctcagctactagcccaccagcccaccagggagaaaagaagccatgagaggcagcgcccgccaccctgtgtccacagcccccaccttcccgcttcccttagaaccctgccgtgtcctatctcatgacgctcatggaacctctttctttgatcttctttttcttttctccccctcttttttgttctaaagaaaagtcattttgatgcaaggtcctgcctgccatcagatccgaggtgcctcctgcagtgaccccttttcctggcatttctcttccacgcgacgaggtctgcctagtgagatctgcatgacctcacgttgctttccagagcccgggcctattttgccatctcagttttcctggaccctgcttcctgtgtaccactgaggggcagctgggccaggagctgtgcccggtgcctgcagccttcataagcacacacgtccattccctactaaggcccagacctcctggtatctgccccgggctccctcatcccacctccatccggagttgcctaagatgcatgtccagcataggcaggattgctcggtggtgagaaggttaggtccggctcagactgaataagaagagataaaatttgccttaaaacttacctggcagtggctttgctgcacggtctgaaaccacctgttcccaccctcttgaccgaaatttccttgtgacacagagaagggcaaaggtctgagcccagagttgacggagggagtatttcagggttcacttcaggggctcccaaagcgacaagatcgttagggagagaggcccagggtggggactgggaatttaaggagagctgggaacggatcccttaggttcaggaagcttctgtgtaagctgcgaggatggcttgggccgaagggttgctctgcccgccgcgctagctgtgagctgagcaaagccctgggctcacagcaccccaaaagcctgtggcttcagtcctgcgtctgcaccacacattcaaaaggatcgttttgttttgtttttaaagaaaggtgagattggcttggttcttcatgagcacatttgatatagctctttttctgtttttccttgctcatttcgttttggggaagaaatctgtactgtattgggattgtaaagaacatctctgcactcagacagtttacagaaataaatgttttttttgtttttcagaaaaca

SEQ ID NO: 6252 - DNA, 2397 bp, Homo sapiens
  source 1..2397: mol_type = unassigned DNA
gggggccttgccttccgcactcgggcgcagccgggtggatctcgagcaggtgcggagccccgggcggcgggcgcgggtgcgagggatccctgacgcctctgtccctgtttctttgtcgctcccagcctgtctgtcgtcgttttggcgcccccgcctccccgcggtgcggggttgcacaccgatcctgggcttcgctcgatttgccgccgaggcgcctcccagacctagaggggcgctggcctggagcagcgggtcgtctgtgtcctctctcctctgcgccgcgcccggggatccgaagggtgcggggctctgaggaggtgacgcgcggggcctcccgcaccctggccttgcccgcattctccctctctcccaggtgtgagcagcctatcagtcaccatgtccgcagcctggatcccggctctcggcctcggtgtgtgtctgctgctgctgccggggcccgcgggcagcgagggagccgctcccattgctatcacatgttttaccagaggcttggacatcaggaaagagaaagcagatgtcctctgcccagggggctgccctcttgaggaattctctgtgtatgggaacatagtatatgcttctgtatcgagcatatgtggggctgctgtccacaggggagtaatcagcaactcagggggacctgtacgagtctatagcctacctggtcgagaaaactattcctcagtagatgccaatggcatccagtctcaaatgctttctagatggtctgcttctttcacagtaactaaaggcaaaagtagtacacaggaggccacaggacaagcagtgtccacagcacatccaccaacaggtaaacgactaaagaaaacacccgagaagaaaactggcaataaagattgtaaagcagacattgcatttctgattgatggaagctttaatattgggcagcgccgatttaatttacagaagaattttgttggaaaagtggctctaatgttgggaattggaacagaaggaccacatgtgggccttgttcaagccagtgaacatcccaaaatagaattttacttgaaaaactttacatcagccaaagatgttttgtttgccataaaggaagtaggtttcagagggggtaattccaatacaggaaaagccttgaagcatactgctcagaaattcttcacggtagatgctggagtaagaaaagggatccccaaagtggtggtggtatttattgatggttggccttctgatgacatcgaggaagcaggcattgtggccagagagtttggtgtcaatgtatttatagtttctgtggccaagcctatccctgaagaactggggatggttcaggatgtcacatttgttgacaaggctgtctgtcggaataatggcttcttctcttaccacatgcccaactggtttggcaccacaaaatacgtaaagcctctggtacagaagctgtgcactcatgaacaaatgatgtgcagcaagacctgttataactcagtgaacattgcctttctaattgatggctccagcagtgttggagatagcaatttccgcctcatgcttgaatttgtttccaacatagccaagacttttgaaatctcggacattggtgccaagatagctgctgtacagtttacttatgatcagcgcacggagttcagtttcactgactatagcaccaaagagaatgtcctagctgtcatcagaaacatccgctatatgagtggtggaacagctactggtgatgccatttccttcactgttagaaatgtgtttggccctataagggagagccccaacaagaacttcctagtaattgtcacagatgggcagtcctatgatgatgtccaaggccctgcagctgctgcacatgatgcaggaatcactatcttctctgttggtgtggcttgggcacctctggatgacctgaaagatatggcttctaaaccgaaggagtctcatgctttcttcacaagagagttcacaggattagaaccaattgtttctgatgtcatcagaggcatttgtagagatttcttagaatcccagcaataatggtaacattttgacaactgaaagaaaaagtacaaggggatccagtgtgtaaattgtattctcataatactgaaatgctttagcatactagaatcagatacaaaactattaagtatgtcaacagccatttaggcaaataagcactcctttaaagccgctgccttctggttacaatttacagtgtactttgttaaaaacactgctgaggcttcataatcatggctcttagaaactcaggaaagaggagataatgtggattaaaaccttaagagttctaaccatgcctactaaatgtacagatatgcaaattccatagctcaataaaagaatctgatacttagaccaaaa

SEQ ID NO: 6253 - DNA, 2131 bp, Homo sapiens
  source 1..2131: mol_type = unassigned DNA
agattgtaaagcagacattgcatttctgattgatggaagctttaatattgggcagcgccgatttaatttacagaagaattttgttggaaaagtggctctaatgttgggaattggaacagaaggaccacatgtgggccttgttcaagccagtgaacatcccaaaatagaattttacttgaaaaactttacatcagccaaagatgttttgtttgccataaaggaagtaggtttcagagggggtaattccaatacagatataacattggagaagtatctctttgtaatgctaaaaagaagtgaaaatcaacagacttatctaatgaatgcagatgtggcagaaagaatgagtagcactaccgttgactctgaagagagacttcttagaggaaaagccttgaagcatactgctcagaaattcttcacggtagatgctggagtaagaaaagggatccccaaagtggtggtggtatttattgatggttggccttctgatgacatcgaggaagcaggcattgtggccagagagtttggtgtcaatgtatttatagtttctgtggccaagcctatccctgaagaactggggatggttcaggatgtcacatttgttgacaaggctgtctgtcggaataatggcttcttctcttaccacatgcccaactggtttggcaccacaaaatacgtaaagcctctggtacagaagctgtgcactcatgaacaaatgatgtgcagcaagacctgttataactcagtgaacattgcctttctaattgatggctccagcagtgttggagatagcaatttccgcctcatgcttgaatttgtttccaacatagccaagacttttgaaatctcggacattggtgccaagatagctgctgtacagtttacttatgatcagcgcacggagttcagtttcactgactatagcaccaaagagaatgtcctagctgtcatcagaaacatccgctatatgagtggtggaacagctactggtgatgccatttccttcactgttagaaatgtgtttggccctataagggagagccccaacaagaacttcctagtaattgtcacagatgggcagtcctatgatgatgtccaaggccctgcagctgctgcacatgatgcaggaatcactatcttctctgttggtgtggcttgggcacctctggatgacctgaaagatatggcttctaaaccgaaggagtctcatgctttcttcacaagagagttcacaggattagaaccaattgtttctgatgtcatcagaggcatttgtagagatttcttagaatcccagcaataatggtaacattttgacaactgaaagaaaaagtacaaggggatccagtgtgtaaattgtattctcataatactgaaatgctttagcatactagaatcagatacaaaactattaagtatgtcaacagccatttaggcaaataagcactcctttaaagccgctgccttctggttacaatttacagtgtactttgttaaaaacactgctgaggcttcataatcatggctcttagaaactcaggaaagaggagataatgtggattaaaaccttaagagttctaaccatgcctactaaatgtacagatatgcaaattccatagctcaataaaagaatctgatacttagaccaaaagcaacattcgttctctaaccattctgtattgattatataagcaaaatgaaaagagaaacttaaatgaacacagctctttaacatggttcaggtacacatattttgacccaagtggatattttcttaaaaccaatcaataatagctagctattactgcagactataaaatctggatatagaaaggagacctgtatcaaactgcttttgtagtgtgttttcataacaacttatgactaaaaatatcacactgaataagagagcaggattgccaggtatttttctatttctctccttaattttatatgtatatagatatatttggcttatattctaagtcacctaagtacttaaaagttaagttggtaaagtatttactgactgcttataaacatttaaagacaaagacatttcaaataactgcagaaaaaatattgtagtttgaatatttaagcaataaaactgctagtgagttattgt

SEQ ID NO: 6254 - DNA, 2536 bp, Homo sapiens
  source 1..2536: mol_type = unassigned DNA
gcactcgggcgcagccgggtggatctcgagcaggtgtgagcagcctatcagtcaccatgtccgcagcctggatcccggctctcggcctcggtgtgtgtctgctgctgctgccggggcccgcgggcagcgagggagccgctcccattgctatcacatgttttaccagaggcttggacatcaggaaagagaaagcagatgtcctctgcccagggggctgccctcttgaggaattctctgtgtatgggaacatagtatatgcttctgtatcgagcatatgtggggctgctgtccacaggggagtaatcagcaactcagggggacctgtacgagtctatagcctacctggtcgagaaaactattcctcagtagatgccaatggcatccagtctcaaatgctttctagatggtctgcttctttcacagtaactaaaggcaaaagtagtacacaggaggccacaggacaagcagtgtccacagcacatccaccaacaggtaaacgactaaagaaaacacccgagaagaaaactggcaataaagattgtaaagcagacattgcatttctgattgatggaagctttaatattgggcagcgccgatttaatttacagaagaattttgttggaaaagtggctctaatgttgggaattggaacagaaggaccacatgtgggccttgttcaagccagtgaacatcccaaaatagaattttacttgaaaaactttacatcagccaaagatgttttgtttgccataaaggaagtaggtttcagagggggtaattccaatacaggaaaagccttgaagcatactgctcagaaattcttcacggtagatgctggagtaagaaaagggatccccaaagtggtggtggtatttattgatggttggccttctgatgacatcgaggaagcaggcattgtggccagagagtttggtgtcaatgtatttatagtttctgtggccaagcctatccctgaagaactggggatggttcaggatgtcacatttgttgacaaggctgtctgtcggaataatggcttcttctcttaccacatgcccaactggtttggcaccacaaaatacgtaaagcctctggtacagaagctgtgcactcatgaacaaatgatgtgcagcaagacctgttataactcagtgaacattgcctttctaattgatggctccagcagtgttggagatagcaatttccgcctcatgcttgaatttgtttccaacatagccaagacttttgaaatctcggacattggtgccaagatagctgctgtacagtttacttatgatcagcgcacggagttcagtttcactgactatagcaccaaagagaatgtcctagctgtcatcagaaacatccgctatatgagtggtggaacagctactggtgatgccatttccttcactgttagaaatgtgtttggccctataagggagagccccaacaagaacttcctagtaattgtcacagatgggcagtcctatgatgatgtccaaggccctgcagctgctgcacatgatgcaggaatcactatcttctctgttggtgtggcttgggcacctctggatgacctgaaagatatggcttctaaaccgaaggagtctcatgctttcttcacaagagagttcacaggattagaaccaattgtttctgatgtcatcagaggcatttgtagagatttcttagaatcccagcaataatggtaacattttgacaactgaaagaaaaagtacaaggggatccagtgtgtaaattgtattctcataatactgaaatgctttagcatactagaatcagatacaaaactattaagtatgtcaacagccatttaggcaaataagcactcctttaaagccgctgccttctggttacaatttacagtgtactttgttaaaaacactgctgaggcttcataatcatggctcttagaaactcaggaaagaggagataatgtggattaaaaccttaagagttctaaccatgcctactaaatgtacagatatgcaaattccatagctcaataaaagaatctgatacttagaccaaaagcaacattcgttctctaaccattctgtattgattatataagcaaaatgaaaagagaaacttaaatgaacacagctctttaacatggttcaggtacacatattttgacccaagtggatattttcttaaaaccaatcaataatagctagctattactgcagactataaaatctggatatagaaaggagacctgtatcaaactgcttttgtagtgtgttttcataacaacttatgactaaaaatatcacactgaataagagagcaggattgccaggtatttttctatttctctccttaattttatatgtatatagatatatttggcttatattctaagtcacctaagtacttaaaagttaagttggtaaagtatttactgactgcttataaacatttaaagacaaagacatttcaaataactgcagaaaaaatattgtagtttgaatatttaagcaataaaactgctagtgagttattgtaa

SEQ ID NO: 6255 - DNA, 2687 bp, Homo sapiens
  source 1..2687: mol_type = unassigned DNA
gacctagaggggcgctggcctggagcagcgggtcgtctgtgtcctctctcctctgcgccgcgcccggggatccgaagggtgcggggctctgaggaggtgacgcgcggggcctcccgcaccctggccttgcccgcattctccctctctcccaggtgtgagcagcctatcagtcaccatgtccgcagcctggatcccggctctcggcctcggtgggtgcgcgcccctcacgaccccggccccttgctccgctgggtggaggctggagccagccctcacgcttctctcttcgcagctcccattgctatcacatgttttaccagaggcttggacatcaggaaagagaaagcagatgtcctctgcccagggggctgccctcttgaggaattctctgtgtatgggaacatagtatatgcttctgtatcgagcatatgtggggctgctgtccacaggggagtaatcagcaactcagggggacctgtacgagtctatagcctacctggtcgagaaaactattcctcagtagatgccaatggcatccagtctcaaatgctttctagatggtctgcttctttcacagtaactaaaggcaaaagtagtacacaggaggccacaggacaagcagtgtccacagcacatccaccaacaggtaaacgactaaagaaaacacccgagaagaaaactggcaataaagattgtaaagcagacattgcatttctgattgatggaagctttaatattgggcagcgccgatttaatttacagaagaattttgttggaaaagtggctctaatgttgggaattggaacagaaggaccacatgtgggccttgttcaagccagtgaacatcccaaaatagaattttacttgaaaaactttacatcagccaaagatgttttgtttgccataaaggaagtaggtttcagagggggtaattccaatacaggaaaagccttgaagcatactgctcagaaattcttcacggtagatgctggagtaagaaaagggatccccaaagtggtggtggtatttattgatggttggccttctgatgacatcgaggaagcaggcattgtggccagagagtttggtgtcaatgtatttatagtttctgtggccaagcctatccctgaagaactggggatggttcaggatgtcacatttgttgacaaggctgtctgtcggaataatggcttcttctcttaccacatgcccaactggtttggcaccacaaaatacgtaagcctctggtacagaagctgtgcactcatgaacaaatgatgtgcagcaagacctgttataactcagtgaacattgcctttctaattgatggctccagcagtgttggagatagcaatttccgcctcatgcttgaatttgtttccaacatagccaagacttttgaaatctcggacattggtgccaagatagctgctgtacagtttacttatgatcagcgcacggagttcagtttcactgactatagcaccaaagagaatgtcctagctgtcatcagaaacatccgctatatgagtggtggaacagctactggtgatgccatttccttcactgttagaaatgtgtttggccctataagggagagccccaacaagaacttcctagtaattgtcacagatgggcagtcctatgatgatgtccaaggccctgcagctgctgcacatgatgcaggaatcactatcttctctgttggtgtggcttgggcacctctggatgacctgaaagatatggcttctaaaccgaaggagtctcatgctttcttcacaagagagttcacaggattagaaccaattgtttctgatgtcatcagaggcatttgtagagatttcttagaatcccagcaataatggtaacattttgacaactgaaagaaaaagtacaaggggatccagtgtgtaaattgtattctcataatactgaaatgctttagcatactagaatcagatacaaaactattaagtatgtcaacagccatttaggcaaataagcactcctttaaagccgctgccttctggttacaatttacagtgtactttgttaaaaacactgctgaggcttcataatcatggctcttagaaactcaggaaagaggagataatgtggattaaaaccttaagagttctaaccatgcctactaaatgtacagatatgcaaattccatagctcaataaaagaatctgatacttagaccaaaagcaacattcgttctctaaccattctgtattgattatataagcaaaatgaaaagagaaacttaaatgaacacagctctttaacatggttcaggtacacatattttgacccaagtggatattttcttaaaaccaatcaataatagctagctattactgcagactataaaatctggatatagaaaggagacctgtatcaaactgcttttgtagtgtgttttcataacaacttatgactaaaaatatcacactgaataagagagcaggattgccaggtatttttctatttctctccttaattttatatgtatatagatatatttggcttatattctaagtcacctaagtacttaaaagttaagttggtaaagtatttactgactgcttataaacatttaaagacaaagacatttcaaataactgcagaaaaaatattgtagtttgaatatttaagcaataaaactgctagtgagttattgt

SEQ ID NO: 6256 - DNA, 3821 bp, Homo sapiens
  source 1..3821: mol_type = unassigned DNA
agagactctcactgcacgccggagggcgcccttcctcgctcgcgcccgcgcgaccgcgcgccccagtcccgccccgccccgctaaccgccccagacacagcgctcgccgagggtcgcttggaccctgatcttacccgtgggcaccctgcgctctgcctgccgcgaagaccggctccccgacccgcagaagtcaggagagagggtgaagcggagcagcccgaggcggggcagcctcccggagcagcgccgcgcagagcccgggacaatggggccgcggcggctgctgctggtggccgcctgcttcagtctgtgcggcccgctgttgtctgcccgcacccgggcccgcaggccagaatcaaaagcaacaaatgccaccttagatccccggtcatttcttctcaggaaccccaatgataaatatgaaccattttgggaggatgaggagaaaaatgaaagtgggttaactgaatacagattagtctccatcaataaaagcagtcctcttcaaaaacaacttcctgcattcatctcagaagatgcctccggatatttgaccagctcctggctgacactctttgtcccatctgtgtacaccggagtgtttgtagtcagcctcccactaaacatcatggccatcgttgtgttcatcctgaaaatgaaggtcaagaagccggcggtggtgtacatgctgcacctggccacggcagatgtgctgtttgtgtctgtgctcccctttaagatcagctattacttttccggcagtgattggcagtttgggtctgaattgtgtcgcttcgtcactgcagcattttactgtaacatgtacgcctctatcttgctcatgacagtcataagcattgaccggtttctggctgtggtgtatcccatgcagtccctctcctggcgtactctgggaagggcttccttcacttgtctggccatctgggctttggccatcgcaggggtagtgcctctgctcctcaaggagcaaaccatccaggtgcccgggctcaacatcactacctgtcatgatgtgctcaatgaaaccctgctcgaaggctactatgcctactacttctcagccttctctgctgtcttcttttttgtgccgctgatcatttccacggtctgttatgtgtctatcattcgatgtcttagctcttccgcagttgccaaccgcagcaagaagtcccgggctttgttcctgtcagctgctgttttctgcatcttcatcatttgcttcggacccacaaacgtcctcctgattgcgcattactcattcctttctcacacttccaccacagaggctgcctactttgcctacctcctctgtgtctgtgtcagcagcataagctgctgcatcgaccccctaatttactattacgcttcctctgagtgccagaggtacgtctacagtatcttatgctgcaaagaaagttccgatcccagcagttataacagcagtgggcagttgatggcaagtaaaatggatacctgctctagtaacctgaataacagcatatacaaaaagctgttaacttaggaaaagggactgctgggaggttaaaaagaaaagtttataaaagtgaataacctgaggattctattagtccccacccaaactttattgattcacctcctaaaacaacagatgtacgacttgcatacctgctttttatgggagctgtcaagcatgtatttttgtcaattaccagaaagataacaggacgagatgacggtgttattccaagggaatattgccaatgctacagtaataaatgaatgtcacttctggatatagctaggtgacatatacatacttacatgtgtgtatatgtagatgtatgcacacacatatattatttgcagtgcagtatagaataggcactttaaaacactctttccccgcaccccagcaattatgaaaataatctctgattccctgatttaatatgcaaagtctaggttggtagagtttagccctgaacatttcatggtgttcatcaacagtgagagactccatagtttgggcttgtaccacttttgcaaataagtgtattttgaaattgtttgacggcaaggtttaagttattaagaggtaagacttagtactatctgtgcgtagaagttctagtgttttcaattttaaacatatccaagtttgaattcctaaaattatggaaacagatgaaaagcctctgttttgatatgggtagtattttttacattttacacactgtacacataagccaaaactgagcataagtcctctagtgaatgtaggctggctttcagagtaggctattcctgagagctgcatgtgtccgcccccgatggaggactccaggcagcagacacatgccagggccatgtcagacacagattggccagaaaccttcctgctgagcctcacagcagtgagactggggccactacatttgctccatcctcctgggattggctgtgaactgatcatgtttatgagaaactggcaaagcagaatgtgatatcctaggaggtaatgaccatgaaagacttctctacccatcttaaaaacaacgaaagaaggcatggacttctggatgcccatccactgggtgtaaacacatctagtagttgttctgaaatgtcagttctgatatggaagcacccattatgcgctgtggccactccaataggtgctgagtgtacagagtggaataagacagagacctgccctcaagagcaaagtagatcatgcatagagtgtgatgtatgtgtaataaatatgtttcacacaaacaaggcctgtcagctaaagaagtttgaacatttgggttactatttcttgtggttataacttaatgaaaacaatgcagtacaggacatatattttttaaaataagtctgatttaattgggcactatttatttacaaatgttttgctcaatagattgctcaaatcaggttttcttttaagaatcaatcatgtcagtctgcttagaaataacagaagaaaatagaattgacattgaaatctaggaaaattattctataatttccatttacttaagacttaatgagactttaaaagcattttttaacctcctaagtatcaagtatagaaaatcttcatggaattcacaaagtaatttggaaattaggttgaaacatatctcttatcttacgaaaaaatggtagcattttaaacaaaatagaaagttgcaaggcaaatgtttatttaaaagagcaggccaggcgcggtggctcacgcctgtaatcccagcactttgggaggctgaggcgggtggatcacgaggtcaggagatcgagaccatcctggctaacacggtgaaacccgtctctactaaaaatgcaaaaaaaattagccgggcgtggtggcaggcacctgtagtcccagctactcgggaggctgaggcaggagactggcgtgaacccaggaggcggaccttgtagtgagccgagatcgcgccactgtgctccagcctgggcaacagagcaagactccatctcaaaaaataaaaataaataaaaaataaaaaaataaaagagcaaactatttccaaataccatagaataacttacataaaagtaatataactgtattgtaagtagaagctagcactggttttattaatttagtgactattcattttatctaaatcagtgaagatttactgtcattgtttattagtctgtatatattaaaatatgatatcattaatgtacttacaaaatagtatgtcactgtttttatgttcattcttaaaaacataacctgtattaataaatgtgaacatttgcttggtatctctttggaa

SEQ ID NO: 6257 - DNA, 2914 bp, Homo sapiens
  source 1..2914: mol_type = unassigned DNA
ggtcccggggcgtggcctcccgcaggtgagtacgctgctccttcggtttccctgaaacctaacccgccctggggaggcgcgcagcagaggctccgattcggggcaggtgagaggctgactttctctcggtgcgtccagtggagctctgagtttcgaatcggcggcggcggattccccgcgcgcccggcgtcggggcttccaggaggatgcggagccccagcgcggcgtggctgctgggggccgccatcctgctagcagcctctctctcctgcagtggcaccatccaaggaaccagtagatcctctaaaggaagaagccttattggtaaggttgatggcacatcccacgtcactggaaaaggagttacagttgaaacagtcttttctgtggatgagttttctgcatctgtcctcactggaaaactgaccactgtcttccttccaattgtctacacaattgtgtttgtggtgggtttgccaagtaacggcatggccctgtgggtctttcttttccgaactaagaagaagcaccctgctgtgatttacatggccaatctggccttggctgacctcctctctgtcatctggttccccttgaagattgcctatcacatacatggcaacaactggatttatggggaagctctttgtaatgtgcttattggctttttctatggcaacatgtactgttccattctcttcatgacctgcctcagtgtgcagaggtattgggtcatcgtgaaccccatggggcactccaggaagaaggcaaacattgccattggcatctccctggcaatatggctgctgattctgctggtcaccattcctttgtatgtcgtgaagcagaccatcttcattcctgccctgaacatcacgacctgtcatgatgttttgcctgagcagctcttggtgggagacatgttcaattacttcctctctctggccattggggtctttctgttcccagccttcctcacagcctctgcctatgtgctgatgatcagaatgctgcgatcttctgccatggatgaaaactcagagaagaaaaggaagagggccatcaaactcattgtcactgtcctggccatgtacctgatctgcttcactcctagtaaccttctgcttgtggtgcattattttctgattaagagccagggccagagccatgtctatgccctgtacattgtagccctctgcctctctacccttaacagctgcatcgacccctttgtctattactttgtttcacatgatttcagggatcatgcaaagaacgctctcctttgccgaagtgtccgcactgtaaagcagatgcaagtatccctcacctcaaagaaacactccaggaaatccagctcttactcttcaagttcaaccactgttaagacctcctattgagttttccaggtcctcagatgggaattgcacagtaggatgtggaacctgtttaatgttatgaggacgtgtctgttatttcctaatcaaaaaggtctcaccacataccatgtggatgcagcacctctcaggattgctaggagctcccctgtttgcatgagaaaagtagtcccccaaattaacatcagtgtctgtttcagaatctctctactcagatgaccccagaaactgaaccaacagaagcagacttttcagaagatggtgaagacagaaacccagtaacttgcaaaaagtagacttggtgtgaagactcacttctcagctgaaattatatatatacacatatatatattttacatctgggatcatgatagacttgttagggcttcaaggccctcagagatgatcagtccaactgaacgaccttacaaatgaggaaaccaagataaatgagctgccagaatcaggtttccaatcaacagcagtgagttgggattggacagtagaatttcaatgtccagtgagtgaggttcttgtaccacttcatcaaaatcatggatcttggctgggtgcggtgcctcatgcctgtaatcctagcactttgggaggctgaggcaggcaatcacttgaggtcaggagttcgagaccagcctggccatcatggcgaaacctcatctctactaaaaatacaaaagttaaccaggtgtgtggtgcacgtttgtaatcccagttactcaggaggctgaggcacaagaattgagtatcactttaactcaggaggcagaggttgcagtgagccgagattgcaccactgcactccagcttgggtgataaaataaaataaaatagtcgtgaatcttgttcaaaatgcagattcctcagattcaataatgagagctcagactgggaacagggcccaggaatctgtgtggtacaaacctgcatggtgtttatgcacacagagatttgagaaccattgttctgaatgctgcttccatttgacaaagtgccgtgataatttttgaaaagagaagcaaacaatggtgtctcttttatgttcagcttataatgaaatctgtttgttgacttattaggactttgaattatttctttattaaccctctgagtttttgtatgtattattattaaagaaaaatgcaatcaggattttaaacatgtaaatacaaattttgtataacttttgatgacttcagtgaaattttcaggtagtctgagtaatagattgttttgccacttagaatagcatttgccacttagtattttaaaaaataattgttggagtatttattgtcagttttgttcacttgttatctaatacaaaattataaagccttcagagggtttggaccacatctctttggaaaatagtttgcaacatatttaagagatacttgatgccaaaatgactttatacaacgattgtatttgtgacttttaaaaataattattttattgtgtaattgatttataaataacaaaattttttttacaactta

SEQ ID NO: 6258 - DNA, 3408 bp, Homo sapiens
  source 1..3408: mol_type = unassigned DNA
atgcttactgaagcatcgagtggattacatcctttccctgcggaggaccagggcaagtttcctgcctgcacggcacaggagagcaaacttctacagacagaccaaggcttccatttgctgctgacacatggaactgaggtgaaattgtgctccatgattttacagatttcataacgtttaagagacgggactcaggtcatcaaaatgaaagccctcatctttgcagctgctggcctcctgcttctgttgcccactttttgtcagagtggcatggaaaatgatacaaacaacttggcaaagccaaccttacccattaagacctttcgtggagctcccccaaattcttttgaagagttccccttttctgccttggaaggctggacaggagccacgattactgtaaaaattaagtgccctgaagaaagtgcttcacatctccatgtgaaaaatgctaccatggggtacctgaccagctccttaagtactaaactgatacctgccatctacctcctggtgtttgtagttggtgtcccggccaatgctgtgaccctgtggatgcttttcttcaggaccagatccatctgtaccactgtattctacaccaacctggccattgcagattttcttttttgtgttacattgccctttaagatagcttatcatctcaatgggaacaactgggtatttggagaggtcctgtgccgggccaccacagtcatcttctatggcaacatgtactgctccattctgctccttgcctgcatcagcatcaaccgctacctggccatcgtccatcctttcacctaccggggcctgcccaagcacacctatgccttggtaacatgtggactggtgtgggcaacagttttcttatatatgctgccatttttcatactgaagcaggaatattatcttgttcagccagacatcaccacctgccatgatgttcacaacacttgcgagtcctcatctcccttccaactctattacttcatctccttggcattctttggattcttaattccatttgtgcttatcatctactgctatgcagccatcatccggacacttaatgcatacgatcatagatggttgtggtatgttaaggcgagtctcctcatccttgtgatttttaccatttgctttgctccaagcaatattattcttattattcaccatgctaactactactacaacaacactgatggcttatattttatatatctcatagctttgtgcctgggtagtcttaatagttgcttagatccattcctttattttctcatgtcaaaaaccagaaatcactccactgcttaccttacaaaatagtgaaatgatcttagagaacaaggacagccatcacagagaacgtctgttttcaagaacaacataagcatagtgcaaggagctccatttccgagctcctaagaaatatgcttcaaaggtcaaacattacaaaagcattagtagtttgtttgtttgtttttgagactgagtctcactttatcacccagactggcgtgcagtggcactatcttggctcattgcaacctctgcctcccaggtcagcctcccaagtagctgggattacaccaccatgcccagctactaaaaatacttgtatttttagtagagacggggtttcaccatgttgaccaggctggtcttgaactcctgacctcaagtgatcttccggcctcagcctcccaaagtgctggattacaggcgtgagccactgagccagccagcattagtaatttttaaaaacactttatcagtattttaaaaatgttaatgcaggagaaaagatatcacaactctatggaaaatgacatttccatttgccttattgctacttcaagctctttaaatcaccatcttccctatttctgtgagtggtattgccatccttgacatttgacatcattttttattctttggtctcttttgactctcatgctggtggctgcctcatcaactgattctatctttgtagggtccctcaccagggtcttttatctagtttcacctttgccttcttttttcctttttttaatagagacagtgtctcgcttcgtcacctggctgaagtgcagtagcctgatcatagctcacttcagcctccaactcctgggctcaagcaatcctgctgtctcagcctcccaagtaactaagactacaggcatgcaccaccatacccaactaattttattttttattttttgcagagatggagtctcactgttgcccaggctggtcttgaactcctggtctcgagtgatcttcctatctcagcctcccaaagtgctgggactacaggcatgagccactacgtccaggccacctctaccttctaaccattctctccactgccagcctaccctccaccacttcacaagtcctgccagattaatcttccttagatatcagttaggatacatcactaaaacatttccactaactccactgtttctataataaatcataaatctttagcctggcattcaaggctaacttgctaatcacacttcccattaaaccttgcttatgatataggcaccaaccaaacctcttgctctgctatatctccactctgcctcagactgaaaagctagtcctaacgtctttgccttaattctgttcattttttcaagtccttgaaggaccattcttccctgattctcaggctagaagtgtcacttttcttatctgtacttccaaagcactttcgtatatttttattatggcatttatatatagttcatttatatttaaattttaattccatgaacaatcaagtaccaagtataatggagaaggtgctcatcctctgccttccttgagcttctgggtgatgccaggcccaagtctttgtggcacccagctccatgctttgaatactatgtggctgaatgaatttttaaaatctcaaagcagttaaacagcaggaaagcccattaacttcgtactgaaaaagcaacatactgtgatgatacgggatgacatcatttcaggttgggcatacaaaaaagtaaggaagctaaactaagactatactcaccaggccatttagaagttttaaataatgcctccactattttttttcttagacatagcttttaatggggaaatggaattttgttattaatacccattatattcctgtaagtaaatgactatttttcccttaactcagtgattagacaggaaggaagacattagtgattagacaggagggaagatattagtgattagacagcagggaagatattagtggtaaagagtgaatgatagtagtgaatataaatggggctgaggaaactttaagcataaaagattcctgagatgactttacaagtctgtacgaatctgccttgactgtatatttcatactgcccaacaaaacaa

SEQ ID NO: 6259 - DNA, 1387 bp, Homo sapiens
  source 1..1387: mol_type = unassigned DNA
ggattacatcctttccctgcggaggaccagggcaagtttcctgcctgcacggcacaggagagcaaacttctacagacagaccaaggcttccatttgctgctgacacatggaactgaggcatggaaaatgatacaaacaacttggcaaagccaaccttacccattaagacctttcgtggagctcccccaaattcttttgaagagttccccttttctgccttggaaggctggacaggagccacgattactgtaaaaattaagtgccctgaagaaagtgcttcacatctccatgtgaaaaatgctaccatggggtacctgaccagctccttaagtactaaactgatacctgccatctacctcctggtgtttgtagttggtgtcccggccaatgctgtgaccctgtggatgcttttcttcaggaccagatccatctgtaccactgtattctacaccaacctggccattgcagattttcttttttgtgttacattgccctttaagatagcttatcatctcaatgggaacaactgggtatttggagaggtcctgtgccgggccaccacagtcatcttctatggcaacatgtactgctccattctgctccttgcctgcatcagcatcaaccgctacctggccatcgtccatcctttcacctaccggggcctgcccaagcacacctatgccttggtaacatgtggactggtgtgggcaacagttttcttatatatgctgccatttttcatactgaagcaggaatattatcttgttcagccagacatcaccacctgccatgatgttcacaacacttgcgagtcctcatctcccttccaactctattacttcatctccttggcattctttggattcttaattccatttgtgcttatcatctactgctatgcagccatcatccggacacttaatgcatacgatcatagatggttgtggtatgttaaggcgagtctcctcatccttgtgatttttaccatttgctttgctccaagcaatattattcttattattcaccatgctaactactactacaacaacactgatggcttatattttatatatctcatagctttgtgcctgggtagtcttaatagttgcttagatccattcctttattttctcatgtcaaaaaccagaaatcactccactgcttaccttacaaaatagtgaaatgatcttagagaacaaggacagccatcacagagaacgtctgttttcaagaacaacataagcatagtgcaaggagctccatttccgagctcctaagaaatatgcttcaaaggtcaaacattacaaaagcattagtagtttgtttgtttgtttttgagactgagtctcactttatcacccagactggcgtgcagtggcactatctt

SEQ ID NO: 6260 - DNA, 2731 bp, Homo sapiens
  source 1..2731: mol_type = unassigned DNA
ctcccacgggctggctggcaagcggccctggtgggtctgcgggggcaggggcagccttcctggtttatctctaccggcgcgatctgctcgtccgcctcggctccagaagctggggctcagggtccggcgaggcaggaagcctgaggccacagcccagagcagcctgagtgcagtcatgtgggggcgactgctcctgtggcccctggtgctggggttcagcctgtctggcggcacccagacccccagcgtctacgacgagagcgggagcaccggaggtggtgatgacagcacgccctcaatcctgcctgccccccgcggctacccaggccaagtctgtgccaatgacagtgacaccctggagctcccggacagctcacgggcactgcttctgggctgggtgcccaccaggctggtgcccgccctctatgggctggtcctggtggtggggctgccggccaatgggctggcgctgtgggtgctggccacgcaggcacctcggctgccctccaccatgctgctgatgaacctcgcggctgctgacctcctgctggccctggcgctgcccccgcggatcgcctaccacctgcgtggccagcgctggcccttcggggaggccgcctgccgcctggccacggccgcactctatggtcacatgtatggctcagtgctgctgctggccgccgtcagcctggatcgctacctggccctggtgcacccgctgcgggcccgcgccctgcgtggccggcgcctggcccttggactctgcatggctgcttggctcatggcggccgccctggcactgcccctgacactgcagcggcagaccttccggctggcgcgctccgatcgcgtgctctgccatgacgcgctgcccctggacgcacaggcctcccactggcaaccggccttcacctgcctggcgctgttgggctgtttcctgcccctgctggccatgctgctgtgctacggggccaccctgcacacgctggcggccagcggccggcgctacggccacgcgctgaggctgaccgcagtggtgctggcctccgccgtggccttcttcgtgcccagcaacctgctgctgctgctgcattactcggacccgagccccagcgcctggggcaacctctatggtgcctacgtgcccagcctggcgctgagcaccctcaacagctgcgtggatcccttcatctactactacgtgtcggccgagttcagggacaaggtgcgggcagggctcttccaacggtcgccgggggacaccgtggcctccaaggcctctgcggaagggggcagccggggcatgggcacccactcctctttgctccagtgacacaaagtggggaaggctgtactgggtcgaacagggtcccttcccccacttcacgtccttcctgggacctcagaatgtgaccttatttggaaatagggttgttacaactgtcactagcggaggtcactttggagaagggtgggccttacatccagtgtgggtggtgtcctcataagataaggagaggccaggcctggtggctcacgcctgtaatcccagcactttaagaggccaaggcggatggatcacttgagcccaggagttcaacaccagcctgagcaacatggtaaaaccccatctctaccaaaaatacaaaaattagctgggcttggtggctggcgcctgtaatcccagctactcaggagactgaggcagaaggatcgcttgaacctgggaggcagaggttgcagtgagccgagattgcgccactggactccagcctgcgtgacagagagcctgtctctaaattaattaattaattaatttaattcaattttaaaaagacgaaaagtgacggccaggtgcagtggctcacgcctataatctcagcactctgggaggccaagatggaggattgcttgaagccaggagtttgggaccagcctgggcaacatagggggatcccatctctacacacaaaaaaattttttaatgaaccaggcattgtggcatgcgcctatagtcccagccactcaagaggcacaggcgggaggatcacttgagcctgggaggttgtggttgcagtgagctatgattgtaccactgcactccagcctgggcaacagagcaagaccttgtctcaaaaataaacaaactaaaattaaaaaaagaagacgagagatagtgggtgtggtggctcacacctgcaatcccagcactttggaaggccgaggtgggcagatcatctgaggccaggagttcaagaccagcctggctaacatggtgaaatcctatctctaccaaaaatacaaaaattagccaggcgtggtggtgggcacctgtactggggaggtgcccacccagctactggggaggctgagtcaggagaatcgcttgaacctgggaggcggaggttgcggtcagctgagatggtgccactgcactccagcctgggcgaaagagcgactctgtctccaaaaaaaagagaagaggagaggacacagagacacacagagaagaaagccatgtggcggcagaggcagagatgggagtgatgcggacggacacaaactaagggatgccacgatgccaagcacagccaacagccaccagcagccaggagacaggcctgggacgggctctccctcacagcctccagagggaaccagccctgccaccaccttgaccctggacttctggcctgcagaactgtgagacaataaactctcattgttttaa

SEQ ID NO: 6261 - DNA, 2049 bp, Homo sapiens
  source 1..2049: mol_type = unassigned DNA
ctattgatctggactcctggataggcagctggaccaacggacggatgccatgagggctctgctgctcctggggttcctgctggtgagcttggagtcaacactttcgattccaccttgggaagcccccaaggagcataagtacaaagctgaagagcacacagtcgttctcactgtcaccggggagccctgccacttccccttccagtaccaccggcagctgtaccacaaatgtacccacaagggccggccaggccctcagccctggtgtgctaccacccccaactttgatcaggaccagcgatggggatactgtttggagcccaagaaagtgaaagaccactgcagcaaacacagcccctgccagaaaggagggacctgtgtgaacatgccaagcggcccccactgtctctgtccacaacacctcactggaaaccactgccagaaagagaagtgctttgagcctcagcttctccggtttttccacaagaatgagatatggtatagaactgagcaagcagctgtggccagatgccagtgcaagggtcctgatgcccactgccagcggctggccagccaggcctgccgcaccaacccgtgcctccatgggggtcgctgcctagaggtggagggccaccgcctgtgccactgcccggtgggctacaccggagccttctgcgacgtggacaccaaggcaagctgctatgatggccgcgggctcagctaccgcggcctggccaggaccacgctctcgggtgcgccctgtcagccgtgggcctcggaggccacctaccggaacgtgactgccgagcaagcgcggaactggggactgggcggccacgccttctgccggaacccggacaacgacatccgcccgtggtgcttcgtgctgaaccgcgaccggctgagctgggagtactgcgacctggcacagtgccagaccccaacccaggcggcgcctccgaccccggtgtcccctaggcttcatgtcccactcatgcccgcgcagccggcaccgccgaagcctcagcccacgacccggaccccgcctcagtcccagaccccgggagccttgccggcgaagcgggagcagccgccttccctgaccaggaacggcccactgagctgcgggcagcggctccgcaagagtctgtcttcgatgacccgcgtcgttggcgggctggtggcgctacgcggggcgcacccctacatcgccgcgctgtactggggccacagtttctgcgccggcagcctcatcgccccctgctgggtgctgacggccgctcactgcctgcaggaccggcccgcacccgaggatctgacggtggtgctcggccaggaacgccgtaaccacagctgtgagccgtgccagacgttggccgtgcgctcctaccgcttgcacgaggccttctcgcccgtcagctaccagcacgacctggctctgttgcgccttcaggaggatgcggacggcagctgcgcgctcctgtcgccttacgttcagccggtgtgcctgccaagcggcgccgcgcgaccctccgagaccacgctctgccaggtggccggctggggccaccagttcgagggggcggaggaatatgccagcttcctgcaggaggcgcaggtaccgttcctctccctggagcgctgctcagccccggacgtgcacggatcctccatcctccccggcatgctctgcgcagggttcctcgagggcggcaccgatgcgtgccagggtgattccggaggcccgctggtgtgtgaggaccaagctgcagagcgccggctcaccctgcaaggcatcatcagctggggatcgggctgtggtgaccgcaacaagccaggcgtctacaccgatgtggcctactacctggcctggatccgggagcacaccgtttcctgattgctcagggactcatctttccctccttggtgattccgcagtgagagagtggctggggcatggaaggcaagattgtgtcccattcccccagtgcggccagctccgcgccaggatggcgcaggaactcaataaagtgctttgaaaatgctgag

SEQ ID NO: 6262 - DNA, 2217 bp, Homo sapiens
  source 1..2217: mol_type = unassigned DNA
agtgcttagaattgttaaaatctttgtgaagcacaccactgaagatgaggttgaaaaacctgacttttatcatcatattgataatctcaggagaactctatgcagaagagaaaccctgtggttttcctcatgtggaaaatggaagaattgcccaatattactatacttttaaaagcttttactttccaatgagcatagacaaaaaattgtcatttttctgcttggctggttataccactgaaagtggaagacaagaagagcaaaccacgtgtacaacagaaggctggtctccagagccaaggtgcttcaaaaaatgcactaagcctgacctgagtaatggttacatctctgatgtaaagttattgtataaaattcaagagaacatgcgttatggttgcgcttcagggtacaaaaccactggagggaaggatgaagaagtggttcaatgtctctctgatggatggtcttctcaaccaacctgtaggaaagaacatgaaacatgtttggctcctgaattatataatggaaattattccacaacacagaaaacattcaaagtgaaggacaaagtacaatacgaatgtgctactggctactacacagctggaggaaagaagacagaggaggtagaatgtctcacatacggatggtctctcacaccaaaatgtaccaaattaaagtgctcttctttaagattaattgaaaatggttattttcatcctgtaaagcaaacctatgaagaaggagatgtcgttcagtttttctgtcatgaaaattattatctaagtggatctgatttaattcaatgctataactttggttggtacccagaatctcctgtatgcgaaggaagaagaaacagatgtcctcctccacctctgcccataaactccaaaattcaaacacattcaacaacttatcgtcatggagaaatagttcatatagaatgtgaacttaattttgagatccatgggtcagcagaaatacgttgtgaagatggaaaatggacagaacctccaaaatgcattgaaggacaggagaaggtagcctgtgaggaaccacccttcattgaaaatggtgcagcaaatttacactctaagatttattacaatggggataaagtgacatatgcatgtaaaagcggctaccttctccatggatcgaatgagataacttgtaatcgtggaaaatggacacttcctcctgagtgtgttgaaaataatgagaattgtaagcatcctcctgttgtaatgaatggggctgttgcagacgggatattggcaagctatgcaacaggatcctcagtggaatatagatgcaatgaatattacttactgaggggatcaaaaatatctcgttgcgaacaaggaaaatggtcatccccacctgtttgcttggaaccatgtactgttaatgtggattacatgaacagaaataacatagaaatgaagtggaaatatgaagggaaagtcttacatggagatttaatagattttgtatgtaaacagggatatgacttatctccattaaccccattgtctgaattatctgtgcagtgcaacagaggagaagtgaaatatcctttatgtactagaaaagaatctaaaggaatgtgcacatctcctcctcttattaaacatggagtcattattagttcaacagtagacacctatgaaaatggctcttcagtagaatacagatgttttgatcaccatttcctagaaggatctagggaggcctattgtttagatggaatgtggactacaccaccattgtgtttagagccatgcacattatcttttactgaaatggaaaagaataatttacttctgaaatgggattttgacaatagaccacacattttgcatggtgaatatattgagtttatttgtagaggagatacttatccagctgaattatatattactggatctatacttagaatgcaatgtgacagagggcagttaaaatatccaagatgtattccaagacaaagcactctgtcttatcaagaacccttaagaacatagaaatgaatggcagaaagaggagtcatatttcaatacatcatgaaattccttataaaatataattttgaggaaataagttaaaaacttcggagtttttccttgcttaaatatttgaatctaaattatttgtgctgaacatttcgttatttataaatgaaaaccaataaatgtctaatttttagtttgt

SEQ ID NO: 6263 - DNA, 4789 bp, Homo sapiens
  source 1..4789: mol_type = unassigned DNA
ccatcttgcctctctgctgagcggaagcccccgttcggctcctgtctgttagcggcctctctaggctaccactgacaccgtctctgtggcccggagcctaagagaccggaagttcgtgtttccaggcgcttccggaaaccgcgggagagggtcgctgacgtggaggcgtccgaagggcagcagggtgtgtcggggctcggattaagacatcggagtcggagacctgagagatgttaaccaaattcgagaccaagagcgcgcgggtcaaagggctcagctttcaccccaaaagaccttggatcctgactagtttacataatggggtcatccagttatgggactatcggatgtgcactctcattgacaagtttgatgaacatgatggtccagtgcgaggcattgacttccataagcagcagccactgttcgtctctggaggagatgactataagattaaggtttggaattacaagcttcggcgctgtcttttcacattgcttgggcacttagattatattcgcaccacgttttttcatcatgaatatccctggattctgagtgcctccgatgatcagaccatccgagtgtggaactggcaatctagaacctgtgtttgtgtgttaacagggcacaaccattatgtgatgtgtgctcagttccaccccacagaagacttggtagtatcagccagcctggaccagactgtgcgcgtttgggatatttctggtctgaggaaaaaaaacctgtcccctggtgcggtggaatcggatgtgagaggaataactggggttgatctatttggaactacagatgcagtggtgaagcatgtactagagggtcacgatcgtggagtaaactgggctgccttccaccccactatgccccttattgtatctggggcagatgatcgtcaagtgaagatctggcgcatgaatgaatcaaaggcatgggaggttgatacctgccggggccattacaacaatgtatcttgtgccgtcttccaccctcgccaagagttgatcctcagcaattctgaggacaagagtattcgagtctgggatatgtctaagcggactggggttcagactttccgcagagaccatgatcgtttctgggtcctagctgctcaccctaaccttaacctctttgcagcaggccatgatggtggtatgattgtgtttaagctggaacgggaacggccagcctatgctgttcatggcaatatgctacactatgtcaaggaccgattcttacgacagctggatttcaacagctccaaagatgtagctgtgatgcagttgcggagtggttccaagtttccagtattcaatatgtcatacaatccagcagaaaatgcagtcctgctttgtacaagagctagcaatctagagaatagtacctatgacctgtacaccatccctaaagatgctgactcccagaatcctgatgcgcctgaagggaaacgatcctcaggcctgacagccgtttgggtcgctcgaaatcggtttgctgtcctagatcggatgcattcgcttctgatcaagaatctgaagaatgagatcaccaaaaaggtacaggtgcccaactgtgatgagatcttctatgctggcacaggcaatctcctgcttcgagatgcggactctatcacactctttgacgtacagcagaagcggactctggcatctgtgaagatttctaaagtgaaatacgttatctggtcagcagacatgtcacatgtagcactactagccaaacacgccattgtgatctgtaaccgcaaactggatgctttatgtaacattcatgagaacattcgtgtcaagagtggggcctgggatgagagtggggtatttatctataccacaagcaaccacatcaaatatgctgtcaccactggggaccacgggatcattcgaactctggatttacccatctatgtcacacgggtgaagggcaacaatgtatactgcctagacagggagtgtcgtccccgggtactcaccattgatcccactgagttcaaattcaagctggccctgatcaacagaaaatatgatgaggtactgcacatggtgaggaatgccaaactagttggccagtctattattgcttatctccagaagaagggctatcctgaagtggcactgcattttgtcaaggatgagaaaactcgctttagtctggcactggagtgtggaaacattgagattgctctggaagcagccaaagcactggatgacaagaactgctgggaaaagctgggagaagtggccctgctgcaggggaaccaccagattgtggaaatgtgctatcagcgtaccaaaaactttgacaaactttccttcctgtatcttatcactggcaacttagaaaaacttcgcaagatgatgaagattgctgagatcagaaaggacatgagtggccactatcagaatgccctatacctgggtgatgtgtcagagcgtgtgcggatcctgaagaactgtggacagaagtccctggcctatctcacagctgctacccatggcttagatgaagaagctgagagcctaaaggagacatttgacccagagaaggagacaatcccagacattgaccctaatgccaagctgctccagccacctgcacctatcatgccattggataccaattggcctttattgactgtatccaaaggattttttgaaggcaccattgccagcaaagggaagggaggagcactggctgctgacattgacattgacactgttggtacagagggctggggagaggatgcagagctgcagttggatgaagatgggtttgtggaggctacagaaggtttgggggatgatgctcttggcaagggacaggaagaaggaggtggctgggatgtagaagaagatctggagctccctcctgagctggatatatcccctggggcagctggtggggctgaagatggtttctttgtgcccccaaccaagggaacaagtccaactcagatctggtgtaataactctcagcttccagttgatcacatcctggcaggctctttcgaaacagccatgcggctccttcatgaccaagtaggggtaatccagtttggcccctacaagcaactgttcctacagacatacgcccgaggccgcacaacctatcaggctctgccctgcctaccctccatgtatggctatcctaatcgcaactggaaggatgcagggctgaagaatggtgtaccagctgtgggcctgaagcttaatgacctcatccaacggttgcagctgtgctaccagctcaccacagttggcaaatttgaggaggctgtggaaaaattccgttccatccttctcagtgtgccacttcttgttgtggacaataaacaagagattgcagaggcccagcagctcatcaccatttgccgtgagtacattgtgggtttgtccgtggagacagaaaggaagaagctgcccaaagagactctagaacagcagaagcgcatctgtgagatggcagcctatttcacccactcaaacctgcagcctgtgcacatgatcctggtgctgcgtacagccctcaatctgttcttcaagctcaagaacttcaagacagctgccacctttgctcggcgcctactagaactcgggcccaagcctgaggtggcccaacagacccgaaaaatcctgtctgcctgtgagaagaatcccacagatgcctaccagctcaattatgacatgcacaacccctttgacatttgtgctgcatcatatcggcccatctaccgtggaaagccagtagaaaagtgtccactcagtggggcctgctattcccctgagttcaaaggtcaaatctgcagggtcaccacagtgacagagattggcaaagatgtgattggtttaaggatcagtcctctgcagtttcgctaaggccccctttgtgtgcatgggtcagtcaccatatgttccccccagagaatgtgtctatatcctccttctaacagcaccttccccctgcagctactcttcagatctggctctctgtaccctaaaacctagtatctttttctcttctatggaaaatccgaaggtctaaacttgacttttttgaggtcttctcaacttgactacagttgtgctcataattgtccttgcctttccagcttaattattttaaggaacaaatgaaaactctgggctgggtggagtggctcatacctgtaatcccagcactttgggaggctacggtgggcagatcatctgaggccaggagttcgagacctgcctggccaacatggcaacaccccgtctctaataaaaatataaaaattagcctggcatggtagcatgcgcctatagtcccagctgctcaggaggctgaggcatgagaatcgcttgaacctaggaggtggaggttgcattcaactgagatcataccacttcattccagcctgggtgacagagcaagactctgtctcaaaaaaaaaaaaaaggaaaactctgtgatggacatttgtttagtaaatcccttcagtatttatccctcctttccccacagcagctttctttcctgtcaactagaaaggagcaggatgtaataaatacattttggtgtgactaggccacaccaactcttaatcatctcccattttccttagacatttaaatttcaaggcaggtaccctctgtgtactcagaaatttgaagaagttatttggttttccaaaatgcacactgcgggttattgatttgttctttacaactattgttctcatatttctcacactaaataaatctctatgagagcttcttga

SEQ ID NO: 6264 - DNA, 4664 bp, Homo sapiens
  source 1..4664: mol_type = unassigned DNA
cgctgacgtggaggcgtccgaagggcagcagggtgtgtcggggctcggattaagacatcggagtcggagacctgagagatgttaaccaaattcgagaccaagagcgcgcgggtcaaagggctcagctttcaccccaaaagaccttggatcctgactagtttacataatggggtcatccagttatgggactatcggatgtgcactctcattgacaagtttgatgaacatgatggtccagtgcgaggcattgacttccataagcagcagccactgttcgtctctggaggagatgactataagattaaggtttggaattacaagcttcggcgctgtcttttcacattgcttgggcacttagattatattcgcaccacgttttttcatcatgaatatccctggattctgagtgcctccgatgatcagaccatccgagtgtggaactggcaatctagaacctgtgtttgtgtgttaacagggcacaaccattatgtgatgtgtgctcagttccaccccacagaagacttggtagtatcagccagcctggaccagactgtgcgcgtttgggatatttctggtctgaggaaaaaaaacctgtcccctggtgcggtggaatcggatgtgagaggaataactggggttgatctatttggaactacagatgcagtggtgaagcatgtactagagggtcacgatcgtggagtaaactgggctgccttccaccccactatgccccttattgtatctggggcagatgatcgtcaagtgaagatctggcgcatgaatgaatcaaaggcatgggaggttgatacctgccggggccattacaacaatgtatcttgtgccgtcttccaccctcgccaagagttgatcctcagcaattctgaggacaagagtattcgagtctgggatatgtctaagcggactggggttcagactttccgcagagaccatgatcgtttctgggtcctagctgctcaccctaaccttaacctctttgcagcaggccatgatggtggtatgattgtgtttaagctggaacgggaacggccagcctatgctgttcatggcaatatgctacactatgtcaaggaccgattcttacgacagctggatttcaacagctccaaagatgtagctgtgatgcagttgcggagtggttccaagtttccagtattcaatatgtcatacaatccagcagaaaatgcagtcctgctttgtacaagagctagcaatctagagaatagtacctatgacctgtacaccatccctaaagatgctgactcccagaatcctgatgcgcctgaagggaaacgatcctcaggcctgacagccgtttgggtcgctcgaaatcggtttgctgtcctagatcggatgcattcgcttctgatcaagaatctgaagaatgagatcaccaaaaaggtacaggtgcccaactgtgatgagatcttctatgctggcacaggcaatctcctgcttcgagatgcggactctatcacactctttgacgtacagcagaagcggactctggcatctgtgaagatttctaaagtgaaatacgttatctggtcagcagacatgtcacatgtagcactactagccaaacacgaacactcatgccctttgcctcttacagccattgtgatctgtaaccgcaaactggatgctttatgtaacattcatgagaacattcgtgtcaagagtggggcctgggatgagagtggggtatttatctataccacaagcaaccacatcaaatatgctgtcaccactggggaccacgggatcattcgaactctggatttacccatctatgtcacacgggtgaagggcaacaatgtatactgcctagacagggagtgtcgtccccgggtactcaccattgatcccactgagttcaaattcaagctggccctgatcaacagaaaatatgatgaggtactgcacatggtgaggaatgccaaactagttggccagtctattattgcttatctccagaagaagggctatcctgaagtggcactgcattttgtcaaggatgagaaaactcgctttagtctggcactggagtgtggaaacattgagattgctctggaagcagccaaagcactggatgacaagaactgctgggaaaagctgggagaagtggccctgctgcaggggaaccaccagattgtggaaatgtgctatcagcgtaccaaaaactttgacaaactttccttcctgtatcttatcactggcaacttagaaaaacttcgcaagatgatgaagattgctgagatcagaaaggacatgagtggccactatcagaatgccctatacctgggtgatgtgtcagagcgtgtgcggatcctgaagaactgtggacagaagtccctggcctatctcacagctgctacccatggcttagatgaagaagctgagagcctaaaggagacatttgacccagagaaggagacaatcccagacattgaccctaatgccaagctgctccagccacctgcacctatcatgccattggataccaattggcctttattgactgtatccaaaggattttttgaaggcaccattgccagcaaagggaagggaggagcactggctgctgacattgacattgacactgttggtacagagggctggggagaggatgcagagctgcagttggatgaagatgggtttgtggaggctacagaaggtttgggggatgatgctcttggcaagggacaggaagaaggaggtggctgggatgtagaagaagatctggagctccctcctgagctggatatatcccctggggcagctggtggggctgaagatggtttctttgtgcccccaaccaagggaacaagtccaactcagatctggtgtaataactctcagcttccagttgatcacatcctggcaggctctttcgaaacagccatgcggctccttcatgaccaagtaggggtaatccagtttggcccctacaagcaactgttcctacagacatacgcccgaggccgcacaacctatcaggctctgccctgcctaccctccatgtatggctatcctaatcgcaactggaaggatgcagggctgaagaatggtgtaccagctgtgggcctgaagcttaatgacctcatccaacggttgcagctgtgctaccagctcaccacagttggcaaatttgaggaggctgtggaaaaattccgttccatccttctcagtgtgccacttcttgttgtggacaataaacaagagattgcagaggcccagcagctcatcaccatttgccgtgagtacattgtgggtttgtccgtggagacagaaaggaagaagctgcccaaagagactctagaacagcagaagcgcatctgtgagatggcagcctatttcacccactcaaacctgcagcctgtgcacatgatcctggtgctgcgtacagccctcaatctgttcttcaagctcaagaacttcaagacagctgccacctttgctcggcgcctactagaactcgggcccaagcctgaggtggcccaacagacccgaaaaatcctgtctgcctgtgagaagaatcccacagatgcctaccagctcaattatgacatgcacaacccctttgacatttgtgctgcatcatatcggcccatctaccgtggaaagccagtagaaaagtgtccactcagtggggcctgctattcccctgagttcaaaggtcaaatctgcagggtcaccacagtgacagagattggcaaagatgtgattggtttaaggatcagtcctctgcagtttcgctaaggccccctttgtgtgcatgggtcagtcaccatatgttccccccagagaatgtgtctatatcctccttctaacagcaccttccccctgcagctactcttcagatctggctctctgtaccctaaaacctagtatctttttctcttctatggaaaatccgaaggtctaaacttgacttttttgaggtcttctcaacttgactacagttgtgctcataattgtccttgcctttccagcttaattattttaaggaacaaatgaaaactctgggctgggtggagtggctcatacctgtaatcccagcactttgggaggctacggtgggcagatcatctgaggccaggagttcgagacctgcctggccaacatggcaacaccccgtctctaataaaaatataaaaattagcctggcatggtagcatgcgcctatagtcccagctgctcaggaggctgaggcatgagaatcgcttgaacctaggaggtggaggttgcattcaactgagatcataccacttcattccagcctgggtgacagagcaagactctgtctcaaaaaaaaaaaaaaggaaaactctgtgatggacatttgtttagtaaatcccttcagtatttatccctcctttccccacagcagctttctttcctgtcaactagaaaggagcaggatgtaataaatacattttggtgtgactaggccacaccaactcttaatcatctcccattttccttagacatttaaatttcaaggcaggtaccctctgtgtactcagaaatttgaagaagttatttggttttccaaaatgcacactgcgggttattgatttgttctttacaactattgttctcatatttctcacactaaataaatctctatgagagcttcttga

SEQ ID NO: 6265 - DNA, 3481 bp, Homo sapiens
  source 1..3481: mol_type = unassigned DNA
agccaaggactctggagccgccgccgccgctgctgcggttcatagccggagtagacggagccgcagtagacggatccgcggctgcaccaaaccactgcccctcggagcctggtagtgggccacaagcccccagtcccagaggcgtggtgggtcgggcagagtcggaagaactggctttctagctggaagatgcggaaggggagcgactaggccgcttgcgtctgggcctggcagaagggaccggattttctggcatccttaaatcttgtgtcaaggattggttataatataaccagaaaccatgacggcggctgagaacgtatgctacacgttaattaacgtgccaatggattcagaaccaccatctgaaattagcttaaaaaatgatctagaaaaaggagatgtaaagtcaaagactgaagctttgaagaaagtaatcattatgattctgaatggtgaaaaacttcctggacttctgatgaccatcattcgttttgtgctacctcttcaggatcacactatcaagaaattacttctggtattttgggaaattgttcctaaaacaactccagatgggagacttttacatgagatgatccttgtatgtgatgcatacagaaaggatcttcaacatcctaatgaatttattcgaggatctactcttcgttttctttgcaaattgaaagaagcagaattgctagaacctttaatgccagctattcgtgcatgtttggagcatcgacacagctatgttagaagaaatgctgttttggccatctataccatctatagaaattttgaacatcttatacctgatgctcctgaactgatacatgattttctggtgaatgagaaggatgcaagttgcaaaaggaatgcatttatgatgctaattcatgcagatcaggatcgagctttggattacttaagtacttgcattgatcaagttcaaacatttggagacattctgcagctggttattgttgaactgatttataaggtctgtcatgctaatccatcagaaagagctcgttttattcgctgcatctataacttattacagtcatccagccctgctgtaaaatatgaagctgctgggacattagtgacactctctagtgcaccaactgcaatcaaggctgctgctcagtgttacattgatttaattattaaggagagcgacaacaatgtaaaactcatagttttggatcgcttgatagaattaaaagagcatcctgctcatgaacgagtactacaggatctggttatggatatcctaagagtattgagcacaccagacttagaagtacgaaagaaaactctgcagttagcactggatcttgtctcttctagaaatgttgaagagctggttattgtcctgaagaaggaagtgataaaaacaaataatgtgtctgagcatgaagatactgacaaatacagacaactcctagtgcgaacattgcattcctgttctgtccgatttccagatatggctgcaaatgttattcctgtgttaatggaatttctcagtgacaacaacgaagcagcagctgctgatgtcttggagtttgttcgtgaagccattcagcgctttgataacctgagaatgcttattgttgagaagatgcttgaagtctttcatgctattaaatctgtcaagatttaccgaggagcattatggatcctgggagaatactgtagtaccaaggaagacattcagagtgtgatgactgagatccgcaggtcccttggagagatcccaattgtagagtcagaaataaagaaagaagctggtgaattaaaacctgaagaagaaataactgtagggccagttcagaaattggttactgaaatgggtacctatgcaactcagagtgcccttagcagttctagacccaccaagaaagaggaagacagacctcccttgagaggattccttctggatggagatttctttgttgctgcctcccttgccacaactctgaccaagattgcattgcgctatgtagctttggttcaggagaagaaaaagcaaaattcttttgttgctgaggctatgttgctcatggctactatcctgcatttgggaaaatcctctcttcctaagaagccaattactgatgatgatgtggatcgaatttccctgtgcctcaaggtcttgtctgaatgttcacctttaatgaatgacattttcaataaggaatgcagacagtccctttctcacatgttatctgctaaactagaagaagagaaattatcccaaaagaaagaatctgaaaagaggaatgtgacagtacagcctgatgaccccatttccttcatgcaactaactgctaagaatgaaatgaactgcaaggaagatcagtttcagctgagtttactggcagcaatgggtaacacacagaggaaagaggcagcagatcccctagcatctaaacttaacaaggtcacccaattgacaggtttctcagatcctgtatatgcagaagcttacgttcatgtcaaccaatatgatattgtcctggatgtacttgttgtgaaccaaaccagtgatactttgcagaattgcacattagaactagctacactaggggatctgaaacttgtggaaaagccgtctcctttgactcttgctcctcatgacttcgcaaatattaaagctaacgtcaaagtagcatcaacagaaaatggaataatttttggtaatatagtttatgatgtctctggagcagcaagtgacagaaattgtgtggttctcagtgatattcacatcgacatcatggactatatccagcctgcaacttgcactgatgcagaattccgtcagatgtgggccgaatttgaatgggaaaacaaagtgacagttaacaccaacatggttgatttaaatgactacttacagcacatattaaagtcaaccaatatgaaatgcctgactccagaaaaggccctttctggttactgtggctttatggcagccaacctttatgctcgttccatatttggtgaagatgcacttgcaaatgtcagcattgagaagccaattcaccagggaccagatgctgctgttaccggccatataagaattcgtgcaaagagccagggaatggccttaagtcttggagataaaatcaacttgtcacagaagaaaactagtatataaaaataaacaaaaagtccttgaagctttacagttaatttaggtatgggcttactggactccaacatcttttgtactctttcatgcttatatagaatctgagttcatgctgaatacttttcagccaataatttatagcctttcccttaaatcaagattgagtttaaaattatagtttgtcttttgtcttaacagttctgaatgctgtcctcaaagtatataatgtttcatgtaccaagacccttttcacagtacaataaacagatctattcataaatttttgttattttataaataaatgattacataattttagttata

SEQ ID NO: 6266 - DNA, 3382 bp, Homo sapiens
  source 1..3382: mol_type = unassigned DNA
aggtggctgtggcttcggtcgttaccccacccccttccacgtcagccaaggactctggagccgccgccgccgctgctgcggttcatagccggagtagacggagccgcagtagacggatccgcggctgcaccaaaccactgcccctcggagcctggtagtgggccacaagcccccagtcccagaggcgtgattttctggcatccttaaatcttgtgtcaaggattggttataatataaccagaaaccatgacggcggctgagaacgtatgctacacgttaattaacgtgccaatggattcagaaccaccatctgaaattagcttaaaaaatgatctagaaaaaggagatgtaaagtcaaagactgaagctttgaagaaagtaatcattatgattctgaatggtgaaaaacttcctggacttctgatgaccatcattcgttttgtgctacctcttcaggatcacactatcaagaaattacttctggtattttgggaaattgttcctaaaacaactccagatgggagacttttacatgagatgatccttgtatgtgatgcatacagaaaggatcttcaacatcctaatgaatttattcgaggatctactcttcgttttctttgcaaattgaaagaagcagaattgctagaacctttaatgccagctattcgtgcatgtttggagcatcgacacagctatgttagaagaaatgctgttttggccatctataccatctatagaaattttgaacatcttatacctgatgctcctgaactgatacatgattttctggtgaatgagaaggatgcaagttgcaaaaggaatgcatttatgatgctaattcatgcagatcaggatcgagctttggattacttaagtacttgcattgatcaagttcaaacatttggagacattctgcagctggttattgttgaactgatttataaggtctgtcatgctaatccatcagaaagagctcgttttattcgctgcatctataacttattacagtcatccagccctgctgtaaaatatgaagctgctgggacattagtgacactctctagtgcaccaactgcaatcaaggctgctgctcagtgttacattgatttaattattaaggagagcgacaacaatgtaaaactcatagttttggatcgcttgatagaattaaaagagcatcctgctcatgaacgagtactacaggatctggttatggatatcctaagagtattgagcacaccagacttagaagtacgaaagaaaactctgcagttagcactggatcttgtctcttctagaaatgttgaagagctggttattgtcctgaagaaggaagtgataaaaacaaataatgtgtctgagcatgaagatactgacaaatacagacaactcctagtgcgaacattgcattcctgttctgtccgatttccagatatggctgcaaatgttattcctgtgttaatggaatttctcagtgacaacaacgaagcagcagctgctgatgtcttggagtttgttcgtgaagccattcagcgctttgataacctgagaatgcttattgttgagaagatgcttgaagtctttcatgctattaaatctgtcaagatttaccgaggagcattatggatcctgggagaatactgtagtaccaaggaagacattcagagtgtgatgactgagatccgcaggtcccttggagagatcccaattgtagagtcagaaataaagaaagaagctggtgaattaaaacctgaagaagaaataactgtagggccagttcagaaattggttactgaaatgggtacctatgcaactcagagtgcccttagcagttctagacccaccaagaaagaggaagacagacctcccttgagaggattccttctggatggagatttctttgttgctgcctcccttgccacaactctgaccaagattgcattgcgctatgtagctttggttcaggagaagaaaaagcaaaattcttttgttgctgaggctatgttgctcatggctactatcctgcatttgggaaaatcctctcttcctaagaagccaattactgatgatgatgtggatcgaatttccctgtgcctcaaggtcttgtctgaatgttcacctttaatgaatgacattttcaataaggaatgcagacagtccctttctcacatgttatctgctaaactagaagaagagaaattatcccaaaagaaagaatctgaaaagaggaatgtgacagtacagcctgatgaccccatttccttcatgcaactaactgctaagaatgaaatgaactgcaaggaagatcagtttcagctgagtttactggcagcaatgggtaacacacagaggaaagaggcagcagatcccctagcatctaaacttaacaaggtcacccaattgacaggtttctcagatcctgtatatgcagaagcttacgttcatgtcaaccaatatgatattgtcctggatgtacttgttgtgaaccaaaccagtgatactttgcagaattgcacattagaactagctacactaggggatctgaaacttgtggaaaagccgtctcctttgactcttgctcctcatgacttcgcaaatattaaagctaacgtcaaagtagcatcaacagaaaatggaataatttttggtaatatagtttatgatgtctctggagcagcaagtgacagaaattgtgtggttctcagtgatattcacatcgacatcatggactatatccagcctgcaacttgcactgatgcagaattccgtcagatgtgggccgaatttgaatgggaaaacaaagtgacagttaacaccaacatggttgatttaaatgactacttacagcacatattaaagtcaaccaatatgaaatgcctgactccagaaaaggccctttctggttactgtggctttatggcagccaacctttatgctcgttccatatttggtgaagatgcacttgcaaatgtcagcattgagaagccaattcaccagggaccagatgctgctgttaccggccatataagaattcgtgcaaagagccagggaatggccttaagtcttggagataaaatcaacttgtcacagaagaaaactagtatataaaaataaacaaaaagtccttgaagctttacagttaatttaggtatgggcttactggactccaacatcttttgtactctttcatgcttatatagaatctgagttcatgctgaatacttttcagccaataatttatagcctttcccttaaatcaagattgagtttaaaattatagtttgtcttttgtcttaacagttctgaatgctgtcctcaaagtatataatgtttcatgtaccaagacccttttcacagtacaataaacagatctattcataaa

SEQ ID NO: 6267 - DNA, 3175 bp, Homo sapiens
  source 1..3175: mol_type = unassigned DNA
ggaaacgacggccctgcgcgcagtttgcgcaggcgctccggccctggcctctgactatcgcgagaatcggctcccggaagttccacgtcagtcagtctgacggtcagtggatcggtgggtttatctcaaggcctgagtagccggtaacaaacgagggttcccgggattggaccgacgcagccatgcctctgcgacttgatatcaaaagaaagctaactgctagatctgatcgagttaagagtgtggatctgcatcctacagagccatggatgttggcaagtctttacaatggcagtgtgtgtgtttggaatcatgaaacacagacactggtgaagacatttgaagtatgtgatcttcctgttcgagctgcaaagtttgttgcaaggaagaattgggttgtgacaggagcggatgacatgcagattagagtgttcaattacaatactctggagagagttcatatgtttgaagcacactcagactacattcgctgtattgctgttcatccaacccagcctttcattctaactagcagtgatgacatgcttattaagctctgggactgggataaaaaatggtcttgctcacaagtgtttgaaggacacacccattatgttatgcagattgtgatcaaccccaaagataacaatcagtttgccagtgcctctttggacaggactatcaaggtgtggcagttgggctcttcgtcaccaaacttcactttggaaggacatgagaaaggcgtgaattgcattgattactacagtggtggggacaagccatacctcatttcaggtgcagatgaccgtcttgttaaaatatgggattatcagaataaaacatgtgtgcagacactggaaggacatgcccaaaatgtgtcttgtgccagctttcatcctgagttgccaatcattatcacaggttcagaagatggaacagtacgtatttggcattcaagcacctaccggcttgagagcacactgaattatggaatggagagggtatggtgcgtggccagtctaagagggtcaaacaatgtcgctttgggctatgatgaagggagcatcattgttaagcttggtcgggaggaacctgccatgtccatggatgccaatggaaagataatttgggccaagcattcagaagtccagcaggccaacctaaaagcaatgggagatgctgaaattaaagatggtgaaagattgccactggcagtaaaggatatgggcagttgtgaaatataccctcagactattcagcacaatcctaatgggcggtttgtggtggtgtgtggtgatggggagtatatcatctacacagcaatggcattgagaaacaagagctttggatctgctcaggagtttgcatgggcccacgattcttcagagtatgcaataagagagagcaacagcattgtaaagatatttaagaactttaaggaaaaaaaatcatttaaaccagattttggagcagaaagtatctacggcggcttcttattgggagtcagatctgtaaatggcttagccttctatgactgggacaatacagaactcatacgaagaattgaaattcagcccaaacatattttctggtctgactctggagagctagtctgtattgctactgaggaatcattttttatccttaagtatctgtcagaaaaagtcttggctgcacaggaaacacatgagggagttactgaagatggcattgaagatgcctttgaggttcttggtgagattcaggaaattgtgaaaacagggctttgggtaggcgattgcttcatttacacaagttctgtgaacagattaaattattatgttggaggagaaatagtcaccattgcccacttggacaggacgatgtatctcctaggctacattcctaaagacaacaggctttatctgggggataaagaattgaacatcattagctattccctgctggtttcagtcctggaataccagacagctgtcatgcggagggactttagcatggctgataaggtccttcctaccattccaaaagaacagaggaccagagttgcacactttttggaaaagcagggcttcaagcagcaagctcttacagtatccacagatcctgagcatcgttttgagcttgctcttcagcttggagagttaaaaattgcataccagttagcagtggaagcagagtcagaacagaagtggaaacaacttgctgaacttgccattagtaaatgtcagtttggcctagcccaggagtgcctgcatcatgcacaggattatgggggcctgctgcttttggccactgcctctggaaatgctaatatggtgaacaagctagcagagggtgcggagagagatggcaaaaataatgtggcattcatgagctactttttacagggcaaggttgatgcctgcctagagctcttaattagaactggacggctgccagaagctgccttcttggcccgaacttacttacccagtcaggtttcaagggtagtgaaactctggagagagaatctctcaaaagtcaatcagaaagcagcagaatcccttgctgacccaacagagtatgaaaacctgttccctggattaaaagaagcctttgttgttgaagaatgggtgaaggaaacacatgctgatctgtggccagccaaacaatacccacttgtcacgccaaatgaagagagaaatgtcatggaagagggaaaagactttcagccctcaagatctacagctcaacaggaacttgatgggaaacctgcttctcctactccggttattgtggcctcccacacagccaacaaagaagaaaagagtttactcgaactagaagtagatttggataatttggaattagaagatattgacacaacagatatcaatctggatgaagatattttggatgattgactgtaatgctttccatttacctgactaaacagatcattattatatataggtattgattgctaccctgaccacagtgctttggactatgagaaacttcttagatttttatatgtaaatgctgtggaccactgggagcacaatgcccacatcatcttaagaagagtttatgtgcagcatttaaatcactgtgttttccttgttaactaaaacagacatgggctttgatttttttcatactattagaccatatctcataaaaccttttgaattaa

SEQ ID NO: 6268 - DNA, 3034 bp, Homo sapiens
  source 1..3034: mol_type = unassigned DNA
atcgcgagaatcggctcccggaagttccacgtcagtcagtctgacgcctctgcgacttgatatcaaaagaaagctaactgctagatctgatcgagttaagagtgtggatctgcatcctacagagccatggatgttggcaagtctttacaatggcagtgtgtgtgtttggaatcatgaaacacagacactggtgaagacatttgaagtatgtgatcttcctgttcgagctgcaaagtttgttgcaaggaagaattgggttgtgacaggagcggatgacatgcagattagagtgttcaattacaatactctggagagagttcatatgtttgaagcacactcagactacattcgctgtattgctgttcatccaacccagcctttcattctaactagcagtgatgacatgcttattaagctctgggactgggataaaaaatggtcttgctcacaagtgtttgaaggacacacccattatgttatgcagattgtgatcaaccccaaagataacaatcagtttgccagtgcctctttggacaggactatcaaggtgtggcagttgggctcttcgtcaccaaacttcactttggaaggacatgagaaaggcgtgaattgcattgattactacagtggtggggacaagccatacctcatttcaggtgcagatgaccgtcttgttaaaatatgggattatcagaataaaacatgtgtgcagacactggaaggacatgcccaaaatgtgtcttgtgccagctttcatcctgagttgccaatcattatcacaggttcagaagatggaacagtacgtatttggcattcaagcacctaccggcttgagagcacactgaattatggaatggagagggtatggtgcgtggccagtctaagagggtcaaacaatgtcgctttgggctatgatgaagggagcatcattgttaagcttggtcgggaggaacctgccatgtccatggatgccaatggaaagataatttgggccaagcattcagaagtccagcaggccaacctaaaagcaatgggagatgctgaaattaaagatggtgaaagattgccactggcagtaaaggatatgggcagttgtgaaatataccctcagactattcagcacaatcctaatgggcggtttgtggtggtgtgtggtgatggggagtatatcatctacacagcaatggcattgagaaacaagagctttggatctgctcaggagtttgcatgggcccacgattcttcagagtatgcaataagagagagcaacagcattgtaaagatatttaagaactttaaggaaaaaaaatcatttaaaccagattttggagcagaaagtatctacggcggcttcttattgggagtcagatctgtaaatggcttagccttctatgactgggacaatacagaactcatacgaagaattgaaattcagcccaaacatattttctggtctgactctggagagctagtctgtattgctactgaggaatcattttttatccttaagtatctgtcagaaaaagtcttggctgcacaggaaacacatgagggagttactgaagatggcattgaagatgcctttgaggttcttggtgagattcaggaaattgtgaaaacagggctttgggtaggcgattgcttcatttacacaagttctgtgaacagattaaattattatgttggaggagaaatagtcaccattgcccacttggacaggacgatgtatctcctaggctacattcctaaagacaacaggctttatctgggggataaagaattgaacatcattagctattccctgctggtttcagtcctggaataccagacagctgtcatgcggagggactttagcatggctgataaggtccttcctaccattccaaaagaacagaggaccagagttgcacactttttggaaaagcagggcttcaagcagcaagctcttacagtatccacagatcctgagcatcgttttgagcttgctcttcagcttggagagttaaaaattgcataccagttagcagtggaagcagagtcagaacagaagtggaaacaacttgctgaacttgccattagtaaatgtcagtttggcctagcccaggagtgcctgcatcatgcacaggattatgggggcctgctgcttttggccactgcctctggaaatgctaatatggtgaacaagctagcagagggtgcggagagagatggcaaaaataatgtggcattcatgagctactttttacagggcaaggttgatgcctgcctagagctcttaattagaactggacggctgccagaagctgccttcttggcccgaacttacttacccagtcaggtttcaagggtagtgaaactctggagagagaatctctcaaaagtcaatcagaaagcagcagaatcccttgctgacccaacagagtatgaaaacctgttccctggattaaaagaagcctttgttgttgaagaatgggtgaaggaaacacatgctgatctgtggccagccaaacaatacccacttgtcacgccaaatgaagagagaaatgtcatggaagagggaaaagactttcagccctcaagatctacagctcaacaggaacttgatgggaaacctgcttctcctactccggttattgtggcctcccacacagccaacaaagaagaaaagagtttactcgaactagaagtagatttggataatttggaattagaagatattgacacaacagatatcaatctggatgaagatattttggatgattgactgtaatgctttccatttacctgactaaacagatcattattatatataggtattgattgctaccctgaccacagtgctttggactatgagaaacttcttagatttttatatgtaaatgctgtggaccactgggagcacaatgcccacatcatcttaagaagagtttatgtgcagcatttaaatcactgtgttttccttgttaactaaaacagacatgggctttgatttttttcatactattagaccatatctcataaaaccttttgaatt

SEQ ID NO: 6269 - DNA, 1134 bp, Homo sapiens
  source 1..1134: mol_type = unassigned DNA
gacgtgtctttcaggaagaggagctggtgagaagacagcgaaatggcgcctccggcccccggcccggcctccggcggctccggggaggtagacgagctgttcgacgtaaagaacgccttctacatcggcagctaccagcagtgcataaacgaggcgcagcgggtgaagctatcaagcccagagagagacgtggagagggacgtcttcctgtatagagcgtacctggcgcagaggaagttcggtgtggtcctggatgagatcaagccctcctcggcccctgagctccaggccgtgcgcatgtttgctgactacctcgcccacgagagtcggagggacagcatcgtggccgagctggaccgagagatgagcaggagcgtggacgtgaccaacaccaccttcctgctcatggccgcctccatctatctccacgaccagaacccggatgccgccctgcgtgcgctgcaccagggggacagcctggagtgcacagccatgacagtgcagatcctgctgaagctggaccgcctggacctcgcccggaaggagctgaagagaatgcaggacctggacgaggatgccaccctcacccagctcgccactgcctgggtcagcctggccacgggtggtgagaagctgcaggatgcctactacatcttccaggagatggctgacaagtgctcgcccaccctgctgctgctcaatgggcaggcggcctgccacatggcccagggccgctgggaggccgctgagggcctgctgcaggaggcgctagacaaggatagtggctacccagagacgctggtcaacctcatcgtcctgtcccagcacctgggcaagccccctgaggtgacaaaccgatacctgtcccagctgaaggatgcccacaggtcccatcccttcatcaaggagtaccaggccaaggagaacgactttgacaggctggtgctacagtacgctcccagcgcctgaggctggcccagagctgtcaggaccatgaagccaggacagaggccaggagccagccctgcagccctccccacccggcatccacctgcatcccctctgggggcaggagcccacccccagcacccccatctgttaataaatatctcaactccagggtgttccacctga

SEQ ID NO: 6270 - DNA, 978 bp, Homo sapiens
  source 1..978: mol_type = unassigned DNA
gacgtgtctttcaggaagaggagctggtgagaagacagcgaaatggcgcctccggcccccggcccggcctccggcggctccggggaggtagacgagctgttcgacgtaaagaacgccttctacatcggcagctaccagcagtgcataaacgaggcgcagcgggtgaagctatcaagcccagagagagacgtggagagggacgtcttcctgtatagagcgtacctggcgcagaggaagttcggtgtggtcctggatgagatcaagccctcctcggcccctgagctccaggccgtgcgcatgtttgctgactacctcgcccacgagagtcggagggacagcatcgtggccgagctggaccgagagatgagcaggagcgtggacgtgaccaacaccaccttcctgctcatggccgcctccatctatctccacgaccagaacccggatgccgccctgcgtgcgctgcaccagggggacagcctggagtgcacagccatgacagtgcagatcctgctgaagctggaccgcctggacctcgcccggaaggagctgaagagaatgcaggacctggacgaggatgccaccctcacccagctcgccactgcctgggtcagcctggccacggatagtggctacccagagacgctggtcaacctcatcgtcctgtcccagcacctgggcaagccccctgaggtgacaaaccgatacctgtcccagctgaaggatgcccacaggtcccatcccttcatcaaggagtaccaggccaaggagaacgactttgacaggctggtgctacagtacgctcccagcgcctgaggctggcccagagctgtcaggaccatgaagccaggacagaggccaggagccagccctgcagccctccccacccggcatccacctgcatcccctctgggggcaggagcccacccccagcacccccatctgttaataaatatctcaactccagggtgttccacctga

SEQ ID NO: 6271 - DNA, 981 bp, Homo sapiens
  source 1..981: mol_type = unassigned DNA
gacgtgtctttcaggaagaggagctggtgagaagacagcgaaatggcgcctccggcccccggcccggcctccggcggctccggggaggtagacgagctgttcgacgtaaagaacgccttctacatcggcagctaccagcagtgcataaacgaggcgcagcgggtgaagctatcaagcccagagagagacgtggagagggacgtcttcctgtatagagcgtacctggcgcagaggaagttcggtgtggtcctggatgagatcaagccctcctcggcccctgagctccaggccgtgcgcatgtttgctgactacctcgcccacgagagtcggagcacagccatgacagtgcagatcctgctgaagctggaccgcctggacctcgcccggaaggagctgaagagaatgcaggacctggacgaggatgccaccctcacccagctcgccactgcctgggtcagcctggccacgggtggtgagaagctgcaggatgcctactacatcttccaggagatggctgacaagtgctcgcccaccctgctgctgctcaatgggcaggcggcctgccacatggcccagggccgctgggaggccgctgagggcctgctgcaggaggcgctagacaaggatagtggctacccagagacgctggtcaacctcatcgtcctgtcccagcacctgggcaagccccctgaggtgacaaaccgatacctgtcccagctgaaggatgcccacaggtcccatcccttcatcaaggagtaccaggccaaggagaacgactttgacaggctggtgctacagtacgctcccagcgcctgaggctggcccagagctgtcaggaccatgaagccaggacagaggccaggagccagccctgcagccctccccacccggcatccacctgcatcccctctgggggcaggagcccacccccagcacccccatctgttaataaatatctcaactccagggtgttccacctga

SEQ ID NO: 6272 - DNA, 1128 bp, Homo sapiens
  source 1..1128: mol_type = unassigned DNA
cgtgtctttcaggaagaggagctggtgagaagacagcgaaatggcgcctccggccccggccggcctccggggctccggggaggtagacgagctgttcgacgtaaagaacgccttctacatcggcagctaccagcagtgcataaacgaggcgcagcgggtgaagctatcaagcccagagagagacgtggagagggacgtcttcctgtatagagcgtacctggcgcagaggaagttcggtgtggtcctggatgagatcaagccctcctcggcccctgagctccaggccgtgcgcatgtttgctgactacctcgcccacgagagtcggagggacagcatcgtggccgagctggaccgagagatgagcaggagcgtggacgtgaccaacaccaccttcctgctcatggccgcctccatctatctccacgaccagaacccggatgccgccctgcgtgcgctgcaccagggggacagcctggagtgcacagccatgacagtgcagatcctgctgaagctggaccgcctggacctcgcccggaaggagctgaagagaatgcaggacctggacgaggatgccaccctcacccagctcgccactgcctgggtcagcctggccacgggtggtgagaagctgcaggatgcctactacatcttccaggagatggctgacaagtgctcgcccaccctgctgctgctcaatgggcaggcggcctgccacatggcccagggccgctgggaggccgctgagggcctgctgcaggaggcgctagacaaggatagtggctacccagagacgctggtcaacctcatcgtcctgtcccagcacctgggcaagccccctgaggtgacaaaccgatacctgtcccagctgaaggatgcccacaggtcccatcccttcatcaaggagtaccaggccaaggagaacgactttgacaggctggtgctacagtacgctcccagcgcctgaggctggcccagagctgtcaggaccatgaagccaggacagaggccaggagccagccctgcagccctccccacccggcatccacctgcatcccctctgggggcaggagcccacccccagcacccccatctgttaataaatatctcaactccagggtgttccacctg

SEQ ID NO: 6273 - DNA, 792 bp, Homo sapiens
  source 1..792: mol_type = unassigned DNA
ggctgcggcgcctgggacggttgcggtgggtctgggcgctgggaagtcgtccaagatgattaaaaaattcgacaagaaggacgaggagtctggtagtggctccaatcctttccagcatctggagaagagtgctgttttacaggaggctcgtatattcaatgaaactccaatcaatccaagaagatgtttgcatattcttacaaagattctttacttactgaaccagggtgaacactttggaacaacggaagctacagaagccttctttgcaatgacgcgattgtttcaatctaatgatcaaacattgaggagaatgtgctaccttaccatcaaagaaatggctaccatctctgaggatgtgataattgtcacaagcagtctgactaaagacatgactggaaaagaagatgtataccgaggcccggccatcagagctctctgcaggatcaccgatggaacaatgttgcaagccattgaaagatacatgaagcaggccattgtggataaagtttccagtgtatccagttcagcactggtatcttccctgcacatgatgaagataagctatgatgtggttaagcgctggatcaatgaagcccaagaagctgcatcaagtgataatattatggtccagtaccatgcattgggagtcctgtatcaccttagaaagaatgatcgacttgctgtttccaagatgttgaataagtttactaaatctggtctcaagtcacagtttgcttactgcatgctgatccgaattgccagtcgcttactaaaagaaactgaggatgg

SEQ ID NO: 6274 - DNA, 895 bp, Homo sapiens
  source 1..895: mol_type = unassigned DNA
ttgcaggctcctttagctgcaccatgaagtttacagtccgggactgtgaccctaacactggagttccagatgaggatgggtatgatgatgagtatgtgctggaagatctcgaagtgactgtgtctgaccatattcagaaagtactgaagcctaactttgctgctgcttgggaagaggtgggagatacctttgagaaagaggaaacctttgccctcagttctaccaaaacccttgaagaggctgtcaacaatatcatcacatttctgggcatgcagccatgtgagaggtccgataaagtacctgagaacaagaattcccattcgctctatctggcaggtatattcagaggtggctatgatttattggtgaggtccaggctggccttagccgatggagtgaccatgcaggtgactgtcagaagtaaagagagaacacctgtagatgttatcttagcttctgttggataaatgcttactggacaagaggaaactgatgcacactacatggtcagtgggcttttaggctagtggcatcagtttcccagaatcagacttttgaagatgaatgactttggagaagcaaattaaacatttggccctgagccagcagatcaagcaaatgtctatctttgcgcatgggttgtttttttttttttttctttttattctacttggtcagctttgggacgatagtgcagctttgggtgatcttgaaaatcaaatactatcctatactccagctgcttaacttcattttattctttaatgtgtacctgaaagctcctggcaatgctggaaaatttttatcccagaggggtgggggggaggggggaggggaagccagagtccacttttgtcacaattcatttttattaatagaaaataaacacttattc

SEQ ID NO: 6275 - DNA, 831 bp, Homo sapiens
  source 1..831: mol_type = unassigned DNA
cggggccggccttcctgcagcctcttccgctcgccggctgcggcgcctgggacggttgcggtgggtctgggcgctgggaagtcgtccaagatgattaaaaaattcgacaagaaggacgaggagtctggtagtggctccaatcctttccagcatctggagaagagtgctgttttacaggaggctcgtatattcaatgaaactccaatcaatccaagaagatgtttgcatattcttacaaagattctttacttactgaaccagggtgaacactttggaacaacggaagctacagaagccttctttgcaatgacgcgattgtttcaatctaatgatcaaacattgaggagaatgtgctaccttaccatcaaagaaatggctaccatctctgaggatgtgataattgtcacaagcagtctgactaaagacatgactggaaaagaagatgtataccgaggcccggccatcagagctctctgcaggatcaccgatggaacaatgttgcaagccattgaaagatacatgaagcaggccattgtggataaagtttccagtgtatccagttcagcactggtatcttccctgcacatgatgaagataagctatgatgtggttaagcgctggatcaatgaagcccaagaagctgcatcaagtgataatattatggtccagtaccatgcattgggagtcctgtatcaccttagaaagaatgatcgacttgctgtttccaagatgttgaataagtttactaaatctggtctcaagtcacagtttgcttactgcatgctgatccgaattgccagtcgcttactaaaagaaactgaggatgggtaa

SEQ ID NO: 6276 - DNA, 1402 bp, Homo sapiens
  source 1..1402: mol_type = unassigned DNA
gcggtacggcgtgttggtcccagcggttcagctgaggtagggacgtgctgtaggccggaatgttaccggctgttggatctgcggatgaggaggaggatcctgcggaggaggattgtcctgaattggttcccattgagacgacgcaaagcgaggaggaggaaaagtctggcctcggcgccaagatcccagtcacaattatcaccgggtatttagttattcagaggctgctctgctgagaagatgaacaaatttcttgtccaaaacaatgtatttcaaacgtgccgctcgggcctttcccgtattgctcactggtgctgggaagacaacacttctgaactatattttgacagagcaacatagtaaaagagtagcggtcattttaaatgaatttggggaaggaagtgcgctggagaaatccttagctgtcagccaaggtggagagctctatgaagagtggctggaacttagaaacggttgcctctgctgttcagtgaaggacagtggccttagagctattgagaatttgatgcaaaagaaggggaaatttgattacatactgttagagaccactggattagcagaccctggtgcagtggcttctatgttttgggttgatgctgaattagggagtgatatttatcttgatggtatcataactattgtggattcaaaatatggattaaaacatttaacagaagagaaacctgatggccttatcaatgaagctactagacaagttgctttggcagatgccattctcattaataaaacagacctggttccagaagaagatgtaaagaaattaagaacgacaattagatccataaatggactaggacaaatcttagaaacacaaagatcaagagttgatctctctaatgtattagatcttcatgcctttgatagtctctctggaataagtttgcagaaaaaacttcagcatgtgccaggaacacaacctcaccttgatcagagtattgttacaatcacatttgaagtaccaggaaatgcaaaggaagaacatcttaatatgtttattcagaatctcctgtgggaaaagaatgtgagaaacaaggacaatcactgcatggaggtcataaggctgaagggattggtgtcaatcaaagacaaatcacaacaagtgattgtccagggtgtccatgagctctatgatctggaggagactccagtgagctggaaggatgacactgagagaacaaatcgattggtcctccttggcagaaatttagataaggatatccttaaacagctgtttatagctactgtgacagaaacagaaaagcagtggacaacacgtttccaagaagatcaagtttgtacataacactagaggcatttcttatcaaaaggattggataataaaaataagtttctactgggt

SEQ ID NO: 6277 - DNA, 1703 bp, Homo sapiens
  source 1..1703: mol_type = unassigned DNA
ccgggagtggcgtgctgggcgtgcgcggctgcggtacggcgtgttggtcccagcggttcagctgaggtagggacgtgctgtaggccggaatgttaccggctgttggatctgcggatgaggaggaggatcctgcggaggaggattgtcctgaattggttcccattgagacgacgcaaagcgaggaggaggaaaagtctggcctcggcgccaagatcccagtcacaattatcaccgggtatttaggtgctgggaagacaacacttctgaactatattttgacagagcaacatagtaaaagagtagcggtcattttaaatgaatttggggaaggaagtgcgctggagaaatccttagctgtcagccaaggtggagagctctatgaagagtggctggaacttagaaacggttgcctctgctgttcagtgaaggacagtggccttagagctattgagaatttgatgcaaaagaaggggaaatttgattacatactgttagagaccactggattagcagaccctggtgcagtggcttctatgttttgggttgatgctgaattagggagtgatatttatcttgatggtatcataactattgtggattcaaaatatggattaaaacatttaacagaagagaaacctgatggccttatcaatgaagctactagacaagttgctttggcagatgccattctcattaataaaacagacctggttccagaagaagatgtaaagaaattaagaacgacaattagatccataaatggactaggacaaatcttagaaacacaaagatcaagagttgatctctctaatgtattagatcttcatgcctttgatagtctctctggaataagtttgcagaaaaaacttcagcatgtgccaggaacacaacctcaccttgatcagagtattgttacaatcacatttgaagtaccaggaaatgcaaaggaagaacatcttaatatgtttattcagaatctcctgtgggaaaagaatgtgagaaacaaggacaatcactgcatggaggtcataaggctgaagggattggtgtcaatcaaagacaaatcacaacaagtgattgtccagggtgtccatgagctctatgatctggaggagactccagtgagctggaaggatgacactgagagaacaaatcgattggtcctccttggcagaaatttagataaggatatccttaaacagctgtttatagctactgtgacagaaacagaaaagcagtggacaacacgtttccaagaagatcaagtttgtacataacactagaggcatttcttatcaaaaggattggataataaaaataagtttctactgggtatatttcaagcatttatttattactttagttacgaattccaatatactttaaaatggtatttgttttacagcatacataaaatgtagcaaatcagtactgtaaaacatttaacattcatacagttatatataatatccttttttttaaagaatggtatttcacaaaaatatcttttgaaattggctttggagtttacatatactgaacatgaaagtttataataatgatgatacaactttcaacattgtcattttttcttagaacttcagctgattgcagagatataatgattacattgttattaaatttttttaacacaagtaagtgtcaccattttatgacatgaaataaaaggttatgactgttat

SEQ ID NO: 6278 - DNA, 721 bp, Homo sapiens
  source 1..721: mol_type = unassigned DNA
aaggggcgaggcgcttctcgtccagagcccaggtaatccgggcgggatcagcgagcgtcgcgatgtgatgacgtcaggccccgggcaggccgggagtggcgtgctgggcgtgcgcggctgcggtacggcgtgttggtcccagcggttcagctgaggtagggacgtgctgtaggccggaatgttaccggctgttggatctgcggatgaggaggaggatcctgcggaggaggattgtcctgaattggttcccattgagacgacgcaaagcgaggaggaggaaaagtctggcctcggcgccaagatcccagtcacaattatcaccgggtatttaggtgctgggaagacaacacttctgaactatattttgacagagcaacatagtaaaagagtagcggtcattttaaatgaatttggggaaggaagtgcgctggagaaatccttagctgtcagccaaggtggagagctctatgaagagtggctggaacttagaaacggttgcctctgctgttcagtgaaggacagtggccttagagctattgagaatttgatgcaaaagaaggggaaatttgattacatactgttagagaccactggattagcagaccctggtgcagtggcttctatgttttgggttgatgctgaattagggagtgatatttatcttgatggtatcataactattgtggattcaaaatatggattaaaagtgaaataccactaa

SEQ ID NO: 6279 - DNA, 1572 bp, Homo sapiens
  source 1..1572: mol_type = unassigned DNA
aggccccgggcaggccgggagtggcgtgctgggcgtgcgcggctgcggtacggcgtgttggtcccagcggttcagctgaggtagggacgtgctgtaggccggaatgttaccggctgttggatctgcggatgaggaggaggatcctgcggaggaggattgtcctgaattggttcccattgagacgacgcaaagcgaggaggaggaaaagtctggcctcggcgccaagatcccagtcacaattatcaccgggtatttaggtgctgggaagacaacacttctgaactatattttgacagagcaacatagtaaaagagtagcggtcattttaaatgaatttggggaaggaagtgcgctggagaaatccttagctgtcagccaaggtggagagctctatgaagagtggctggaacttagaaacggttgcctctgctgttcagtgaaggacagtggccttagagctattgagaatttgatgcaaaagaaggggaaatttgattacatactgttagagaccactggattagcagaccctggtgcagtggcttctatgttttgggttgatgctgaattagggagtgatatttatcttgatggtatcataactattgtggattcaaaatatggattaaaacatttaacagaagagaaacctgatggccttatcaatgaagctactagatccataaatggactaggacaaatcttagaaacacaaagatcaagtttgcagaaaaaacttcagcatgtgccaggaacacaacctcaccttgatcagagtattgttacaatcacatttgaagtaccaggaaatgcaaaggaagaacatcttaatatgtttattcagaatctcctgtgggaaaagaatgtgagaaacaaggacaatcactgcatggaggtcataaggctgaagggattggtgtcaatcaaagacaaatcacaacaagtgattgtccagggtgtccatgagctctatgatctggaggagactccagtgagctggaaggatgacactgagagaacaaatcgattggtcctccttggcagaaatttagataaggatatccttaaacagctgtttatagctactgtgacagaaacagaaaagcagtggacaacacgtttccaagaagatcaagtttgtacataacactagaggcatttcttatcaaaaggattggataataaaaataagtttctactgggtatatttcaagcatttatttattactttagttacgaattccaatatactttaaaatggtatttgttttacagcatacataaaatgtagcaaatcagtactgtaaaacatttaacattcatacagttatatataatatccttttttttaaagaatggtatttcacaaaaatatcttttgaaattggctttggagtttacatatactgaacatgaaagtttataataatgatgatacaactttcaacattgtcattttttcttagaacttcagctgattgcagagatataatgattacattgttattaaatttttttaacacaagtaagtgtcaccattttatgacatgaaataaaaggttatgactgtta

SEQ ID NO: 6280 - DNA, 1793 bp, Homo sapiens
  source 1..1793: mol_type = unassigned DNA
gtacggcgtgttggtcccagcggttcagctgaggtagggacgtgctgtaggccggaatgttaccggctgttggatctgcggatgaggaggaggatcctgcggaggaggattgtcctgaattggttcccattgagacgacgcaaagcgaggaggaggaaaagtctggcctcggcgccaagatcccagtcacaattatcaccgggtatttaggtgctgggaagacaacacttctgaactatattttgacagagcaacatagtaaaagagtagcggtcattttaaatgaatttggggaaggaagtgcgctggagaaatccttagctgtcagccaaggtggagagctctatgaagagtggctggaacttagaaacggttgcctctgctgttcagtgaaggacagtggccttagagctattgagaatttgatgcaaaagaaggggaaatttgattacatactgttagagaccactggattagcagaccctggtgcagtggcttctatgttttgggttgatgctgaattagggagtgatatttatcttgatggtatcataactattgtggattcaaaatatggattaaaacatttaacagaagagaaacctgatggccttatcaatgaagctactagacaagttgctttggcagatgccattctcattaataaaacagacctggttccagaagaagatgtaaagaaattaagaacgacaattaggtacgaaatgataagtgtgttaagtgcctacagatccatgttgtatacacagaatattttttactctgattgttgccctgtagaaacttaaggtataaggttgagctgcttcaagaacgttagggaatcacatatattgttgatggctaattgttatataaatggtaatacataaaattagtccccagtgcttgcagaatatagttcacagttaatagactgatattcagggtcttcgcactccatctttcttttcctgtcttctctttgactctttcctaatgtcagtcttccctaactttacccaggatggttaattcactttcccatggatgcatcctgtcagttcctgtctttactcgtaatgtattctcactctgccaatccctgagttctttcttgttctgctttttttttttttaatttattctatagagcctattctgtctctccccccttcctatgtgaagtcttccctgactcaagtggtctcagttttccctgaactcttgttgacttcatcttccttaactgtcaaccatgccttgtcttccagcttgctttaatatcttctttgtccatagccaaggctgatcagcataggacaatcaggacaatatgaatgatgctcaaatatgtgctaacagtcattttgctgactgttctggagactcccattccttttgaaaacaaagatgggcttttcaaatgaggttatagttcaggggctttgttttgaattattttgtaagacctgaactaataaaagccctatacagagagacattcggtagctattagtattggttatctttaatgtgtacaatgctttgagcgtgatggctcaaaattactattcttagtatttataagttctactgacattagattttgaatctgtcatctcagttcatatagtatatattatcaattgaatcaataaaggtaaggctcattaggagattatttgccatgattaatgattgtggaagaaagaaattcatattttttccacatatttcatcttattttaatagtaatgtccttaaactttactataaaaaaatataatgtc

SEQ ID NO: 6281 - DNA, 815 bp, Homo sapiens
  source 1..815: mol_type = unassigned DNA
acggcgtgttggtcccagcggttcagctgaggtagggacgtgctgtaggccggaatgttaccggctgttggatctgcggatgaggaggaggatcctgcggaggaggattgtcctgaattggttcccattgagacgacgcaaagcgaggaggaggaaaagtctggcctcggcgccaagatcccagtcacaattatcaccgggtatttagttattcagaggctgctctgctgagaagatgaacaaatttcttgtccaaaacaatgtatttcaaacgtgccgctcgggcctttcccgtattgctcactggtgctgggaagacaacacttctgaactatattttgacagagcaacatagtaaaagagtagcggtcattttaaatgaatttggggaaggaagtgcgctggagaaatccttagctgtcagccaaggtggagagctctatgaagagtggctggaacttagaaacggttgcctctgctgttcagtgaagtgaggaatgtgtttactgtgtacatggtttactagaaatgtttattgattatatttccagctttaattttcttgagtaatttaactgaatttacacagtttgcttcattgtattttcaaacaaatagaaaataaacttattaggaagcattttcttaaagtgtttcttgctgtcttttctatctgctctaatgttttggtccttttattgagtttttattgcttttgatgtcagggcttatttaatctctagtgcatgaaagtctcatatgtaaaaaatgattattctgaatttaatctgtcattggtcatacttctaagtgtt

SEQ ID NO: 6282 - DNA, 1744 bp, Homo sapiens
  source 1..1744: mol_type = unassigned DNA
ccgggagtggcgtgctgggcgtgcgcggctgcggtacggcgtgttggtcccagcggttcagctgaggtagggacgtgctgtaggccggaatgttaccggctgttggatctgcggatgaggaggaggatcctgcggaggaggattgtcctgaattggttcccattgagacgacgcaaagcgaggaggaggaaaagtctggcctcggcgccaagatcccagtcacaattatcaccgggtatttaggtgctgggaagacaacacttctgaactatattttgacagagcaacatagtaaaagagtagcggtcattttaaatgaatttggggaaggaagtgcgctggagaaatccttagctgtcagccaaggtggagagctctatgaagagtggctggaacttagaaacggttgcctctgctgttcagtgaagtgaggaatgtgtttactgtgtacatggtttactagaaatgtttattgattatatttccagctttaattttcttgagtaatttaactgaatttacacagtttgcttcattgtattttcaaacaaatagaaaataaacttattaggaagcattttcttaaagtgtttcttgctgtcttttctatctgctctaatgttttggtccttttattgagtttttattgcttttgatgtcagggcttatttaatctctagtgcatgaaagtctcatatgtaaaaaatgattattctgaatttaatctgtcattggtcatacttctaagtgttcaatcttataaaaaaaataaatgactatcaaaaaagagaaaaaccttacgttatgttctactagttaagttttcaaggacagtgttcactagtctaccatagaccctagaagagttacccaacacatagtagcactcaaatatttgttgaatgaattataaaaatgactacttgtactgttaattttgtgtattctagtgaattaaatctcttcggcatcatttactcccttaggtatttgactttgtgtcaaatgttttggcaaggataaaattataacagactttcttgaacaaccaaaatataatctattaaggattttccttcacttttgataaaataagaaaaaaggaaattaaaaccttgcatcctaatgtaaaatagaattatatggtgtttaatatcagtgtctctttagctattatattaaactactatagttaatacattttatcattattttgtatgttggtttttaaaaatttcataaagctataaaaagatacttggtcagataaagtttcctctgcttttaattttgataaagtattatgtatatgatttctttttacctattatatatatgcatctattgttttctcactggtaaatatgggacggacattttgttagaaggttagaagtgagttaaattttcacattcccaagggtacttttgtctcgggttgttgaatatattttaaagtgtttataataatcacttcaaaatatttaggtaattaactgtaaattatgttttggtattctccagggacagtggccttagagctattgagaatttgatgcaaaagaaggggaaatttgattacatactgttagagaccactggattagcagaccctggtaagaagtgagattattaataaccagaatatagttctgtgatatattgtaaatagatgtattagaggaatatctaaaatgaggattaaagcttttgttagtattaaaccaaaaactttttttggttt

SEQ ID NO: 6283 - DNA, 1241 bp, Homo sapiens
  source 1..1241: mol_type = unassigned DNA
ggcgtgttggtcccagcggttcagctgaggtagggacgtgctgtaggccggaatgttaccggctgttggatctgcggatgaggaggaggatcctgcggaggaggattgtcctgaattggttcccattgagacgacgcaaagcgaggaggaggaaaagtctggcctcggcgccaagatcccagtcacaattatcaccgggtatttaggtgctgggaagacaacacttctgaactatattttgacagagcaacatagtaaaagagtagcggtcattttaaatgaatttggggaaggaagtgcgctggagaaatccttagctgtcagccaaggtggagagctctatgaagagtggctggaacttagaaacggttgcctctgctgttcagtgaaggacagtggccttagagctattgagaatttgatgcaaaagaaggggaaatttgattacatactgttagagaccactggattagcagaccctggtgcagtggcttctatgttttgggttgatgctgaattagggagtgatatttatcttgatggtatcataactattgtggattcaaaatatggattaaaacatttaacagaagagaaacctgatggccttatcaatgaagctactagacaagttgctttggcagatgccattctcattaataaaacagacctggttccagaagaagatgtaaagaaattaagaacgacaattagatccataaatggactaggacaaatcttagaaacacaaagatcaagtttgcagaaaaaacttcagcatgtgccaggaacacaacctcaccttgatcagagtattgttacaatcacatttgaagtaccaggaaatgcaaaggaagaacatcttaatatgtttattcagaatctcctgtgggaaaagaatgtgagaaacaaggacaatcactgcatggaggtcataaggctgaagggattggtgtcaatcaaagacaaatcacaacaagtgattgtccagggtgtccatgagctctatgatctggaggagactccagtgagctggaaggatgacactgagagaacaaatcgattggtcctccttggcagaaatttagataaggatatccttaaacagctgtttatagctactgtgacagaaacagaaaagcagtggacaacacgtttccaagaagatcaagtttgtacataacactagaggcatttcttatcaaaaggattggataataaaaataagtttctactgggta

SEQ ID NO: 6284 - DNA, 661 bp, Homo sapiens
  source 1..661: mol_type = unassigned DNA
aaggggcgaggcgcttctcgtccagagcccaggtaatccgggcgggatcagcgagcgtcgcgatgtgatgacgtcaggccccgggcaggccgggagtggcgtgctgggcgtgcgcggctgcggtacggcgtgttggtcccagcggttcagctgaggtagggacgtgctgtaggccggaatgttaccggctgttggatctgcggatgaggaggaggatcctgcggaggaggattgtcctgaattggttcccattgagacgacgcaaagcgaggaggaggaaaagtctggcctcggcgccaagatcccagtcacaattatcaccgggtatttaggtgctgggaagacaacacttctgaactatattttgacagagcaacatagtaaaagagtagcggtcattttaaatgaatttggggaaggaagtgcgctggagaaatccttagctgtcagccaaggtggagagctctatgaagagtggctggaacttagaaacggttgcctctgctgttcagtgaaggacagtggccttagagctattgagaatttgatgcaaaagaaggggaaatttgattacatactgttagagaccactggattagcagaccctggtatcataactattgtggattcaaaatatggattaaaagtgaaataccactaa

SEQ ID NO: 6285 - DNA, 728 bp, Homo sapiens
  source 1..728: mol_type = unassigned DNA
gtgttggtcccagcggttcagctgaggtagggacgtgctgtaggccggaatgttaccggctgttggatctgcggatgaggaggaggatcctgcggaggaggattgtcctgaattggttcccattgagacgacgcaaagcgaggaggaggaaaagtctggcctcggcgccaagatcccagtcacaattatcaccgggtatttagttattcagaggctgctctgctgagaagatgaacaaatttcttgtccaaaacaatgtatttcaaacgtgccgctcgggcctttcccgtattgctcactggtgctgggaagacaacacttctgaactatattttgacagagcaacatagtaaaagagtagcggtcattttaaatgaatttggggaaggaagtgcgctggagaaatccttagctgtcagccaaggtggagagctctatgaagagtggctggaacttagaaacggttgcctctgctgttcagtgaaggacagtggccttagagctattgagaatttgatgcaaaagaaggggaaatttgattacatactgttagagaccactggattagcagaccctggtgcagtggcttctatgttttgggttgatgctgaattagggagtgatatttatcttgatggtatcataactattgtggattcaaaatatggattaaaagcaaagaattggacaacttaaaatgacagctctctattctgaggacttgacac

SEQ ID NO: 6286 - DNA, 1812 bp, Homo sapiens
  source 1..1812: mol_type = unassigned DNA
aagggacgaggcgcttctcgtccagagcccaggtaatccgggcgggatcagcgagcgtcgcgatgtgatgacgtcaggccccgggcaggccgggagtggcgtgctgggcgtgcgcggctgcggtacggcgtgttggtcccagcggttcagctgaggtagggacgtgctgtaggccggaatgttaccggctgttggatctgcggatgaggaggaggatcctgcggaggaggattgtcctgaattggttcccatggagacgacgcaaagcgaggaggaggaaaagtctggcctcggcgccaagatcccagtcacaattatcaccgggtatttaggtgctgggaagacaacacttctgaactatattttgacagagcaacatagtaaaagagtagcggtcattttaaatgaatttggggaaggaagtgcgctggagaaatccttagctgtcagccaaggtggagagctctatgaagagtggctggaacttagaaacggttgcctctgctgttcagtgaaggacaatggccttagagctattgagaatttgatgcaaaagaaggggaaatttgattacatactgttagagaccactggattggcagacccaggtgcagtggcttctatgttttgggttgatgctgaattagggagtgatatttaccttgatggtatcataactatagtggattcaaaatatggattaaaacatttagcagaagagaaacctgatggccttatcaatgaagctactaggcaagttgctttggcagatgccattctcattaataaaacagacttggttccagaagaagatgtaaagaaattaagagcgacaattagatccataaatggactaggacaaatcttagaaacacaaagatcaagagttgatctctctaatgtattagatcttcatgcctttgatagtctctctggaataagtttgcagaaaaaacttcagcatgtgccaggaacacaacctcaccttgatcagagtattgttacaatcacatttgaagtaccaggaaatgcaaaggaagaacatcttaatatgtttattcagaatctcctgtgggaaaagaatgtgagaaacaaggacaatcactgcatggaggtcataaggctgaagggattggtgtcaatcaaagacaaatcacaacaagtgattgtccagggtgtccatgagctctatgatctggaggagactccagtgagctggaaggatgacactgagagaacaaatcgattggtcctccttggcagaaatttagataaggatatccttaaacagctgtttatagctactgtgacagaaacagaaaagcagtggacaacacatttcaaagaagatcaagtttgtacataacactagaggcatttcttatcaaaaggattggataataaaaataagtttctactgggtatatttcaagcatttatttattactttagttacgaattccaatatactttaaaatggtatttgttttacagcatacataaaatgtagcaaatcggtactgtaaaacatttaacattcatacagttatatataatatccttttttttaaagaatggtatttcacaaaaatgtcttttgaaattggctttggagtttacatatactgaacatgaaagtttataataatgatgatacaactttcaacattgtcattttttcttagaacttcagctgattgcagagatataatgattacattgttattaaatttttttaacacaagtaagtgtcaccattttatgacatgaaataaaaggttatgactgttattgatgttgatgttgacgacc

SEQ ID NO: 6287 - DNA, 721 bp, Homo sapiens
  source 1..721: mol_type = unassigned DNA
aagggacgaggcgcttctcgtccagagcccaggtaatccgggcgggatcagcgagcgtcgcgatgtgatgacgtcaggccccgggcaggccgggagtggcgtgctgggcgtgcgcggctgcggtacggcgtgttggtcccagcggttcagctgaggtagggacgtgctgtaggccggaatgttaccggctgttggatctgcggatgaggaggaggatcctgcggaggaggattgtcctgaattggttcccatggagacgacgcaaagcgaggaggaggaaaagtctggcctcggcgccaagatcccagtcacaattatcaccgggtatttaggtgctgggaagacaacacttctgaactatattttgacagagcaacatagtaaaagagtagcggtcattttaaatgaatttggggaaggaagtgcgctggagaaatccttagctgtcagccaaggtggagagctctatgaagagtggctggaacttagaaacggttgcctctgctgttcagtgaaggacaatggccttagagctattgagaatttgatgcaaaagaaggggaaatttgattacatactgttagagaccactggattggcagacccaggtgcagtggcttctatgttttgggttgatgctgaattagggagtgatatttaccttgatggtatcataactatagtggattcaaaatatggattaaaagtgaaataccactaa

SEQ ID NO: 6288 - DNA, 1665 bp, Homo sapiens
  source 1..1665: mol_type = unassigned DNA
gtcaggccccgggcaggccgggagtggcgtgctgggcgtgcgcggctgcggtacggcgtgttggtcccagcggttcagctgaggtagggacgtgctgtaggccggaatgttaccggctgttggatctgcggatgaggaggaggatcctgcggaggaggattgtcctgaattggttcccatggagacgacgcaaagcgaggaggaggaaaagtctggcctcggcgccaagatcccagtcacaattatcaccgggtatttaggtgctgggaagacaacacttctgaactatattttgacagagcaacatagtaaaagagtagcggtcattttaaatgaatttggggaaggaagtgcgctggagaaatccttagctgtcagccaaggtggagagctctatgaagagtggctggaacttagaaacggttgcctctgctgttcagtgaaggacaatggccttagagctattgagaatttgatgcaaaagaaggggaaatttgattacatactgttagagaccactggattggcagacccaggtgcagtggcttctatgttttgggttgatgctgaattagggagtgatatttaccttgatggtatcataactatagtggattcaaaatatggattaaaacatttagcagaagagaaacctgatggccttatcaatgaagctactaggcaagttgctttggcagatgccattctcattaataaaacagacttggttccagaagaagatgtaaagaaattaagagcgacaattagatccataaatggactaggacaaatcttagaaacacaaagatcaagtttgcagaaaaaacttcagcatgtgccaggaacacaacctcaccttgatcagagtattgttacaatcacatttgaagtaccaggaaatgcaaaggaagaacatcttaatatgtttattcagaatctcctgtgggaaaagaatgtgagaaacaaggacaatcactgcatggaggtcataaggctgaagggattggtgtcaatcaaagacaaatcacaacaagtgattgtccagggtgtccatgagctctatgatctggaggagactccagtgagctggaaggatgacactgagagaacaaatcgattggtcctccttggcagaaatttagataaggatatccttaaacagctgtttatagctactgtgacagaaacagaaaagcagtggacaacacatttcaaagaagatcaagtttgtacataacactagaggcatttcttatcaaaaggattggataataaaaataagtttctactgggtatatttcaagcatttatttattactttagttacgaattccaatatactttaaaatggtatttgttttacagcatacataaaatgtagcaaatcggtactgtaaaacatttaacattcatacagttatatataatatccttttttttaaagaatggtatttcacaaaaatgtcttttgaaattggctttggagtttacatatactgaacatgaaagtttataataatgatgatacaactttcaacattgtcattttttcttagaacttcagctgattgcagagatataatgattacattgttattaaatttttttaacacaagtaagtgtcaccattttatgacatgaaataaaaggttatgactgttattg

SEQ ID NO: 6289 - DNA, 1820 bp, Homo sapiens
  source 1..1820: mol_type = unassigned DNA
gtcaggccccgggcaggccgggagtggcgtgctgggcgtgcgcggctgcggtacggcgtgttggtcccagcggttcagctgaggtagggacgtgctgtaggccggaatgttaccggctgttggatctgcggatgaggaggaggatcctgcggaggaggattgtcctgaattggttcccatggagacgacgcaaagcgaggaggaggaaaagtctggcctcggcgccaagatcccagtcacaattatcaccgggtatttagttattcagaggctgctctgctgagaagatgaacaaatttcttgtccaaaacaatgtatttcaaacgtgccgctcgggcctttcccgtattgctcactggtgctgggaagacaacacttctgaactatattttgacagagcaacatagtaaaagagtagcggtcattttaaatgaatttggggaaggaagtgcgctggagaaatccttagctgtcagccaaggtggagagctctatgaagagtggctggaacttagaaacggttgcctctgctgttcagtgaaggacaatggccttagagctattgagaatttgatgcaaaagaaggggaaatttgattacatactgttagagaccactggattggcagacccaggtgcagtggcttctatgttttgggttgatgctgaattagggagtgatatttaccttgatggtatcataactatagtggattcaaaatatggattaaaacatttagcagaagagaaacctgatggccttatcaatgaagctactaggcaagttgctttggcagatgccattctcattaataaaacagacttggttccagaagaagatgtaaagaaattaagagcgacaattagatccataaatggactaggacaaatcttagaaacacaaagatcaagagttgatctctctaatgtattagatcttcatgcctttgatagtctctctggaataagtttgcagaaaaaacttcagcatgtgccaggaacacaacctcaccttgatcagagtattgttacaatcacatttgaagtaccaggaaatgcaaaggaagaacatcttaatatgtttattcagaatctcctgtgggaaaagaatgtgagaaacaaggacaatcactgcatggaggtcataaggctgaagggattggtgtcaatcaaagacaaatcacaacaagtgattgtccagggtgtccatgagctctatgatctggaggagactccagtgagctggaaggatgacactgagagaacaaatcgattggtcctccttggcagaaatttagataaggatatccttaaacagctgtttatagctactgtgacagaaacagaaaagcagtggacaacacatttcaaagaagatcaagtttgtacataacactagaggcatttcttatcaaaaggattggataataaaaataagtttctactgggtatatttcaagcatttatttattactttagttacgaattccaatatactttaaaatggtatttgttttacagcatacataaaatgtagcaaatcggtactgtaaaacatttaacattcatacagttatatataatatccttttttttaaagaatggtatttcacaaaaatgtcttttgaaattggctttggagtttacatatactgaacatgaaagtttataataatgatgatacaactttcaacattgtcattttttcttagaacttcagctgattgcagagatataatgattacattgttattaaatttttttaacacaagtaagtgtcaccattttatgacatgaaataaaaggttatgactgttattg

SEQ ID NO: 6290 - DNA, 661 bp, Homo sapiens
  source 1..661: mol_type = unassigned DNA
aagggacgaggcgcttctcgtccagagcccaggtaatccgggcgggatcagcgagcgtcgcgatgtgatgacgtcaggccccgggcaggccgggagtggcgtgctgggcgtgcgcggctgcggtacggcgtgttggtcccagcggttcagctgaggtagggacgtgctgtaggccggaatgttaccggctgttggatctgcggatgaggaggaggatcctgcggaggaggattgtcctgaattggttcccatggagacgacgcaaagcgaggaggaggaaaagtctggcctcggcgccaagatcccagtcacaattatcaccgggtatttaggtgctgggaagacaacacttctgaactatattttgacagagcaacatagtaaaagagtagcggtcattttaaatgaatttggggaaggaagtgcgctggagaaatccttagctgtcagccaaggtggagagctctatgaagagtggctggaacttagaaacggttgcctctgctgttcagtgaaggacaatggccttagagctattgagaatttgatgcaaaagaaggggaaatttgattacatactgttagagaccactggattggcagacccaggtatcataactatagtggattcaaaatatggattaaaagtgaaataccactaa

SEQ ID NO: 6291 - DNA, 2165 bp, Homo sapiens
  source 1..2165: mol_type = unassigned DNA
aaaaagaaaaaattgtcactggttatccttcaggtataaaaattacaattaaaattgtaatgttataaccttccattctttcccctatgaattaaaacttttttttttaacgagactaaaaaatcaagttgataaaatctatgccctgtgggaactggttaggtcaggctacccactccagatttccagcaggctggcctcagctctacctacagccagtagcttattaaggctctaggcgccagtgacaccttcagacaggtggttagtgcgccctaaggactctccgcagcgtcgctcaggttcacagaacacgcccaggggcgtgtccagctgtcgtcggggagagcccacctccccggggggtgtggctaagggacgaggcagttctcgtccagagcccaggtaatccgggcgggatcagctagcgtcgcgatgtgatgacgtcaggccccggccaggccgggagtggcgtgctgggcgtgcgcggctgcggtacggcgtgttggtcccagcggttcagctgaggtagggacgtgctgtaggccggaatgttaccggctgttggatctgtggatgaggaagaggatcctgcggaggaggattgtcctgaattggttcccattgagacgacgcaaagcgaggaggaggaaaagtctggcctcggcgccaagatcccagtcacaattatcaccgggtatttaggtgctgggaagacaacacttctgaactatattttgacagagcaacatagtaaaagagtagcggtcattttaaatgaatctggggaaggaagtgcgctggagaaatccttagctgtcagccaaggtggagagctctatgaagagtggctggaacttagaaacggttgcctctgctgttcagtgaaggacaatggccttagagctattgagaatttgatgcaaaagaaggggaaatttgatgacatactgttagagaccactggattagcagaccctggtgcagtggcttctatgttttgggttgatgctgaattagggagtgatatttaccttgatggtatcataactattgtggattcaaaatatggattaaaacatttaacagaagagaaacctgatggccttatcaatgaagctactaggcaagttgctttggcagatatcattctcattaataaaacagacttggttccagaagaagatgtaaagaaattaagaacgacaattagatccataaatggactaggacaaatcttagaaacacaaagatcaagagttgatctctctaatgtattagatcttcatgcctttgatagtctctctggaataagtttgcagaaaaaacttcagcatgtgccaggaacacaacctcaccttgatcagagtattgttacaatcacatttgaagtaccaggaaatgcaaaggaagaacatcttaatatgtttattcagaatcttctgtgggaaaagaatgtgagaaacaaggacaatcactgcatggaggtcataaggctgaagggattggtgtcaatcaaagacaaatcacaacaagtgattgtccagggtgtccatgagctctatgatctggaggagactccagtgagctggaaggatgacactgagagaacaaatcgattggtcctcattggcagaaatttagataaggatatccttaaacagctgtttatagctactgtgacagaaacagaaaagcagtggacaacacatttcaaagaagatcaagtttgtacataacactagaggcatttcttatcaaaaggattggataataaaaataagtttctactgggtatatttcaagcatttatttattactttagttacgaattccaatatactttaaaatggtatttgttttacagcatacataaaatgtagcaaatcagtactgtaaaacatttaacattcatacaattatatataatatccttttttttaaagaatggtatttcacaaaaatatcttttgaaattggctttggagtttacatatactgaacatgaaagtttataataatgatgatacaactttcaacattgtcattttttcttagaacttcagctgattgcagagatataatgattacattgttattaaatttttttaacacaagtaagtgtcaccattttatgacatgaaataaaaggttatgactgttat

SEQ ID NO: 6292 - DNA, 720 bp, Homo sapiens
  source 1..720: mol_type = unassigned DNA
agaatgaattaaataatgaggaccctttcatcagggtttctgagtgagttttttaaaatacaaggtagtagtttgtgtaaatactaaatccattggtacctgtgcagaatgtaggaaatggagttgctaattccaaaaaaacagcacatatgctgaggaaagtataatacgtaatatatatggtttaagcaatgtaaaattccatgaatatgttcctttcatcttaaaatttgtgatttaaaaaacattgatattactataaagaattattattatttcccttgatttacagagtattgttacaatcacatttgaagtaccaggaaatgcaaaggaagaacatcttaatatgtttattcagaatcttctgtgggaaaagaatgtgagaaacaaggacaatcactgcatggaggtcataaggctgaagggattggtgtcaatcaaagacaaatcacaacaagtgattgtccagggtgtccatgagctctatgatctggaggagactccagtgagctggaaggatgacactgagagaacaaatcgattggtcctcattggcagaaatttagataaggatatccttaaacagctgtttatagctactgtgacagaaacagaaaagcagtggacaacacatttcaaagaagatcaagtttgtacataacactagaggcatttcttatcaaaaggattggataataaaaataagtttctactggg

SEQ ID NO: 6293 - DNA, 1060 bp, Homo sapiens
  source 1..1060: mol_type = unassigned DNA
gtcctgtccccatcagtgttgaaatgtatgctacagttattatggttgtaatttgttatgccatgttgatcttcttgtgcttttcatatcagaacaatgtatttttaacattctgactttctttttctctcaattggtaactgactatatagaaaatttatatttatggatactatttcttttttaataagttcaagggaaaacattgataaaggaaaatttatcctttcaactttctttaggtgccagcattattttcatattaggaagcaggagaaagttaaggaactctaagcaatactagaatggttatatatatatttaagtttgtattaaacctgttggaatggtaaagaaatttactgacatatttaaccatacaaaatagtgttgctaaaagactagtttttctctttattctgtgcatatgtatatatatgaatgtgtgttttttttaagaaattttaaaaaaacttaatctgccagcttttctctattggaatttgcgaacaacttgtaaaattggaattacagaatattagaatagtcagttatggaaagtcacttcattatccttgtgtcactaaataacgtataaagttaaatcagaagtgtattcatctctgaatttctaatcagttgtttttagtttgcagaaaaaacttcagcatgtgccaggaacacaacctcaccttgatcagaatcttctgtgggaaaagaatgtgagaaacaaggacaatcactgcatggaggtcataaggctgaagggattggtgtcaatcaaagacaaatcacaacaagtgattgtccagggtgtccatgagctctatgatctggaggagactccagtgagctggaaggatgacactgagagaacaaatcgattggtcctcattggcagaaatttagataaggatatccttaaacagctgtttatagctactgtgacagaaacagaaaagcagtggacaacacatttcaaagaagatcaagtttgtacataacactagaggcatttcttatcaaaaggattggataataaaaataagtttctactggg

SEQ ID NO: 6294 - DNA, 2411 bp, Homo sapiens
  source 1..2411: mol_type = unassigned DNA
attagatcttcatgcctttgatagtctctctggaataagtttgcagaaaaaacttcagcatgtgccaggaacacaacctcaccttgatcagagtattgttacaatcacatttgaagtaccaggaaatgcaaaggaagaacatcttaatatgtttattcagaatcttctgtgggaaaagaatgtgagaaacaaggacaatcactgcatggaggtcataaggctgaaggtacagtttactgttgcagacttttggacaaagtccttttcttggctgttataaaaactatatttggttttaaacagaaacactggttttagtacaaatcatctttgtctactttcatttttctttattattttcatgactgaaaaggagctttggaaatcactgcataaggcttgatttatttgcacaactttctttagggttgcagctagaacaaacctgtgtgctttgaaatgttaccttctgctctctgttcccaagtacagagaaataatgttgcaaatctcacttctgctgaacattatgcttcctgatgcatttagcagacactaaacatttgttgtactctaaacaaagttacaaaggactagaagaattcttgttctgtatttagaaacccactcacattacttgatatttgggtatttaagtcatgaaaggtatttcttctaggaagcagtgattctaaagtgtatgcttaaccagtcagttgagtgtctactcttgtgtgttcacaagtgtgcacaaagtttttggtaaattaagaatattatttcaaataaattaatttcatccccataggagccagtttatcagataattcgtttctcatttctgcaaatcaatacacaatgagctcatattcagataaattgagctcatatccagataaatataatagtttttctttatttcaacattgttcattgattgcaacccatttctaaaacaaattatttaatataacaaaactcctttaacttctcaacttttcccactaaaactgtgaaacattatataaaatctttaatcaataggatatgatacatatttcatcattttgtttcaggttttggttgtgataaataacactgaaaaaccatcctaatatatgtattaactttatcattagaaaaggggattgttcaaaaaaaaatcaatacacagaaaccttttttgaaaattaaaaacattaagaaacttcttgtaattcacaaataattggaattaagtaattttctcagcttaagagtttgtattttttaagtgaatatcagtaattaatccattaacattgatgctctatttctgcttttaagtttgaactgaggctgattaatgttcagtcaattctcctttgagcagggattggtgtcaatcaaagacaaatcacaacaagtgattgtccagggtgtccatgagctctatgatctggaggagactccagtgagctggaaggatgacactgagagaacaaatcgattggtcctcattggtaagtctcaaaggattcacagttttgaaacaaagtgaaaaatatatttgaaagggatatcatgtgccacttaaacagattaaccattcaggtcctcttttaaaactaaataagcttgtggtcaatgtttcatctttgtcacattacaacgttcgtaaaagcttgttaggacttttgttcttcttcaattttagaaaagtggttaatccaaggaccaatgtgactttgatgtactgacctggaaagttaaagatggaatcactcaattactattctttttgtaaatttttaaacaccataaagcatttaatgaactggaattgataggtgaactgtgtcattttaataagcataatgtaatcacgtcatattttgttttgtttgcaggcagaaatttagataaggatatccttaaacagctgtttatagctactgtgacagaaacagaaaagcagtggacaacacatttcaaagaagatcaagtttgtacataacactagaggcatttcttatcaaaaggattggataataaaaataagtttctactgggtatatttcaagcatttatttattactttagttacgaattccaatatactttaaaatggtatttgttttacagcatacataaaatgtagcaaatcagtactgtaaaacatttaacattcatacaattatatataatatccttttttttaaagaatggtatttcacaaaaatatcttttgaaattggctttggagtttacatatactgaacatgaaagtttataataatgatgatacaactttcaacattgtcattttttcttagaacttcagctgattgcagagatataatgattacattgttattaaatttttttaacacaagtaagtgtcaccattttatgacatgaaataaaaggtt

SEQ ID NO: 6295 - DNA, 1234 bp, Homo sapiens
  source 1..1234: mol_type = unassigned DNA
gtgttggtcccagcggttcagctgaggtagggacgtgctgtaggccggaatgttaccggctgttggatctgtggatgaggaagaggatcctgcggaggaggattgtcctgaattggttcccattgagacgacgcaaagcgaggaggaggaaaagtctggcctcggcgccaagatcccagtcacaattatcaccgggtatttaggtgctgggaagacaacacttctgaactatattttgacagagcaacatagtaaaagagtagcggtcattttaaatgaatctggggaaggaagtgcgctggagaaatccttagctgtcagccaaggtggagagctctatgaagagtggctggaacttagaaacggttgcctctgctgttcagtgaaggacaatggccttagagctattgagaatttgatgcaaaagaaggggaaatttgatgacatactgttagagaccactggattagcagaccctggtatcataactattgtggattcaaaatatggattaaaacatttaacagaagagaaacctgatggccttatcaatgaagctactaggcaagttgctttggcagatatcattctcattaataaaacagacttggttccagaagaagatgtaaagaaattaagaacgacaattagatccataaatggactaggacaaatcttagaaacacaaagatcaagagttgatctctctaatgtattagatcttcatgcctttgatagtctctctggaataagtttgcagaaaaaacttcagcatgtgccaggaacacaacctcaccttgatcagagtattgttacaatcacatttgaagtaccaggaaatgcaaaggaagaacatcttaatatgtttattcagaatcttctgtgggaaaagaatgtgagaaacaaggacaatcactgcatggaggtcataaggctgaagggattggtgtcaatcaaagacaaatcacaacaagtgattgtccagggtgtccatgagctctatgatctggaggagactccagtgagctggaaggatgacactgagagaacaaatcgattggtcctcattggcagaaatttagataaggatatccttaaacagctgtttatagctactgtgacagaaacagaaaagcagtggacaacacatttcaaagaagatcaagtttgtacataacactagaggcatttcttatcaaaaggattggataataaaaataagtttctactgggt

SEQ ID NO: 6296 - DNA, 1402 bp, Homo sapiens
  source 1..1402: mol_type = unassigned DNA
gcggtacggcgtgttggtcccagcggttcagctgaggtagggacgtgctgtaggccggaatgttaccggctgttggatctgtggatgaggaagaggatcctgcggaggaggattgtcctgaattggttcccattgagacgacgcaaagcgaggaggaggaaaagtctggcctcggcgccaagatcccagtcacaattatcaccgggtatttagttattcagaggctgctctactgagaagatgaacaaatttcttgtccaaaacaatgtatttcaaacgtgcccctcgggcctttcccgtgttgctcactggtgctgggaagacaacacttctgaactatattttgacagagcaacatagtaaaagagtagcggtcattttaaatgaatctggggaaggaagtgcgctggagaaatccttagctgtcagccaaggtggagagctctatgaagagtggctggaacttagaaacggttgcctctgctgttcagtgaaggacaatggccttagagctattgagaatttgatgcaaaagaaggggaaatttgatgacatactgttagagaccactggattagcagaccctggtgcagtggcttctatgttttgggttgatgctgaattagggagtgatatttaccttgatggtatcataactattgtggattcaaaatatggattaaaacatttaacagaagagaaacctgatggccttatcaatgaagctactaggcaagttgctttggcagatatcattctcattaataaaacagacttggttccagaagaagatgtaaagaaattaagaacgacaattagatccataaatggactaggacaaatcttagaaacacaaagatcaagagttgatctctctaatgtattagatcttcatgcctttgatagtctctctggaataagtttgcagaaaaaacttcagcatgtgccaggaacacaacctcaccttgatcagagtattgttacaatcacatttgaagtaccaggaaatgcaaaggaagaacatcttaatatgtttattcagaatcttctgtgggaaaagaatgtgagaaacaaggacaatcactgcatggaggtcataaggctgaagggattggtgtcaatcaaagacaaatcacaacaagtgattgtccagggtgtccatgagctctatgatctggaggagactccagtgagctggaaggatgacactgagagaacaaatcgattggtcctcattggcagaaatttagataaggatatccttaaacagctgtttatagctactgtgacagaaacagaaaagcagtggacaacacatttcaaagaagatcaagtttgtacataacactagaggcatttcttatcaaaaggattggataataaaaataagtttctactgggt

SEQ ID NO: 6297 - DNA, 861 bp, Homo sapiens
  source 1..861: mol_type = unassigned DNA
gggagtggcgtgctgggcgtgcgcggctgcggtacggcgtgttggtcccagcggttcagctgaggtagggacgtgctgtaggccggaatgttaccggctgttggatctgtggatgaggaagaggatcctgcggaggaggattgtcctgaattggttcccattgagacgacgcaaagcgaggaggaggaaaagtctggcctcggcgccaagatcccagtcacaattatcaccgggtatttagttattcagaggctgctctactgagaagatgaacaaatttcttgtccaaaacaatgtatttcaaacgtgcccctcgggcctttcccgtgttgctcactggtgctgggaagacaacacttctgaactatattttgacagagcaacatagtaaaagagtagcggtcattttaaatgaatctggggaaggaagtgcgctggagaaatccttagctgtcagccaaggtggagagctctatgaagagtggctggaacttagaaacggttgcctctgctgttcagtgaagtgaggaatgtgtttactgtgtacatggtttactagaaatgtttattgattatatttccagctttaattttcttgagtaatttaactgaatttacacagtttgcttcattgtattttcaaacaaatagaaaataaacttattaggaagcattttcttaaagtgtttcttgctgtcttttctatctgctctaatgttttggtccttttattgagtttttattgcttttgatgtcagggcttatttaatctctagtgcatgaaagtctcatatgtaaaaaatgattattctgaatttaatctgtcattggtcatacttctaagtgttcaaccttataaaa

SEQ ID NO: 6298 - DNA, 1665 bp, Homo sapiens
  source 1..1665: mol_type = unassigned DNA
gtcaggccccggccaggccgggagtggcgtgctgggcgtgcgcggctgcggtacggcgtgttggtcccagcggttcagctgaggtagggacgtgctgtaggccggaatgttaccggctgttggatctgtggatgaggaagaggatcctgcggaggaggattgtcctgaattggttcccattgagacgacgcaaagcgaggaggaggaaaagtctggcctcggcgccaagatcccagtcacaattatcaccgggtatttaggtgctgggaagacaacacttctgaactatattttgacagagcaacatagtaaaagagtagcggtcattttaaatgaatctggggaaggaagtgcgctggagaaatccttagctgtcagccaaggtggagagctctatgaagagtggctggaacttagaaacggttgcctctgctgttcagtgaaggacaatggccttagagctattgagaatttgatgcaaaagaaggggaaatttgatgacatactgttagagaccactggattagcagaccctggtgcagtggcttctatgttttgggttgatgctgaattagggagtgatatttaccttgatggtatcataactattgtggattcaaaatatggattaaaacatttaacagaagagaaacctgatggccttatcaatgaagctactaggcaagttgctttggcagatatcattctcattaataaaacagacttggttccagaagaagatgtaaagaaattaagaacgacaattagatccataaatggactaggacaaatcttagaaacacaaagatcaagtttgcagaaaaaacttcagcatgtgccaggaacacaacctcaccttgatcagagtattgttacaatcacatttgaagtaccaggaaatgcaaaggaagaacatcttaatatgtttattcagaatcttctgtgggaaaagaatgtgagaaacaaggacaatcactgcatggaggtcataaggctgaagggattggtgtcaatcaaagacaaatcacaacaagtgattgtccagggtgtccatgagctctatgatctggaggagactccagtgagctggaaggatgacactgagagaacaaatcgattggtcctcattggcagaaatttagataaggatatccttaaacagctgtttatagctactgtgacagaaacagaaaagcagtggacaacacatttcaaagaagatcaagtttgtacataacactagaggcatttcttatcaaaaggattggataataaaaataagtttctactgggtatatttcaagcatttatttattactttagttacgaattccaatatactttaaaatggtatttgttttacagcatacataaaatgtagcaaatcagtactgtaaaacatttaacattcatacaattatatataatatccttttttttaaagaatggtatttcacaaaaatatcttttgaaattggctttggagtttacatatactgaacatgaaagtttataataatgatgatacaactttcaacattgtcattttttcttagaacttcagctgattgcagagatataatgattacattgttattaaatttttttaacacaagtaagtgtcaccattttatgacatgaaataaaaggttatgactgttattg

SEQ ID NO: 6299 - DNA, 552 bp, Homo sapiens
  source 1..552: mol_type = unassigned DNA
gtgcttgtattacaggcatgagccactgtgcacagcctacttatattatttaaaaaacaattaatcaaataagttggttaggattagtttcagtggcataaacagaaacttaaacaatgtgaaagcttatttctgtctccttctgccaggtgaacacacagtgttcatcccctcaggaggacacagcttttgaggtaccatcttggaagcagagaccagccctcactagacacaaacttcctggcacgttgattttggacttcatagcctctagaactttattcagaggctgctctactgagaagatgaacaaatttcttgtccaaaacaatgtatttcaaacgtgcccctcgggcctttcccgtgttgctcactggtgctgggaagacaacacttctgaactatattttgacagagcaacatagtaaaagagtagcggtcattttaaatgaatctggggaaggaagtgcgctggagaaatccttagctgtcagccaaggtggagagctctatgaagagtggctggaacttagaaacggttgcctctgctgt

SEQ ID NO: 6300 - DNA, 649 bp, Homo sapiens
  source 1..649: mol_type = unassigned DNA
gtcaggccccggccaggccgggagtggcgtgctgggcgtgcgcggctgcggtacggcgtgttggtcccagcggttcagctgaggtagggacgtgctgtaggccggaatgttaccggctgttggatctgtggatgaggaagaggatcctgcggaggaggattgtcctgaattggttcccattgagacgacgcaaagcgaggaggaggaaaagtctggcctcggcgccaagatcccagtcacaattatcaccgggtatttaggtgctgggaagacaacacttctgaactatattttgacagagcaacatagtaaaagagtagcggtcattttaaatgaatctggggaaggaagtgcgctggagaaatccttagctgtcagccaaggtggagagctctatgaagagtggctggaacttagaaacggttgcctctgctgttcagtgaaggacaatggccttagagctattgagaatttgatgcaaaagaaggggaaatttgatgacatactgttagagaccactggattagcagaccctggtgcagtggcttctatgttttgggttgatgctgaattagggagtgatatttaccttgatggtatcataactattgtggattcaaaatatggattaaaagtgaaataccactaa

SEQ ID NO: 6301 - DNA, 1572 bp, Homo sapiens
  source 1..1572: mol_type = unassigned DNA
aggccccggccaggccgggagtggcgtgctgggcgtgcgcggctgcggtacggcgtgttggtcccagcggttcagctgaggtagggacgtgctgtaggccggaatgttaccggctgttggatctgtggatgaggaagaggatcctgcggaggaggattgtcctgaattggttcccattgagacgacgcaaagcgaggaggaggaaaagtctggcctcggcgccaagatcccagtcacaattatcaccgggtatttaggtgctgggaagacaacacttctgaactatattttgacagagcaacatagtaaaagagtagcggtcattttaaatgaatctggggaaggaagtgcgctggagaaatccttagctgtcagccaaggtggagagctctatgaagagtggctggaacttagaaacggttgcctctgctgttcagtgaaggacaatggccttagagctattgagaatttgatgcaaaagaaggggaaatttgatgacatactgttagagaccactggattagcagaccctggtgcagtggcttctatgttttgggttgatgctgaattagggagtgatatttaccttgatggtatcataactattgtggattcaaaatatggattaaaacatttaacagaagagaaacctgatggccttatcaatgaagctactagatccataaatggactaggacaaatcttagaaacacaaagatcaagtttgcagaaaaaacttcagcatgtgccaggaacacaacctcaccttgatcagagtattgttacaatcacatttgaagtaccaggaaatgcaaaggaagaacatcttaatatgtttattcagaatcttctgtgggaaaagaatgtgagaaacaaggacaatcactgcatggaggtcataaggctgaagggattggtgtcaatcaaagacaaatcacaacaagtgattgtccagggtgtccatgagctctatgatctggaggagactccagtgagctggaaggatgacactgagagaacaaatcgattggtcctcattggcagaaatttagataaggatatccttaaacagctgtttatagctactgtgacagaaacagaaaagcagtggacaacacatttcaaagaagatcaagtttgtacataacactagaggcatttcttatcaaaaggattggataataaaaataagtttctactgggtatatttcaagcatttatttattactttagttacgaattccaatatactttaaaatggtatttgttttacagcatacataaaatgtagcaaatcagtactgtaaaacatttaacattcatacaattatatataatatccttttttttaaagaatggtatttcacaaaaatatcttttgaaattggctttggagtttacatatactgaacatgaaagtttataataatgatgatacaactttcaacattgtcattttttcttagaacttcagctgattgcagagatataatgattacattgttattaaatttttttaacacaagtaagtgtcaccattttatgacatgaaataaaaggttatgactgtta

SEQ ID NO: 6302 - DNA, 1464 bp, Homo sapiens
  source 1..1464: mol_type = unassigned DNA
catgctgggctcgcgagccgcggggttcgcgcggggcctgcgggctgtggcactggcgtggctgccgggctggcggggccgctccttcgccctggcgcgtgcggcaggcgcgccccacggtggtgacttgcagccccccgcctgtcccgagccgcgcgggcgccagctcagtttgtccgcggcggcggtggtggactctgcgccccgccccctgcagccgtacttgcgcctcatgcggttggacaagcccattggaacctggcttctgtatttaccatgtacctggagcattggtttggcagctgaaccaggttgttttccagattggtacatgctctccctctttggcactggagctattctgatgcgtggagcaggctgtactattaatgacatgtgggaccaggactatgataaaaaggttacaagaacagccaatcgtccaatagccgctggagacatttcaacttttcagtcctttgtttttcttgggggacagctaaccctggcactgggtgttcttctgtgtctaaattactacagtatagctctgggagcaggatccttacttcttgtcatcacctacccactaatgaaaagaatttcatactggcctcaactagccttgggcttgacatttaattggggagcgttacttggatggtctgctatcaagggttcctgtgatccatctgtttgcctgcctctttatttttctggagttatgtggacactaatatatgatactatttatgcccatcaggacaaaagagatgatgttttgattggtcttaagtcaacggctctgcggttcggagaaaataccaagccgtggctcagcggcttcagtgttgcaatgctgggggcactgagcctagtgggtgtgaacagtggacagactgctccctactacgctgccctgggtgctgtaggagcccatctgactcaccagaaatggggtcttgagattttgcccaggctggtctgaaattcctggcttcaagcaatcttcctgccctggtctcccaaaagtgctgggattaccagtgtgagctaccaaccccagccaaggtatattattttttaaaaataatataggcctaaatccaaattttcccatctgattttcctggaattacttctgattcatgtctggaaaaatttcagtgatatctgaagcttgtggtttgagttgaattactctaaaagcaaactgacagataaagcttttaaaaaaaaatctgggtttctagtgatggttagtagactaattattcataaatttggtttctgctggcataaagaccaaggacagataagacatgaaatgcggaacatgtcaaagttctgccagtagagagcaggaagctgtcatttcaggatattcacccacaccacatcccctacctgtcagaaacttatgttgagaatctacattgttgacttgtaaatgaatgaactaaa

SEQ ID NO: 6303 - DNA, 1641 bp, Homo sapiens
  source 1..1641: mol_type = unassigned DNA
atgaccccaatttcacaagtaaggatgaggaaaggttctgcccacaccgccgcccagcctggcagactaggattgcatcctgcgggtgccactgcgcatgcctgccggggaatgacgtcaatccgagctcgtcccggcctcaccagcgccatgctgggctcgcgagccgcggggttcgcgcggggcctgcgggctgtggcactggcgtggctgccgggctggcggggccgctccttcgccctggcgcgtgcggcaggcgcgccccacggtggtgacttgcagccccccgcctgtcccgagccgcgcgggcgccagctcagtttgtccgcggcggcggtggtggactctgcgccccgccccctgcagccgtacttgcgcctcatgcggttggacaagcccattggaacctggcttctgtatttaccatgtacctggagcattggtttggcagctgaaccaggttgttttccagattggtacatgctctccctctttggcactggagctattctgatgcgtggagcaggctgtactattaatgacatgtgggaccaggactatgataaaaaggttacaagaacagccaatcgtccaatagccgctggagacatttcaacttttcagtcctttgtttttcttgggggacagctaaccctggcactgggtgttcttctgtgtctaaattactacagtatagctctgggagcaggatccttacttcttgtcatcacctacccactaatgaaaagaatttcatactggcctcaactagccttgggcttgacatttaattggggagcgttacttggatggtctgctatcaagggttcctgtgatccatctgtttgcctgcctctttatttttctggagttatgtggacactaatatatgatactatttatgcccatcaggacaaaagagatgatgttttgattggtcttaagtcaacggctctgcggttcggagaaaataccaagccgtggctcagcggcttcagtgttgcaatgctgggggcactgagcctagtgggtgtgaacagtggacagactgctccctactacgctgccctgggtgctgtaggagcccatctgactcaccagatttacactctagacatccacagacctgaggattgttggaataaatttatctccaaccgaacactgggactaatagtttttttagggattgtccttgggaatttgtggaaagaaaagaagacagacaaaacaaagaagggtatagagaataaaatagaaaattaatgaatgaaatttatctaggaatttttaaaacattttttacaaaatataattagatttgaatacaaaatctgatacaatatgttaaagaattaagaacctgaagatgaagatttagagcatatttacctggattttacttatttgctagcaaaattcccccttgtcacagaaaccagggactcttcaggatttgagatggccttgagtattttagttgatacattcttctgcccattataattctcacctgaagttatggggattgcacgggttttggcactttagaaaaagcctgatgtgggtcttacataaatgaatgtctgtataagaaaatggactcttttttttagggaaaaataaaagcaactatgggaa

SEQ ID NO: 6304 - DNA, 1639 bp, Homo sapiens
  source 1..1639: mol_type = unassigned DNA
atgaccccaatttcacaagtaaggatgaggaaaggttctgcccacaccgccgcccagcctggcagactaggattgcatcctgcgggtgccactgcgcatgcctgccggggaatgacgtcaatccgagctcgtcccggcctcaccagcgccatgctgggctcgcgagccgcggggttcgcgcggggcctgcgggctgtggcactggcgtggctgccgggctggcggggccgctccttcgccctggcgcgtgcggcaggcgcgccccacggtggtgacttgcagccccccgcctgtcccgagccgcgcgggcgccagctcagtttgtccgcggcggcggtggtggactctgcgccccgccccctgcagccgtacttgcgcctcatgcggttggacaagcccattggaacctggcttctgtatttaccatgtacctggagcattggtttggcagctgaaccaggttgttttccagattggtacatgctctccctctttggcactggagctattctgatgcgtggagcaggctgtactattaatgacatgtgggaccaggactatgataaaaaggttacaagaacagccaatcgtccaatagccgctggagacatttcaacttttcagtcctttgtttttcttgggggacagctaaccctggcactgggtgttcttctgtgtctaaattactacagtatagctctgggagcaggatccttacttcttgtcatcacctacccactaatgaaaagaatttcatactggcctcaactagccttgggcttgacatttaattggggagcgttacttggatggtctgctatcaagggttcctgtgatccatctgtttgcctgcctctttatttttctggagttatgtggacactaatatatgatactatttatgcccatcaggacaaaagagatgatgttttgattggtcttaagtcaacggctctgcggttcggagaaaataccaagccgtggctcagcggcttcagtgttgcaatgctgggggcactgagcctagtgggtgtgaacagtggacagactgctccctactacgctgccctgggtgctgtaggagcccatctgactcaccagatttacactctagacatccacagacctgaggattgttggaataaatttatctccaaccgaacactgggactaatagtttttttagggattgtccttgggaatttgtggaaagaaaagaagacagacaaaacaaagaagggtatagagaataaaatagaaaattaatgaatgaaatttatctaggaatttttaaaacattttttacaaaatataattagatttgaatacaaaatctgatacaatatgttaaagaattaagaacctgaagatgaagatttagagcatatttacctggattttacttatttgctagcaaaattcccccttgtcacagaaaccagggactcttcaggatttgagatggccttgagtattttagttgatacattcttctgcccattataattctcacctgaagttatggggattgcacgggttttggcactttagaaaaagcctgatgtgggtcttacataaatgaatgtctgtataagaaaatggactcttttttttagggaaaaataaaagcaactatggg

SEQ ID NO: 6305 - DNA, 1548 bp, Homo sapiens
  source 1..1548: mol_type = unassigned DNA
gggaaaaccggctgtggagaaggaaatagggcccggcgctgagtgagcgtggttgcgtgtcctttgcagacactttctggggcgaggtgacatggcgagagtcttggatcggtggacgtagacggtagacagttcgcgtgcgtttccttcgcctacttggcctacatgccttctgcccgtgaagcgatgtttcccctcgaaaggccgtaggctacgccgtcagaatcggtttttcagtgagttttgacccctccgacgctccgtcgcctgacagaatcgcggcgttcttcgtacccgcccatcctccgcggacgcccgctgccatggcgactctgctgcgccctgtcctccgtcggctctgcgggctcccgggcctacagcggcctgcggcagaaatgcccctccgggctaggagcgacggcgccggcccgctatactcgcaccacctccccacctccccgctgcagaaagggctgttggccgccggctccgcggcgatggcgctctataacccctaccgccacgacatggtcgcagttctaggggagaccacaggacaccgcaccctgaaggtcctcagggaccagatgaggagggatccagagggtgcccagatcctgcaggagcgtccccggatttcgacatccaccctcgacctgggcaagctccagagcctgccggaaggctccctcggtcgcgagtatctccgtttcctggatgtgaacagggtctccccagacacccgagcacccacccgcttcgtggatgatgaggagctagcgtatgtgattcagcggtaccgggaggtgcacgacatgcttcacaccctgctggggatgcccaccaacatcctgggggagatcgtggtgaaatggtttgaggctgtccagactggcctgcccatgtgcatcctgggtgcattctttggaccgatccgacttggcgctcagagcctgcaagtgctggtctcggagttgatcccatgggccgttcagaacgggcgcagagccccatgtgtcctcaacctgtactatgagcggcgctgggagcagtccctgagggctctgcgggaggagctgggcattacagcaccacccatgcacgtccagggcttggcctgagctcctgagccagcggggcctggcctacctcccccatcccctgcttcccttggaggcagagggctcccttgactacctttgttcctcttctttgaacactgacccttggacaacatttatcataatttgtcataaccactgctgagtggccttgaggacgaaccccgcagggagcaagcagtacagtggcattcccagggggaccagcagctacccaaggagaaccatgcatgaacagtatcagtcgtctgggctcatgctgggatgtcgcagtgctcctgttgcaactcctcccagccagccaggtttgctgggggccaggctgggtgtcctcacaggagtgagggctacacccaattccaaaagcctgagaagagagaagtggagggggaggcgagtgtgtgaataaaggctcccatcaggtcaa

SEQ ID NO: 6306 - DNA, 928 bp, Homo sapiens
  source 1..928: mol_type = unassigned DNA
cgctgccatggcgactctgctgcgccctgtcctccgtcggctctgcgggctcccgggcctacagcggcctgcggcagaaatgcccctccgggctaggagcgacggcgccggcccgctatactcgcaccacctccccacctccccgctgcagaaagggctgttggccgccggctccgcggcgatggcgctctataacccctaccgccacgacatggtcgcagttctaggggagaccacaggacaccgcaccctgaaggtcctcagggaccagatgaggagggatccagagggtgcccagatcctgcaggagcgtccccggatttcgacatccaccctcgacctgggcaagctccagagcctgccggaaggctccctcggtcgcgagtatctccgtttcctggatgtgaacgtgagttttcagctcctgtgtatctggcagtcaccagacaggacagaggaatagcacaggcatgacaccctgaggaaagaggagccctgagctgccaccattggcaggagtgctcttcaggctcatgccaaggctttgtcattttctatgggataggcaaatgggtgggaacatgcctgcaattgataatactggccagtgttcattaacctcgcactgcatgcctgatgccagcctcatccgtgatcttgctgaatccccccacaactctgtcaagtatgttctattattatcctcttttagcagataaggaaacagaggctcagagcagtgaagcaaacttgctaattccacataactggtattaatggagatagtaatcaatcccagatcatgctcttcactgctgtactgtatccctttattccagggacattgctttccctacggtatggcaggtgtggcactctccagcccctccagccccaggcagggaggacaaggagagggggaaagggg

SEQ ID NO: 6307 - DNA, 2657 bp, Homo sapiens
  source 1..2657: mol_type = unassigned DNA
gtccgagccaagggcactattggccagttccgttcaacgaagtggttgctttttttagttccggcaatgagttgcgccggggcggcggcggctccccgcctttggcggctgcgcccgggggcccggcggtccctctcagcttatggaagaagaaccagtgtcagatttcgcagttcaggaatgactttagacaatatcagtcgggcagctgtggatcgaataatccgggtggatcatgcaggcgaatatggagcaaaccgcatctatgccgggcagatggctgtcctgggtcggaccagcgtcgggccagtcattcagaaaatgtgggatcaagaaaaggaccatttgaaaaagttcaatgagttgatggttacgttcagggtccggccaacagttctgatgcccttgtggaacgtgctggggtttgcactgggggcggggaccgccttgctcgggaaggaaggtgccatggcctgcaccgtggcggtggaagagagcatagcacatcactacaacaaccagatcaggacgctgatggaggaggaccctgaaaaatacgaggaacttcttcagctgataaagaaatttcgggatgaagagcttgagcaccatgacataggcctcgaccatgatgcagaattggctccagcctatgccgtcctgaagagcattatccaggccggatgcagagtggcgatatatttatcagaaagattataaagtgtgtccagttttgcctgtctataaaagatgatagtaatttaccaagtgacatttgcagagaaacaggtgtacagttatcgttgtacttttgtacaatgtgaattttgttaataaattataaggtttgtttttttttttttaaactctgcagtgttgatttttctctgggttgttttttctgccatgagaccaacaggtcaccagccttgttcaagttacagcaaacgaagctgggccttgtttggtctcatacttaattttcttttatatacatgtttttcttttacatgcatatatatatattttattttattttatgttttttggagacagggcctcgctcttttgtccaggccgggtcacaactcactgcagcctggacctcctagcctcaagcaatccacccacctcagccttccaagtagctgggactacaggtgtgcaccaccacagctggctaattctatttttttatagaggcgaagtctcactatgtcgccaggctggtctctaactcctgggctcagtgatcctcccgtttcgacttcccaaagtgctgggattacaggtgtgagccacttcaccaggcccattttctcctaaaacttcaaggacaaatcattaataatgtaacaggaatctttaggagaaaaaacaatttggtttactgataacaaaagataattggaaacatgagagtatttgagattggccaagcagaactatgaagtccatcaagtaagtcaaagatcatcgtttctgttttgaattgtgggtgataatgggtgggagagtgctacagtctgtatgtctgtgtctccctagaattcatacgatgaaatcttcactctcaagttgatagaaggtggggcccttgggaagtgtgaggtcatgagagtggagccctcatgaatgggatcagtgccttatgaaaggccctagagagatacctcatcctctccacagtgtgagacttcaaggggaagtatgagacttctctgaggaagcagacccttcacaagcaaaatcagccagcactttgatcacggacttcccagcctctaggactgtgagcaataaatgtttgatgtttataagccacccagactgtggtattttgttatagcagcctgaacagactaagacgggggtgttgcttccatcaaaggatgtactaagttgtggattatttgtgaaattgaattacaaccttttccttaaggtcttttaccacctcccccccaaaaaaatcccccaaaactgattcagattttcatactttaatgaaatattttataatttgcaaatttttaagtaatttatgaaaaacctagatcagtggatctcctctctggctgcccattagaatgtcctgtggagattaaacttttttttttcagtttatggaccaagagttttgatttatttagggtggagttcaggatcagaatggtttcagaagctcccaggtgattccggagtgagttggagctgcaagcccctgagctagattataagatgcttctgggaaagaaccacattttaggaatttgcttcccacccagtgccctgcatttaatcagcacctgatgacttggcaggacttgccccaccagggtctggctttgaagggtagtggacaccaggatcctttggattaatcctctgccacctctctcttttcctcaaccgagagtgaatttatgtaattgagtgaaagtctacgaatcataattgtaataaattaaggctgggcatttgtttgaaattagataggataaagccaaaggtttgaacaagttgtggatggtttgtaaaaattaatcttacaaaataaatgctgtgtgtgaacacgttgattaaattcaaaagggtattatttggtttttctgtaaattgaaccttgaaataaaagcacaacaaggttttcttaa

SEQ ID NO: 6308 - DNA, 2608 bp, Homo sapiens
  source 1..2608: mol_type = unassigned DNA
agcggcgagagtgacaggaggacaggggttgtttcggcagtgacgcctggggagtgacgcaattgcacccctgtgcagtgatgtcacggcagcttatggaagaagaaccagtgtcagatttcgcagttcaggaatgactttagacaatatcagtcgggcagctgtggatcgaataatccgggtggatcatgcaggcgaatatggagcaaaccgcatctatgccgggcagatggctgtcctgggtcggaccagcgtcgggccagtcattcagaaaatgtgggatcaagaaaaggaccatttgaaaaagttcaatgagttgatggttacgttcagggtccggccaacagttctgatgcccttgtggaacgtgctggggtttgcactgggggcggggaccgccttgctcgggaaggaaggtgccatggcctgcaccgtggcggtggaagagagcatagcacatcactacaacaaccagatcaggacgctgatggaggaggaccctgaaaaatacgaggaacttcttcagctgataaagaaatttcgggatgaagagcttgagcaccatgacataggcctcgaccatgatgcagaattggctccagcctatgccgtcctgaagagcattatccaggccggatgcagagtggcgatatatttatcagaaagattataaagtgtgtccagttttgcctgtctataaaagatgatagtaatttaccaagtgacatttgcagagaaacaggtgtacagttatcgttgtacttttgtacaatgtgaattttgttaataaattataaggtttgtttttttttttttaaactctgcagtgttgatttttctctgggttgttttttctgccatgagaccaacaggtcaccagccttgttcaagttacagcaaacgaagctgggccttgtttggtctcatacttaattttcttttatatacatgtttttcttttacatgcatatatatatattttattttattttatgttttttggagacagggcctcgctcttttgtccaggccgggtcacaactcactgcagcctggacctcctagcctcaagcaatccacccacctcagccttccaagtagctgggactacaggtgtgcaccaccacagctggctaattctatttttttatagaggcgaagtctcactatgtcgccaggctggtctctaactcctgggctcagtgatcctcccgtttcgacttcccaaagtgctgggattacaggtgtgagccacttcaccaggcccattttctcctaaaacttcaaggacaaatcattaataatgtaacaggaatctttaggagaaaaaacaatttggtttactgataacaaaagataattggaaacatgagagtatttgagattggccaagcagaactatgaagtccatcaagtaagtcaaagatcatcgtttctgttttgaattgtgggtgataatgggtgggagagtgctacagtctgtatgtctgtgtctccctagaattcatacgatgaaatcttcactctcaagttgatagaaggtggggcccttgggaagtgtgaggtcatgagagtggagccctcatgaatgggatcagtgccttatgaaaggccctagagagatacctcatcctctccacagtgtgagacttcaaggggaagtatgagacttctctgaggaagcagacccttcacaagcaaaatcagccagcactttgatcacggacttcccagcctctaggactgtgagcaataaatgtttgatgtttataagccacccagactgtggtattttgttatagcagcctgaacagactaagacgggggtgttgcttccatcaaaggatgtactaagttgtggattatttgtgaaattgaattacaaccttttccttaaggtcttttaccacctcccccccaaaaaaatcccccaaaactgattcagattttcatactttaatgaaatattttataatttgcaaatttttaagtaatttatgaaaaacctagatcagtggatctcctctctggctgcccattagaatgtcctgtggagattaaacttttttttttcagtttatggaccaagagttttgatttatttagggtggagttcaggatcagaatggtttcagaagctcccaggtgattccggagtgagttggagctgcaagcccctgagctagattataagatgcttctgggaaagaaccacattttaggaatttgcttcccacccagtgccctgcatttaatcagcacctgatgacttggcaggacttgccccaccagggtctggctttgaagggtagtggacaccaggatcctttggattaatcctctgccacctctctcttttcctcaaccgagagtgaatttatgtaattgagtgaaagtctacgaatcataattgtaataaattaaggctgggcatttgtttgaaattagataggataaagccaaaggtttgaacaagttgtggatggtttgtaaaaattaatcttacaaaataaatgctgtgtgtgaacacgttgattaaattcaaaagggtattatttggtttttctgtaaattgaaccttgaaataaaagcacaacaaggttttctt

SEQ ID NO: 6309 - DNA, 1615 bp, Homo sapiens
  source 1..1615: mol_type = unassigned DNA
cgtgcccgcttccaaaatggcggcggcggcggtatctggtgcgcttggccgggcgggctggaggctcctgcagctgcgatgcctgcccgtggcccgttgccgacaagccctggtgccgcgtgccttccatgcttcagctgtggggctaaggtcttcagatgagcagaagcagcagcctcccaactcattttctcagcagcattctgagacacagggggcagaaaaacctgatccagagtcttctcattcaccccccaggtatacagaccagggcggcgaggaggaggaggactatgaaagtgaggagcagttgcagcaccgcatcctgacggcagcccttgagtttgtgcccgcccacgggtggacagcagaggcgattgcagaaggagcccagtctctgggtctctccagtgcagcagccagcatgttcgggaaggatggcagtgagctaatactgcattttgtgacccagtgcaatacccggctcacacgtgtgctagaagaggagcagaagctggtacagttgggccaggcggagaagaggaagacagaccagttcctgagggatgcagtggaaaccagactgagaatgctgatcccatacattgagcactggccccgggccctcagcatcctcatgctccctcacaacatcccgtccagcctgagcctgctcaccagcatggtggatgacatgtggcattacgctggggaccagtccactgattttaactggtacacccgccgagccatgctggctgccatctacaacacaacagagctggtgatgatgcaggactcctctccagactttgaggacacttggcgcttcctggaaaaccgggttaatgatgcaatgaacatgggccacactgccaagcaggtaaagtccacaggagaggcactggtgcaaggactcatgggtgcagcagtgacgctcaagaacttgacaggtctaaaccagcgtcggtgagaggaaggggtataagctacaatgcctagaagagaatgagcggacagattgaaagagctttgaaaagtataaggtgccatccacataacctggtgttcacgagaacacactaaaggactcctgagtcactaccacagccacctggaaaccacaaggcatttgatgctaccgttctggtcagggattgggctgcttcttcagttcctaataccagaccaagcctcctgatgcctttctgcactgcaactgtgtgattgaaaaatgagatgttcatccaagcagtcaagccacagaaacccagcatgtccctgtcacaatctcatgggcaccttgatcatgtcttaaccttcccttaaccttggggctcccaagccagagtcaaggtctgacgccacctcaaggtgacagctcatctccagcacagcacaggcgtgtgcacacagaggtgttccttgcagccccctccctctcaggtgtcctgagatgctgttcctgggagccccctcagaaaactgcctcacctgagacaagtgcctgctggacagaggtgtgattccaggcctggtgtcacatgacaccagcatgcattgcaggattattagtgtattttgagtctgtaaaaataataaatatgtttgaagt

SEQ ID NO: 6310 - DNA, 2698 bp, Homo sapiens
  source 1..2698: mol_type = unassigned DNA
cgggaccgggtgggcgcatgcgcgctgggctggctgggcggggtctctcgcgccgggtgagggcgctgctcccaggaacctgcgcgcggccccggcggcgtttcccgggggccggttggcgggcggacctgggcggtgcggggcggaagtgggcggctgcgggacgcgcgcggagtcgcgcggcgggcgggacctggccgagctggagggcgccggggagcggggctcgggcggtccccgaggcccggcggagcgggcttctggggtgtctgcggcggcgccgggggaacgggctggggatggggcgcctagccgggcggtggccggggcctcggccatgttcgcggggctgcaggacctgggcgtggccaacggcgaggacctgaaggagaccctgaccaactgcacggagccgctcaaggccatcgagcagttccagacagagaatggtgtgctgctgccatctcttcagtcagccctccccttcttggacctgcacgggacgccgcggctggagttccaccagtcggtattcgatgagctgcgggacaagctgctggagcgagtgtcagccatcgcttcggaggggaaggctgaggaaaggtacaagaagctggaagaccttctggagaagagcttttctctggtgaagatgccgtccctgcagcccgtggtgatgtgcgtcatgaagcacctgcccaaggttccggagaaaaaactgaagctggttatggctgacaaggagctgtatcgagcctgcgccgtggaggtgaagcggcagatctggcaagacaaccaggccctcttcggggacgaggtttccccactcctgaagcagtacatcctggagaaggagagcgctctcttcagtacagagctctctgtcctgcacaactttttcagtccttcccccaagaccaggcgccagggcgaggtggtgcagcggctgacgcggatggtggggaagaacgtgaagctgtacgacatggtgctgcagtttctgcgcacgctcttcctgcgcacgcggaatgtgcactactgcacgctgcgggctgagctgctcatgtccctgcacgacctggacgtgggtgaaatctgcaccgtggacccgtgccacaagttcacctggtgcctggacgcctgcatccgagagcggttcgtggacagcaagagggcgcgggagctgcaggggtttctcgatggcgtcaagaagggccaggagcaggtgctgggggacctgtccatgatcctgtgtgaccccttcgccatcaacacgctggcactgagcacagtcaggcacctgcaggagctggtcggccaggagacactgcccagggacagccccgacctcctgctgctgctccggctgctggcgctgggccagggagcctgggacatgatcgacagccaggtcttcaaggagcccaagatggaggtagagctcatcaccaggttcctcccgatgctcatgtccttcctggtggatgactacactttcaatgtggatcagaaacttccggctgaggagaaagccccagtctcatatccaaacacacttcccgaaagcttcactaagtttctgcaggagcagcgcatggcctgcgaggtggggctgtactacgtcctgcacatcaccaagcagaggaacaagaacgcgctcctccgcctgctgcccgggctggtggagacctttggcgacttggcctttggcgacatcttcctccacctgctcacgggcaaccttgcgctgctggccgacgaatttgcccttgaggacttctgcagcagcctcttcgatggcttcttcctcaccgcctctccaaggaaggagaacgtgcaccggcacgcgctgcggctcctcattcacctgcaccccagggtggccccgtctaagctggaggcgttgcagaaggccctggagcctacaggccagagcggagaggcagtgaaggagctttactcccagctcggcgagaagctggaacagctggatcaccggaagcccagcccggcacaggctgcggagacgccggccctggagctgcccctccccagcgtgcccgcccctgccccgctctgagggccctccagacctgctcgggtgctggggccatgccgagtcgcggccctgctcagccggaagaggctcccggacctggatgtacagggcagtctctcttcccggggctatggctgggcctgtcctgccgtcatggccccctgcttcctgctccttggagctggctcccggaccttgcccaccatccatgcagtggctcccagggcagagcctctccttgtactttggcagccatagaaagcgtgctcattttctgttttcctgtgttaggaaaaaaccacctgttttccaaggggagagggcggggcctgagggtgggggcggggcctcttcattggcccagcttggcgaaagcgaggcacactgcttactgccttggggttgtggagatggacccgtgacctcgtggaggccgtgtgggggcagcagcctggcctgtgccatggtgggtgtcctggggcctgtgcggagggagccacctcaccctgcagcccagtttgcaggtgtggccttgtttctccttgcccagcagtgctgccttcagcggccgtgacggggccagctggacacacggtgagattttctcgtatgtaaataaaaggcattttggtaaacgtg

SEQ ID NO: 6311 - DNA, 3129 bp, Homo sapiens
  source 1..3129: mol_type = unassigned DNA
ggcccgccgagccccgccacctccctcgggctgcagctcccggcgtgccccgcactctccgctgcccacccgctcgcccgcccctccttctcctcccagtgccacagagccgaagcccgagctgccgccgcagccacagccgagggcactatggcttctggagttacagtgaatgatgaagtcatcaaagtttttaatgatatgaaagtaaggaaatcttctacacaagaggagatcaaaaagagaaagaaagcagttctcttctgtttaagcgatgacaaaagacaaataattgtagaggaagcaaagcagatcttggtgggtgacattggtgatactgtagaggacccctacacatcttttgtgaagttgctacctctgaatgattgccgatatgctttgtacgatgccacatacgaaacaaaagagtctaagaaagaagacctagtatttatattctgggctcctgaaagtgcacctttaaaaagcaagatgatttatgctagctctaaagatgccattaaaaagaaatttacaggtattaaacatgagtggcaagtaaatggcttggatgatattaaggaccgttcgacacttggagagaaattgggaggcaatgtagtagtttcacttgaaggaaaaccattataaaatgacagtcaagtgccatctggatcttaaggagcttccatttctccagctcagtccattggaatagtattaggttttggttttttgttgtatttccccctttccactgggcccttccaacacaatgaatgaaggaaatatcatttatttaagcagcctatcagtgattgccattagactgttgaatactgttacttttatatagaacccaaggaatgccttcctgtcatattttagccaaaacaactggttatatgcctcccttgcagcaagcactacaatgtatgtgatcgtcaatgtgaatagcttagaatactgcaaaggataagctaattgaatgccttgaaagtattatccactggtcagatggtcaacttttttcagtattatttatagttggcacttgattgcagttctgtgaggcttgagcattcatacacctcacctgccttggcaagcctattttagtgatatggcagcacggatataacactatgcattaaaagcactttttgtaataagtttaatatcctaaaaggaatgccaattaagttttgttaactgtgtcatcaacttatcctagtacctcagtgttcattcctgttacctgcatatcttcttaaaagaaatagctgttattaatgcctttttgttttccattgagtgtacactactgaataagtgtaggagttttatgtttaccatgtgagtcctgcaacactaaagatattttgaatatcagtcatgatggcaatttctgtataaaagagccttaaatggaacattgttttgagatcaaactccccaccctcacaaaaatggccacgttgcaataaaaattgtggcatattacagaacgttgccttgttttccttggaaattttgcaaaatgttatgtgaaacaacttctagggtaaaaacagctattactaatctctgcactggtcatttgagaattttttttgtacagcattcatgtgtgatattttccagatttgttggatctatttggtttaaaaagtattctatcttaaggccaactaatataaaataccattgttaaagaatggtacttttataaacattagtgtatttatttcctatgtgttaatatgaagatcagaaattattttttgcactttggcataaatacttttcaatatctgatttgttctctggataaattagcatagttatttttttattcacatttacatttctaagtagttgtatagtagaagcaggaagctcttattgcttatttggtcgtaatgaaaataatttgtaaaatgtcctttaaaagtttaatgatacttctgatgtttcggaacagtcatttcacctactatttctgaatatattttgcaaattgaattggaataggaattgataatagcagtcttaaacattagtagtgggatttggctatggtccagactgtgctccttatagagaatttgatctgctcagtgtgagcggtttgctgttagccagggctatttatggcaaacacatgcttttgtatcttgtcatagttatccacaaatggcaaaactggacttgattctactggtatgcaaaacaggcatgctagtaagcagtcagtcgtggctcagaacttaaccccatagctcagaggaatgcttttagcagaaaacaggaaagaaaatatcccttaaaaattttttttgaatgtgtggaagtaattttagtataattagattttttccatatttttgaaagatttttcagatgtgaacattaaaaatagggattaaatgtctaggcttccatttaaaattatatgaatggtttgggatctttttgcactgagcaattttatttcaggcttccagctgtccctgtgagttatcctggacatttcgatggtttttggtaaggccaaactctgataagcaaaacagagaatactgacgtatacttaaccatatgtgtaactgatacttggcaccatggaatttttcattgagttatttcctcattcttttaaaaaataagggactataaatcagttatgtagtatcttttgtttttgtagctgattccttaactttcttgtatgcctctagtaatttcagagattaaatattgctttaaactgtgatactttgatttgctagattgacaaaactgatactaatataattaagttcatctttgaaatacatctttgtgcgtagagccaaaaaaagagataaaattaataatagttcacttgttatttgagattaatttggcatttgaaatgatcattttattttacaatcatttataatgaatcaatgttccagttagctttaaaaggtatacggtgctaattagtaaaatattgaaggcaatattttactgctagcttgcaaagttatgagagtttaaaaaataaaatatatgaaaatatgtaaagctgttgagatgtgtttacttatacttcagaacattaaaagtttaaaaactggt

SEQ ID NO: 6312 - DNA, 3131 bp, Homo sapiens
  source 1..3131: mol_type = unassigned DNA
aaacatttcagggatgggacaacttgtatttgtccctttcgcttccacgtccaaacccctttaagaaggatgaatgggcaggatgagttagactccttcgctgtatcgtctactgattcttaaaatgtgacaaatctgattggacgacttacatggcttctggagttacagtgaatgatgaagtcatcaaagtttttaatgatatgaaagtaaggaaatcttctacacaagaggagatcaaaaagagaaagaaagcagttctcttctgtttaagcgatgacaaaagacaaataattgtagaggaagcaaagcagatcttggtgggtgacattggtgatactgtagaggacccctacacatcttttgtgaagttgctacctctgaatgattgccgatatgctttgtacgatgccacatacgaaacaaaagagtctaagaaagaagacctagtatttatattctgggctcctgaaagtgcacctttaaaaagcaagatgatttatgctagctctaaagatgccattaaaaagaaatttacaggtattaaacatgagtggcaagtaaatggcttggatgatattaaggaccgttcgacacttggagagaaattgggaggcaatgtagtagtttcacttgaaggaaaaccattataaaatgacagtcaagtgccatctggatcttaaggagcttccatttctccagctcagtccattggaatagtattaggttttggttttttgttgtatttccccctttccactgggcccttccaacacaatgaatgaaggaaatatcatttatttaagcagcctatcagtgattgccattagactgttgaatactgttacttttatatagaacccaaggaatgccttcctgtcatattttagccaaaacaactggttatatgcctcccttgcagcaagcactacaatgtatgtgatcgtcaatgtgaatagcttagaatactgcaaaggataagctaattgaatgccttgaaagtattatccactggtcagatggtcaacttttttcagtattatttatagttggcacttgattgcagttctgtgaggcttgagcattcatacacctcacctgccttggcaagcctattttagtgatatggcagcacggatataacactatgcattaaaagcactttttgtaataagtttaatatcctaaaaggaatgccaattaagttttgttaactgtgtcatcaacttatcctagtacctcagtgttcattcctgttacctgcatatcttcttaaaagaaatagctgttattaatgcctttttgttttccattgagtgtacactactgaataagtgtaggagttttatgtttaccatgtgagtcctgcaacactaaagatattttgaatatcagtcatgatggcaatttctgtataaaagagccttaaatggaacattgttttgagatcaaactccccaccctcacaaaaatggccacgttgcaataaaaattgtggcatattacagaacgttgccttgttttccttggaaattttgcaaaatgttatgtgaaacaacttctagggtaaaaacagctattactaatctctgcactggtcatttgagaattttttttgtacagcattcatgtgtgatattttccagatttgttggatctatttggtttaaaaagtattctatcttaaggccaactaatataaaataccattgttaaagaatggtacttttataaacattagtgtatttatttcctatgtgttaatatgaagatcagaaattattttttgcactttggcataaatacttttcaatatctgatttgttctctggataaattagcatagttatttttttattcacatttacatttctaagtagttgtatagtagaagcaggaagctcttattgcttatttggtcgtaatgaaaataatttgtaaaatgtcctttaaaagtttaatgatacttctgatgtttcggaacagtcatttcacctactatttctgaatatattttgcaaattgaattggaataggaattgataatagcagtcttaaacattagtagtgggatttggctatggtccagactgtgctccttatagagaatttgatctgctcagtgtgagcggtttgctgttagccagggctatttatggcaaacacatgcttttgtatcttgtcatagttatccacaaatggcaaaactggacttgattctactggtatgcaaaacaggcatgctagtaagcagtcagtcgtggctcagaacttaaccccatagctcagaggaatgcttttagcagaaaacaggaaagaaaatatcccttaaaaattttttttgaatgtgtggaagtaattttagtataattagattttttccatatttttgaaagatttttcagatgtgaacattaaaaatagggattaaatgtctaggcttccatttaaaattatatgaatggtttgggatctttttgcactgagcaattttatttcaggcttccagctgtccctgtgagttatcctggacatttcgatggtttttggtaaggccaaactctgataagcaaaacagagaatactgacgtatacttaaccatatgtgtaactgatacttggcaccatggaatttttcattgagttatttcctcattcttttaaaaaataagggactataaatcagttatgtagtatcttttgtttttgtagctgattccttaactttcttgtatgcctctagtaatttcagagattaaatattgctttaaactgtgatactttgatttgctagattgacaaaactgatactaatataattaagttcatctttgaaatacatctttgtgcgtagagccaaaaaaagagataaaattaataatagttcacttgttatttgagattaatttggcatttgaaatgatcattttattttacaatcatttataatgaatcaatgttccagttagctttaaaaggtatacggtgctaattagtaaaatattgaaggcaatattttactgctagcttgcaaagttatgagagtttaaaaaataaaatatatgaaaatatgtaaagctgttgagatgtgtttacttatacttcagaacattaaaagtttaaaaactggt

SEQ ID NO: 6313 - DNA, 2992 bp, Homo sapiens
  source 1..2992: mol_type = unassigned DNA
acagtcagcaccgccccagccaggcgcctgcgcgcccacgcactacctgccgggagttgtagtttcggctcggcagacccggcgagcccagtggccgcgctccggtgcggcggcgcccgaggcccgaggcggaagtgggacggccaagcagggaagcgagggctcgggatcgacggccgcggggcgccgacgaggagtgcaggactcaggaagggcgagtgcgcggcgacagagcccggggaaggaggcagggcaaggccgggcttgggggcaggtggtccgggcatccagccttgaagatgcacaagaggaaaggacccccgggacccccgggcagaggcgccgcggccgcccgccagctgggcctgctggttgacctctccccagatggcctgatgatccctgaggacggggctaacgatgaagaactggaggctgagttcttggctttggtcgggggccagcccccagccctggagaagctcaaaggcaaaggtcccttgccgatggaggccattgagaagatggccagcctgtgcatgagagacccggatgaggatgaggaggaggggacggatgaggacgacttggaggctgatgatgacctgctggcggagctaaatgaggtccttggagaggagcagaaggcttcagagaccccacctcctgtggcccagccgaagcctgaggcccctcatccggggctggagaccaccttgcaggagaggctggcgctctatcagacagcaattgaaagcgccagacaagctggagacagcgccaagatgcggcgctacgatcgggggcttaaaacactggaaaacctgctcgcctccatccgtaagggcaatgccattgacgaagcggacatcccgccgccagtggccataggaaaaggcccggcgtccacgcctacctacagccctgcacccacccagccggcccctagaatcgcgtcagccccagagcccagggtcaccctggagggaccttctgccaccgccccagcctcatctccaggcttggctaagccccagatgcccccaggtccctgcagccctggccctctggcccagttgcagagccgccagcgcgactacaagctggctgccctccacgccaagcagcagcagctggccttcctagagggccgcaagaagcagctcctgcaggccgcactgcgagccaagcagaaaaacgacgtggagggtgccaagatgcacctgcgccaagccaagggactggagcctatgctggaggcctcgcgcaatgggctgcctgtggacatcaccaaggtgccgcctgcccctgtcaacaaggacgactttgccctggtccagcggcctggcccgggtctgtctcaggaggccgcccggcgctatggtgaactcaccaagctcatacggcagcagcacgagatgtgcctgaaccactcaaaccaattcacccagctgggcaacatcactgaaaccaccaagtttgaaaagttggcggaggactgtaagcggagcatggacattctgaagcaagccttcgtccggggtctccccacgcccaccgcccgctttgagcaaaggaccttcagcgtcatcaagatcttccctgacctcagcagcaacgacatgctcctcttcatcgtgaagggcatcaacttgcccacacccccaggactgtcccctggcgatctggatgtctttgttcggtttgacttcccctatcccaacgtggaagaagctcagaaagacaagaccagtgtgatcaagaacacagactcccctgagttcaaggagcagttcaaactctgcatcaaccgcagccaccgtggcttccgaagggccatccagaccaagggcatcaagttcgaagtggttcacaagggggggctgttcaagactgaccgggtgctggggacagcccagctgaagctggatgcactggagatagcatgtgaggtccgggagatccttgaggtcctggatggtcgccggcccacaggggggcgactggaggtaatggtccggattcgggagccactgacagcccagcagttggagacgacgacagagaggtggctggtcattgaccctgtgccggcagctgtgcccacagttgctgggcccaaagggaaggcccctcctgtgcctgcccctgcaagggagtcagggaacagatcagcccggcccctgcatagcctcagtgtgctggcgtttgaccaagagcgtctggagcggaagatcctggccctcaggcaggcgcggcggccggtgcccccagaagtggcccagcagtaccaggacatcatgcaacgcagccagtggcagagggcacagctggagcaggggggtgtgggcatccgacgggaatacgcagcccagctggagcggcagctgcagttctacacggaggctgcccggcgcctgggcaacgatggcagcagggatgctgcaaaggaggcgctctataggcggaatctggtagagagtgagctgcagcggctccgcaggtgaggagcccatggggcgggcagcccccagaaagcgggcagcaggccccgataccgggaagagccgacacagccacgaaccagacaagcagacaatcagcggacaatcggttctggactcacccctcatccgggcccccagccccgccagagcctccgtggctgcgggtgttgggaaccatgcctgccagccagtatgtgcccctcacccaggcctggctgggccctggagagtcctgtttgcacagcccaggggtgtccggcctctggcccgccccggagcagggagggtggctggggccaagccccgagggcccctgcaagcactttacttcctgttcctccccagccttaaccccaaagccctcctgcaccccaaagaagccactgaggctggccgagccacactgtctccccaggggcgtcgacctggcccagctgggtccccagggccagcacatggaataaaatagccagggccacactcag

SEQ ID NO: 6314 - DNA, 3640 bp, Homo sapiens
  source 1..3640: mol_type = unassigned DNA
acagtcagcaccgccccagccaggcgcctgcgcgcccacgcactacctgccgggagttgtagtttcggctcggcagacccggcgagcccagtggccgcgctccggtgcggcggcgcccgaggcccgaggcggaagtgggacggccaagcagggaagcgagggctcgggatcgacggccgcggggcgccgacgaggagtgcaggactcaggaagggcgagtgcgcggcgacagagcccggggaaggaggcagggcaaggccgggcttgggggcaggtggtccgggcatccagccttgaagatgcacaagaggaaaggacccccgggacccccgggcagaggcgccgcggccgcccgccagctgggcctgctggttgacctctccccagatggcctgatgatccctgaggacggggctaacgatgaagaactggaggctgagttcttggctttggtcgggggccagcccccagccctggagaagctcaaaggcaaaggtcccttgccgatggaggccattgagaagatggccagcctgtgcatgagagacccggatgaggatgaggaggaggggacggatgaggacgacttggaggctgatgatgacctgctggcggagctaaatgaggtccttggagaggagcagaaggcttcagagaccccacctcctgtggcccagccgaagcctgaggcccctcatccggggctggagaccaccttgcaggagaggctggcgctctatcagacagcaattgaaagcgccagacaagctggagacagcgccaagatgcggcgctacgatcgggggcttaaaacactggaaaacctgctcgcctccatccgtaagggcaatgccattgacgaagcggacatcccgccgccagtggccataggaaaaggcccggcgtccacgcctacctacagccctgcacccacccagccggcccctagaatcgcgtcagccccagagcccagggtcaccctggagggaccttctgccaccgccccagcctcatctccaggcttggctaagccccagatgcccccaggtccctgcagccctggccctctggcccagttgcagagccgccagcgcgactacaagctggctgccctccacgccaagcagcagggagataccactgctgccgctagacacttccgcgtggctaagagctttgatgctgtcttggaggccctgagccggggtgagcccgtggacctctcctgcctgccccctccacccgaccagctgcccccagacccaccgtcaccaccgtcgcagcctccgacccccgctacggcgccctccacaacagaggtgcccccacccccgaggaccctgctggaggcgctggagcagcggatggagcggtaccaggtggccgcagcccaggccaagagcaagggggaccagcggaaagctcgaatgcacgagcgcatcgtcaagcaataccaagatgccatccgagcccacaaggctggccgagccgtggatgtcgctgaattgcccgtgcccccaggcttccccccaatccagggcctggaggccaccaagcccacccagcagagtctggtgggtgtcctggagactgccatgaagctggccaaccaggatgaaggcccagaggatgaagaggatgaggtgcctaagaagcagaacagccctgtggcccccacagcccagcccaaagccccaccctcaagaactccccagtcgggatcagccccaacagccaaagcgccccccaaagccacatccaccagagcccagcagcagctggccttcctagagggccgcaagaagcagctcctgcaggccgcactgcgagccaagcagaaaaacgacgtggagggtgccaagatgcacctgcgccaagccaagggactggagcctatgctggaggcctcgcgcaatgggctgcctgtggacatcaccaaggtgccgcctgcccctgtcaacaaggacgactttgccctggtccagcggcctggcccgggtctgtctcaggaggccgcccggcgctatggtgaactcaccaagctcatacggcagcagcacgagatgtgcctgaaccactcaaaccaattcacccagctgggcaacatcactgaaaccaccaagtttgaaaagttggcggaggactgtaagcggagcatggacattctgaagcaagccttcgtccggggtctccccacgcccaccgcccgctttgagcaaaggaccttcagcgtcatcaagatcttccctgacctcagcagcaacgacatgctcctcttcatcgtgaagggcatcaacttgcccacacccccaggactgtcccctggcgatctggatgtctttgttcggtttgacttcccctatcccaacgtggaagaagctcagaaagacaagaccagtgtgatcaagaacacagactcccctgagttcaaggagcagttcaaactctgcatcaaccgcagccaccgtggcttccgaagggccatccagaccaagggcatcaagttcgaagtggttcacaagggggggctgttcaagactgaccgggtgctggggacagcccagctgaagctggatgcactggagatagcatgtgaggtccgggagatccttgaggtcctggatggtcgccggcccacaggggggcgactggaggtaatggtccggattcgggagccactgacagcccagcagttggagacgacgacagagaggtggctggtcattgaccctgtgccggcagctgtgcccacacaggttgctgggcccaaagggaaggcccctcctgtgcctgcccctgcaagggagtcagggaacagatcagcccggcccctgcatagcctcagtgtgctggcgtttgaccaagagcgtctggagcggaagatcctggccctcaggcaggcgcggcggccggtgcccccagaagtggcccagcagtaccaggacatcatgcaacgcagccagtggcagagggcacagctggagcaggggggtgtgggcatccgacgggaatacgcagcccagctggagcggcagctgcagttctacacggaggctgcccggcgcctgggcaacgatggcagcagggatgctgcaaaggaggcgctctataggcggaatctggtagagagtgagctgcagcggctccgcaggtgaggagcccatggggcgggcagcccccagaaagcgggcagcaggccccgataccgggaagagccgacacagccacgaaccagacaagcagacaatcagcggacaatcggttctggactcacccctcatccgggcccccagccccgccagagcctccgtggctgcgggtgttgggaaccatgcctgccagccagtatgtgcccctcacccaggcctggctgggccctggagagtcctgtttgcacagcccaggggtgtccggcctctggcccgccccggagcagggagggtggctggggccaagccccgagggcccctgcaagcactttacttcctgttcctccccagccttaaccccaaagccctcctgcaccccaaagaagccactgaggctggccgagccacactgtctccccaggggcgtcgacctggcccagctgggtccccagggccagcacatggaataaaatagccagggccacactcag

SEQ ID NO: 6315 - DNA, 3266 bp, Homo sapiens
  source 1..3266: mol_type = unassigned DNA
tggcactccccagatggcctgatgatccctgaggacggggctaacgatgaagaactggaggctgagttcttggctttggtcgggggccagcccccagccctggagaagctcaaaggcaaaggtcccttgccgatggaggccattgagaagatggccagcctgtgcatgagagacccggatgaggatgaggaggaggggacggatgaggacgacttggaggctgatgatgacctgctggcggagctaaatgaggtccttggagaggagcagaaggcttcagagaccccacctcctgtggcccagccgaagcctgaggcccctcatccggggctggagaccaccttgcaggagaggctggcgctctatcagacagcaattgaaagcgccagacaagctggagacagcgccaagatgcggcgctacgatcgggggcttaaaacactggaaaacctgctcgcctccatccgtaagggcaatgccattgacgaagcggacatcccgccgccagtggccataggaaaaggcccggcgtccacgcctacctacagccctgcacccacccagccggcccctagaatcgcgtcagccccagagcccagggtcaccctggagggaccttctgccaccgccccagcctcatctccaggcttggctaagccccagatgcccccaggtccctgcagccctggccctctggcccagttgcagagccgccagcgcgactacaagctggctgccctccacgccaagcagcagggagataccactgctgccgctagacacttccgcgtggctaagagctttgatgctgtcttggaggccctgagccggggtgagcccgtggacctctcctgcctgccccctccacccgaccagctgcccccagacccaccgtcaccaccgtcgcagcctccgacccccgctacggcgccctccacaacagaggtgcccccacccccgaggaccctgctggaggcgctggagcagcggatggagcggtaccaggtggccgcagcccaggccaagagcaagggggaccagcggaaagctcgaatgcacgagcgcatcgtcaagcaataccaagatgccatccgagcccacaaggctggccgagccgtggatgtcgctgaattgcccgtgcccccaggcttccccccaatccagggcctggaggccaccaagcccacccagcagagtctggtgggtgtcctggagactgccatgaagctggccaaccaggatgaaggcccagaggatgaagaggatgaggtgcctaagaagcagaacagccctgtggcccccacagcccagcccaaagccccaccctcaagaactccccagtcgggatcagccccaacagccaaagcgccccccaaagccacatccaccagagcccagcagcagctggccttcctagagggccgcaagaagcagctcctgcaggccgcactgcgagccaagcagaaaaacgacgtggagggtgccaagatgcacctgcgccaagccaagggactggagcctatgctggaggcctcgcgcaatgggctgcctgtggacatcaccaaggtgccgcctgcccctgtcaacaaggacgactttgccctggtccagcggcctggcccgggtctgtctcaggaggccgcccggcgctatggtgaactcaccaagctcatacggcagcagcacgagatgtgcctgaaccactcaaaccaattcacccagctgggcaacatcactgaaaccaccaagtttgaaaagttggcggaggactgtaagcggagcatggacattctgaagcaagccttcgtccggggtctccccacgcccaccgcccgctttgagcaaaggaccttcagcgtcatcaagatcttccctgacctcagcagcaacgacatgctcctcttcatcgtgaagggcatcaacttgcccacacccccaggactgtcccctggcgatctggatgtctttgttcggtttgacttcccctatcccaacgtggaagaagctcagaaagacaagaccagtgtgatcaagaacacagactcccctgagttcaaggagcagttcaaactctgcatcaaccgcagccaccgtggcttccgaagggccatccagaccaagggcatcaagttcgaagtggttcacaagggggggctgttcaagactgaccgggtgctggggacagcccagctgaagctggatgcactggagatagcatgtgaggtccgggagatccttgaggtcctggatggtcgccggcccacaggggggcgactggaggtaatggtccggattcgggagccactgacagcccagcagttggagacgacgacagagaggtggctggtcattgaccctgtgccggcagctgtgcccacacaggttgctgggcccaaagggaaggcccctcctgtgcctgcccctgcaagggagtcagggaacagatcagcccggcccctgcatagcctcagtgtgctggcgtttgaccaagagcgtctggagcggaagatcctggccctcaggcaggcgcggcggccggtgcccccagaagtggcccagcagtaccaggacatcatgcaacgcagccagtggcagagggcacagctggagcaggggggtgtgggcatccgacgggaatacgcagcccagctggagcggcagctgcagttctacacggaggctgcccggcgcctgggcaacgatggcagcagggatgctgcaaaggaggcgctctataggcggaatctggtagagagtgagctgcagcggctccgcaggtgaggagcccatggggcgggcagcccccagaaagcgggcagcaggccccgataccgggaagagccgacacagccacgaaccagacaagcagacaatcagcggacaatcggttctggactcacccctcatccgggcccccagccccgccagagcctccgtggctgcgggtgttgggaaccatgcctgccagccagtatgtgcccctcacccaggcctggctgggccctggagagtcctgtttgcacagcccaggggtgtccggcctctggcccgccccggagcagggagggtggctggggccaagccccgagggcccctgcaagcactttacttcctgttcctccccagccttaaccccaaagccctcctgcaccccaaagaagccactgaggctggccgagccacactgtctccccaggggcgtcgacctggcccagctgggtccccagggccagcacatggaataaaatagccagggccacactcag

SEQ ID NO: 6316 - DNA, 2153 bp, Homo sapiens
  source 1..2153: mol_type = unassigned DNA
acagtcagcaccgccccagccaggcgcctgcgcgcccacgcactacctgccgggagttgtagtttcggctcggcagacccggcgagcccagtggccgcgctccggtgcggcggcgcccgaggcccgaggcggaagtgggacggccaagcagggaagcgagggctcgggatcgacggccgcggggcgccgacgaggagtgcaggactcaggaagggcgagtgcgcggcgacagagcccggggaaggaggcagggcaaggccgggcttgggggcaggtggtccgggcatccagccttgaagatgcacaagaggaaaggacccccgggacccccgggcagaggcgccgcggccgcccgccagctgggcctgctggttgacctctccccagatggcctgatgatccctgaggacggggctaacgatgaagaactggaggctgagttcttggctttggtcgggggccagcccccagccctggagaagctcaaaggcaaaggtcccttgccgatggaggccattgagaagatggccagcctgtgcatgagagacccggatgaggatgaggaggaggggacggatgaggacgacttggaggctgatgatgacctgctggcggagctaaatgaggtccttggagaggagcagaaggcttcagagaccccacctcctgtggcccagccgaagcctgaggcccctcatccggggctggagaccaccttgcaggagaggctggcgctctatcagacagcaattgaaagcgccagacaagctggagacagcgccaagatgcggcgctacgatcgggggcttaaaacactggaaaacctgctcgcctccatccgtaagggcaatgccattgacgaagcggacatcccgccgccagtggccataggaaaaggcccggcgtccacgcctacctacagccctgcacccacccagccggcccctagaatcgcgtcagccccagagcccagggtcaccctggagggaccttctgccaccgccccagcctcatctccaggcttggctaagccccagatgcccccaggtccctgcagccctggccctctggcccagttgcagagccgccagcgcgactacaagctggctgccctccacgccaagcagcagggagataccactgctgccgctagacacttccgcgtggctaagagctttgatgctgtcttggaggccctgagccggggtgagcccgtggacctctcctgcctgccccctccacccgaccagctgcccccagacccaccgtcaccaccgtcgcagcctccgacccccgctacggcgccctccacaacagaggtgcccccacccccgaggaccctgctggaggcgctggagcagcggatggagcggtaccaggtggccgcagcccaggccaagagcaagggggaccagcggaaagctcgaatgcacgagcgcatcgtcaagcaataccaagatgccatccgagcccacaaggctggccgagccgtggatgtcgctgaattgcccgtgcccccaggcttccccccaatccagggcctggaggccaccaagcccacccagcagagtctggtgggtgtcctggagactgccatgaagctggccaaccaggatgaaggcccagaggatgaagaggatgaggtgcctaagaagcagaacagccctgtggcccccacagcccagcccaaagccccaccctcaagaactccccagtcgggatcagccccaacagccaaagcgccccccaaagccacatccaccagagcccagcagcagctggccttcctagagggccgcaagaagcagctcctgcaggccgcactgcgagccaagcagaaaaacgacgtggagggtgccaagatgcacctgcgccaagccaagggactggagcctatgctggaggcctcgcgcaatgggctgcctgtggacatcaccaaggtgccgcctgcccctgtcaacaaggacgactttgccctggtccagcggcctggcccgggtctgtctcaggaggccgcccggcgctatggtgaactcaccaagctcatacggcagcagcacgagatgtgcctgaaccactcaaaccaattcacccagctgggcaacatcactgaaaccaccaaggctaacatggtgaaaccctgtttctactaa

SEQ ID NO: 6317 - DNA, 4790 bp, Homo sapiens
  source 1..4790: mol_type = unassigned DNA
aagccaactcctttctcccgagcctgctggcagatcctcccccacctctccgcaggagttcccctcctaggctgggagcatcccgtgcagggtaaatcttttcaagccaccaactgctgtccccaaggaaatggtgtccgaaaaatcccaccttggcaacccccaggagcctgtgcaggaggagcccaagacccgcctcctgagtatgacagtccggagaggcccacggagcttacctccaattccttcaacttccagaacaggctttgcagaattttccatgaggggacgcatgagggagaaattgcaagcagcgaggtccaaagcagaaagtgcattgctgcaggaaatccccactcctcggcccagacgcttacgaagtcccagtaagaaagaattggagactgaatttggcacagagccagggaaagaggtagaaaggactcaacaagaagttgactcccaaagttactcaagagtcaagttccatgattctgcacgaaaaatcaagcctaaaccccaggttccacctggcttcccttctgcagaagaggcctataacttctttactttcaactttgatcccgaaccagaaggatcagaggaaaaaccaaaagcaagacatagagcgggaactaatcaagaggaggaggaaggggaagaagaagaaccacctgcacaaggaggaggaaaggaaatggatgaggaagaactgcttaatggtgatgatgccgaggacttcctattgggcttagatcacgtggctgacgattttgtagcagtcagacctgcagattatgaaagcatccatgatcggctgcagatggaaagagaaatgctcttcatacccagtaggcagacagtccctacatataaaaagcttcctgagaatgtacagcccaggttcctggaagatgaaggcctttacaccggggtaagaccagaggtggcacgcaccaatcagaacatcatggagaacagattgctgatgcaggaccccgaaagaagatggtttggagatgacggcaggatcctagctctgccaaaccccatcaagccatttccttcaaggccgccagtactaacacaggagcagagcattaaggcagagcttgaaacactgtataaaaaggctgtaaaatacgttcacagtagtcagcatgtgatcagatctggagaccctcctggaaatttccaactggacattgatatttcagggttaatcttcactcatcatccctgttttagccgagagcatgttttggcagccaagctggcccagttatatgaccagtaccttgcaagacaccagagaaacaaggcgaaatttcttactgataagctccaagctttaagaaatgctgttcagactggccttgatccagaaaaacctcatcagtctctcgataccatccaaaaaaccatcaatgagtataaatctgaaattcgacaaacaagaaaattccgtgatgctgaacaagaaaaagatagaacattgcttaagactatcataaaagtttggaaagagatgaaatcccttcgagagttccagagatttacaaatactcccttgaaacttgttttgagaaaggaaaaagctgaccagaaagcagatgaagaagcatatgaagcagaaattcaagctgaaataagtgaactgttagaagagcacacggaggagtacgcacagaagatggaagaatacagaacgtcgttacaacagtggaaggcctggaggaaagtgcaaagggccaagaagaagaaaaggaaacaagcagcagaagaacatcccggtgatgagattgcagagccgtatcccgaggaggaccttgtgaagcccagccctccagagcccactgatcgggcagtgatagagcaggaggtgagggagagagcagcccagagcaggaggaggccttgggagcccacgctggtcccggagctaagcctggcaggaagcgtaacacccaatgaccagtgccccagagcggaggtctcgagaagggaggatgtaaagaagcgctcagtgtacttaaaagtgctgttcaacaacaaggaggtgtccaggacagtcagtcggccactaggagcagacttccgagttcactttgggcagattttcaatttgcaaatagtcaactggccggagagtttaacacttcaggtctatgaaactgtcggacacagtagtcccaccttgctagcagaagtgtttctgcctattcctgagactactgttgtcactggaagggctcctactgaagaagtggagtttagcagtaatcagcatgtgacactggaccacgagggagttggaagtggagtgcccttctcatttgaagctgatggcagtaaccagctgactctgatgacctcagggaaagtgtctcatagtgtggcatgggccattggagaaaacgggatacctttaattcctccattgtcacagcagaacatcggatttcggagtgctttgaagaaagcagatgccatctcatctattggcacatcaggactgacagacatgaaaaaattggccaagtgggcagcagagtccaagctcgacccaaatgaccccaacaatgcccctttgatgcagcttatctcggttgctaccagtggtgaatcctatgtccctgatttctttagactggagcagctgcaacaggagtttaactttgtttcagatcaagaattaaatagatccaaacgatttaggcttcttcatcttagaagccaagaggtgccagaattccgaaattataagcaagttccagtctatgaccgagaaattatggaaaaggtattccaggactatgagaaacggttacgagacagaaatgtaatagaaaccaaggaacacatagacacccatagggccatagtagccaagtacctccagcaggttagagaatcagtgataaatcgtttcttaattgcaaaacaatattttcttcttgctgatatgatagtagaagaagaagttcccaatatcagcattttgggcctaagccttttcaagctggcagaacaaaagcgaccactgcggccaaggagaaaaggtcggaagaaggtgacagcccaaaacctgtctgatggagacataaagctgctggtgaacattgtgcgagcttacgacattccagtgaggaagccggcagtgagcaaattccagcagccgtcgaggtcttcaaggatgttcagtgaaaagcatgctgcttccccaagcacgtacagcccaacccacaatgctgactaccccctcggccaggttttagtacgtccctttgtagaagtctcttttcaacgaacagtttgccatacgactacggctgaaggaccaaaccctagctggaatgaagaactagaacttccatttagggctcctaatggagattatagcacagccagtctgcagtcagtgaaagatgttgtgttcattaacatttttgatgaagtactgcatgatgtcttagaggatgaccgtgaaagaggaagtggaatccatactcgtattgagagacactggctgggatgtgtgaaaatgccatttagcacaatatatttccaagcaaggtttgagtctcaggaagatgagaaattacttcaagcaactgagaagtttcaagctgaatgtgccttaaagtttccaaatcgtcagtgccttacaacagtaattgatataagcggaaaaactgtttttatcacacgttatctcaaacctttaaaccctcctcaggagctccttaatgtctaccccaataatctacaggcaactgcagaactggtggctcgatatgtgtccttgattcccttcttgcctgacactgtctcatttggtggtatctgtgacctctggagcacatctgatcaatttcttgatctcctggcaggggatgaagaagaacatgcagtactattgtgtaattactttctgtctctgggtaagaaggcctggctgttgatgggcaatgctattcctgagggtccaactgcctatgtgctaacttgggagcaaggtcgttatttaatatggaatccctgcagtggacatttttatggacaatttgatacattctgtcccttgaaaaatgtgggctgtttaataggtcctgacaatatttggtttaatattcaacgatatgaatctccactaaggataaattttgatgtcaccaggcccaagctatggaaatctttcttttcaagaagccttccatatcctggcctttccagtgttcagcctgaagagctaatttaccagcgctcagacaaagcagctgcagctgagctacaagacaggattgaaaaaatactaaaagaaaaaatcatggactggaggccacgccatctgactcggtggaataggtattgtacctctactctgcgtcacttcttgcctctgttagaaaaaagtcaaggagaagatgtagaagatgaccacagagcagaactgctaaaacagctgggagactacaggttctctggatttcctcttcacatgccttattctgaagtgaagcctttaattgacgctgtgtatagtactggagtacataatattgatgttcctaatgttgaatttgctttagctgtatacatacacccataccccaaaaatgttttgtctgtttggatctatgttgcctctcttatacgcaacaggtaatttttttcactgtactttctgtatcatgtaaaaactacacttaggatatgagaaaattttaaattatatgcatcacatcagaagaacatattattggcaaataataaaattatcaactgtt

SEQ ID NO: 6318 - DNA, 5234 bp, Homo sapiens
  source 1..5234: mol_type = unassigned DNA
cttaggaacgggttgctaagctggtgtttttgctccaagacatggctgcagcttcccagggaggagcccaggggcatctccaacactcagcctttccctccggacccttttaaaagattcaacagcaccgtctctctccacttccatcctagaatgcagaatctgcaaagtgccttttgtaaagtttcttaaggtaaatcagtccctatgttctttgtcagggacccatcccagccaaaatgaatcccagggaagaaaaagtaaaaataattacagaggagttcattgaaaatgatgaggatgcagacatgggaagacagaataagaactcaaaggttcgaagacagccaagaaagaaacagccaccaactgctgtccccaaggaaatggtgtccgaaaaatcccaccttggcaacccccaggagcctgtgcaggaggagcccaagacccgcctcctgagtatgacagtccggagaggcccacggagcttacctccaattccttcaacttccagaacaggctttgcagaattttccatgaggggacgcatgagggagaaattgcaagcagcgaggtccaaagcagaaagtgcattgctgcaggaaatccccactcctcggcccagacgcttacgaagtcccagtaagaaagaattggagactgaatttggcacagagccagggaaagaggtagaaaggactcaacaagaagttgactcccaaagttactcaagagtcaagttccatgattctgcacgaaaaatcaagcctaaaccccaggttccacctggcttcccttctgcagaagaggcctataacttctttactttcaactttgatcccgaaccagaaggatcagaggaaaaaccaaaagcaagacatagagcgggaactaatcaagaggaggaggaaggggaagaagaagaaccacctgcacaaggaggaggaaaggaaatggatgaggaagaactgcttaatggtgatgatgccgaggacttcctattgggcttagatcacgtggctgacgattttgtagcagtcagacctgcagattatgaaagcatccatgatcggctgcagatggaaagagaaatgctcttcatacccagtaggcagacagtccctacatataaaaagcttcctgagaatgtacagcccaggttcctggaagatgaaggcctttacaccggggtaagaccagaggtggcacgcaccaatcagaacatcatggagaacagattgctgatgcaggaccccgaaagaagatggtttggagatgacggcaggatcctagctctgccaaaccccatcaagccatttccttcaaggccgccagtactaacacaggagcagagcattaaggcagagcttgaaacactgtataaaaaggctgtaaaatacgttcacagtagtcagcatgtgatcagatctggagaccctcctggaaatttccaactggacattgatatttcagggttaatcttcactcatcatccctgttttagccgagagcatgttttggcagccaagctggcccagttatatgaccagtaccttgcaagacaccagagaaacaaggcgaaatttcttactgataagctccaagctttaagaaatgctgttcagactggccttgatccagaaaaacctcatcagtctctcgataccatccaaaaaaccatcaatgagtataaatctgaaattcgacaaacaagaaaattccgtgatgctgaacaagaaaaagatagaacattgcttaagactatcataaaagtttggaaagagatgaaatcccttcgagagttccagagatttacaaatactcccttgaaacttgttttgagaaaggaaaaagctgaccagaaagcagatgaagaagcatatgaagcagaaattcaagctgaaataagtgaactgttagaagagcacacggaggagtacgcacagaagatggaagaatacagaacgtcgttacaacagtggaaggcctggaggaaagtgcaaagggccaagaagaagaaaaggaaacaagcagcagaagaacatcccggtgatgagattgcagagccgtatcccgaggaggaccttgtgaagcccagccctccagagcccactgatcgggcagtgatagagcaggaggtgagggagagagcagcccagagcaggaggaggccttgggagcccacgctggtcccggagctaagcctggcaggaagcgtaacacccaatgaccagtgccccagagcggaggtctcgagaagggaggatgtaaagaagcgctcagtgtacttaaaagtgctgttcaacaacaaggaggtgtccaggacagtcagtcggccactaggagcagacttccgagttcactttgggcagattttcaatttgcaaatagtcaactggccggagagtttaacacttcaggtctatgaaactgtcggacacagtagtcccaccttgctagcagaagtgtttctgcctattcctgagactactgttgtcactggaagggctcctactgaagaagtggagtttagcagtaatcagcatgtgacactggaccacgagggagttggaagtggagtgcccttctcatttgaagctgatggcagtaaccagctgactctgatgacctcagggaaagtgtctcatagtgtggcatgggccattggagaaaacgggatacctttaattcctccattgtcacagcagaacatcggatttcggagtgctttgaagaaagcagatgccatctcatctattggcacatcaggactgacagacatgaaaaaattggccaagtgggcagcagagtccaagctcgacccaaatgaccccaacaatgcccctttgatgcagcttatctcggttgctaccagtggtgaatcctatgtccctgatttctttagactggagcagctgcaacaggagtttaactttgtttcagatcaagaattaaatagatccaaacgatttaggcttcttcatcttagaagccaagaggtgccagaattccgaaattataagcaagttccagtctatgaccgagaaattatggaaaaggtattccaggactatgagaaacggttacgagacagaaatgtaatagaaaccaaggaacacatagacacccatagggccatagtagccaagtacctccagcaggttagagaatcagtgataaatcgtttcttaattgcaaaacaatattttcttcttgctgatatgatagtagaagaagaagttcccaatatcagcattttgggcctaagccttttcaagctggcagaacaaaagcgaccactgcggccaaggagaaaaggtcggaagaaggtgacagcccaaaacctgtctgatggagacataaagctgctggtgaacattgtgcgagcttacgacattccagtgaggaagccggcagtgagcaaattccagcagccgtcgaggtcttcaaggatgttcagtgaaaagcatgctgcttccccaagcacgtacagcccaacccacaatgctgactaccccctcggccaggttttagtacgtccctttgtagaagtctcttttcaacgaacagtttgccatacgactacggctgaaggaccaaaccctagctggaatgaagaactagaacttccatttagggctcctaatggagattatagcacagccagtctgcagtcagtgaaagatgttgtgttcattaacatttttgatgaagtactgcatgatgtcttagaggatgaccgtgaaagaggaagtggaatccatactcgtattgagagacactggctgggatgtgtgaaaatgccatttagcacaatatatttccaagcaaggattgatggaacatttaaaatagatattcccccagttcttctgggctacagtaaggagcgaaatatgattcttgagcggggttttgattctgtccgaagcttaagtgaaggctcctacattaccctctttattaccattgagccccagctggttcctggagagtccattcgagaaaagtttgagtctcaggaagatgagaaattacttcaagcaactgagaagtttcaagctgaatgtgccttaaagtttccaaatcgtcagtgccttacaacagtaattgatataagcggaaaaactgtttttatcacacgttatctcaaacctttaaaccctcctcaggagctccttaatgtctaccccaataatctacaggcaactgcagaactggtggctcgatatgtgtccttgattcccttcttgcctgacactgtctcatttggtggtatctgtgacctctggagcacatctgatcaatttcttgatctcctggcaggggatgaagaagaacatgcagtactattgtgtaattactttctgtctctgggtaagaaggcctggctgttgatgggcaatgctattcctgagggtccaactgcctatgtgctaacttgggagcaaggtcgttatttaatatggaatccctgcagtggacatttttatggacaatttgatacattctgtcccttgaaaaatgtgggctgtttaataggtcctgacaatatttggtttaatattcaacgatatgaatctccactaaggataaattttgatgtcaccaggcccaagctatggaaatctttcttttcaagaagccttccatatcctggcctttccagtgttcagcctgaagagctaatttaccagcgctcagacaaagcagctgcagctgagctacaagacaggattgaaaaaatactaaaagaaaaaatcatggactggaggccacgccatctgactcggtggaataggtattgtacctctactctgcgtcacttcttgcctctgttagaaaaaagtcaaggagaagatgtagaagatgaccacagagcagaactgctaaaacagctgggagactacaggttctctggatttcctcttcacatgccttattctgaagtgaagcctttaattgacgctgtgtatagtactggagtacataatattgatgttcctaatgttgaatttgctttagctgtatacatacacccataccccaaaaatgttttgtctgtttggatctatgttgcctctcttatacgcaacaggtaatttttttcactgtactttctgtatcatgtaaaaactacacttaggatatgagaaaattttaaattatatgcatcacatcagaagaacatattattggcaaataataaaattatcaactgttttcaaactgtg

SEQ ID NO: 6319 - DNA, 5249 bp, Homo sapiens
  source 1..5249: mol_type = unassigned DNA
cttaggaacgggttgctaagctggtgtttttgctccaagacatggctgcagcttcccagggaggagcccaggggcatctccaacactcagcctttccctccggacccttttaaaagattcaacagcaccgtctctctccacttccatcctagaatgcagaatctgcaaagtgccttttgtaaagtttcttaaggtaaatcagtccctaaccggactttaggctgcaacattgtcagggacccatcccagccaaaatgaatcccagggaagaaaaagtaaaaataattacagaggagttcattgaaaatgatgaggatgcagacatgggaagacagaataagaactcaaaggttcgaagacagccaagaaagaaacagccaccaactgctgtccccaaggaaatggtgtccgaaaaatcccaccttggcaacccccaggagcctgtgcaggaggagcccaagacccgcctcctgagtatgacagtccggagaggcccacggagcttacctccaattccttcaacttccagaacaggctttgcagaattttccatgaggggacgcatgagggagaaattgcaagcagcgaggtccaaagcagaaagtgcattgctgcaggaaatccccactcctcggcccagacgcttacgaagtcccagtaagaaagaattggagactgaatttggcacagagccagggaaagaggtagaaaggactcaacaagaagttgactcccaaagttactcaagagtcaagttccatgattctgcacgaaaaatcaagcctaaaccccaggttccacctggcttcccttctgcagaagaggcctataacttctttactttcaactttgatcccgaaccagaaggatcagaggaaaaaccaaaagcaagacatagagcgggaactaatcaagaggaggaggaaggggaagaagaagaaccacctgcacaaggaggaggaaaggaaatggatgaggaagaactgcttaatggtgatgatgccgaggacttcctattgggcttagatcacgtggctgacgattttgtagcagtcagacctgcagattatgaaagcatccatgatcggctgcagatggaaagagaaatgctcttcatacccagtaggcagacagtccctacatataaaaagcttcctgagaatgtacagcccaggttcctggaagatgaaggcctttacaccggggtaagaccagaggtggcacgcaccaatcagaacatcatggagaacagattgctgatgcaggaccccgaaagaagatggtttggagatgacggcaggatcctagctctgccaaaccccatcaagccatttccttcaaggccgccagtactaacacaggagcagagcattaaggcagagcttgaaacactgtataaaaaggctgtaaaatacgttcacagtagtcagcatgtgatcagatctggagaccctcctggaaatttccaactggacattgatatttcagggttaatcttcactcatcatccctgttttagccgagagcatgttttggcagccaagctggcccagttatatgaccagtaccttgcaagacaccagagaaacaaggcgaaatttcttactgataagctccaagctttaagaaatgctgttcagactggccttgatccagaaaaacctcatcagtctctcgataccatccaaaaaaccatcaatgagtataaatctgaaattcgacaaacaagaaaattccgtgatgctgaacaagaaaaagatagaacattgcttaagactatcataaaagtttggaaagagatgaaatcccttcgagagttccagagatttacaaatactcccttgaaacttgttttgagaaaggaaaaagctgaccagaaagcagatgaagaagcatatgaagcagaaattcaagctgaaataagtgaactgttagaagagcacacggaggagtacgcacagaagatggaagaatacagaacgtcgttacaacagtggaaggcctggaggaaagtgcaaagggccaagaagaagaaaaggaaacaagcagcagaagaacatcccggtgatgagattgcagagccgtatcccgaggaggaccttgtgaagcccagccctccagagcccactgatcgggcagtgatagagcaggaggtgagggagagagcagcccagagcaggaggaggccttgggagcccacgctggtcccggagctaagcctggcaggaagcgtaacacccaatgaccagtgccccagagcggaggtctcgagaagggaggatgtaaagaagcgctcagtgtacttaaaagtgctgttcaacaacaaggaggtgtccaggacagtcagtcggccactaggagcagacttccgagttcactttgggcagattttcaatttgcaaatagtcaactggccggagagtttaacacttcaggtctatgaaactgtcggacacagtagtcccaccttgctagcagaagtgtttctgcctattcctgagactactgttgtcactggaagggctcctactgaagaagtggagtttagcagtaatcagcatgtgacactggaccacgagggagttggaagtggagtgcccttctcatttgaagctgatggcagtaaccagctgactctgatgacctcagggaaagtgtctcatagtgtggcatgggccattggagaaaacgggatacctttaattcctccattgtcacagcagaacatcggatttcggagtgctttgaagaaagcagatgccatctcatctattggcacatcaggactgacagacatgaaaaaattggccaagtgggcagcagagtccaagctcgacccaaatgaccccaacaatgcccctttgatgcagcttatctcggttgctaccagtggtgaatcctatgtccctgatttctttagactggagcagctgcaacaggagtttaactttgtttcagatcaagaattaaatagatccaaacgatttaggcttcttcatcttagaagccaagaggtgccagaattccgaaattataagcaagttccagtctatgaccgagaaattatggaaaaggtattccaggactatgagaaacggttacgagacagaaatgtaatagaaaccaaggaacacatagacacccatagggccatagtagccaagtacctccagcaggttagagaatcagtgataaatcgtttcttaattgcaaaacaatattttcttcttgctgatatgatagtagaagaagaagttcccaatatcagcattttgggcctaagccttttcaagctggcagaacaaaagcgaccactgcggccaaggagaaaaggtcggaagaaggtgacagcccaaaacctgtctgatggagacataaagctgctggtgaacattgtgcgagcttacgacattccagtgaggaagccggcagtgagcaaattccagcagccgtcgaggtcttcaaggatgttcagtgaaaagcatgctgcttccccaagcacgtacagcccaacccacaatgctgactaccccctcggccaggttttagtacgtccctttgtagaagtctcttttcaacgaacagtttgccatacgactacggctgaaggaccaaaccctagctggaatgaagaactagaacttccatttagggctcctaatggagattatagcacagccagtctgcagtcagtgaaagatgttgtgttcattaacatttttgatgaagtactgcatgatgtcttagaggatgaccgtgaaagaggaagtggaatccatactcgtattgagagacactggctgggatgtgtgaaaatgccatttagcacaatatatttccaagcaaggattgatggaacatttaaaatagatattcccccagttcttctgggctacagtaaggagcgaaatatgattcttgagcggggttttgattctgtccgaagcttaagtgaaggctcctacattaccctctttattaccattgagccccagctggttcctggagagtccattcgagaaaagtttgagtctcaggaagatgagaaattacttcaagcaactgagaagtttcaagctgaatgtgccttaaagtttccaaatcgtcagtgccttacaacagtaattgatataagcggaaaaactgtttttatcacacgttatctcaaacctttaaaccctcctcaggagctccttaatgtctaccccaataatctacaggcaactgcagaactggtggctcgatatgtgtccttgattcccttcttgcctgacactgtctcatttggtggtatctgtgacctctggagcacatctgatcaatttcttgatctcctggcaggggatgaagaagaacatgcagtactattgtgtaattactttctgtctctgggtaagaaggcctggctgttgatgggcaatgctattcctgagggtccaactgcctatgtgctaacttgggagcaaggtcgttatttaatatggaatccctgcagtggacatttttatggacaatttgatacattctgtcccttgaaaaatgtgggctgtttaataggtcctgacaatatttggtttaatattcaacgatatgaatctccactaaggataaattttgatgtcaccaggcccaagctatggaaatctttcttttcaagaagccttccatatcctggcctttccagtgttcagcctgaagagctaatttaccagcgctcagacaaagcagctgcagctgagctacaagacaggattgaaaaaatactaaaagaaaaaatcatggactggaggccacgccatctgactcggtggaataggtattgtacctctactctgcgtcacttcttgcctctgttagaaaaaagtcaaggagaagatgtagaagatgaccacagagcagaactgctaaaacagctgggagactacaggttctctggatttcctcttcacatgccttattctgaagtgaagcctttaattgacgctgtgtatagtactggagtacataatattgatgttcctaatgttgaatttgctttagctgtatacatacacccataccccaaaaatgttttgtctgtttggatctatgttgcctctcttatacgcaacaggtaatttttttcactgtactttctgtatcatgtaaaaactacacttaggatatgagaaaattttaaattatatgcatcacatcagaagaacatattattggcaaataataaaattatcaactgttttcaaactgtg

SEQ ID NO: 6320 - DNA, 5057 bp, Homo sapiens
  source 1..5057: mol_type = unassigned DNA
cttaggaacgggttgctaagctggtgtttttgctccaagacatggctgcagcttcccagggaggagcccaggggcatctccaacactcagcctttccctccggacccttttaaaagattcaacagcaccgtctctctccacttccatcctagaatgcagaatctgcaaagtgccttttgtaaagtttcttaaggtaaatcagtccctatgttctttgtcagggacccatcccagccaaaatgaatcccagggaagaaaaagtaaaaataattacagaggagttcattgaaaatgatgaggatgcagacatgggaagacagaataagaactcaaaggttcgaagacagccaagaaagaaacagccaccaactgctgtccccaaggaaatggtgtccgaaaaatcccaccttggcaacccccaggagcctgtgcaggaggagcccaagacccgcctcctgagtatgacagtccggagaggcccacggagcttacctccaattccttcaacttccagaacaggctttgcagaattttccatgaggggacgcatgagggagaaattgcaagcagcgaggtccaaagcagaaagtgcattgctgcaggaaatccccactcctcggcccagacgcttacgaagtcccagtaagaaagaattggagactgaatttggcacagagccagggaaagaggtagaaaggactcaacaagaagttgactcccaaagttactcaagagtcaagttccatgattctgcacgaaaaatcaagcctaaaccccaggttccacctggcttcccttctgcagaagaggcctataacttctttactttcaactttgatcccgaaccagaaggatcagaggaaaaaccaaaagcaagacatagagcgggaactaatcaagaggaggaggaaggggaagaagaagaaccacctgcacaaggaggaggaaaggaaatggatgaggaagaactgcttaatggtgatgatgccgaggacttcctattgggcttagatcacgtggctgacgattttgtagcagtcagacctgcagattatgaaagcatccatgatcggctgcagatggaaagagaaatgctcttcatacccagtaggcagacagtccctacatataaaaagcttcctgagaatgtacagcccaggttcctggaagatgaaggcctttacaccggggtaagaccagaggtggcacgcaccaatcagaacatcatggagaacagattgctgatgcaggaccccgaaagaagatggtttggagatgacggcaggatcctagctctgccaaaccccatcaagccatttccttcaaggccgccagtactaacacaggagcagagcattaaggcagagcttgaaacactgtataaaaaggctgtaaaatacgttcacagtagtcagcatgtgatcagatctggagaccctcctggaaatttccaactggacattgatatttcagggttaatcttcactcatcatccctgttttagccgagagcatgttttggcagccaagctggcccagttatatgaccagtaccttgcaagacaccagagaaacaaggcgaaatttcttactgataagctccaagctttaagaaatgctgttcagactggccttgatccagaaaaacctcatcagtctctcgataccatccaaaaaaccatcaatgagtataaatctgaaattcgacaaacaagaaaattccgtgatgctgaacaagaaaaagatagaacattgcttaagactatcataaaagtttggaaagagatgaaatcccttcgagagttccagagatttacaaatactcccttgaaacttgttttgagaaaggaaaaagctgaccagaaagcagatgaagaagcatatgaagcagaaattcaagctgaaataagtgaactgttagaagagcacacggaggagtacgcacagaagatggaagaatacagaacgtcgttacaacagtggaaggcctggaggaaagtgcaaagggccaagaagaagaaaaggaaacaagcagcagaagaacatcccggtgatgagattgcagagccgtatcccgaggaggaccttgtgaagcccagccctccagagcccactgatcgggcagtgatagagcaggaggtgagggagagagcagcccagagcaggaggaggccttgggagcccacgctggtcccggagctaagcctggcaggaagcgtaacacccaatgaccagtgccccagagcggaggtctcgagaagggaggatgtaaagaagcgctcagtgtacttaaaagtgctgttcaacaacaaggaggtgtccaggacagtcagtcggccactaggagcagacttccgagttcactttgggcagattttcaatttgcaaatagtcaactggccggagagtttaacacttcaggtctatgaaactgtcggacacagtagtcccaccttgctagcagaagtgtttctgcctattcctgagactactgttgtcactggaagggctcctactgaagaagtggagtttagcagtaatcagcatgtgacactggaccacgagggagttggaagtggagtgcccttctcatttgaagctgatggcagtaaccagctgactctgatgacctcagggaaagtgtctcatagtgtggcatgggccattggagaaaacgggatacctttaattcctccattgtcacagcagaacatcggatttcggagtgctttgaagaaagcagatgccatctcatctattggcacatcaggactgacagacatgaaaaaattggccaagtgggcagcagagtccaagctcgacccaaatgaccccaacaatgcccctttgatgcagcttatctcggttgctaccagtggtgaatcctatgtccctgatttctttagactggagcagctgcaacaggagtttaactttgtttcagatcaagaattaaatagatccaaacgatttaggcttcttcatcttagaagccaagaggtgccagaattccgaaattataagcaagttccagtctatgaccgagaaattatggaaaaggtattccaggactatgagaaacggttacgagacagaaatgtaatagaaaccaaggaacacatagacacccatagggccatagtagccaagtacctccagcaggttagagaatcagtgataaatcgtttcttaattgcaaaacaatattttcttcttgctgatatgatagtagaagaagaagttcccaatatcagcattttgggcctaagccttttcaagctggcagaacaaaagcgaccactgcggccaaggagaaaaggtcggaagaaggtgacagcccaaaacctgtctgatggagacataaagctgctggtgaacattgtgcgagcttacgacattccagtgaggaagccggcagtgagcaaattccagcagccgtcgaggtcttcaaggatgttcagtgaaaagcatgctgcttccccaagcacgtacagcccaacccacaatgctgactaccccctcggccaggttttagtacgtccctttgtagaagtctcttttcaacgaacagtttgccatacgactacggctgaaggaccaaaccctagctggaatgaagaactagaacttccatttagggctcctaatggagattatagcacagccagtctgcagtcagtgaaagatgttgtgttcattaacatttttgatgaagtactgcatgatgtcttagaggatgaccgtgaaagaggaagtggaatccatactcgtattgagagacactggctgggatgtgtgaaaatgccatttagcacaatatatttccaagcaaggtttgagtctcaggaagatgagaaattacttcaagcaactgagaagtttcaagctgaatgtgccttaaagtttccaaatcgtcagtgccttacaacagtaattgatataagcggaaaaactgtttttatcacacgttatctcaaacctttaaaccctcctcaggagctccttaatgtctaccccaataatctacaggcaactgcagaactggtggctcgatatgtgtccttgattcccttcttgcctgacactgtctcatttggtggtatctgtgacctctggagcacatctgatcaatttcttgatctcctggcaggggatgaagaagaacatgcagtactattgtgtaattactttctgtctctgggtaagaaggcctggctgttgatgggcaatgctattcctgagggtccaactgcctatgtgctaacttgggagcaaggtcgttatttaatatggaatccctgcagtggacatttttatggacaatttgatacattctgtcccttgaaaaatgtgggctgtttaataggtcctgacaatatttggtttaatattcaacgatatgaatctccactaaggataaattttgatgtcaccaggcccaagctatggaaatctttcttttcaagaagccttccatatcctggcctttccagtgttcagcctgaagagctaatttaccagcgctcagacaaagcagctgcagctgagctacaagacaggattgaaaaaatactaaaagaaaaaatcatggactggaggccacgccatctgactcggtggaataggtattgtacctctactctgcgtcacttcttgcctctgttagaaaaaagtcaaggagaagatgtagaagatgaccacagagcagaactgctaaaacagctgggagactacaggttctctggatttcctcttcacatgccttattctgaagtgaagcctttaattgacgctgtgtatagtactggagtacataatattgatgttcctaatgttgaatttgctttagctgtatacatacacccataccccaaaaatgttttgtctgtttggatctatgttgcctctcttatacgcaacaggtaatttttttcactgtactttctgtatcatgtaaaaactacacttaggatatgagaaaattttaaattatatgcatcacatcagaagaacatattattggcaaataataaaattatcaactgttttcaaactgtg

SEQ ID NO: 6321 - DNA, 1673 bp, Homo sapiens
  source 1..1673: mol_type = unassigned DNA
cttaggaacgggttgctaagctggtgtttttgctccaagacatggctgcagcttcccagggaggagcccaggggcatctccaacactcagcctttccctccggacccttttaaaagattcaacagcaccgtctctctccacttccatcctagaatgcagaatctgcaaagtgccttttgtaaagtttcttaaggtaaatcagtccctaaccggactttaggctgcaacattgtcagggacccatcccagccaaaatgaatcccagggaagaaaaagtaaaaataattacagaggagttcattgaaaatgatgaggatgcagacatgggaagacagaataagaactcaaaggttcgaagacagccaagaaagaaacagaagccaactcctttctcccgagcctgctggcagatcctcccccacctctccgcaggagttcccctcctaggctgggagcatcccgtgcagggtaaatcttttcaagccaccaactgctgtccccaaggaaatggtgtccgaaaaatcccaccttggcaacccccaggagcctgtgcaggaggagcccaagacccgcctcctgagtatgacagtccggagaggcccacggagagagctggttgttaaaaagagcctgggcaggccaggcacggtgactcacgtctgtaatcccagcactttggaaggccgaggcgggtaaatcacctgaggttgggagttcaagaccagcctgaccaacatggagaaaccccatctctactaaaaatacaaaaaaattagccaggcgtggtggcgcatgcctgtaatcccagctacttgggaggctgaggcatgagaattgcttgaacctgggaggtggaggttgcagtgagccgagatcggagcactgcactccagcctaggcaacagagcaagactccatctcagaaaacaaacaaacaaaaaagagcctggaacctcctcccctctctcttgctccctctctcaccatgcgacacacctgtttccccttccccttctgacataagtgaaagcttcctaaggcctcaccagaggcagatgctggcaccatgcttattgcacagtctgcagaacagtgagccaaaataaacctcttttctttataaattacccagtctcagatattcctttatagcaatgcaaaatggactaacaatacataagttagggagtgttaattagaatggaaattaaatatgcagaaactcaaaggaagatgaaattgttagggaagacatatgtgttaacctagtgaggcttgaatcagatgtttggaagaaatgagggaggtttctgaggctcctggtgaccttgccattgaggacacatatacttctccccctacacacgccttttcttcttccccagtacaatgaacattaggaattacctgctcattgtagggaaaatgaccacccttcaggcattgcttttcatgaaaagtggattagacaagaggagaagtggttacactttttaattgttacataattgttagactgttttccctatggcaaagttgggaaataagtaactgttggaaactagaggcctttggaagcaagtagactcttagattggaaaaatgtggttctaatctaaaagcaatgatacaatgagagctgttatgaattaataaaaacagaaccaaaattt

SEQ ID NO: 6322 - DNA, 5175 bp, Homo sapiens
  source 1..5175: mol_type = unassigned DNA
gcccaggggcatctccaacactcagcctttccctccggacccttttaaaagattcaacagcaccgtctctctccacttccatcctagaatgcagaatctgcaaagtgccttttgtaaagtttcttaagctatattctaatggatatgggctgacattaacaaggacccatcccagccaaaatgaatcccagggaagaaaaagtaaaaataattacagaggagttcattgaaaatgatgaggatgcagacatgggaagacagaataagaactcaaaggttcgaagacagccaagaaagaaacagccaccaactgctgtccccaaggaaatggtgtccgaaaaatcccaccttggcaacccccaggagcctgtgcaggaggagcccaagacccgcctcctgagtatgacagtccggagaggcccacggagcttacctccaattccttcaacttccagaacaggctttgcagaattttccatgaggggacgcatgagggagaaattgcaagcagcgaggtccaaagcagaaagtgcattgctgcaggaaatccccactcctcggcccagacgcttacgaagtcccagtaagaaagaattggagactgaatttggcacagagccagggaaagaggtagaaaggactcaacaagaagttgactcccaaagttactcaagagtcaagttccatgattctgcacgaaaaatcaagcctaaaccccaggttccacctggcttcccttctgcagaagaggcctataacttctttactttcaactttgatcccgaaccagaaggatcagaggaaaaaccaaaagcaagacatagagcgggaactaatcaagaggaggaggaaggggaagaagaagaaccacctgcacaaggaggaggaaaggaaatggatgaggaagaactgcttaatggtgatgatgccgaggacttcctattgggcttagatcacgtggctgacgattttgtagcagtcagacctgcagattatgaaagcatccatgatcggctgcagatggaaagagaaatgctcttcatacccagtaggcagacagtccctacatataaaaagcttcctgagaatgtacagcccaggttcctggaagatgaaggcctttacaccggggtaagaccagaggtggcacgcaccaatcagaacatcatggagaacagattgctgatgcaggaccccgaaagaagatggtttggagatgacggcaggatcctagctctgccaaaccccatcaagccatttccttcaaggccgccagtactaacacaggagcagagcattaaggcagagcttgaaacactgtataaaaaggctgtaaaatacgttcacagtagtcagcatgtgatcagatctggagaccctcctggaaatttccaactggacattgatatttcagggttaatcttcactcatcatccctgttttagccgagagcatgttttggcagccaagctggcccagttatatgaccagtaccttgcaagacaccagagaaacaaggcgaaatttcttactgataagctccaagctttaagaaatgctgttcagactggccttgatccagaaaaacctcatcagtctctcgataccatccaaaaaaccatcaatgagtataaatctgaaattcgacaaacaagaaaattccgtgatgctgaacaagaaaaagatagaacattgcttaagactatcataaaagtttggaaagagatgaaatcccttcgagagttccagagatttacaaatactcccttgaaacttgttttgagaaaggaaaaagctgaccagaaagcagatgaagaagcatatgaagcagaaattcaagctgaaataagtgaactgttagaagagcacacggaggagtacgcacagaagatggaagaatacagaacgtcgttacaacagtggaaggcctggaggaaagtgcaaagggccaagaagaagaaaaggaaacaagcagcagaagaacatcccggtgatgagattgcagagccgtatcccgaggaggaccttgtgaagcccagccctccagagcccactgatcgggcagtgatagagcaggaggtgagggagagagcagcccagagcaggaggaggccttgggagcccacgctggtcccggagctaagcctggcaggaagcgtaacacccaatgaccagtgccccagagcggaggtctcgagaagggaggatgtaaagaagcgctcagtgtacttaaaagtgctgttcaacaacaaggaggtgtccaggacagtcagtcggccactaggagcagacttccgagttcactttgggcagattttcaatttgcaaatagtcaactggccggagagtttaacacttcaggtctatgaaactgtcggacacagtagtcccaccttgctagcagaagtgtttctgcctattcctgagactactgttgtcactggaagggctcctactgaagaagtggagtttagcagtaatcagcatgtgacactggaccacgagggagttggaagtggagtgcccttctcatttgaagctgatggcagtaaccagctgactctgatgacctcagggaaagtgtctcatagtgtggcatgggccattggagaaaacgggatacctttaattcctccattgtcacagcagaacatcggatttcggagtgctttgaagaaagcagatgccatctcatctattggcacatcaggactgacagacatgaaaaaattggccaagtgggcagcagagtccaagctcgacccaaatgaccccaacaatgcccctttgatgcagcttatctcggttgctaccagtggtgaatcctatgtccctgatttctttagactggagcagctgcaacaggagtttaactttgtttcagatcaagaattaaatagatccaaacgatttaggcttcttcatcttagaagccaagaggtgccagaattccgaaattataagcaagttccagtctatgaccgagaaattatggaaaaggtattccaggactatgagaaacggttacgagacagaaatgtaatagaaaccaaggaacacatagacacccatagggccatagtagccaagtacctccagcaggttagagaatcagtgataaatcgtttcttaattgcaaaacaatattttcttcttgctgatatgatagtagaagaagaagttcccaatatcagcattttgggcctaagccttttcaagctggcagaacaaaagcgaccactgcggccaaggagaaaaggtcggaagaaggtgacagcccaaaacctgtctgatggagacataaagctgctggtgaacattgtgcgagcttacgacattccagtgaggaagccggcagtgagcaaattccagcagccgtcgaggtcttcaaggatgttcagtgaaaagcatgctgcttccccaagcacgtacagcccaacccacaatgctgactaccccctcggccaggttttagtacgtccctttgtagaagtctcttttcaacgaacagtttgccatacgactacggctgaaggaccaaaccctagctggaatgaagaactagaacttccatttagggctcctaatggagattatagcacagccagtctgcagtcagtgaaagatgttgtgttcattaacatttttgatgaagtactgcatgatgtcttagaggatgaccgtgaaagaggaagtggaatccatactcgtattgagagacactggctgggatgtgtgaaaatgccatttagcacaatatatttccaagcaaggattgatggaacatttaaaatagatattcccccagttcttctgggctacagtaaggagcgaaatatgattcttgagcggggttttgattctgtccgaagcttaagtgaaggctcctacattaccctctttattaccattgagccccagctggttcctggagagtccattcgagaaaagtttgagtctcaggaagatgagaaattacttcaagcaactgagaagtttcaagctgaatgtgccttaaagtttccaaatcgtcagtgccttacaacagtaattgatataagcggaaaaactgtttttatcacacgttatctcaaacctttaaaccctcctcaggagctccttaatgtctaccccaataatctacaggcaactgcagaactggtggctcgatatgtgtccttgattcccttcttgcctgacactgtctcatttggtggtatctgtgacctctggagcacatctgatcaatttcttgatctcctggcaggggatgaagaagaacatgcagtactattgtgtaattactttctgtctctgggtaagaaggcctggctgttgatgggcaatgctattcctgagggtccaactgcctatgtgctaacttgggagcaaggtcgttatttaatatggaatccctgcagtggacatttttatggacaatttgatacattctgtcccttgaaaaatgtgggctgtttaataggtcctgacaatatttggtttaatattcaacgatatgaatctccactaaggataaattttgatgtcaccaggcccaagctatggaaatctttcttttcaagaagccttccatatcctggcctttccagtgttcagcctgaagagctaatttaccagcgctcagacaaagcagctgcagctgagctacaagacaggattgaaaaaatactaaaagaaaaaatcatggactggaggccacgccatctgactcggtggaataggtattgtacctctactctgcgtcacttcttgcctctgttagaaaaaagtcaaggagaagatgtagaagatgaccacagagcagaactgctaaaacagctgggagactacaggttctctggatttcctcttcacatgccttattctgaagtgaagcctttaattgacgctgtgtatagtactggagtacataatattgatgttcctaatgttgaatttgctttagctgtatacatacacccataccccaaaaatgttttgtctgtttggatctatgttgcctctcttatacgcaacaggtaatttttttcactgtactttctgtatcatgtaaaaactacacttaggatatgagaaaattttaaattatatgcatcacatcagaagaacatattattggcaaataataaaattatcaactgttttcaaactgtg

SEQ ID NO: 6323 - DNA, 630 bp, Homo sapiens
  source 1..630: mol_type = unassigned DNA
ctagaatgcagaatctgcaaagtgccttttgtaaagtttcttaagctatattctaatggatatgggctgacattaacaaggacccatcccagccaaaatgaatcccagggaagaaaaagtaaaaataattacagaggagttcattgaaaatgatgaggatgcagacatgggaagacagaataagaactcaaaggttcgaagacagccaagaaagaaacagaagccaactcctttctcccgagcctgctggcagatcctcccccacctctccgcaggagttcccctcctaggctgggagcatcccgtgcagggtaaatcttttcaagccaccaactgctgtccccaaggaaatggtgtccgaaaaatcccaccttggcaacccccaggagcctgtgcaggaggagcccaagacccgcctcctgagtatgacagtccggagaggcccacggagagagctggttgttaaaaagagcctgggcaggccaggcacggtgactcacgtctgtaatcccagcactttggaaggccgaggcgggtaaatcacctgaggttgggagttcaagaccagcctgaccaacatggagaaaccccatctctactaaaaatacaaaaaaattagccaggcgtggt

SEQ ID NO: 6324 - DNA, 5031 bp, Homo sapiens
  source 1..5031: mol_type = unassigned DNA
cttaggaacgggttgctaagctggtgtttttgctccaagacatggctgcagcttcccagggaggagcccaggggcatctccaacactcagcctttccctccggacccttttaaaagattcaacagcaccgtctctctccacttccatcctagaatgcagaatctgcaaagtgccttttgtaaagtttcttaaggtaaatcagtccctatgttctttgtcagggacccatcccagccaaaatgaatcccagggaagaaaaagtaaaaataattacagaggagttcattgaaaatgatgaggatgcagacatgggaagacagaataagaactcaaaggttcgaagacagccaagaaagaaacagaagccaactcctttctcccgagcctgctggcagatcctcccccacctctccgcaggagttcccctcctaggctgggagcatcccgtgcagggtaaatcttttcaagccaccaactgctgtccccaaggaaatggtgtccgaaaaatcccaccttggcaacccccaggagcctgtgcaggaggagcccaagacccgcctcctgagtatgacagtccggagaggcccacggagcttacctccaattccttcaacttccagaacaggctttgcagaattttccatgaggggacgcatgagggagaaattgcaagcagcgaggtccaaagcagaaagtgcattgctgcaggaaatccccactcctcggcccagacgcttacgaagtcccagtaagaaagaattggagactgaatttggcacagagccagggaaagaggtagaaaggactcaacaagaagttgactcccaaagttactcaagagtcaagttccatgattctgcacgaaaaatcaagcctaaaccccaggttccacctggcttcccttctgcagaagaggcctataacttctttactttcaactttgatcccgaaccagaaggatcagaggaaaaaccaaaagcaagacatagagcgggaactaatcaagaggaggaggaaggggaagaagaagaaccacctgcacaaggaggaggaaaggaaatggatgaggaagaactgcttaatggtgatgatgccgaggacttcctattgggcttagatcacgtggctgacgattttgtagcagtcagacctgcagattatgaaagcatccatgatcggctgcagatggaaagagaaatgctcttcatacccagtaggcagacagtccctacatataaaaagcttcctgagaatgtacagcccaggttcctggaagatgaaggcctttacaccggggtaagaccagaggtggcacgcaccaatcagaacatcatggagaacagattgctgatgcaggaccccgaaagaagatggtttggagatgacggcaggatcctagctctgccaaaccccatcaagccatttccttcaaggccgccagtactaacacaggagcagagcattaaggcagagcttgaaacactgtataaaaaggctgtaaaatacgttcacagtagtcagcatgtgatcagatctggagaccctcctggaaatttccaactggacattgatatttcagggttaatcttcactcatcatccctgttttagccgagagcatgttttggcagccaagctggcccagttatatgaccagtaccttgcaagacaccagagaaacaaggcgaaatttcttactgataagctccaagctttaagaaatgctgttcagactggccttgatccagaaaaacctcatcagtctctcgataccatccaaaaaaccatcaatgagtataaatctgaaattcgacaaacaagaaaattccgtgatgctgaacaagaaaaagatagaacattgcttaagactatcataaaagtttggaaagagatgaaatcccttcgagagttccagagatttacaaatactcccttgaaacttgttttgagaaaggaaaaagctgaccagaaagcagatgaagaagcatatgaagcagaaattcaagctgaaataagtgaactgttagaagagcacacggaggagtacgcacagaagatggaagaatacagaacgtcgttacaacagtggaaggcctggaggaaagtgcaaagggccaagaagaagaaaaggaaacaagcagcagaagaacatcccggtgatgagattgcagagccgtatcccgaggaggaccttgtgaagcccagccctccagagcccactgatcgggcagtgatagagcaggaggtgagggagagagcagcccagagcaggaggaggccttgggagcccacgctggtcccggagctaagcctggcaggaagcgtaacacccaatgaccagtgccccagagcggaggtctcgagaagggaggatgtaaagaagcgctcagtgtacttaaaagtgctgttcaacaacaaggaggtgtccaggacagtcagtcggccactaggagcagacttccgagttcactttgggcagattttcaatttgcaaatagtcaactggccggagagtttaacacttcaggtctatgaaactgtcggacacagtagtcccaccttgctagcagaagtgtttctgcctattcctgagactactgttgtcactggaagggctcctactgaagaagtggagtttagcagtaatcagcatgtgacactggaccacgagggagttggaagtggagtgcccttctcatttgaagctgatggcagtaaccagctgactctgatgacctcagggaaagtgtctcatagtgtggcatgggccattggagaaaacgggatacctttaattcctccattgtcacagcagaacatcggatttcggagtgctttgaagaaagcagatgccatctcatctattggcacatcaggactgacagacatgaaaaaattggccaagtgggcagcagagtccaagctcgacccaaatgaccccaacaatgcccctttgatgcagcttatctcggttgctaccagtggtgaatcctatgtccctgatttctttagactggagcagctgcaacaggagtttaactttgtttcagatcaagaattaaatagatccaaacgatttaggcttcttcatcttagaagccaagaggtgccagaattccgaaattataagcaagttccagtctatgaccgagaaattatggaaaaggtattccaggactatgagaaacggttacgagacagaaatgtaatagaaaccaaggaacacatagacacccatagggccatagtagccaagtacctccagcaggttagagaatcagtgataaatcgtttcttaattgcaaaacaatattttcttcttgctgatatgatagtagaagaagaagttcccaatatcagcattttgggcctaagccttttcaagctggcagaacaaaagcgaccactgcggccaaggagaaaaggtcggaagaaggtgacagcccaaaacctgtctgatggagacataaagctgctggtgaacattgtgcgagcttacgacattccagtgaggaagccggcagtgagcaaattccagcagccgtcgaggtcttcaaggatgttcagtgaaaagcatgctgcttccccaagcacgtacagcccaacccacaatgctgactaccccctcggccaggttttagtacgtccctttgtagaagtctcttttcaacgaacagtttgccatacgactacggctgaaggaccaaaccctagctggaatgaagaactagaacttccatttagggctcctaatggagattatagcacagccagtctgcagtcagtgaaagatgttgtgttcattaacatttttgatgaagtactgcatgatgtcttagaggatgaccgtgaaagaggaagtggaatccatactcgtattgagagacactggctgggatgtgtgaaaatgccatttagcacaatatatttccaagcaaggtttgagtctcaggaagatgagaaattacttcaagcaactgagaagtttcaagctgaatgtgccttaaagtttccaaatcgtcagtgccttacaacagtaattgatataagcggaaaaactgtttttatcacacgttatctcaaacctttaaaccctcctcaggagctccttaatgtctaccccaataatctacaggcaactgcagaactggtggctcgatatgtgtccttgattcccttcttgcctgacactgtctcatttggtggtatctgtgacctctggagcacatctgatcaatttcttgatctcctggcaggggatgaagaagaacatgcagtactattgtgtaattactttctgtctctgggtaagaaggcctggctgttgatgggcaatgctattcctgagggtccaactgcctatgtgctaacttgggagcaaggtcgttatttaatatggaatccctgcagtggacatttttatggacaatttgatacattctgtcccttgaaaaatgtgggctgtttaataggtcctgacaatatttggtttaatattcaacgatatgaatctccactaaggataaattttgatgtcaccaggcccaagctatggaaatctttcttttcaagaagccttccatatcctggcctttccagtgttcagcctgaagagctaatttaccagcgctcagacaaagcagctgcagctgagctacaagacaggattgaaaaaatactaaaagaaaaaatcatggactggaggccacgccatctgactcggtggaataggtattgtacctctactctgcgtcacttcttgcctctgttagaaaaaagtcaaggagaagatgtagaagatgaccacagagcagaactgctaaaacagctgggagactacaggttctctggatttcctcttcacatgccttattctgaagtgaagcctttaattgacgctgtgtatagtactggagtacataatattgatgttcctaatgttgaatttgctttagctgtatacatacacccataccccaaaaatgttttgtctgtttggatctatgttgcctctcttatacgcaacaggtaa

SEQ ID NO: 6325 - DNA, 1659 bp, Homo sapiens
  source 1..1659: mol_type = unassigned DNA
tttttgctccaagacatggctgcagcttcccagggaggagcccaggggcatctccaacactcagcctttccctccggacccttttaaaagattcaacagcaccgtctctctccacttccatcctagaatgcagaatctgcaaagtgccttttgtaaagtttcttaagggacccatcccagccaaaatgaatcccagggaagaaaaagtaaaaataattacagaggagttcattgaaaatgatgaggatgcagacatgggaagacagaataagaactcaaaggttcgaagacagccaagaaagaaacagaagccaactcctttctcccgagcctgctggcagatcctcccccacctctccgcaggagttcccctcctaggctgggagcatcccgtgcagggtaaatcttttcaagccaccaactgctgtccccaaggaaatggtgtccgaaaaatcccaccttggcaacccccaggagcctgtgcaggaggagcccaagacccgcctcctgagtatgacagtccggagaggcccacggagagagctggttgttaaaaagagcctgggcaggccaggcacggtgactcacgtctgtaatcccagcactttggaaggccgaggcgggtaaatcacctgaggttgggagttcaagaccagcctgaccaacatggagaaaccccatctctactaaaaatacaaaaaaattagccaggcgtggtggcgcatgcctgtaatcccagctacttgggaggctgaggcatgagaattgcttgaacctgggaggtggaggttgcagtgagccgagatcggagcactgcactccagcctaggcaacagagcaagactccatctcagaaaacaaacaaacaaaaaagagcctggaacctcctcccctctctcttgctccctctctcaccatgcgacacacctgtttccccttccccttctgacataagtgaaagcttcctaaggcctcaccagaggcagatgctggcaccatgcttattgcacagtctgcagaacagtgagccaaaataaacctcttttctttataaattacccagtctcagatattcctttatagcaatgcaaaatggactaacaatacataagttagggagtgttaattagaatggaaattaaatatgcagaaactcaaaggaagatgaaattgttagggaagacatatgtgttaacctagtgaggcttgaatcagatgtttggaagaaatgagggaggtttctgaggctcctggtgaccttgccattgaggacacatatacttctccccctacacacgccttttcttcttccccagtacaatgaacattaggaattacctgctcattgtagggaaaatgaccacccttcaggcattgcttttcatgaaaagtggattagacaagaggagaagtggttacactttttaattgttacataattgttagactgttttccctatggcaaagttgggaaataagtaactgttggaaactagaggcctttggaagcaagtagactcttagattggaaaaatgtggttctaatctaaaagcaatgatacaatgagagctgttatgaattaataaaaacagaaccaaaatttatctcatatggctgtttctttttctaaatgctcaaaattatttattactaccaaa

SEQ ID NO: 6326 - DNA, 1949 bp, Homo sapiens
  source 1..1949: mol_type = unassigned DNA
tttttgctccaagacatggctgcagcttcccagggaggagcccaggggcatctccaacactcagcctttccctccggacccttttaaaagattcaacagcaccgtctctctccacttccatcctagaatgcagaatctgcaaagtgccttttgtaaagtttcttaagggacccatcccagccaaaatgaatcccagggaagaaaaagtaaaaataattacagaggagttcattgaaaatgatgaggatgcagacatgggaagacagaataagaactcaaaggttcgaagacagccaagaaagaaacagccaccaactgctgtccccaaggaaatggtgtccgaaaaatcccaccttggcaacccccaggagcctgtgcaggaggagcccaagacccgcctcctgagtatgacagtccggagaggcccacggagcttacctccaattccttcaacttccagaacaggctttgcagaattttccatgaggggacgcatgagggagaaattgcaagcagcgaggtccaaagcagaaagtgcattgctgcaggaaatccccactcctcggcccagacgcttacgaagtcccagtaagaaagaattggagactgaatttggcacagagccagggaaagaggtagaaaggactcaacaagaagttgactcccaaagttactcaagagtcaagttccatgattctgcacgaaaaatcaagcctaaaccccaggttccacctggcttcccttctgcagaagaggcctataacttctttactttcaactttgatcccgaaccagaaggatcagaggaaaaaccaaaagcaagacatagagcgggaactaatcaagaggaggaggaaggggaagaagaagaaccacctgcacaaggaggaggaaaggaaatggatgaggaagaactgcttaatggtgatgatgccgaggacttcctattgggcttagatcacgtggctgacgattttgtagcagtcagacctgcagattatgaaagcatccatgatcggctgcagatggaaagagaaatgctcttcatacccagtaggcagacagtccctacatataaaaagcttcctgagaatgtacagcccaggttcctggaagatgaaggcctttacaccggggtaagaccagaggtggcacgcaccaatcagaacatcatggagaacagattgctgatgcaggaccccgaaagaagatggtttggagatgacggcaggatcctagctctgccaaaccccatcaagccatttccttcaaggccgccagtactaacacaggagcagagcattaaggcagagcttgaaacactgtataaaaaggctgtaaaatacgttcacagtagtcagcatgtgatcagatctggagaccctcctggaaatttccaactggacattgatatttcagggttaatcttcactcatcatccctgttttagccgagagcatgttttggcagccaagctggcccagttatatgaccagtaccttgcaagacaccagagaaacaaggcgaaatttcttactgataagctccaagctttaagaaatgctgttcagactggccttgatccagaaaaacctcatcagtctctcgataccatccaaaaaaccatcaatgagtataaatctgaaattcgacaaacaagaaaattccgtgatgctgaacaagaaaaagatagaacattgcttaagactatcataaaagtttggaaagagatgaaatcccttcgagagttccagagatttacaaatactcccttgaaacttgttttgagaaaggaaaaagctgaccagaaagcagatgaagaagcatatgaagcagaaattcaagctgaaataagtgaactgttagaagagcacacggaggagtacgcacagaagatggaagaatacagaacgtcgttacaacagtggaaggcctggaggaaagtgcaa

SEQ ID NO: 6327 - DNA, 1474 bp, Homo sapiens
  source 1..1474: mol_type = unassigned DNA
gcagcttcccagggaggagcccaggggcatctccaacactcagcctttccctccggacccttttaaaagattcaacagcaccgtctctctccacttccatcctagaatgcagaatctgcaaagtgccttttgtaaagtttcttaagggacccatcccagccaaaatgaatcccagggaagaaaaagtaaaaataattacagaggagttcattgaaaatgatgaggatgcagacatgggaagacagaataagaactcaaaggttcgaagacagccaagaaagaaacagccaccaactgctgtccccaaggaaatggtgtccgaaaaatcccaccttggcaacccccaggagcctgtgcaggaggagcccaagacccgcctcctgagtatgacagtccggagaggcccacggagagagctggttgttaaaaagagcctgggcaggccaggcacggtgactcacgtctgtaatcccagcactttggaaggccgaggcgggtaaatcacctgaggttgggagttcaagaccagcctgaccaacatggagaaaccccatctctactaaaaatacaaaaaaattagccaggcgtggtggcgcatgcctgtaatcccagctacttgggaggctgaggcatgagaattgcttgaacctgggaggtggaggttgcagtgagccgagatcggagcactgcactccagcctaggcaacagagcaagactccatctcagaaaacaaacaaacaaaaaagagcctggaacctcctcccctctctcttgctccctctctcaccatgcgacacacctgtttccccttccccttctgacataagtgaaagcttcctaaggcctcaccagaggcagatgctggcaccatgcttattgcacagtctgcagaacagtgagccaaaataaacctcttttctttataaattacccagtctcagatattcctttatagcaatgcaaaatggactaacaatacataagttagggagtgttaattagaatggaaattaaatatgcagaaactcaaaggaagatgaaattgttagggaagacatatgtgttaacctagtgaggcttgaatcagatgtttggaagaaatgagggaggtttctgaggctcctggtgaccttgccattgaggacacatatacttctccccctacacacgccttttcttcttccccagtacaatgaacattaggaattacctgctcattgtagggaaaatgaccacccttcaggcattgcttttcatgaaaagtggattagacaagaggagaagtggttacactttttaattgttacataattgttagactgttttccctatggcaaagttgggaaataagtaactgttggaaactagaggcctttggaagcaagtagactcttagattggaaaaatgtggttctaatctaaaagcaatgatacaatgagagctgttatgaattaataaaaacagaaccaaaa

SEQ ID NO: 6328 - DNA, 1153 bp, Homo sapiens
  source 1..1153: mol_type = unassigned DNA
cgcgcgactacgctcataaaaggaaaaaaaagcgtgtgcggttctcgacgtgccgccaatcttcgaacgcaggtctgtgatcatccgcagactccgaaaaagggttcgaggaacgcgcctgctcccctcgtcgcagtttccagcccgacgagcttgttttgtcccggactcggtgcccctgtagacaatggccctcgtgtctgccgattcccgcattgcagaacttctcacagagctccatcagctgatcaaacaaacccaggaagagcgttcgcggagcgaacacaacttagtgaacatccagaagacccatgagcggatgcagacagagaacaagatttctccctattaccggacaaagctgcgtggcctctacacaaccgccaaggccgatgcagaggctgagtgcaacatccttcggaaagctctggacaagatcgcggaaatcaagtctctgttggaagagaggcggattgcggccaagattgccggtctctacaatgactcggagccaccccggaagaccatgcgcagaggggtgctgatgaccctgctgcagcagtcggccatgaccctgcccctgtggatcgggaagcctggtgacaagcccccacccctctgtggggccatccctgcctcaggagactacgtggccagacctggagacaaggtggctgcccgggtgaaggccgtggatggggacgagcagtggatcctggccgaggtggtcagttacagccatgccaccaacaagtatgaggtagatgacatcgatgaagaaggcaaagagagacacaccctgagccggcgccgtgtcatcccgctgccccagtggaaggccaacccggagacggaccctgaggccttgttccagaaggagcagctcgtgctggccctgtatccccagactacctgcttctaccgcgccctgatccatgcgcccccacagcggccccaggatgactactcggtcctgtttgaagacacctcctatgcagatggctattcccctcccctcaatgtggctcagagatacgtggtggcttgtaaggaacccaagaaaaagtgatgccgcctggcagactcgccatcccccaacgacacagggcaggacagcagaggacgtgctgggattaaacacattccccctcta

SEQ ID NO: 6329 - DNA, 1993 bp, Homo sapiens
  source 1..1993: mol_type = unassigned DNA
ggctggggaggagcaggaacagtcaggactggaatctagctttgctccaaagccagctcttaattaccaacatggggatgggggtggcgtgttcctggccctcattttccgggagaggggtaactcccccgattttggcccccacatccctgagaaccttggggtctggctgtaggaggtaggggagctctgaggggtccgcgctggctagttcctgagagagcgttaaaagtagattctcctttcgctccaactttctcggtgtctcaaacactctcctgccttctgggcccattgggcacaccgccacccaatccggggacccccggagactcgccagctctccaggatgggaatttcgtgatgttccctgcctgagcttcggggagggcgggggagtgctgtaaggggctatcgcgcaagtgcagaccctctgcttctgccgcaaacggcgggcctcacctggacccggggactcttcaacgaggggcgctagcctggcccgactgggcgagtccccgcgtccctgcccgttccgtcgctcagttccacgacacgctcccctgccgccccgcctgttcgcgggtgggtgggcgcttccctcggctccccgtgacactttgcagacgctccccggcgccgggcatgggcgccgccgccgtcggtccccgagccggattccgcgagcggtgcccctgaggccctcggctgctggggtccgtaggaagccgcgccatgaatgaccggagcagtcggaggcggacaatgaaggacgatgagaccttcgagatctccattcccttcgatgaggcaccccacctagacccacagatcttttacagtctgagcccctctcggagaaacttcgaggagcctccggaggctgcgtcctccgccctggctctgatgaacagcgtcaagacccagctgcacatggctctggagaggaactcctggctgcagaagcgcatcgaggacctggaggaagagagggacttcctgcggtgccagctggacaaattcatctcttctgctcggatggaggcagaggaccactgccggatgaagcctgggcccaggcggatggagggggacagccgtggtggggctgggggcgaggcctcggaccctgagtcagcagcctcctccctcagcggagcgtccgaagaaggcagcgccagtgagaggaggcggcagaagcagaagggaggtgctagtcggaggcgctttgggaagcccaaggcccgggagaggcagcgagtgaaggacgccgacggggtcctctgccggtacaagaagatcctgggcaccttccagaagctcaagagcatgtcgcgggccttcgagcaccaccgcgtggacaggaacaccgtggcgctgaccacgcccatcgccgagctgctcattgtggcccccgagaagctggccgaggtgggcgagttcgacccctccaaggagcgcctgctcgagtactcccgccgctgctttctggccctggacgacgagacgctcaagaaggtgcaggcgctcaagaagagcaagctgctgctgcccatcacctaccgcttcaagcggtgatcgcaccacgcctccgcgcctccacccgggccttcctcccccgtggaccccggtggatgacctgcccctctccccgccgcgcccctgcccctcctcctcgctccctgggttgggggctcccttagccgggcccccaagcgcgacggccccggaccggccgcggccccttcccgaacgccggcacccccttccgcttgggctgcccagccctgtcctcgccgggccccttcctcctggaaaaccaggcaggcgggtgcccccccctcgagtgggggactgtacagaccccgtctccgccctggccccgcggaggagctgcccacctgattcccggacagacctccccaactccgcgtgagacagagaattattcagataatttaaattaaaaaacgacgtgaaaatttggaataaa

SEQ ID NO: 6330 - DNA, 2259 bp, Homo sapiens
  source 1..2259: mol_type = unassigned DNA
gtcctgtatctatggagacggcaatatggaggcgatcttacatttctttgatttcatctgaacgtccagttcacaattggagctccatactcagagtgctccctttggactgtgtcccaaggacatgatgctcacccaggctccaagctccgtcgtgaggtccaggaacagcaggaaccacaccgtgaactctggtggatcctgcctgagtgccagcacagtggccatccctgccatcaacgacagcagtgcagccatgagtgcctgcagcaccatcagcgcccagcccgcaagctccatggacactcagatgcactccccaaagaagcaggagagagtgaacaagagggtcatctggggcattgaggtggctgaggagctgcattggaaaggctgggagctaggaaaggagaccacaaggaatctggttctgaaaaatcgatccttgaaactccagaagatgaagtacaggtaccagtataagggatcaaggacccagtgccacagccttgagccccgaaagcaggctctcttcaaaacaaaacaaaacaaacaaaaaaaacctttaacatgccatataaaagccagtgagtgtttaaaatacgtgcagtatgaataattatgcagctataatccattatttttcattgtggtatagtgtcccaatgtgtgcctgtaccataatgtattcatccagaatgaaggaagtttgggctgtttctatttgggactgttggcattcgtgtatatgtgtccagttacataagtacaagagtttttctggggaataccaggtactatgaaggctcacgtgattttggagtcttatgaaggttttttttttttttttcctgcgtagttgttaaattggtgaccttgcgggatggaaccttctattccaccaccttgctccaccttctgtcttttctggggaatagacgcaggagtagaattgcggaggcttgggccatgtacctgttcacttgctgtagataaaccaaactatttcccaaagtgcatggatttctttagacacccaccagcagcattagagagttcccattcctccacatccttaccaataactgctattgtcagaatttaaaatttttgccagtaatggtaacttgtggttttaatttgcatttccctgattactaatgaatgaggatgagtgtctttttgtaggttattgacactttgcatttcttcatgtgtgaaatttatgatcaagtctgtggccatttttctcttacattatcttgtcttttttctttttggtataagttcttatcccaattacaaactctttgccagttatgcgttgtggatatcttctctcatcttatgatttgtctttactccctttattgtgtcttttgaagaataaaagttcaaagttgaattttaaaggtatcaactttatcagtctttttattttatgattggtgcttttttatgcttctcctaagaagtccttctctacccctaggtcattaagatattttcctctagtatcttctaaagactttatatttttgccttttatatttgtcttttgtctatatggaattgatttttatgaatagtaagtcttgatagctggtagtatacgtcctcctacttaattcttcttcaagattgtcttggctattcttggccctccctttgatctcttacataaatattcaaatcagcttatcatacatgcacataaaacacttcttgagattttgattgggatttaattggacctatagatgaatatgaggagaaatgatatcattataatattgagtcttttactccatgaacatgggctatttctgtattcattaggttatctttcctgtctctcaatagagtgtaaagttttctccatagacatttagcacatccttagttagatttattcataagtattttatatttttgctgttgttatatatgacatattttttagttgttttatttctgtttgttgctagtttttaaaatgtcatttttatataggtattatgttcagtgatcttggcaaatcctcttattctaataatttatttgttaattttcttgttttttcatgcacacatttgtattttaaatggaaaatgacatttttttttctttctagtccttacacctttggctttccttactgcattgttaaatagaaaagtgttgaacagaagtggttatagaggcatctttgttttgtttatcatctcagagtaaaggactgcaatgtttcactattaa

SEQ ID NO: 6331 - DNA, 1174 bp, Homo sapiens
  source 1..1174: mol_type = unassigned DNA
ggaaaacagacatgtatgcatacatagcatctggcatatacatagcatctggcatatatacaaatatatgtgccacatatatttgcatatgatttcagctacagtcatcgaggatccctctgctctggagatggattgacttatgctttgattgatttatttcagtgatgtttaccttaaccggttgtagactggtggagaaaacccagaaggtggagaatccatcagtctcatttgcctcttctttcccccttattcctcttctcctaagaggcaagagtgttcagaagaaacaagcagagagtaaaagccagataaaggtaatgcacacacttcagtaacacccactggagcttgctgagcagtgccaagtgtggccatggaggggcctagtggggtgggccttgtccccaagtccctctttggagtgccttccctgagggtgagtccctgggctcccaggcaaagccctggatctcgtgtacagcctcattcctcatggtgccaggtagcacctgttgccagagctgggaagcagaccctctcctccatgacaaggatggccatgagagtctcctccctcagcctctctttctcatgtcactcctgtctcctctcccctctgctctcttcccagctccatactcagagtgctccctttggactgtgtcccaaggacatgatgctcacccaggctccaagctccgtcgtgaggtccaggaacagcaggaaccacaccgtgaactctggtggatcctgcctgagtgccagcacagtggccatccctgccatcaacgacagcagtgcagccatgagtgcctgcagcaccatcagcgcccagcccgcaagctccatggacactcagatgcactccccaaagaagcaggagagagtgaacaagagggtcatctggggcattgaggtggctgaggagctgcattggaaaggctgggagctaggaaaggagaccacaaggaatctggttctgaaaaatcgatccttgaaactccagaagatgaagtacaggtaccagtataagggatcaaggacccagtgccacagccttgagccccgaaagcaggctctcttcaaaacaaaacaaaacaaacaaaaaaaacctttaacatgccatataaaagccagtgagtgtttaaaatacgtgcagtatgaataa

SEQ ID NO: 6332 - DNA, 5953 bp, Homo sapiens
  source 1..5953: mol_type = unassigned DNA
gtcctgtatctatggagacggcaatatggaggcgatcttacatttctttgatttcatctgaacgtccagttcacaattggagtgatgtttaccttaaccggttgtagactggtggagaaaacccagaaggtggagaatccatcagtctcatttgcctcttctttcccccttattcctcttctcctaagaggcaagagtgttcagaagaaacaagcagagagtaaaagccagataaagctccatactcagagtgctccctttggactgtgtcccaaggacatgatgctcacccaggctccaagctccgtcgtgaggtccaggaacagcaggaaccacaccgtgaactctggtggatcctgcctgagtgccagcacagtggccatccctgccatcaacgacagcagtgcagccatgagtgcctgcagcaccatcagcgcccagcccgcaagctccatggacactcagatgcactccccaaagaagcaggagagagtgaacaagagggtcatctggggcattgaggtggctgaggagctgcattggaaaggctgggagctaggaaaggagaccacaaggaatctggttctgaaaaatcgatccttgaaactccagaagatgaagtacaggccccccaagaccaagttcttcttcacggtcatccctcagcccatcttcctgagcccaggcataaccctcacgctccccatcgtcttccggcctctggaggcgaaggagtacatggaccagctgtggtttgagaaagcggaggggatgttctgtgtcggcctacgggccaccctgccctgccacaggctgatctgccgcccaccatccctgcagctgcccatgtgtgctgtgggagatacgactgaggcctttttctgcctggataatgtgggggacctgcccaccttcttcacctgggagttctccagcccattccagatgctgcccgccacggggctcctggagccaggccaggcctctcagatcaaggtgacctttcagccccttacagccgtcatctacgaggtgcaggccacgtgctggtacggggcgggcagccggcagaggagcagcatccagctgcaggctgtggccaagtgcgcccagctgctggtgagcataaagcacaagtgcccggaggaccaggatgccgagggcttccagaagctgttgtactttggctctgttgctgtgggctgcacctcggagaggcagatcaggctacacaacccgtcggcggtaaatgcccccttcaggattgaaatttccccggatgaactggccgaagaccaggccttctcatgccccacggcccatggcatcgtgcttccgggagagaagaaatgtgtgtcggtgttcttccaccccaagactctggacaccagaactgtggactactgctccatcatgccttctggctgtgcctccaagaccctgcttaaagtcgttggtttctgtagaggccctgctgtgtccctgcagcactactgtgtcaacttcagctgggtcaaccttggggagcgctccgagcagcccctgtggattgagaaccaatcggactgcacggcccacttccagtttgccatcgactgcttggagagtgtctttaccatcaggcctgcctttgggacgctggtgggcaaggcccgtatgaccctgcactgtgccttccagcccactcaccccatcatctgctttcggcgtgtggcctgtctcatccaccaccaggacccactgttcctggacctgatggggacctgccactcggacagcaccaagccagccatcctgaagcctcagcacctcacctggtaccgcacacacctggcccggggcctgacgctctacccccctgacatcctggatgccatgctgaaggagaagaagctggcacaggaccagaacggggctctcatgattcccatccaggatctggaggacatgccggccccgcagtacccttatatcccccccatgaccgagttcttcttcgacggcaccagcgacataaccatcttccccccgcccatcagtgtagagcctgtcgaggtagacttcggtgcctgcccagggcctgaggcccccaaccctgtacccctgtgcctgatgaaccacaccaagggcaagatcatggtggtctggacgcgaaggtctgactgccccttctgggtgactccagagagctgcgacgtgcccccactcaagtccatggccatgcgcctgcacttccagccgcctcaccccaactgcctttacacggtggagctcgaagccttcgccatctataaggtcctgcagagctacagtaatattgaggaggactgcaccatgtgcccatcctggtgcctgacggtgcgggcacgaggccacagctatttcgctggctttgagcaccacatcccccagtattccctagatgtccccaagctatttccagcagtgtcctccggtgagcccacctaccgcagcctgctcctggtcaacaaagactgcaagctgctgaccttcagcctggccccccagagaggctcagacgtcatccttcggcccacttcgggccttgtggcacccggggcccaccagatcatcctcatctgcacctaccctgagggcagctcctggaagcagcacactttctatctgcagtgcaatgcttccccccagtatctcaaggaggtgagcatgtacagccgggaggagccactgcagctgaagctggacacccacaaaagcctctacttcaagcccacctgggtgggctgctcctccaccagccccttcaccttccgcaacccctcgcgtctgcccctgcagttcgagtggagggtctctgagcagcatcgaaagctgctggctgtccagccctccagggggctaatccagcccaacgagagacttacgctgacgtggaccttcagccctttggaggagaccaagtacctgttccaagtggggatgtgggtctgggaagccggcctgtccccaaatgccaaccccgctgccaccacccactacatgctccggctggtgggcgttgggctcaccagcagcctctctgcaaaggaaaaggagctggcctttgggaatgtgctggtgaacagcaagcagtccaggttccttgtcctcctgaatgacggcaactgcaccctctattaccgcctctacctggagcagggcagccctgaggccgttgacaaccaccccctcgctctgcagctggaccgaacagaggggagcatgccaccccggtcccaggacaccatctgcctgactgcctgtcccaagcagcggtcccagtactcctggaccatcacctactctctcctttcccacagagataacaaggctggggagaagcaggagctgtgctgcgtctccctggtggccgtgtaccccttgctttccatcctggatgtcagctccatgggcagtgctgagggtatcacccggaagcacctgtggcgcctcttctctctggacctgcttaacagttacttggagcgtgaccccaccccctgtgagctcacctacaaggtgcccacccggcacagcatgagccagatcccccccgtcctcacccctttaaggcttgacttcaatttcggggccgcaccattcaaggccccaccttccgtggtattcctggccctgaagaacagcggagtggtgtccctggactgggccttcctccttccaagtgaccagcggattgacgtggagctctgggcagagcaagcagagttgaattccactgagctccaccagatgcgcgtgcaggacaattgcctcttctccatcagccccaaggctgggagcctgagtcctgggcaggagcagatggtggagttaaaatacagccacctgttcatcggtactgatcacctcccagtgctcttcaaggtgtcccatggccgggagatcctgctaaatttcataggtgtgacagtgaagccggagcagaagtatgtgcacttcacctctactacccaccagttcatccccattcccattggtgacacgctacccccacggcagatttatgagctgtataatggtggctcagtgcccgtgacatatgaggtccagaccgatgtcctgtcacaggttcaggaaaaaaattttgatcaccccatcttttgctgcctcaaccccaaaggggagatccagccaggcagcactgcccgggtcttgtggatcttctcacctatcgaggccaagacctacacggtggacgtgcccatacacatcctgggatggaactcggccctcatccacttccagggagtgggctacaacccccatatgatgggggacacagccccattccacaacatctcctcgtgggacaacagttccatacactctaggctggtggtgcctggacagaatgtcttcctgtcccagtctcatatttccctgggaaacatacctgtgcagagcaagtgcagccgcctgctcttcctcaacaacatctccaagaacgaggaaattgccttctcctggcagccaagtcctctagattttggggaggtgtctgtgagtcccatgataggggtggtggctcctgaagagacggtcccatttgtggtgaccttgagggcctctgtgcatgccagcttctacagtgcagacctggtatgcaagctgtactcgcagcagctcatgaggcagtatcacaaggagctgcaggagtggaaggacgagaaggtgcggcaggaagtggagttcaccatcaccgacatgaaagtgaagaagagaacatgctgcacagcctgtgaacctgcgaggaagtacaagacactgcctcccatcaagaaccagcagtctgtcagccggcctgccagctggaaactgcagaccccaaaggaggaggtgtcctggccctgcccccagccaccctcgccaggcatgctctgcctgggccttactgcccgagcccatgccaccgactactttctggctaacttcttctcagagtttccctgccactttttgcaccgggagctgccaaagaggaaggcccccagggaagagtcagagacttctgaggaaaaatcccctaacaagtggggccctgtttccaagcagaagaagcagctcctggttgacattctcaccacaataatcaggggcctgctggaagacaagaacttccatgaggctgtggaccaaagcctggtggagcaggtgccgtacttccgccaattctggaatgagcagtcaactaagttcatggaccagaaaaacagcctgtacttaatgccaatcctgcctgtaccctccagcagctgggaggatgggaagggcaagcagccgaaggaagacagaccagagcactatccagggttgggaaagaaggaagagggggaggaggagaagggtgaagaggaagaagaagagttggaggaggaagaggaggaagaagaggagacagaagaggaggagttgggcaaggaggagatagaggagaaggaggaggagagggatgagaaggaagagaaagtgagctgggcgggcatcgggcccacaccacagcctgagtcccaggagtccatgcaatggcagtggcaacagcagctgaatgtcatggtgaaggaggagcaagaacaggacgagaaggaggccatcagaaggctcccggccttcgccaacctgcaggaggcgctgctggagaacatgatccagaacatcctggtggaggcgagccgcggggaggtggtactcacctcgcggccacgcgtcatcgccctgccgccgttctgcgtgcccaggagtctgaccccggacacgctgctgccgacgcagcaagcagaggtactccacccggtggtgccacttcctaccgaccttccgtaaatgcccgcgcccagcctctccgacatgccgctaggggtcacgcctggccccctctccaccgccagtaaaagcatctagtcttttttctgta

SEQ ID NO: 6333 - DNA, 2701 bp, Homo sapiens
  source 1..2701: mol_type = unassigned DNA
atctatggagacggcaatatggaggcgatgtaagttctgagcgttagtcccaaggtcccagggtctcagggagctccatactcagagtgctccctttggactgtgtcccaaggacatgatgctcacccaggctccaagctccgtcgtgaggtccaggaacagcaggaaccacaccgtgaactctggtggatcctgcctgagtgccagcacagtggccatccctgccatcaacgacagcagtgcagccatgagtgcctgcagcaccatcagcgcccagcccgcaagctccatggacactcagatgcactccccaaagaagcaggagagagtgaacaagagggtcatctggggcattgaggtggctgaggagctgcattggaaaggctgggagctaggaaaggagaccacaaggaatctggttctgaaaaatcgatccttgaaactccagaagatgaagtacaggccccccaagaccaagttcttcttcacggtcatccctcagcccatcttcctgagcccaggcataaccctcacgctccccatcgtcttccggcctctggaggcgaaggagtacatggaccagctgtggtttgagaaagcggaggggatgttctgtgtcggcctacgggccaccctgccctgccacaggctgatctgccgcccaccatccctgcagctgcccatgtgtgctgtgggagatacgactgaggcctttttctgcctggataatgtgggggacctgcccaccttcttcacctgggagttctccagcccattccagatgctgcccgccacggggctcctggagccaggccaggcctctcagatcaaggtgacctttcagccccttacagccgtcatctacgaggtgcaggccacgtgctggtacggggcgggcagccggcagaggagcagcatccagctgcaggctgtggccaagtgcgcccagctgctggtgagcataaagcacaagtgcccggaggaccaggatgccgagggcttccagaagctgttgtactttggctctgttgctgtgggctgcacctcggagaggcagatcaggctacacaacccgtcggcggtaaatgcccccttcaggattgaaatttccccggatgaactggccgaagaccaggccttctcatgccccacggcccatggcatcgtgcttccgggagagaagaaatgtgtgtcggtgttcttccaccccaagactctggacaccagaactgtggactactgctccatcatgccttctggctgtgcctccaagaccctgcttaaagtcgttggtttctgtagaggccctgctgtgtccctgcagcactactgtgtcaacttcagctgggtcaaccttggggagcgctccgagcagcccctgtggattgagaaccaatcggactgcacggcccacttccagtttgccatcgactgcttggagagtgtctttaccatcaggcctgcctttgggacgctggtgggcaaggcccgtatgaccctgcactgtgccttccagcccactcaccccatcatctgctttcggcgtgtggcctgtctcatccaccaccaggacccactgttcctggacctgatggggacctgccactcggacagcaccaagccagccatcctgaagcctcagcacctcacctggtaccgcacacacctggcccggggcctgacgctctacccccctgacatcctggatgccatgctgaaggagaagaagctggcacaggaccagaacggggctctcatgattcccatccaggatctggaggacatgccggccccgcagtacccttatatcccccccatgaccgagttcttcttcgacggcaccagcgacataaccatcttccccccgcccatcagtgtagagcctgtcgaggtagacttcggtgcctgcccagggcctgaggcccccaaccctgtacccctgtgcctgatgaaccacaccaagggcaagatcatggtggtctggacgcgaaggtctgactgccccttctgggtgactccagagagctgcgacgtgcccccactcaagtccatggccatgcgcctgcacttccagccgcctcaccccaactgcctttacacggtggagctcgaagccttcgccatctataaggtgtgtgcacgcaatgagagggaggaatgcggggtctctgctaggagcctgagtggcttggtggggtggcaggaagtgaccgagggcagcttcaggctccatcctctgcgtgccaggctttctcttggctggacagtgacccctatgagtttgtctcctccaaagctcctggcctagctcggcccatctgattttctcattcttatgtaagtctcccctcccctccaagggagaactcagctgagatcaagctgtttgggaaaactgggtgcacagggagatactccctggggctcctggctaggaggcctcctagcttctctactagtccttgaattaagaagtggtcactctaaaggagctttgagcgggcaggaagctgggcctagagacaaagtcagcagcaccagataattgtgatggaaagggcttctgactcagcttccctgggtcgggaactccgagtgccggctgtccccagccctgctgttctggccccagatgcgtggtgccccctcctcatccgttagtcctgcccatcccttccttcttgactctgcccaccccact

SEQ ID NO: 6334 - DNA, 5945 bp, Homo sapiens
  source 1..5945: mol_type = unassigned DNA
gtcctgtatctatggagacggcaatatggaggcgatgtaagttctgagcgttagtcccaaggtcccagggtctcaatttcagtgatgtttaccttaaccggttgtagactggtggagaaaacccagaaggtggagaatccatcagtctcatttgcctcttctttcccccttattcctcttctcctaagaggcaagagtgttcagaagaaacaagcagagagtaaaagccagataaagctccatactcagagtgctccctttggactgtgtcccaaggacatgatgctcacccaggctccaagctccgtcgtgaggtccaggaacagcaggaaccacaccgtgaactctggtggatcctgcctgagtgccagcacagtggccatccctgccatcaacgacagcagtgcagccatgagtgcctgcagcaccatcagcgcccagcccgcaagctccatggacactcagatgcactccccaaagaagcaggagagagtgaacaagagggtcatctggggcattgaggtggctgaggagctgcattggaaaggctgggagctaggaaaggagaccacaaggaatctggttctgaaaaatcgatccttgaaactccagaagatgaagtacaggccccccaagaccaagttcttcttcacggtcatccctcagcccatcttcctgagcccaggcataaccctcacgctccccatcgtcttccggcctctggaggcgaaggagtacatggaccagctgtggtttgagaaagcggaggggatgttctgtgtcggcctacgggccaccctgccctgccacaggctgatctgccgcccaccatccctgcagctgcccatgtgtgctgtgggagatacgactgaggcctttttctgcctggataatgtgggggacctgcccaccttcttcacctgggagttctccagcccattccagatgctgcccgccacggggctcctggagccaggccaggcctctcagatcaaggtgacctttcagccccttacagccgtcatctacgaggtgcaggccacgtgctggtacggggcgggcagccggcagaggagcagcatccagctgcaggctgtggccaagtgcgcccagctgctggtgagcataaagcacaagtgcccggaggaccaggatgccgagggcttccagaagctgttgtactttggctctgttgctgtgggctgcacctcggagaggcagatcaggctacacaacccgtcggcggtaaatgcccccttcaggattgaaatttccccggatgaactggccgaagaccaggccttctcatgccccacggcccatggcatcgtgcttccgggagagaagaaatgtgtgtcggtgttcttccaccccaagactctggacaccagaactgtggactactgctccatcatgccttctggctgtgcctccaagaccctgcttaaagtcgttggtttctgtagaggccctgctgtgtccctgcagcactactgtgtcaacttcagctgggtcaaccttggggagcgctccgagcagcccctgtggattgagaaccaatcggactgcacggcccacttccagtttgccatcgactgcttggagagtgtctttaccatcaggcctgcctttgggacgctggtgggcaaggcccgtatgaccctgcactgtgccttccagcccactcaccccatcatctgctttcggcgtgtggcctgtctcatccaccaccaggacccactgttcctggacctgatggggacctgccactcggacagcaccaagccagccatcctgaagcctcagcacctcacctggtaccgcacacacctggcccggggcctgacgctctacccccctgacatcctggatgccatgctgaaggagaagaagctggcacaggaccagaacggggctctcatgattcccatccaggatctggaggacatgccggccccgcagtacccttatatcccccccatgaccgagttcttcttcgacggcaccagcgacataaccatcttccccccgcccatcagtgtagagcctgtcgaggtagacttcggtgcctgcccagggcctgaggcccccaaccctgtacccctgtgcctgatgaaccacaccaagggcaagatcatggtggtctggacgcgaaggtctgactgccccttctgggtgactccagagagctgcgacgtgcccccactcaagtccatggccatgcgcctgcacttccagccgcctcaccccaactgcctttacacggtggagctcgaagccttcgccatctataaggtcctgcagagctacagtaatattgaggaggactgcaccatgtgcccatcctggtgcctgacggtgcgggcacgaggccacagctatttcgctggctttgagcaccacatcccccagtattccctagatgtccccaagctatttccagcagtgtcctccggtgagcccacctaccgcagcctgctcctggtcaacaaagactgcaagctgctgaccttcagcctggccccccagagaggctcagacgtcatccttcggcccacttcgggccttgtggcacccggggcccaccagatcatcctcatctgcacctaccctgagggcagctcctggaagcagcacactttctatctgcagtgcaatgcttccccccagtatctcaaggaggtgagcatgtacagccgggaggagccactgcagctgaagctggacacccacaaaagcctctacttcaagcccacctgggtgggctgctcctccaccagccccttcaccttccgcaacccctcgcgtctgcccctgcagttcgagtggagggtctctgagcagcatcgaaagctgctggctgtccagccctccagggggctaatccagcccaacgagagacttacgctgacgtggaccttcagccctttggaggagaccaagtacctgttccaagtggggatgtgggtctgggaagccggcctgtccccaaatgccaaccccgctgccaccacccactacatgctccggctggtgggcgttgggctcaccagcagcctctctgcaaaggaaaaggagctggcctttgggaatgtgctggtgaacagcaagcagtccaggttccttgtcctcctgaatgacggcaactgcaccctctattaccgcctctacctggagcagggcagccctgaggccgttgacaaccaccccctcgctctgcagctggaccgaacagaggggagcatgccaccccggtcccaggacaccatctgcctgactgcctgtcccaagcagcggtcccagtactcctggaccatcacctactctctcctttcccacagagataacaaggctggggagaagcaggagctgtgctgcgtctccctggtggccgtgtaccccttgctttccatcctggatgtcagctccatgggcagtgctgagggtatcacccggaagcacctgtggcgcctcttctctctggacctgcttaacagttacttggagcgtgaccccaccccctgtgagctcacctacaaggtgcccacccggcacagcatgagccagatcccccccgtcctcacccctttaaggcttgacttcaatttcggggccgcaccattcaaggccccaccttccgtggtattcctggccctgaagaacagcggagtggtgtccctggactgggccttcctccttccaagtgaccagcggattgacgtggagctctgggcagagcaagcagagttgaattccactgagctccaccagatgcgcgtgcaggacaattgcctcttctccatcagccccaaggctgggagcctgagtcctgggcaggagcagatggtggagttaaaatacagccacctgttcatcggtactgatcacctcccagtgctcttcaaggtgtcccatggccgggagatcctgctaaatttcataggtgtgacagtgaagccggagcagaagtatgtgcacttcacctctactacccaccagttcatccccattcccattggtgacacgctacccccacggcagatttatgagctgtataatggtggctcagtgcccgtgacatatgaggtccagaccgatgtcctgtcacaggttcaggaaaaaaattttgatcaccccatcttttgctgcctcaaccccaaaggggagatccagccaggcagcactgcccgggtcttgtggatcttctcacctatcgaggccaagacctacacggtggacgtgcccatacacatcctgggatggaactcggccctcatccacttccagggagtgggctacaacccccatatgatgggggacacagccccattccacaacatctcctcgtgggacaacagttccatacactctaggctggtggtgcctggacagaatgtcttcctgtcccagtctcatatttccctgggaaacatacctgtgcagagcaagtgcagccgcctgctcttcctcaacaacatctccaagaacgaggaaattgccttctcctggcagccaagtcctctagattttggggaggtgtctgtgagtcccatgataggggtggtggctcctgaagagacggtcccatttgtggtgaccttgagggcctctgtgcatgccagcttctacagtgcagacctggtatgcaagctgtactcgcagcagctcatgaggcagtatcacaaggagctgcaggagtggaaggacgagaaggtgcggcaggaagtggagttcaccatcaccgacatgaaagtgaagaagagaacatgctgcacagcctgtgaacctgcgaggaagtacaagacactgcctcccatcaagaaccagcagtctgtcagccggcctgccagctggaaactgcagaccccaaaggaggaggtgtcctggccctgcccccagccaccctcgccaggcatgctctgcctgggccttactgcccgagcccatgccaccgactactttctggctaacttcttctcagagtttccctgccactttttgcaccgggagctgccaaagaggaaggcccccagggaagagtcagagacttctgaggaaaaatcccctaacaagtggggccctgtttccaagcagaagaagcagctcctggttgacattctcaccacaataatcaggggcctgctggaagacaagaacttccatgaggctgtggaccaaagcctggtggagcaggtgccgtacttccgccaattctggaatgagcagtcaactaagttcatggaccagaaaaacagcctgtacttaatgccaatcctgcctgtaccctccagcagctgggaggatgggaagggcaagcagccgaaggaagacagaccagagcactatccagggttgggaaagaaggaagagggggaggaggagaagggtgaagaggaagaagaagagttggaggaggaagaggaggaagaagaggagacagaagaggaggagttgggcaaggaggagatagaggagaaggaggaggagagggatgagaaggaagagaaagtgagctgggcgggcatcgggcccacaccacagcctgagtcccaggagtccatgcaatggcagtggcaacagcagctgaatgtcatggtgaaggaggagcaagaacaggacgagaaggaggccatcagaaggctcccggccttcgccaacctgcaggaggcgctgctggagaacatgatccagaacatcctggtggaggcgagccgcggggaggtggtactcacctcgcggccacgcgtcatcgccctgccgccgttctgcgtgcccaggagtctgaccccggacacgctgctgccgacgcagcaagcagaggtactccacccggtggtgccacttcctaccgaccttccgtaaatgcccgcgcccagcctctccgacatgccgctaggggtcacgcctggccccctctccaccgccagtaaaagcatctagtcttt

SEQ ID NO: 6335 - DNA, 5870 bp, Homo sapiens
  source 1..5870: mol_type = unassigned DNA
atttcagtgatgtttaccttaaccggttgtagactggtggagaaaacccagaaggtggagaatccatcagtctcatttgcctcttctttcccccttattcctcttctcctaagaggcaagagtgttcagaagaaacaagcagagagtaaaagccagataaagctccatactcagagtgctccctttggactgtgtcccaaggacatgatgctcacccaggctccaagctccgtcgtgaggtccaggaacagcaggaaccacaccgtgaactctggtggatcctgcctgagtgccagcacagtggccatccctgccatcaacgacagcagtgcagccatgagtgcctgcagcaccatcagcgcccagcccgcaagctccatggacactcagatgcactccccaaagaagcaggagagagtgaacaagagggtcatctggggcattgaggtggctgaggagctgcattggaaaggctgggagctaggaaaggagaccacaaggaatctggttctgaaaaatcgatccttgaaactccagaagatgaagtacaggccccccaagaccaagttcttcttcacggtcatccctcagcccatcttcctgagcccaggcataaccctcacgctccccatcgtcttccggcctctggaggcgaaggagtacatggaccagctgtggtttgagaaagcggaggggatgttctgtgtcggcctacgggccaccctgccctgccacaggctgatctgccgcccaccatccctgcagctgcccatgtgtgctgtgggagatacgactgaggcctttttctgcctggataatgtgggggacctgcccaccttcttcacctgggagttctccagcccattccagatgctgcccgccacggggctcctggagccaggccaggcctctcagatcaaggtgacctttcagccccttacagccgtcatctacgaggtgcaggccacgtgctggtacggggcgggcagccggcagaggagcagcatccagctgcaggctgtggccaagtgcgcccagctgctggtgagcataaagcacaagtgcccggaggaccaggatgccgagggcttccagaagctgttgtactttggctctgttgctgtgggctgcacctcggagaggcagatcaggctacacaacccgtcggcggtaaatgcccccttcaggattgaaatttccccggatgaactggccgaagaccaggccttctcatgccccacggcccatggcatcgtgcttccgggagagaagaaatgtgtgtcggtgttcttccaccccaagactctggacaccagaactgtggactactgctccatcatgccttctggctgtgcctccaagaccctgcttaaagtcgttggtttctgtagaggccctgctgtgtccctgcagcactactgtgtcaacttcagctgggtcaaccttggggagcgctccgagcagcccctgtggattgagaaccaatcggactgcacggcccacttccagtttgccatcgactgcttggagagtgtctttaccatcaggcctgcctttgggacgctggtgggcaaggcccgtatgaccctgcactgtgccttccagcccactcaccccatcatctgctttcggcgtgtggcctgtctcatccaccaccaggacccactgttcctggacctgatggggacctgccactcggacagcaccaagccagccatcctgaagcctcagcacctcacctggtaccgcacacacctggcccggggcctgacgctctacccccctgacatcctggatgccatgctgaaggagaagaagctggcacaggaccagaacggggctctcatgattcccatccaggatctggaggacatgccggccccgcagtacccttatatcccccccatgaccgagttcttcttcgacggcaccagcgacataaccatcttccccccgcccatcagtgtagagcctgtcgaggtagacttcggtgcctgcccagggcctgaggcccccaaccctgtacccctgtgcctgatgaaccacaccaagggcaagatcatggtggtctggacgcgaaggtctgactgccccttctgggtgactccagagagctgcgacgtgcccccactcaagtccatggccatgcgcctgcacttccagccgcctcaccccaactgcctttacacggtggagctcgaagccttcgccatctataaggtcctgcagagctacagtaatattgaggaggactgcaccatgtgcccatcctggtgcctgacggtgcgggcacgaggccacagctatttcgctggctttgagcaccacatcccccagtattccctagatgtccccaagctatttccagcagtgtcctccggtgagcccacctaccgcagcctgctcctggtcaacaaagactgcaagctgctgaccttcagcctggccccccagagaggctcagacgtcatccttcggcccacttcgggccttgtggcacccggggcccaccagatcatcctcatctgcacctaccctgagggcagctcctggaagcagcacactttctatctgcagtgcaatgcttccccccagtatctcaaggaggtgagcatgtacagccgggaggagccactgcagctgaagctggacacccacaaaagcctctacttcaagcccacctgggtgggctgctcctccaccagccccttcaccttccgcaacccctcgcgtctgcccctgcagttcgagtggagggtctctgagcagcatcgaaagctgctggctgtccagccctccagggggctaatccagcccaacgagagacttacgctgacgtggaccttcagccctttggaggagaccaagtacctgttccaagtggggatgtgggtctgggaagccggcctgtccccaaatgccaaccccgctgccaccacccactacatgctccggctggtgggcgttgggctcaccagcagcctctctgcaaaggaaaaggagctggcctttgggaatgtgctggtgaacagcaagcagtccaggttccttgtcctcctgaatgacggcaactgcaccctctattaccgcctctacctggagcagggcagccctgaggccgttgacaaccaccccctcgctctgcagctggaccgaacagaggggagcatgccaccccggtcccaggacaccatctgcctgactgcctgtcccaagcagcggtcccagtactcctggaccatcacctactctctcctttcccacagagataacaaggctggggagaagcaggagctgtgctgcgtctccctggtggccgtgtaccccttgctttccatcctggatgtcagctccatgggcagtgctgagggtatcacccggaagcacctgtggcgcctcttctctctggacctgcttaacagttacttggagcgtgaccccaccccctgtgagctcacctacaaggtgcccacccggcacagcatgagccagatcccccccgtcctcacccctttaaggcttgacttcaatttcggggccgcaccattcaaggccccaccttccgtggtattcctggccctgaagaacagcggagtggtgtccctggactgggccttcctccttccaagtgaccagcggattgacgtggagctctgggcagagcaagcagagttgaattccactgagctccaccagatgcgcgtgcaggacaattgcctcttctccatcagccccaaggctgggagcctgagtcctgggcaggagcagatggtggagttaaaatacagccacctgttcatcggtactgatcacctcccagtgctcttcaaggtgtcccatggccgggagatcctgctaaatttcataggtgtgacagtgaagccggagcagaagtatgtgcacttcacctctactacccaccagttcatccccattcccattggtgacacgctacccccacggcagatttatgagctgtataatggtggctcagtgcccgtgacatatgaggtccagaccgatgtcctgtcacaggttcaggaaaaaaattttgatcaccccatcttttgctgcctcaaccccaaaggggagatccagccaggcagcactgcccgggtcttgtggatcttctcacctatcgaggccaagacctacacggtggacgtgcccatacacatcctgggatggaactcggccctcatccacttccagggagtgggctacaacccccatatgatgggggacacagccccattccacaacatctcctcgtgggacaacagttccatacactctaggctggtggtgcctggacagaatgtcttcctgtcccagtctcatatttccctgggaaacatacctgtgcagagcaagtgcagccgcctgctcttcctcaacaacatctccaagaacgaggaaattgccttctcctggcagccaagtcctctagattttggggaggtgtctgtgagtcccatgataggggtggtggctcctgaagagacggtcccatttgtggtgaccttgagggcctctgtgcatgccagcttctacagtgcagacctggtatgcaagctgtactcgcagcagctcatgaggcagtatcacaaggagctgcaggagtggaaggacgagaaggtgcggcaggaagtggagttcaccatcaccgacatgaaagtgaagaagagaacatgctgcacagcctgtgaacctgcgaggaagtacaagacactgcctcccatcaagaaccagcagtctgtcagccggcctgccagctggaaactgcagaccccaaaggaggaggtgtcctggccctgcccccagccaccctcgccaggcatgctctgcctgggccttactgcccgagcccatgccaccgactactttctggctaacttcttctcagagtttccctgccactttttgcaccgggagctgccaaagaggaaggcccccagggaagagtcagagacttctgaggaaaaatcccctaacaagtggggccctgtttccaagcagaagaagcagctcctggttgacattctcaccacaataatcaggggcctgctggaagacaagaacttccatgaggctgtggaccaaagcctggtggagcaggtgccgtacttccgccaattctggaatgagcagtcaactaagttcatggaccagaaaaacagcctgtacttaatgccaatcctgcctgtaccctccagcagctgggaggatgggaagggcaagcagccgaaggaagacagaccagagcactatccagggttgggaaagaaggaagagggggaggaggagaagggtgaagaggaagaagaagagttggaggaggaagaggaggaagaagaggagacagaagaggaggagttgggcaaggaggagatagaggagaaggaggaggagagggatgagaaggaagagaaagtgagctgggcgggcatcgggcccacaccacagcctgagtcccaggagtccatgcaatggcagtggcaacagcagctgaatgtcatggtgaaggaggagcaagaacaggacgagaaggaggccatcagaaggctcccggccttcgccaacctgcaggaggcgctgctggagaacatgatccagaacatcctggtggaggcgagccgcggggaggtggtactcacctcgcggccacgcgtcatcgccctgccgccgttctgcgtgcccaggagtctgaccccggacacgctgctgccgacgcagcaagcagaggtactccacccggtggtgccacttcctaccgaccttccgtaaatgcccgcgcccagcctctccgacatgccgctaggggtcacgcctggccccctctccaccgccagtaaaagcatctagtcttt

SEQ ID NO: 6336 - DNA, 3438 bp, Homo sapiens
  source 1..3438: mol_type = unassigned DNA
gcgcgtcctgtatctatggagacggcaatatggaggcgatgtaagttctgagcgttagtcccaaggtcccagggtctcagggagaggcaagagtgttcagaagaaacaagcagagagtaaaagccagataaagctccatactcagagtgctccctttggactgtgtcccaaggacatgatgctcacccaggctccaagctccgtcgtgaggtccaggaacagcaggaaccacaccgtgaactctggtggatcctgcctgagtgccagcacagtggccatccctgccatcaacgacagcagtgcagccatgagtgcctgcagcaccatcagcgcccagcccgcaagctccatggacactcagatgcactccccaaagaagcaggagagagtgaacaagagggtcatctggggcattgaggtggctgaggagctgcattggaaaggctgggagctaggaaaggagaccacaaggaatctggttctgaaaaatcgatccttgaaactccagaagatgaagtacaggccccccaagaccaagttcttcttcacggtcatccctcagcccatcttcctgagcccaggcataaccctcacgctccccatcgtcttccggcctctggaggcgggacctgcccaccttcttcacctgggagttctccagcccattccagatgctgcccgccacggggctcctggagccaggccaggcctctcagatcaaggtgacctttcagccccttacagccgtcatctacgaggtgcaggccacgtgctggtacggggcgggcagccggcagaggagcagcatccagctgcaggctgtggccaagtgcgcccagctgctggtgagcataaagcacaagtgcccggaggaccaggatgccgagggcttccagaagctgttgtactttggctctgttgctgtgggctgcacctcggagaggcagatcaggctacacaacccgtcggcggtaaatgcccccttcaggattgaaatttccccggatgaactggccgaagaccaggccttctcatgccccacggcccatggcatcgtgcttccgggagagaagaaatgtgtgtcggtgttcttccaccccaagactctggacaccagaactgtggactactgctccatcatgccttctggctgtgcctccaagaccctgcttaaagtcgttggtttctgtagaggtaccggtgaccccaggggcctcccctggggacaggagcagcccctgctgaggattctgaagagctccttccctgctcctaggaggcggggccaccttgcctcagcctgggtgtctgctgccccctggtggccctgtggggaatcatccgtgactacctggagatcccagtcccactggcatccagtgatgctggagttctgctcaggctgccagggctctgggcctgtagcctggccctgagagtaccacctcccttcagtggaactttgtctaagatatccttggggaagctgataccccatctcctgtgtccaggccctgctgtgtccctgcagcactactgtgtcaacttcagctgggtcaaccttggggagcgctccgagcagcccctgtggattgagaaccaatcggactgcacggcccacttccagtttgccatcgactgcttggagagtgtctttaccatcaggcctgcctttgggacgctggtgggcaaggcccgtatgaccctgcactgtgccttccagcccactcaccccatcatctgctttcggcgtgtggcctgtctcatccaccaccaggacccactgttcctggacctgatggggacctgccactcggacagcaccaagccagccatcctgaagcctcagcacctcacctggtaccgcacacacctggcccggggcctgacgctctacccccctgacatcctggatgccatgctgaaggagaagaagctggcacaggaccagaacggggctctcatgattcccatccaggatctggaggacatgccggccccgcagtacccttatatcccccccatgaccgagttcttcttcgacggcaccagcgacataaccatcttccccccgcccatcagtgtagagcctgtcgaggtagacttcggtgcctgcccagggcctgaggcccccaaccctgtacccctgtgcctgatgaaccacaccaagggcaagatcatggtggtctggacgcgaaggtctgactgccccttctgggtgactccagagagctgcgacgtgcccccactcaagtccatggccatgcgcctgcacttccagccgcctcaccccaactgcctttacacggtggagctcgaagccttcgccatctataaggtgtgtgcacgcaatgagagggaggaatgcggggtctctgctaggagcctgagtggcttggtggggtggcaggaagtgaccgagggcagcttcaggctccatcctctgcgtgccaggctttctcttggctggacagtgacccctatgagtttgtctcctccaaagctcctggcctagctcggcccatctgattttctcattcttatgtaagtctcccctcccctccaagggagaactcagctgagatcaagctgtttgggaaaactgggtgcacagggagatactccctggggctcctggctaggaggcctcctagcttctctactagtccttgaattaagaagtggtcactctaaaggagctttgagcgggcaggaagctgggcctagagacaaagtcagcagcaccagataattgtgatggaaagggcttctgactcagcttccctgggtcgggaactccgagtgccggctgtccccagccctgctgttctggccccagatgcgtggtgccccctcctcatccgttagtcctgcccatcccttccttcttgactctgcccaccccactgcccttgcccagaggccaaggtcttggggcccagagaaaagtagggctgtgcggtcaagatcagggtcacttaccagctatgtgaccttgggcaagttccttaatgtctctgagtcctgatcttttcatctctaaacttgggaccacgtccgatcttttgaggaggctttccaaagtggaggctttggttgcccccgtcctaatgctctggcagtggggtgatgttgaggtttgtaggaataaggttgtagatgcctggctctgctgaggttcagcctgtcagatatttaggttacaggctctagacctgcacagtccagtacagccactgacagccacacgtggctactgagcttttaatatgtggctggtcccaattgagacgtgccgtgagtgtaaaatgcaccctggatttcaagacttagtatgaaaagaatgtaaaatacctcgttactaattttatattggttatatgttaaagtgataagattttagatctgttgggttaaataaaatatactattaacatt

SEQ ID NO: 6337 - DNA, 1646 bp, Homo sapiens
  source 1..1646: mol_type = unassigned DNA
acttgggggctaattggagaaaccagttgattggttgcttccgtgctgcttctctaagggcgcttgcccttaaagaagctgacccagaggccttggtgctgccggcgtggggatccccagatgggaacgccccttgatggaggatctcgtgtgcctattggctgtcctgccaaactgcggagggtgacaaggaagaaggtggctccagatctggaggtgtgtccatggcggcgcttgacctgcgagcggagctggattcgctggtcctgcagctgcttggggacctggaggagctggaggggaaacgaacggtgttgaacgcccgggtggaggagggctggctctcgctcgccaaggctcgctacgcgatgggcgccaagtcggtagggcccctgcagtatgcttcccacatggagccccaggtctgcctccacgccagcgaggcccaggagggactccagaagttcaaggtggtgagagctggtgtccacgccccagaggaggtggggcctcgcgaagcaggtctgcggaggcgcaagggccccactaagaccccagaaccggagtcctctgaggcccctcaggaccccctgaactggtttggaatcctagttcctcacagtctacgtcaggctcaagcaagcttccgggatggcctgcagctggccgcagacatagccagcctccagaaccgcattgactggggtcgaagccagctccggggactccaagagaaactcaagcagctggagcctggggctgcctgacatgcgcgcaaagaggcagggcagcgagcacagctgttctccgacatggctacgtgatctcaggccttcttccttcacaattagctcttgcccctaccccacgccagctaatgccccttctgtgtccctgctctgcatgtttccattttccttaggtgtgaagtttgaagaggcaaacagtaattttgaaagccactactttgaaaccattctaaggcctgagttcccataggacacactcacataggcaggtacacgttagtcaacaattggaactgcctcttggatcactcagctgtgctttcatggctggatgatggaacactgtgcgaagagagatgggggccaggaagtagcgcttcatgcttagtacatcctccaaattgtctttgctggaggagaaaaccgtactcagccaaaagatcaggacaatatgacttgagtccacaaggacacaaacacctgagtagctgggcagcccttggcagggtctaagccaggaagtaaaaatgatctggcctagatatttaagggaactctaggaagaggcctaggtttttaaaatcctgtctctttgtcttaccataagaggctgagcctctcttcatttttttgaagggccacttgtgttttctgttctgggaacttcattcatttttctactgggttgttgatctttgcagtaatttctaggagctgtttatgtttggaggtaattggtcctttgtccatatatatgagatgtaagtcttattttccagtttatctttttgcttattttttttgactttttattgtaaaataaaacatcaaactgcacagaacagttgaatagcttaatgaataactacagtaaaagctatggtaaccactacccaa

SEQ ID NO: 6338 - DNA, 1430 bp, Homo sapiens
  source 1..1430: mol_type = unassigned DNA
aattggagaaaccagttgattggttgcttccgtgctgcttctctaagggcgcttgcccttaaagaagctgacccagaggccttggtgctgccggcgtggggatccccagatgggaacgccccttgatggaggatctcgtgtgcctattggctgtcctgccaaactgcggagggtgacaaggaagaaggtggctccagatctggagggctggctctcgctcgccaaggctcgctacgcgatgggcgccaagtcggtagggcccctgcagtatgcttcccacatggagccccaggtctgcctccacgccagcgaggcccaggagggactccagaagttcaaggtggtgagagctggtgtccacgccccagaggaggtggggcctcgcgaagcaggtctgcggaggcgcaagggccccactaagaccccagaaccggagtcctctgaggcccctcaggaccccctgaactggtttggaatcctagttcctcacagtctacgtcaggctcaagcaagcttccgggatggtgtcctggaggccaagaagagaaagtgtttcctggagcgagtgatccaatgtgtggtcagccctgctgctgaacaggaggccgaagacgagagctgcccggaggactgggcagcagctgttccagcagagacatcagcaaaagccatctagaggtggatccagagtgtggactaacagagaaaagaagtggagggagagcaggcctgcagctggccgcagacatagccagcctccagaaccgcattgactggggtcgaagccagctccggggactccaagagaaactcaagcagctggagcctggggctgcctgacatgcgcgcaaagaggcagggcagcgagcacagctgttctccgacatggctacgtgatctcaggccttcttccttcacaattagctcttgcccctaccccacgccagctaatgccccttctgtgtccctgctctgcatgtttccattttccttaggtgtgaagtttgaagaggcaaacagtaattttgaaagccactactttgaaaccattctaaggcctgagttcccataggacacactcacataggcaggtacacgttagtcaacaattggaactgcctcttggatcactcagctgtgctttcatggctggatgatggaacactgtgcgaagagagatgggggccaggaagtagcgcttcatgcttagtacatcctccaaattgtctttgctggaggagaaaaccgtactcagccaaaagatcaggacaatatgacttgagtccacaaggacacaaacacctgagtagctgggcagcccttggcagggtctaagccaggaagtaaaaatgatctggcctagatatttaagggaactctaggaagaggcctaggtttttaaaatcctgtctctttgtcttaccataaga

SEQ ID NO: 6339 - DNA, 1281 bp, Homo sapiens
  source 1..1281: mol_type = unassigned DNA
attgcctggccagaaaaggaagtaatccctagtgtcagcagattcagcggtactggtgtataataggatcaccaatatacaacaggaaaaaacaaaagtgaaagattatcaatatagattattgagtaggagtaaagaaggtaaatcaaaaaggggaaaagagattacagacacagaaaatgtcagacaacaaagaaaggaagagtcaaggatttcctaaagaagataaccaagacacaagttcattagctgatgctgtagagaaagttgcaaagcaacaacaatcacaagcatcagagatagaaaaaaacaaaaaggttctgttcaatttgaagaatgaacttcatgagcttgaaaaagaaatagcagctatctctgcagaaactaaagaaacagaaagacaaatttatcaacaagattctgccatagagaataccaaacttcattgtgatagcctggaaactcaaatcaaatccttacattcagaaaatgtaaagcttaaatttgacatagaaacagcccaagaagattttgaggaacacatgataaaatataatgcatattatgcaaaaataaaagcacataaaaatagtttgggggaagtagagagcaaatggtcatttatgactgaactccatgaaaagcgagattttgttaaaaaattaaagacaatgaaagaagaacttatgcaagatcttcaaaatccaggagggaaccgaataacacaagtacaggaagacattacaaacttaaaggataaaattataactgtaaaagaatctatcattgaaaaaacttgttttcttgaggaagaaaaaaagacacatgaaaaattaagaaaagaaatagagagtctcgccccatcgcccaggctagagtgcagtagtgcaatctcggctcactgcaagctctgcctcccaggttcacgccattctcctgcctcagcctccggagtagctgggactacaggcgcctgccaccacacccagctaattttttgcatttttagtagagacggggtttcaccatgttagccaggatggtcttgatctcctgacctcatgatccacccgcctcggcctcccaaagtgttgggattacaggcgtgagccaccgcgcccagccttaatttaacttttaagttcaggggtatgtatgcaggtttgttatataggtaaatttctgtcatagtttgttgtacagattatttcaatagccaggtattaagcctagtacccattagttatttttcctgatcctttccctcctctcaccctccag

SEQ ID NO: 6340 - DNA, 1118 bp, Homo sapiens
  source 1..1118: mol_type = unassigned DNA
tcccaggggaaacctgacggccaggttccctcgtgccagctgccgggaggcgggagggagtgccctgaaactctaatctcattgcctggccagaaaaggaagtaatccctagtgtcagcagattcagcggtactggtgtataataggatcaccaatatacaacaggaaaaaacaaaagtgaaagattatcaatatagattattgagtaggagtaaagaaggtaaatcaaaaaggggaaaagagattacagacacagaaaatgtcagacaacaaagaaaggaagagtcaaggatttcctaaagaagataaccaagacacaagttcattagctgatgctgtagagaaagttgcaaagcaacaacaatcacaagcatcagagatagaaaaaaacaaaaaggttctgttcaatttgaagaatgaacttcatgagcttgaaaaagaaatagcagctatctctgcagaaactaaagaaacagaaagacaaatttatcaacaagattctgccatagagaataccaaacttcattgtgatagcctggaaactcaaatcaaatccttacattcagaaaatgtaaagcttaaatttgacatagaaacagcccaagaagattttgaggaacacatgataaaatataatgcatattatgcaaaaataaaagcacataaaaatagtttgggggaagtagagagcaaatggtcatttatgactgaactccatgaaaagcgagattttgttaaaaaattaaagacaatgaaagaagaacttatgcaagatcttcaaaatccaggagggaaccgaataacacaagtacaggaagacattacaaacttaaaggataaaattataactgtaaaagaatctatcattgaaaaaacttgttttcttgaggaagaaaaaaagacacatgaaaaattaagaaaagaaatagaggtacaacataagaggtatgatgcaattcttaagcgtttgcattgtcaggtgaacaagcttcagtcaaatagacgacagtggcaatggaacattcaacaattggaaaaaactgcagccgaattaagaaaatgcattggaatgcaagagtaacattgccatagggcaatgtggaacacagaccatgaca

SEQ ID NO: 6341 - DNA, 4198 bp, Homo sapiens
  source 1..4198: mol_type = unassigned DNA
tgagctggagtccgggctccggtccccgccacggaccttgagagggtacccggggtcagacctggcagacagcccattttttcttatgataaagacggcatttggctcatgagcaaggtggcaagatcatcaagtgagtcagacgtgcagctctgggaaacagaagaggatgacatgacagaaggtgatttagggtatggcctcggaaggaaacctggtgggatttatgaaatagaattttcacataggtctagaaaaagatcagatggaaagaactttagccctcctccatttccgagaaagggagaagaaagaaatgaagcgagttttcagtattccaagcataagagccagcaagatacattccctcaagtgtccagaatttccaattacagacgacaaagtagcactgtagattcgaattcagaattgtcaaatgaagaattaaggcaatgtcttaatgaaactttagaggaggtagaaatgttaaaaactgaacttgaggcatctcaaagacaactcagaggtaaagaggaagcattgaaaattcttcaaagcatggcaatactgggcaaagccacaagtcatacgcaggcagtgcttcaaaaaactatggaacaaaacagatccttggagaaggaaataaatgccttgcagtgggaaatagaatttgatcataatagatttaaaaatatagaggaatcttggatccaaaaatatgacaggctaaactgtgaaaatgcagtcctcaaagagaatttgaaagtgaaaacagaagaaattaaaatgctgaagtctgacaatgcagttttgaatcaacggtatttggaggccctcgccatgcttgatatcaaacagcagaagatggctcaggaaaacatgtgctgtgataaaagtggctttgcagaggcttcaggtcttgagcttgcggtcctcggagcctgcctttgtcatgggcccggagggaacccctgttcttgtgccagaatggcagcatccactcggaaactgcttcttcagctcaaacaagagttggaaattttgcagaagagtaaagaagaagcttacgtgatggcagatgctttcagaattgcatttgagcaacaattaatgagaaaaaatgaccaggcactacaattgacacaaatggataaaatgcataaaaaagcaacaaaatggatgaattggaagcaccttaaagaggatggatttccatcaccaaggagtaagaagaccttcgggcagagactgttgggtatgctcccttcagaaaacagttctaagaggatggaagaccaggacagtcctcaagaggtccttaagatgctcatagatttgcttaatgataaagaagaagctttggctcatcaaagaaaagttagctacatgcttgctcgggcattggaagacaaagacactgcttcaaacgagaataaagaaaaaaatcctataaaagagaatttccctttcaacaacccctggcgtaagacttcagaattctctgttttgggtgatcctatacattcaagtgtctgcattttaaattctgtgggctgcatttgttcaatccagcactctcaaatagatccaaactatagaactcttaaaagatcccattctttgccatcaagtatcatattttaaagacaagccagttgaaattggaactgagagttgtttatatcgagatactttgaaaaatgattttgtaaattttgctgcatcttgagaagttgtatgtttcctaggtatttctaaattttaggaggtcacttaaatcaaatattttctacattttctttttcttcttttgagatggagtcttgctctgtcacccaggttggagtgcagtggtgtgatctcggttcactgcaacctccgcctcccggttcaagcaattctcctgcctcagcctcccgagtaactcggattacaggcatgtgccaccacgcccagctaatttttgtatttttagtagagacggggttttaccatgttagccaggctgatcttgaactcctgacctcaagtgatccgcctgccttggcctccgaaagtgctgggattacaggcgtgagccaccacacccagcctattttctacattttctacaagaaattagtattctgtgttgacattttatttataaattacattactgtatttataaattacattacaggctgggcatggtggctcatgcttataaatcccagcactttgggaggccaaggtgggtgggtcacctgaggctggagttcaagaccagtctgaccaacatggagaaaccccatctctactaaaaatacaaaaaattagctaggcctagtggcgcatgcctgtaatcccagctacttgggaggctgaggtaggagaatcgcttgaacctgggaggcgggggttgtggtaagccgagactgtgtcattgcactccagcctgggcgacaagagcgaaactctgtctcaaaaaaaaaaaaaaacacattacagtgtttgccaacatcctaaaacaaaaaataatgatttttgggaaaaacaaaaaattatttaactattttgattgactatagggatcttagcttggctaaatcaacaatatagcaatgtatcttaatgctctaaaaagtaacaatacctaggactgactgaatgttaatttctggaattcatttatcttgttttatttgccttgttcagtatttttcatttaccatatgaagtttagaaataacaatttccttaagttaacttcaataagacagttttgatggtgggaccttggcagaagtatattgagtcagtgccggctgcgttcatggcttcttgtcagggtagtaacattttgcaaccaaatctgcacagatttgtagccaagtctacaaagtgcttaacagctcttttcattgcatcctgtgagatggttgtgatgatccaggaaatggggtctcaggaatctgaagaagctgcctgagccaaggtgatttctaggagtttttttgtttgtggtatgtgaattggggtgtgtgggggtggggtgtgtgtgtagacagggtcccactgtgttgctcaggctggtgccaaactcctggcctcaagggatcctcctgcctcagcctctcaaagtgctgggattacaggcataaaccacaactcaataaaaaagtttttaaaaatttacaaagctcatatttgatccagctaggattttaccctgtacatttgtatttcttgtaggctggcgcacagatatcttaaatggctactaattgctgctgtgtatgaaaacaaatggctatcaaggccgggtgcagtggcttacagatctggtctgaatctcaagtccagaccagtccagagttcaagaccagcctgggcaacatggtgaaaccccatctatacaaaaactcggcaaggcatggtggcatgcacctgttgtcccagctactcaggggctgaggcaggaggatggcatgagcccaggagcttgaggctgcagtgagctgtgattgtgccactgcactccagcctgagtgacagagtgagacccccatctccaaaagaaaaggctatcaatacaaaagtttatctaaattactgtacagctatacaatggaatactctacaaaatggagagatccataagataaagcaaatgaataaagcaaaatgcatgtgttgacagctgttgtgatacctcagttcttgtcttcttggtttaaaagaatttaaatgagacagcaaaggagatgcagcataatttattgcaaaagaaaaggagtattttgaaagttaggtgcagaacagacagtacacctgagagagagaattcagggccggctgctcgtaagggtgagacagcattgattattgctggagaaactccctttatgggagttttgcattattattcataaggaggtgaggtgttgcagtaatcatgtcctgggtggtcctctgcacaggtgcagtagctgttaatgcttgttcatacaccacatgtctcagtagcatcttaaatttccacctagaggtgtgttttttattattatcatgtgcaaaggatcagtttgaggacaggtaaaatcaaaatgtgtatgctctctagaagggaaagtccctactgaagatagctttgcttaaatgagctcaattacaatgtgaatgctgaggtttattgtgttggctgtatggtcatgag

SEQ ID NO: 6342 - DNA, 3613 bp, Homo sapiens
  source 1..3613: mol_type = unassigned DNA
cagacagcccattttttcttatgataaagacggcatttggctcatgagcaaggtggcaagatcatcaagtgagtcagacgtgcagctctgggaaacagaagaggatgacatgacagaaggtgatttagggtatggcctcggaaggaaacctggtgggatttatgaaatagaattttcacataggtctagaaaaagatcagatggaaagaactttagccctcctccatttccgagaaagggagaagaaagaaatgaagcgagttttcagtattccaagcataagagccagcaagatacattccctcaagtgtccagaatttccaattacagacgacaaagtagcactgtagattcgaattcagaattgtcaaatgaagaattaaggcaatgtcttaatgaaactttagaggaggtagaaatgttaaaaactgaacttgaggcatctcaaagacaactcagaggtaaagaggaagcattgaaaattcttcaaagcatggcaatactgggcaaagccacaagtcatacgcaggcagtgcttcaaaaaactatggaacaaaacagatccttggagaaggaaataaatgccttgcagtgggaaatagaatttgatcataatagatttaaaaatatagaggaatcttggatccaaaaatatgacaggctaaactgtgaaaatgcagtcctcaaagagaatttgaaagtgaaaacagaagaaattaaaatgctgaagtctgacaatgcagttttgaatcaacggtatttggaggccctcgccatgcttgatatcaaacagcagaagatggctcaggaaaacatgtgctgtgataaaagtggctttgcagaggcttcaggtcttgagcttgcggtcctcggagcctgcctttgtcatgggcccggagggaacccctgttcttgtgccagaatggcagcatccactcggaaactgcttcttcagctcaaacaagagttggaaattttgcagaagagtaaagaagaagcttacgtgatggcagatgctttcagaattgcatttgagcaacaattaatgagaaaaaatgaccaggcactacaattgacacaaatggataaaatgcataaaaaagcaacaaaatggatgaattggaagcaccttaaagaggatggatttccatcaccaaggagtaagaagaccttcgggcagagactgttgggtatgctcccttcagaaaacagttctaagaggatggaagaccaggacagtcctcaagaggtccttaagatgctcatagatttgcttaatgataaagaagaagctttggctcatcaaagaaaagttagctacatgcttgctcgggcattggaagacaaagacactgcttcaaacgagaataaagaaaaaaatcctataaaagagaatttccctttcaacaacccctggcgtaagacttcagaattctctgttttgggtgatcctatacattcaagtgtctgcattttaaattctgtgggctgcatttgttcaatccagcactctcaaatagatccaaactatagaactcttaaaagatcccattctttgccatcaagtatcatattttaaagacaagccagttgaaattggaactgagagttgtttatatcgagatactttgaaaaatgattttgtaaattttgctgcatcttgagaagttgtatgtttcctaggtatttctaaattttaggaggtcacttaaatcaaatattttctacattttctttttcttcttttgagatggagtcttgctctgtcacccaggttggagtgcagtggtgtgatctcggttcactgcaacctccgcctcccggttcaagcaattctcctgcctcagcctcccgagtaactcggattacaggcatgtgccaccacgcccagctaatttttgtatttttagtagagacggggttttaccatgttagccaggctgatcttgaactcctgacctcaagtgatccgcctgccttggcctccgaaagtgctgggattacaggcgtgagccaccacacccagcctattttctacattttctacaagaaattagtattctgtgttgacattttatttataaattacattactgtatttataaattacattacaggctgggcatggtggctcatgcttataaatcccagcactttgggaggccaaggtgggtgggtcacctgaggctggagttcaagaccagtctgaccaacatggagaaaccccatctctactaaaaatacaaaaaattagctaggcctagtggcgcatgcctgtaatcccagctacttgggaggctgaggtaggagaatcgcttgaacctgggaggcgggggttgtggtaagccgagactgtgtcattgcactccagcctgggcgacaagagcgaaactctgtctcaaaaaaaaaaaaaaacacattacagtgtttgccaacatcctaaaacaaaaaataatgatttttgggaaaaacaaaaaattatttaactattttgattgactatagggatcttagcttggctaaatcaacaatatagcaatgtatcttaatgctctaaaaagtaacaatacctaggactgactgaatgttaatttctggaattcatttatcttgttttatttgccttgttcagtatttttcatttaccatatgaagtttagaaataacaatttccttaagttaacttcaataagacagttttgatggtgggaccttggcagaagtatattgagtcagtgccggctgcgttcatggcttcttgtcagggtagtaacattttgcaaccaaatctgcacagatttgtagccaagtctacaaagtgcttaacagctcttttcattgcatcctgtgagatggttgtgatgatccaggaaatggggtctcaggaatctgaagaagctgcctgagccaaggtgatttctaggagtttttttgtttgtggtatgtgaattggggtgtgtgggggtggggtgtgtgtgtagacagggtcccactgtgttgctcaggctggtgccaaactcctggcctcaagggatcctcctgcctcagcctctcaaagtgctgggattacaggcataaaccacaactcaataaaaaagtttttaaaaatttacaaagctcatatttgatccagctaggattttaccctgtacatttgtatttcttgtaggctggcgcacagatatcttaaatggctactaattgctgctgtgtatgaaaacaaatggctatcaaggccgggtgcagtggcttacagatctggtctgaatctcaagtccagaccagtccagagttcaagaccagcctgggcaacatggtgaaaccccatctatacaaaaactcggcaaggcatggtggcatgcacctgttgtcccagctactcaggggctgaggcaggaggatggcatgagcccaggagcttgaggctgcagtgagctgtgattgtgccactgcactccagcctgagtgacagagtgagacccccatctccaaaagaaaaggctatcaatacaaaagtttatctaaattactgtacagctatacaatggaatactctacaaaatggagagatccataagataaagcaaatgaataaagcaaaatgcatgtgttg

SEQ ID NO: 6343 - DNA, 1735 bp, Homo sapiens
  source 1..1735: mol_type = unassigned DNA
acgcgcacggagaggaggctacttgccagacagcccattttttcttatgataaagacggcatttggctcatgagcaaggtggcaagatcatcaagtgagtcagacgtgcagctctgggaaacagaagaggatgacatgacagaagggagaagaaagaaatgaagcgagttttcagtattccaagcataagagccagcaagatacattccctcaagtgtccagaatttccaattacagacgacaaagtagcactgattcgaattcagaattgtcaaatgaagaattaaggcaatgtcttaatgaaactttagaggaggtagaaatgttaaaaactgaacttgaggcatctcaaagacaactcagaggtaaagaggaagcattgaaaattcttcaaagcatggcaatactgggcaaagccacaagtcatacgcaggcagtgcttcaaaaaactatggaacaaaacagatccttggagaaggaaataaatgccttgcagtgggaaatagaatttgatcataatagatttaaaaatatagaggaatcttggatccaaaaatatgacaggctaaactgtgaaaatgcagtcctcaaagagaatttgaaagtgaaaacagaagaaattaaaatgctgaagtctgacaatgcagttttgaatcaacggtatttggaggccctcgccatgcttgatatcaaacagcagaagatggctcaggaaaacatgtgctgtgataaaagtggctttgcagaggcttcaggtcttgagcttgcggtcctcggagcctgcctttgtcatgggcccggagggaacccctgttcttgtgccagaatggcagcatccactcggaaactgcttcttcagctcaaacaagagttggaaattttgcagaagagtaaagaagaagcttacgtgatggcagatgctttcagaattgcatttgagcaacaattaatgagaaaaaatgaccaggcactacaattgacacaaatggataaaatgcataaaaaagcaacaaaatggatgaattggaagcaccttaaagaggatggatttccatcaccaaggagtaagaagaccttcgggcagagactgttgggtatgctcccttcagaaaacagttctaagaggatggaagaccaggacagtcctcaagaggtccttaagatgctcatagatttgcttaatgataaagaagaagctttggctcatcaaagaaaagttagctacatgcttgctcgggcattggaagacaaagacactgcttcaaacgagaataaagaaaaaaatcctataaaagagaatttccctttcaacaacccctggcgtaagacttcagaattctctgttttgggtgatcctatacattcaagtgtctgcattttaaattctgtgggctgcatttgttcaatccagcactctcaaatagatccaaactatagaactcttaaaagatcccattctttgccatcaagtatcatattttaaagacaagccagttgaaattggaactgagagttgtttatatcgagatactttgaaaaatgattttgtaaattttgctgcatcttgagaagttgtatgtttcctaggtatttctaaattttaggaggtcacttaaatcaaatattttctacattttctttttcttcttttgagatggagtcttgctctgtcacccaggttggagtgcagtggtgtgatctcggttcactgcaacctccgcctcccggttcaagc

SEQ ID NO: 6344 - DNA, 4169 bp, Homo sapiens
  source 1..4169: mol_type = unassigned DNA
ccctgtccccccggactaaatacgcacaccccctctttctttctgtgcaagcaagagggtcctggaacagcgggttctgaggaggctgggaggcagggctgagaggtggccgagagagaggagtcgcagagccgccagagtgagtcaggcacctccactgggattacagatcccagagcctcgaggagctggaagacatgtccccttctttcctctgcaccccagcccgcagccagccccccaccccccagcccctcctttctccctgctctcaggacccacagtgaccactctaggctcctatgaggcttccgagggctgtgagaggaagaagggccaacgctgggggtccctggaacgacgggggatgcaagctatggagggggaggtgttactcccagctctctatgaggaggaagaggaagaggaagaggaggaagaagaggtggaagaagaagaagaacaagtgcagaaaggtggcagtgttggctctctgtcagtcaacaagcaccggggactgagcctcacggagacagagctggaggagctgcgggctcaggtgctgcagctggtggcagaactggaggagacccgggaactggcagggcagcatgaggatgactccttggagctacaggggctcctggaggatgaacggctagccagcgcccagcaggcagaggtgttcaccaagcagatccagcagctccaaggtgagctgcgttctctacgggaggagatttccctgttagagcatgagaaagaaagcgaacttaaggaaatagaacaggaattgcatttggcccaggctgagatccagagtctgcggcaagcagcagaggattccgcaactgaacatgagagtgacatagcatccctgcaggaggatctctgccggatgcagaatgaacttgaagacatggaacgcattcggggagattatgagatggagatcgcctccctccgtgcagaaatggaaatgaagagctctgaaccatccggtagtttaggtctctcagattactctgggttacaagaagaactgcaggagctgcgggaacgctaccatttcctgaatgaggaataccgggccctgcaggagagcaacagcagcctcacggggcagcttgcagatctggagagtgagaggacacagagagcaacagagagatggctgcagtcccaaacactgagtatgacgtcagcagagtctcagacttcagaaatggatttcttagagcctgatcctgaaatgcagttgttacggcagcagctacgggatgctgaagagcagatgcatggcatgaagaacaagtgtcaggaattgtgttgtgagttggaagagctacagcatcatcgccaggtcagtgaggaggagcagaggcggctgcagagggagctcaagtgtgctcagaatgaggtgcttcggtttcagacctcccacagtgtcacccagaatgaggagctgaagtccagactctgtaccctgcagaaaaaatatgatactagccaggatgagcagaacgagctcttgaagatgcagctgcaacttcagactgagctccggcagctcaaagtcatgaaatccacacttgtagaaaaccagagtgagaaggagttactgtgccggctgcagaagctgcacctccagcaccagaacgtcacatgtgagaaggaaaagctgctggaacggcagcagcagctgcaggaggagctgcagtgccatgaggcagagctgcagcacctcagggatacggtggcctccttcaaagagagcaatgagaaggacacagagacgcacgctcagcttcaggagatgaagcagctgtaccaggccagcaaggacgagctggagcggcagaagcacatgtatgaccagctggagcaggacctcctgctctgccagctggagctgaaagagctcaaggcctcccaccccattccggaggacaaaggaaagtgtgctaataagtgtgacacactgctgtccagactgacagaattgcaggaaaagtacaaggccagccagaaggagatggggcagctgcagatggagcagtgtgagctcctggaggatcagaggaggatgcaggaggagcagggccagctgcaggaagagctgcacaggctcacactgccactgccaaagagtggcctcttactcaagagtcaggagctactcaccaagttagaagacctgtgtgagctgcagctgctctaccaaggcatgcaggaggaacagaagaagctgatacagaaccaagactgtgtattaaaagaacaattagagatccacgaagagctgcgacgtttcaaagagtctcatttccaggaagtgttggagaatcccgatgattccaaattggctaagtcctccaaatgtaatcgaaacaagcaatccaagctgctcatggagcagatgcaggccctgcaggtgatgtatgacgccggtcaggcgaagcaggagctcttgcagcaagagcaagggaggctcctagaggagcggaagaggctgcaggcagacttgcagctctgcctggaagaaatgcagctgcttcaagtccagtccccttctataaaaatgagccttgagtcctacgggaagagctatggtagcatggtccccagcaatgagaactgtcgcaagacttatgataccactgtggatgacaatgagagctattacaagagttacaccagcacccagaccagcagcaagagctttctcaagagctatgacagcagcaccagtgccagtgaggcctatgggaagagttactgcactaccagcaacagcagcattacctataagaagagttacggcagcaccagtagctctgacacctgccagaagagttttgtcagcagctgcactgacgaggaacctgctgagcctgaagacatggagcgctttgaggaaatggttgtgaaagtgctgatcaagctgcaggcggtgcaggccatgtaccagataagccaggaggaacacagccagctgcaagagcagatggaaaagttactggccaagcagaaagacctgaaggaagagctggatgcctgtgaaagggagttcaaggagtgcatggaatgccttgaaaagcccatggccccccagaacgacaagaatgagatcaaagaactgcagaccaagctgcgggagctgcagctgcaataccaggctagcatggatgagcaggggcggcttctggtagtgcaggagcagctggaggggcagctgcagtgctgccaggaggagctccgccagctcagggagaagaggccttctgttgtcaaagaagcccgggggaagaatgctaataagaacatgaacaagaatgccaatggggttaaaatgaaaaaggtgaccaagccatgctcggatacttctgagagcgaccttgagaccagaaagagtctggaggtagtgctgtactacaaggccagccagaggaaattagatggactagcaaaagaggaggaaaagaaagaggagatggaggaggaaaaaaagcaagtgaaagaggaagcaaaggagcagtgtggggatgagctagttgctgagccagcagatcctgaggaagctaaatccacagaagatcaggaggaaaatgaagaggacaaagaggaagaggagaaggaagaagacagtgaagaggaggaggatgacgccgactcttcccttgaaagtcccgaagaaaataaccccctcagactttccgagagcaaaaagtcatcccctacccccaatccccccatcttctccttgcctcttgtaggcctggtggtcatctcggctttgctctggtgctggtgggctgagacgtcgtcctaatgcagaacatgtttgggttgtggaagcctatggtattcttggctattgcagctgtggctctgtatgtgttacccaacatgcgacagcaggagtcagagttctgcctcatggagtgatggcagaccttggccagcgcgagggcagatccccagtggccaccaccctcagctttgggcaggacacactgtgccagaaccctccccatatgttccatgtgtccccatctcctcagcctcagtcacccaggctgaaaaggcttgtggggagcggctgacttccatctcctgccttgtgtaagaacctgagttccttgtaattaaatatcaactgaattaca

SEQ ID NO: 6345 - DNA, 3094 bp, Homo sapiens
  source 1..3094: mol_type = unassigned DNA
ttgagggccctggaaggggaggtgttactcccagctctctatgaggaggaagaggaagaggaagaggaggaagaagaggtggaagaagaagaagaacaagtgcagaaaggtggcagtgttggctctctgtcagtcaacaagcaccggggactgagcctcacggagacagagctggaggagctgcgggctcaggtgctgcagctggtggcagaactggaggagacccgggaactggcagggcagcatgaggatgactccttggagctacaggggctcctggaggatgaacggctagccagcgcccagcaggcagaggtgttcaccaagcagatccagcagctccaaggtgagctgcgttctctacgggaggagatttccctgttagagcatgagaaagaaagcgaacttaaggaaatagaacaggaattgcatttggcccaggctgagatccagagtctgcggcaagcagcagaggattccgcaactgaacatgagagtgacatagcatccctgcaggaggatctctgccggatgcagaatgaacttgaagacatggaacgcattcggggagattatgagatggagatcgcctccctccgtgcagaaatggaaatgaagagctctgaaccatccggtagtttaggtctctcagattactctgggttacaagaagaactgcaggagctgcgggaacgctaccatttcctgaatgaggaataccgggccctgcaggagagcaacagcagcctcacggggcagcttgcagatctggagagtgagaggacacagagagcaacagagagatggctgcagtcccaaacactgagtatgacgtcagcagagtctcagacttcagaaatggatttcttagagcctgatcctgaaatgcagttgttacggcagcagctacgggatgctgaagagcagatgcatggcatgaagaacaagtgtcaggaattgtgttgtgagttggaagagctacagcatcatcgccaggtcagtgaggaggagcagaggcggctgcagagggagctcaagtgtgctcagaatgaggtgcttcggtttcagacctcccacagtgtcacccagaatgaggagctgaagtccagactctgtaccctgcagaaaaaatatgatactagccaggatgagcagaacgagctcttgaagatgcagctgcaacttcagactgagctccggcagctcaaagtcatgaaatccacacttgtagaaaaccagagtgagaaggagttactgtgccggctgcagaagctgcacctccagcaccagaacgtcacatgtgagaaggaaaagctgctggaacggcagcagcagctgcaggaggagctgcagtgccatgaggcagagctgcagcacctcagggatacggtggcctccttcaaagagagcaatgagaaggacacagagacgcacgctcagcttcaggagatgaagcagctgtaccaggccagcaaggacgagctggagcggcagaagcacatgtatgaccagctggagcaggacctcctgctctgccagctggagctgaaagagctcaaggcctcccaccccattccggaggacaaaggaaagtgtgctaataagtgtgacacactgctgtccagactgacagaattgcaggaaaagtacaaggccagccagaaggagatggggcagctgcagatggagcagtgtgagctcctggaggatcagaggaggatgcaggaggagcagggccagctgcaggaagagctgcacaggctcacactgccactgccaaagagtggcctcttactcaagagtcaggagctactcaccaagttagaagacctgtgtgagctgcagctgctctaccaaggcatgcaggaggaacagaagaagctgatacagaaccaagactgtgtattaaaagaacaattagagatccacgaagagctgcgacgtttcaaagagtctcatttccaggaagtgttggagaatcccgatgattccaaattggctaagtcctccaaatgtaatcgaaacaagcaatccaagctgctcatggagcagatgcaggccctgcaggtgatgtatgacgccggtcaggcgaagcaggagctcttgcagcaagagcaagggaggctcctagaggagcggaagaggctgcaggcagacttgcagctctgcctggaagaaatgcagctgcttcaagtccagtccccttctataaaaatgagccttgagtcctacgggaagagctatggtagcatggtccccagcaatgagaactgtcgcaagacttatgataccactgtggatgacaatgagagctattacaagagttacaccagcacccagaccagcagcaagagctttctcaagagctatgacagcagcaccagtgccagtgaggcctatgggaagagttactgcactaccagcaacagcagcattacctataagaagagttacggcagcaccagtagctctgacacctgccagaagagttttgtcagcagctgcactgacgaggaacctgctgagcctgaagacatggagcgctttgaggaaatggttgtgaaagtgctgatcaagctgcaggcggtgcaggccatgtaccagataagccaggaggaacacagccagctgcaagagcagatggaaaagttactggccaagcagaaagacctgaaggaagagctggatgcctgtgaaagggagttcaaggagtgcatggaatgccttgaaaagcccatggccccccagaacgacaagaatgagaacatgtttgggttgtggaagcctatggtattcttggctattgcagctgtggctctgtatgtgttacccaacatgcgacagcaggagtcagagttctgcctcatggagtgatggcagaccttggccagcgcgagggcagatccccagtggccaccaccctcagctttgggcaggacacactgtgccagaaccctccccatatgttccatgtgtccccatctcctcagcctcagtcacccaggctgaaaaggcttgtggggagcggctgacttccatctcctgccttgtgtaagaacctgagttccttgtaattaaatatcaactgaattac

SEQ ID NO: 6346 - DNA, 1689 bp, Homo sapiens
  source 1..1689: mol_type = unassigned DNA
gcggctgcggcttctgctcagggaggcggaaggcggcggcgggagcggtcatggaggcgggcgccggagccggcgcgggagccgcgggctggagctgcccgggcccaggacccacagtgaccactctaggctcctatgaggcttccgagggctgtgagaggaagaagggccaacgctgggggtccctggaacgacgggggatgcaagctatggagggggaggtgttactcccagctctctatgaggaggaagaggaagaggaagaggaggaagaagaggtggaagaagaagaagaacaagtgcagaaaggtggcagtgttggctctctgtcagtcaacaagcaccggggactgagcctcacggagacagagctggaggagctgcgggctcaggtgctgcagctggtggcagaactggaggagacccgggaactggcagggcagcatgaggatgactccttggagctacaggggctcctggaggatgaacggctagccagcgcccagcaggcagaggtgttcaccaagcagatccagcagctccaaggtgagctgcgttctctacgggaggagatttccctgttagagcatgagaaagaaagcgaacttaaggaaatagaacaggaattgcatttggcccaggctgagatccagagtctgcggcaagcagcagaggattccgcaactgaacatgagagtgacatagcatccctgcaggaggatctctgccggatgcagaatgaacttgaagacatggaacgcattcggggagattatgagatggagatcgcctccctccgtgcagaaatggaaatgaagagctctgaaccatccgaagaactgcaggagctgcgggaacgctaccatttcctgaatgaggaataccgggccctgcaggagagcaacagcagcctcacggggcagcttgcagatctggagagtgagaggacacagagagcaacagagagatggctgcagtcccaaacactgagtatgacgtcagcagagtctcagacttcagaaatggatttcttagagcctgatcctgaaatgcagttgttacggcagcagctacgggatgctgaagagcagatgcatggcatgaagaacaagtgtcaggaattgtgttgtgagttggaagagctacagcatcatcgccaggtcagtgaggaggagcagaggcggctgcagagggagctcaagtgtgctcagaatgaggtgcttcggtttcagacctcccacagtgtcacccagtcatcccctacccccaatccccccatcttctccttgcctcttgtaggcctggtggtcatctcggctttgctctggtgctggtgggctgagacgtcgtcctaatgcagaacatgtttgggttgtggaagcctatggtattcttggctattgcagctgtggctctgtatgtgttacccaacatgcgacagcaggagtcagagttctgcctcatggagtgatggcagaccttggccagcgcgagggcagatccccagtggccaccaccctcagctttgggcaggacacactgtgccagaaccctccccatatgttccatgtgtccccatctcctcagcctcagtcacccaggctgaaaaggcttgtggggagcggctgacttccatctcctgccttgtgtaagaacctgagttccttgtaattaaatatcaactgaatt

SEQ ID NO: 6347 - DNA, 3694 bp, Homo sapiens
  source 1..3694: mol_type = unassigned DNA
ttgagggccctggaaggggaggtgttactcccagctctctatgaggaggaagaggaagaggaagaggaggaagaagaggtggaagaagaagaagaacaagtgcagaaaggtggcagtgttggctctctgtcagtcaacaagcaccggggactgagcctcacggagacagagctggaggagctgcgggctcaggtgctgcagctggtggcagaactggaggagacccgggaactggcagggcagcatgaggatgactccttggagctacaggggctcctggaggatgaacggctagccagcgcccagcaggcagaggtgttcaccaagcagatccagcagctccaaggtgagctgcgttctctacgggaggagatttccctgttagagcatgagaaagaaagcgaacttaaggaaatagaacaggaattgcatttggcccaggctgagatccagagtctgcggcaagcagcagaggattccgcaactgaacatgagagtgacatagcatccctgcaggaggatctctgccggatgcagaatgaacttgaagacatggaacgcattcggggagattatgagatggagatcgcctccctccgtgcagaaatggaaatgaagagctctgaaccatccggtagtttaggtctctcagattactctgggttacaagaagaactgcaggagctgcgggaacgctaccatttcctgaatgaggaataccgggccctgcaggagagcaacagcagcctcacggggcagcttgcagatctggagagtgagaggacacagagagcaacagagagatggctgcagtcccaaacactgagtatgacgtcagcagagtctcagacttcagaaatggatttcttagagcctgatcctgaaatgcagttgttacggcagcagctacgggatgctgaagagcagatgcatggcatgaagaacaagtgtcaggaattgtgttgtgagttggaagagctacagcatcatcgccaggtcagtgaggaggagcagaggcggctgcagagggagctcaagtgtgctcagaatgaggtgcttcggtttcagacctcccacagtgtcacccagaatgaggagctgaagtccagactctgtaccctgcagaaaaaatatgatactagccaggatgagcagaacgagctcttgaagatgcagctgcaacttcagactgagctccggcagctcaaagtcatgaaatccacacttgtagaaaaccagagtgagaaggagttactgtgccggctgcagaagctgcacctccagcaccagaacgtcacatgtgagaaggaaaagctgctggaacggcagcagcagctgcaggaggagctgcagtgccatgaggcagagctgcagcacctcagggatacggtggcctccttcaaagagagcaatgagaaggacacagagacgcacgctcagcttcaggagatgaagcagctgtaccaggccagcaaggacgagctggagcggcagaagcacatgtatgaccagctggagcaggacctcctgctctgccagctggagctgaaagagctcaaggcctcccaccccattccggaggacaaaggaaagtgtgctaataagtgtgacacactgctgtccagactgacagaattgcaggaaaagtacaaggccagccagaaggagatggggcagctgcagatggagcagtgtgagctcctggaggatcagaggaggatgcaggaggagcagggccagctgcaggaagagctgcacaggctcacactgccactgccaaagagtggcctcttactcaagagtcaggagctactcaccaagttagaagacctgtgtgagctgcagctgctctaccaaggcatgcaggaggaacagaagaagctgatacagaaccaagactgtgtattaaaagaacaattagagatccacgaagagctgcgacgtttcaaagagtctcatttccaggaagtgttggagaatcccgatgattccaaattggctaagtcctccaaatgtaatcgaaacaagcaatccaagctgctcatggagcagatgcaggccctgcaggtgatgtatgacgccggtcaggcgaagcaggagctcttgcagcaagagcaagggaggctcctagaggagcggaagaggctgcaggcagacttgcagctctgcctggaagaaatgcagctgcttcaagtccagtccccttctataaaaatgagccttgagtcctacgggaagagctatggtagcatggtccccagcaatgagaactgtcgcaagacttatgataccactgtggatgacaatgagagctattacaagagttacaccagcacccagaccagcagcaagagctttctcaagagctatgacagcagcaccagtgccagtgaggcctatgggaagagttactgcactaccagcaacagcagcattacctataagaagagttacggcagcaccagtagctctgacacctgccagaagagttttgtcagcagctgcactgacgaggaacctgctgagcctgaagacatggagcgctttgaggaaatggttgtgaaagtgctgatcaagctgcaggcggtgcaggccatgtaccagataagccaggaggaacacagccagctgcaagagcagatggaaaagttactggccaagcagaaagacctgaaggaagagctggatgcctgtgaaagggagttcaaggagtgcatggaatgccttgaaaagcccatggccccccagaacgacaagaatgagatcaaagaactgcagaccaagctgcgggagctgcagctgcaataccaggctagcatggatgagcaggggcggcttctggtagtgcaggagcagctggaggggcagctgcagtgctgccaggaggagctccgccagctcagggagaagaggccttctgttgtcaaagaagcccgggggaagaatgctaataagaacatgaacaagaatgccaatggggttaaaatgaaaaaggtgaccaagccatgctcggatacttctgagagcgaccttgagaccagaaagagtctggaggtagtgctgtactacaaggccagccagaggaaattagatggactagcaaaagaggaggaaaagaaagaggagatggaggaggaaaaaaagcaagtgaaagaggaagcaaaggagcagtgtggggatgagctagttgctgagccagcagatcctgaggaagctaaatccacagaagatcaggaggaaaatgaagaggacaaagaggaagaggagaaggaagaagacagtgaagaggaggaggatgacgccgactcttcccttgaaagtcccgaagaaaataaccccctcagactttccgagagcaaaaagaacatgtttgggttgtggaagcctatggtattcttggctattgcagctgtggctctgtatgtgttacccaacatgcgacagcaggagtcagagttctgcctcatggagtgatggcagaccttggccagcgcgagggcagatccccagtggccaccaccctcagctttgggcaggacacactgtgccagaaccctccccatatgttccatgtgtccccatctcctcagcctcagtcacccaggctgaaaaggcttgtggggagcggctgacttccatctcctgccttgtgtaagaacctgagttccttgtaattaaatatcaactgaattac

SEQ ID NO: 6348 - DNA, 624 bp, Homo sapiens
  source 1..624: mol_type = unassigned DNA
cctccctgcgcacccggctcgggtccccgggctcgcggctgcggcttctgctcagggaggcggaaggcggcggcgggagcggtcatggaggcgggcgccggagccggcgcgggagccgcgggctggagctgcccgggcccagagggtcctggaacagcgggttctgaggaggctgggaggcagggctgagaggtggccgagagagaggagtcgcagagccgccagagacccacagtgaccactctaggctcctatgaggcttccgagggctgtgagaggaagaagggccaacgctgggggtccctggaacgacgggggatgcaagctatggagggggaggtgttactcccagctctctatgaggaggaagaggaagaggaagaggaggaagaagaggtggaagaagaagaagaacaagtgcagaaaggtggcagtgttggctctctgtcagtcaacaagcaccggggactgagcctcacggagacagagctggaggagctgcgggctcaggtgctgcagctggtggcagaactggaggagacccgggaactggcagggcagcatgaggatgactccttggagctacaggggctcctggaggatgaacggctagccagcgcccag

SEQ ID NO: 6349 - DNA, 1720 bp, Homo sapiens
  source 1..1720: mol_type = unassigned DNA
gcggcttctgctcagggaggcggaaggcggcggcgggagcggtcatggaggcgggcgccggagccggcgcgggagccgcgggctggagctgcccgggcccaggacccacagtgaccactctaggctcctatgaggcttccgagggctgtgagaggaagaagggccaacgctgggggtccctggaacgacgggggatgcaagctatggagggggaggtgttactcccagctctctatgaggaggaagaggaagaggaagaggaggaagaagaggtggaagaagaagaagaacaagtgcagaaaggtggcagtgttggctctctgtcagtcaacaagcaccggggactgagcctcacggagacagagctggaggagctgcgggctcaggtgctgcagctggtggcagaactggaggagacccgggaactggcagggcagcatgaggatgactccttggagctacaggggctcctggaggatgaacggctagccagcgcccagcaggcagaggtgttcaccaagcagatccagcagctccaaggtgagctgcgttctctacgggaggagatttccctgttagagcatgagaaagaaagcgaacttaaggaaatagaacaggaattgcatttggcccaggctgagatccagagtctgcggcaagcagcagaggattccgcaactgaacatgagagtgacatagcatccctgcaggaggatctctgccggatgcagaatgaacttgaagacatggaacgcattcggggagattatgagatggagatcgcctccctccgtgcagaaatggaaatgaagagctctgaaccatccggtagtttaggtctctcagattactctgggttacaagaagaactgcaggagctgcgggaacgctaccatttcctgaatgaggaataccgggccctgcaggagagcaacagcagcctcacggggcagcttgcagatctggagagtgagaggacacagagagcaacagagagatggctgcagtcccaaacactgagtatgacgtcagcagagtctcagacttcagaaatggatttcttagagcctgatcctgaaatgcagttgttacggcagcagctacgggatgctgaagagcagatgcatggcatgaagaacaagtgtcaggaattgtgttgtgagttggaagagctacagcatcatcgccaggtcagtgaggaggagcagaggcggctgcagagggagctcaagtgtgctcagaatgaggtgcttcggtttcagacctcccacagtgtcacccagtcatcccctacccccaatccccccatcttctccttgcctcttgtaggcctggtggtcatctcggctttgctctggtgctggtgggctgagacgtcgtcctaatgcagaacatgtttgggttgtggaagcctatggtattcttggctattgcagctgtggctctgtatgtgttacccaacatgcgacagcaggagtcagagttctgcctcatggagtgatggcagaccttggccagcgcgagggcagatccccagtggccaccaccctcagctttgggcaggacacactgtgccagaaccctccccatatgttccatgtgtccccatctcctcagcctcagtcacccaggctgaaaaggcttgtggggagcggctgacttccatctcctgccttgtgtaagaacctgagttccttgtaattaaatatcaactgaatta

SEQ ID NO: 6350 - DNA, 253 bp, Homo sapiens
  source 1..253: mol_type = unassigned DNA
tgctcagggaggcggaaggcggcggcgggagcggtcatggaggcgggcgccggagccggcgcgggagccgcgggctggagctgcccgggcccagcccgcagccagccccccaccccccagcccctcctttctccctgctctcaggacccacagtgaccactctaggctcctatgaggcttccgagggctgtgagaggaagaagggccaacgctgggggtccctggaacgacgggggatgcaagctatggaggg

SEQ ID NO: 6351 - DNA, 723 bp, Homo sapiens
  source 1..723: mol_type = unassigned DNA
gggggtcttccggccctgaggcttgatggggccaccggagggctcctcctaagagggtccttggccctggctcggtggggggtcgcggaaagcggagaggtcagggccctgccgttcgcccatccgggcctcgacttccctcctccggcccccaggctgccgaggggccaccgggcaggggtgggcagggcctggggccggagtcagcgcggactgctaggacccacagtgaccactctaggctcctatgaggcttccgagggctgtgagaggaagaagggccaacgctgggggtccctggaacgacgggggatgcaagctatggagggggaggtgttactcccagctctctatgaggaggaagaggaagaggaagaggaggaagaagaggtggaagaagaagaagaacaagtgcagaaaggtggcagtgttggctctctgtcagtcaacaagcaccggggactgagcctcacggagacagagctggaggagctgcgggctcaggtgctgcagctggtggcagaactggaggagacccgggaactggcagggcagcatgaggatgactccttggagctacaggggctcctggaggatgaacggctagccagcgcccagcaggcagaggtgttcaccaagcagatccagcagctccaaggtgagctgcgttctctacgggaggagatttccctgttagagcatgagaaagaaagcgaacttaag

SEQ ID NO: 6352 - DNA, 552 bp, Homo sapiens
  source 1..552: mol_type = unassigned DNA
agacccccaggtgctcccggcctccgcggctcccctttctccgcccaaagtcttcctccctccatcctggcctccaccggggcccggtctccatccttccggcctgggactgaggcttccgcgcaccggccgcatcctgcctggtggtccctccccagcgcgtctctccacttcagtccgacggtgcttccagccttcgggactgcagaccctacacctcctgcagccccggagactcctgagcgcggggcgagggtggggtgggcaaggacccacagtgaccactctaggctcctatgaggcttccgagggctgtgagaggaagaagggccaacgctgggggtccctggaacgacgggggatgcaagctatggagggggaggtgttactcccagctctctatgaggaggaagaggaagaggaagaggaggaagaagaggtggaagaagaagaagaacaagtgcagaaaggtggcagtgttggctctctgtcagtcaacaagcaccggggactgagcctcacggagacagagctggaggagctgcgggctca

SEQ ID NO: 6353 - DNA, 2109 bp, Homo sapiens
  source 1..2109: mol_type = unassigned DNA
ggaagtggcttcgctagggagcctcccggcgtggagatggcgggagctggtcgcggagcagcggtgtccagggtgcaggcgggtcctgggagtccccggcgagcgcgggggcggcagcaagtgcagccgctggggaagcagcgcccagccccgtggcccgggcttcgcagcaaagagaagaagaaagtgaactgcaagcccaagaaccaggacgaacaggagattcctttccggctccgggagattatgaggagccgccaagagatgaaaaacccgatcagtaacaagaagaggaagaaagcagcccaggtgaccttcagaaagacattggagaaggaagcaaagggagaggagcccgacatcgcagtccccaagttcaaacagaggaagggggagtctgacggggcctatatccaccgcatgcagcaagaggcccagcatgtgctgttcctcagcaagaaccaggccatccggcagccagaggtgcaggcagctcccaaggagaagtctgagcagaaaaaagcaaaaaaagcgttccagaagcggcgactagataaagtccgacggaaaaaggaggaaaaggcggcagacaggctggagcaggagttgctccgagacacggtgaagtttggtgaggttgtcctgcagcccccagagctgactgccaggccccagaggagcgtaagcaaggaccagcctggcaggagatcgcagatgctgcggatgcttctgagccccggtggtgtgtcccagcctctgaccgcctccctggcccgccagcggattgtggaggaggagagagagcgggccgtgcaggcctacagagcgttgaagcagcggcagcagcagctgcacggggagcgaccccacctcacttcccggaagaagccagagccgcagctgtgatggagagacacccggggcctggccacgctctggggcaactggcaccaggagctgctacacctgggtaggagagaggcaggccatgccagcagtgtggggtgaggcctccagctacttgttcacacgttgggcactagtgggtccacatcttgcagggggtgagtgcccgatggactagggccaaggcctggttgacagacggcccgtggggcccggtgtcactcacagctccatctctttgttttgaacgtccattctgagtctcagcccaggtggaccttaggaagggctggatccctgtccctgaacaccaaataccgagacagctgatgaggctggctcagtgtgtgacggaggcccccgggagtcagcagagccgagcgtacagtgcacatcaggcagagcaggccacgggcagggacgacgcatcgggacagggctctgcaggggaccgtgactacaggccagctgtgagtggtcccctacagaggctgcccacccaaggtttggttggggtgaaacatgatgacaacacatacacttaagaaggtgggaaccgggggccgggcgcggtggctcacacctgtaatgccagcactttgggcagctgaggcgagtggatcacctgaggtcaggagttcgaaccagcctggccaacatggtgaaactgcatctctactaaaaatacacgaagaaaaaaaaaacagtgggaacagagttgtcacctacctaacagggctctgagagagccgggaggcccaaagtggctggaagaaggtaaaggaaaaatcctgtcttgggctcaaggtcacagagtggggcccagggggagttcctgctgagggcagggccttgccaggcttcagtctccagtgccaaaggaggaaatgcccaggctgtcagcatttccagatgagagcagaagggagaagcttaaacccaagtcacacatccagcaatggagtccgacagcccagcaccatctgggaactgagaagcacctctgcccggcccccacaccgtgtggaaagtgaggagcacctctgcctggccgccaccccgtctggcaagtgaggagcgcctctgcccggccgctgtgcaaccttccaagtgtgaagtgacagccttgtgtgtgatgttttctgccttccccaagtttgcactttcgacattaaagtttactttttagttaaaagttttaaa

SEQ ID NO: 6354 - DNA, 1842 bp, Homo sapiens
  source 1..1842: mol_type = unassigned DNA
cactagggccttggcggcgccgaggcggcagcagaagtccggagtcagggcgtgtggctgaggagatgccactaagcacagctggcatcctgagctcctcttctgccgcttccaacaggtcaaggaataaggctcgctatcggaccaaagccgtgagctctgaggtggatgagagcctctttggagatatcaagtccccagcccagggccagagcgacagccccattgtgctgctccgagataagcatacccttcaaaaaactctcactgctttgggcttggatcgcaagccagagaccatccagctcatcacccgggacatggtccgagaactcattgttcccacagaggatccctccggggagtccctaatcatcagccctgaggagtttgagcgaatcaaatgggcatcccatgtcctgaccagagaagaacttgaggccagggaccaggccttcaagaaggagaaggaagccaccatggatgcagtgatgacacgaaagaagatcatgaaacagaaggagatggtgtggaacaacaacaagaagctcagtgacctggaggaggtggccaaggaacgggcccagaacctcctgcagagagccaacaagctgcggatggagcaggaggaggagctcaaggacatgagcaagattatcctcaatgctaagtgccatgccatccgggatgcccaaatcctggagaagcagcagatccaaaaagaactggacacagaagagaagcggttggatcagatgatggaagtggagcggcagaaatccattcaaaggcaggaggaactggagaggaagaggagggaggaaagaattagaggaaggcggcaaattgtggaacagatggaaaagaaccaggaggagcgatcgctgcttgctgagcagcgggagcaggagaaggagcagatgctggaatatatggaacagctccaagaggaagatctaaaggacatggaacgaaggcagcaacaaaaactgaagatgcaagctgagattaagcgcatcaatgatgaaaaccagaaacagaaagcagaactgctggctcaggagaagctggcagaccagatggtgatggagtttaccaagaagaagatggctcgagaagcagagtttgaggctgagcaggagagaatccggagggagaaagagaaggagatcgcacgcttgagggccatgcaggagaaggcccaggattaccaggcagaacaggatgccttgcgggccaagcgcaaccaggaggttgcagacagagagtggcgcagaaaggaaaaggaaaatgcgcggaagaagatggaaacagaggctgagctgcgaaaaagtcggctcgaacaggtggctttcaaggagcacgctctggctgttcaggtgcaacgggaccgggatgagttcgagaggattcttcgggctcagagagaacagattgagaaggagcggctggaggaggagaaaaaggccacagggcgcttacagcatgccaatgagctccggcgccaggtgcgcgagaaccagcagaaggaagtgcagaaccggattgccacctttgaggagggccggcgcctcaaagaggaggcccagaaacgccgtgagcgcatcgatgagatcaagaggaaaaagcttgaagagctgagagccactggccttcccgagaagtactgcattgaagctgagcgcaaagctaacatcctgccagctacctctgtgaactgaggggagccttcgtggccctcaggatgccttcgggggacagattctgcccagtctctgggcatccataattgctgctaacctagacatttcatagttacagattaaatctacttgactttaa

SEQ ID NO: 6355 - DNA, 1976 bp, Homo sapiens
  source 1..1976: mol_type = unassigned DNA
gatggccaacttggtcccaattgaagaaagaggataattgcgtggatcactcagagtaaaaggcaaggggtctcgtgcatgggaatctccctttcttggtaaccaaagtctacagaaagggaagtagaaccaggccaagagtttgaagcctgaatttgccagcctgcggagactgtgcaaaagaagaactagatctcagaatggccactaagcacagctggcatcctgagctcctcttctgccgcttccaacaggtcaaggaataaggctcgctatcggaccaaagccgtgagctctgaggtggatgagagcctctttggagatatcaagtccccagcccagggccagagcgacagccccattgtgctgctccgagataagcatacccttcaaaaaactctcactgctttgggcttggatcgcaagccagagaccatccagctcatcacccgggacatggtccgagaactcattgttcccacagaggatccctccggggagtccctaatcatcagccctgaggagtttgagcgaatcaaatgggcatcccatgtcctgaccagagaagaacttgaggccagggaccaggccttcaagaaggagaaggaagccaccatggatgcagtgatgacacgaaagaagatcatgaaacagaaggagatggtgtggaacaacaacaagaagctcagtgacctggaggaggtggccaaggaacgggcccagaacctcctgcagagagccaacaagctgcggatggagcaggaggaggagctcaaggacatgagcaagattatcctcaatgctaagtgccatgccatccgggatgcccaaatcctggagaagcagcagatccaaaaagaactggacacagaagagaagcggttggatcagatgatggaagtggagcggcagaaatccattcaaaggcaggaggaactggagaggaagaggagggaggaaagaattagaggaaggcggcaaattgtggaacagatggaaaagaaccaggaggagcgatcgctgcttgctgagcagcgggagcaggagaaggagcagatgctggaatatatggaacagctccaagaggaagatctaaaggacatggaacgaaggcagcaacaaaaactgaagatgcaagctgagattaagcgcatcaatgatgaaaaccagaaacagaaagcagaactgctggctcaggagaagctggcagaccagatggtgatggagtttaccaagaagaagatggctcgagaagcagagtttgaggctgagcaggagagaatccggagggagaaagagaaggagatcgcacgcttgagggccatgcaggagaaggcccaggattaccaggcagaacaggatgccttgcgggccaagcgcaaccaggaggttgcagacagagagtggcgcagaaaggaaaaggaaaatgcgcggaagaagatggaaacagaggctgagctgcgaaaaagtcggctcgaacaggtggctttcaaggagcacgctctggctgttcaggtgcaacgggaccgggatgagttcgagaggattcttcgggctcagagagaacagattgagaaggagcggctggaggaggagaaaaaggccacagggcgcttacagcatgccaatgagctccggcgccaggtgcgcgagaaccagcagaaggaagtgcagaaccggattgccacctttgaggagggccggcgcctcaaagaggaggcccagaaacgccgtgagcgcatcgatgagatcaagaggaaaaagcttgaagagctgagagccactggccttcccgagaagtactgcattgaagctgagcgcaaagctaacatcctgccagctacctctgtgaactgaggggagccttcgtggccctcaggatgccttcgggggacagattctgcccagtctctgggcatccataattgctgctaacctagacatttcatagttacagattaaatctacttgacttt

SEQ ID NO: 6356 - DNA, 2319 bp, Homo sapiens
  source 1..2319: mol_type = unassigned DNA
ctcacatccggcatgcgccgtgctcgctcacagaactacactttccaactctccccacacgacccgtgacactctgtggaccgcgagcacggagcagggtttctacagctgctccccactttctcggacccggtcctggacccagcccccgactccgacacggctccaccatggaggaggcggaccgaatcctcatccattcgctgcgccaggccggcacggcagttcctccagatgtgcagaccttgcgcgccttcaccactgagctggttgtagaggctgtggtccgctgcctgcgtgtgatcaaccctgcggtgggctctggcctcagccctctgctgcctcttgccatgtctgcccggttccgcctggccatgagcctggctcaggcctgcatggacctgggctatcccttggagcttggctatcagaacttcctctaccccagtgagcctgacctccgagacctgcttctcttcttggctgagcgtctgcccaccgatgcctctgaggatgcagaccagcctgcaggtgactcagctattctcctccgggccattgggagccaaattcgggaccagctggcactgccttgggtcccgccccaccttcgcactcccaagctgcagcacctccagggctcggccctccagaagcctttccatgccagcaggctggtcgtgccagaattgagttccagaggtgagccacgggagttccaggcgagtcccctgctgcttccagtccctacccaggtgcctcagcctgttggaagggtggcctcgctcctcgaacaccatgccctgcagctctgccagcagacgggccgggaccggccaggggatgaggactgggtccaccggacatcccgcctcccaccccaggaggacacacgggctcagcggcagcggctgcagaagcaactgactgagcatctgcgccaaagctggggcctgcttggggcccccatacaagcccgggacctgggagaactgctgcaggcctggggtgctggggccaagactggtgctcctaagggctcccgcttcacgcactcagagaagttcaccttccatctggagccccaggcccaggccactcaggtgtcagatgtgccagccacctcccggcggcctgaacaggtcacgtgggcagctcaggaacaggagctcgagtcccttcgggagcagctggaaggagtgaaccgcagcattgaggaggttgaggccgacatgaagaccctgggcgtcagctttgtgcaggcagagtctgagtgccggcacagcaagctcagtacagcagagcgtgagcaggccctgcgcctgaagagccgcgcggtggagctgctgcccgatgggactgccaaccttgccaagctgcagcttgtggtggagaatagtgcccagcgggtcatccacttggcgggtcagtgggagaagcaccgggtcccactcctcgctgagtaccgccacctccgaaagctgcaggattgcagagagctggaatcttctcgacggctggcagagatccaagaactgcaccagagtgtccgggcggctgctgaagaggcccgcaggaaggaggaggtctataagcagctgatgtcagagctggagactctgcccagagatgtgtcccggctggcctacacccagcgcatcctggagatcgtgggcaacatccggaagcagaaggaagagatcaccaagatcttgtctgatacgaaggagcttcagaaggaaatcaactccctatctgggaagctggaccggacgtttgcggtgactgatgagcttgtgttcaaggatgccaagaaggacgatgctgttcggaaggcctataagtatctagctgctctgcacgagaactgcagccagctcatccagaccatcgaggacacaggcaccatcatgcgggaggttcgagacctcgaggagcagatcgagacagagctgggcaagaagaccctcagcaacctggagaagatccgggaggactaccgagccctccgccaggagaacgctggcctcctaggccgggtccgggaggcctgaggagccgccggcagaggtctctccccagcctcaggcagggatttggggtgctggaggcagtggccaagcacatgccctagctacttcctccgctgtccagttcctcctgctgcggccttggacccagacccctgcccactgaccgcaacccttatatggggtgatagtccagcatgtggggagctcggctgcagtttattggggacggtactgtgggttgggggccttggatcccaaataaatgagtagttcctctgcagtctaa

SEQ ID NO: 6357 - DNA, 1921 bp, Homo sapiens
  source 1..1921: mol_type = unassigned DNA
atccggcatgcgccgtgctcgctcacagaactacactttccaactctccccacacgacccgtgacactctgtggaccgcgagcacggagcagggtttctacagctgctccccactttctcggacccggtcctggacccagcccccgactccgacacggctccaccatggaggaggcggaccgaatcctcatccattcgctgcgccaggccggcacggcagttcctccagatgtgcagaccttgcgcgccttcaccactgagctggttgtagaggctgtggtccgctgcctgcgtgtgatcaaccctgcggtgggctctggcctcagccctctgctgcctcttgccatgtctgcccggttccgcctggccatgagcctggctcaggcctgcatggacctgggctatcccttggagcttggctatcagaacttcctctaccccagtgagcctgacctccgagacctgcttctcttcttggctgagcgtctgcccaccgatgcctctgaggatgcagaccagcctgcaggtgactcagctattctcctccgggccattgggagccaaattcgggaccagctggcactgccttgggtcccgccccaccttcgcactcccaagctgcagcacctccagggctcggccctccagaagcctttccatgccagcaggctggtcgtgccagaattgagttccagaggtgagccacgggagttccaggcgagtcccctgctgcttccagtccctacccaggtgcctcagcctgttggaagggtggcctcgctcctcgaacaccatgccctgcagctctgccagcagacgggccgggaccggccaggggatgaggactgggtccaccggacatcccgcctcccaccccaggaggacacacgggctcagcggcagcggctgcagaagcaactgactgagcatctgcgccaaagctggggcctgcttggggcccccatacaagcccgggacctgggagaactgctgcaggcctggggtgctggggccaagactggtgctcctaagggctcccgcttcacgcactcagagaagttcaccttccatctggagccccaggcccaggccactcaggtgtcagatgtgccagccacctcccggcggcctgaacaggtcacgtgggcagctcaggaacaggagctcgagtcccttcgggagcagctggaaggagtgaaccgcagcattgaggaggttgaggccgacatgaagaccctgggcgtcagctttgtgcaggcagagtctgagtgccggcacagcaagctcagtacagcagagcgtgagcaggccctgcgcctgaagagccgcgcggtggagctgctgcccgatgggactgccaaccttgccaagctgcagcttgtggtggagaatagtgcccagcgggtcatccacttggcgggtcagtgggagaagcaccgggtcccactcctcgctgagtaccgccacctccgaaagctgcaggattgcagagagctggaatcttctcgacggctggcagagatccaagaactgcaccagagtgtccgggcggctgctgaagaggcccgcaggaaggaggaggtctataagcagctgatgtcagagctggagactctgcccagagatgtgtcccggctggcctacacccagcgcatcctggagatcgtgggcaacatccggaagcagaaggaagagatcaccaagatcttgtctgatacgaaggagcttcagaaggaaatcaactccctatctgggaagctggaccggacgtttgcggtgactgatgagcttgtgttcaaggatgccaagaaggacgatgctgttcggaaggcctataagtatctagctgctctgcactttattggggacggtactgtgggttgggggccttggatcccaaataaatgagtagttcctctgc

SEQ ID NO: 6358 - DNA, 1089 bp, Homo sapiens
  source 1..1089: mol_type = unassigned DNA
aaagccaccaccattttgtaaggaactgtagcttctctctgaaactgccgggaaagggaaaatctttttaaaatagacatcacacaaccaacagggtcccctaggttcaggcggggaggtgaggtcgagtgagaggaactgcttagcatacgcggggatgctcctcccatctcaccccaccgcgctaaggagaaggtcactttctctttaaatgcaaatgaactccctccagcttagctttcacccggtggtgttcccgggaggagagggcggagggcggagggaacttgcaccgaagcatcactcgagaccccaaacctccaggcctgaggcccagccagcgcccaatggatgacaaaaagaagaaacggagtcccaagccctgcctggcccagccagcccaggccccaggcacactacggagggtccctgtgcctaccagccacagcggctccttggccctaggacttcctcatctgccatcccccaagcagcgggccaagttcaagagagtaggcaaagagaagtgccgcccagtcctggctggaggtggaagcggctctgcaggcacgcccctgcagcactccttcctgaccgaggtgactgatgtctatgagatggaggggggactcctgaacctgctcaatgatttccactctggccggctgcaggccttcgggaaggaatgctcctttgagcagctggagcacgttcgggagatgcaggagaagctagcccggctgcacttcagcctggatgtgtgtggggaggaggaggacgatgaagaggaagaggatggggtcactgaggggctgccagaggagcagaagaagacaatggctgaccgtaacctggaccagctgcttagcaatctggaagacctcagtaattctatccagaagctgcacctggccgagaacgccgagcctgaggagcagtccgctgcgtaggcgtcccacgcaggcccacactgcccctctcattctcttcaaactgtgactttttacagactcgggcgggtgttctgcggccccccaggtgctatgggggaggggggcgttgaatggaattaaaccagaaagaaagcaa

SEQ ID NO: 6359 - DNA, 2109 bp, Homo sapiens
  source 1..2109: mol_type = unassigned DNA
tccccgccgcggctccgccagtttgaacttggcgggccagatgtgggcggcggggcgctgggggcctacttttccctcttcctacgccggtttctctgctgactgcagacccaggtctcggccctcctcggactcctgctcagtccctatgacgggcgcacgtgggcaggggctggaggtggtgcgctcgccgtcgccgccgctgccgctgagctgcagcaattccaccaggtcgctgttgtctccccttggccaccagagcttccagtttgacgaggacgacggtgacggggaggatgaggaagacgtggatgatgaggaagacgtggatgaagatgcccatgattcagaggccaaagtggcgagcctgagaggaatggagttacaggggtgcgccagcactcaggttgaatcagaaaataaccaagaagaacagaaacaggtgcgcttaccagaaagccgcctgacaccatgggaggtgtggtttattggcaaagaaaaagaagaacgtgaccggctgcaactgaaagctctagaggaattaaatcaacaactagaaaaaagaaaagaaatggaagaacgtgaaaaaagaaagataattgctgaagaaaagcacaaggaatgggttcagaaaaagaatgagcaagtaaggaggggaaaatggatacacacattgacatctcttttgcaaaatatttcttcctattatacttcattacctaggttttaaaaaatacttctcttagagtctttcttctttggcttgttttgtttttctatcctggtggacatttatcaagtctctatcttctgccctttgccctctacttttctcctttttccctcctgtggcttgcactaatatttgcctgcaggcagtcaccaagtctgtatttctaggcctgaccttttggatccttatggcaagtgcctccaagtctgcaaatctaaaacaacccattttgcccatttctccttcgtaaatccatcctcccatttctctgtttcattcagctgtcttctcggtcatcaaggcttaattagaattcttctgttgttcctaatcatctcctccttttctttacaattactactcccctgtttgtgatctctttccattatatctttcaacttgttgtttacttcttatactggattgtaagctacataagggcagggatttttgcctcttttgttcagttttccaggagctagatgaatacctgcgcatgatatatgtccaaaaatagtttaattgagtgaagatgttcattgaatggctgcattttttccttttaattttaatatattcttctatggatcacacacattcgaaattttaaaaatacttattctgtggtcaatttgtcttctgttgtgatttttacatatttagagtggtactgcttttattattataatccagttttacaaatgtggaaaaatgtttaaattgtaggacaatattttaaattttaattctaactttttatctttattgttgaatctaatgcctaatggtattaataagagtactaagtaaataatttcagtaaattgaagatgatataaccttcttcatccaagtattataagaaggaaattggttagatgtatgtgtgttataaccatatttgtttagaagtcaattactttgtttttttaaaaaagtttacttcatcccatgatataacatgaaagagatctttgtgaataaattcaaaaatcaaaataaatctctgtgactgttataaaactttgggtaatatctttttgaaatttgtaactataaaacaaaattattttacacatgcagaatagtttgctctttcctctaaaagtccttcttatcttctaactccattaagctaattttaccatgccaatcaaacctagttgttgtttgtctaggaatgtaagatacttctgggagacaatatattcactgttttaattagtggcagtagacctaatccaattatttgaagaaaaaaaaaattatttcttttggagggaagtggcttgccctgacataaatcactagttattgaaggcaaaattccgtaatgttgagaattatttaaaaataaaactgagacgttatattta

SEQ ID NO: 6360 - DNA, 2088 bp, Homo sapiens
  source 1..2088: mol_type = unassigned DNA
gagacttttaatcatctatcccttgtgctttacgcagaccctacaatacactagaggcttcaaagaggtcaaaaattcacatgtgtagacaaattaggtcccttaagatgccaggcaaacgaagtgctaccaaaacacgcaatgactgtcctaaaagtgcgttctgggatacacctgtaaacttggatcaagttccctcccctctcctcaaaatatatcgacttgtgctgaaagaaatcacgaccgatgctcacaattctgacctcgtaattatatagggggtggttttggtttctgcgtctttccctgattcagtggcaggtaacatatttcatgtacaaaatgaactgcaacaccacggcaaacaagggacaggccctcaaagttgtcggtagggagccaggaccccgccagtggcgtggggagacaccgtactaaacaagcttgcaaacagcaggcaccttcctgccactgaggaggaagggctggctaagggaggccggggcggaggaagccaagctctgcaggccctgacaaagtcctcccggcctccacgcgtcgccatggcaacgcggggtctgtgctggccgggattggccggcctggcgcgcgcagggcccgctgggaaagcgcgtccccgccgcggctccgccagtttgaacttggcgggccagatgtgggcggcggggcgctgggggcctacttttccctcttcctacgccggtttctctgctgactgcagacccaggtctcggccctcctcggactcctgctcagtccctatgacgggcgcacgtgggcaggggctggaggtggtgcgctcgccgtcgccgccgctgccgctgagctgcagcaattccaccaggtcgctgttgtctccccttggccaccagagcttccagtttgacgaggacgacggtgacggggaggatgaggaagacgtggatgatgaggaagacgtggatgaagatgcccatgattcagaggccaaagtggcgagcctgagaggaatggagttacaggggtgcgccagcactcaggttgaatcagaaaataaccaagaagaacagaaacaggtgcgcttaccagaaagccgcctgacaccatgggaggtgtggtttattggcaaagaaaaagaagaacgtgaccggctgcaactgaaagctctagaggaattaaatcaacaactagaaaaaagaaaagaaatggaagaacgtgaaaaaagaaagataattgctgaagaaaagcacaaggaatgggttcagaaaaagaatgagcaaaaaagaaaagaaagagaacaaaaaattaataaagaaatggaggaaaaagcagcaaaggaactggagaaagaatacttgcaagaaaaagcaaaagaaaaatatcaagaatggttaaagaaaaaaaatgctgaagaatgtgagaggaagaagaaagaaaaggaaaaagaaaaacaacagcaagctgaaatacaggagaaaaaggaaatagcagaaaaaaagtttcaagaatggttggaaaatgcgaaacataaacctcgtccagctgcaaagagctatggttatgccaatggaaaacttacaggtttttacagtggaaattcctatccagaaccagccttttataatccaattccgtggaaaccaattcatatgccacctcccaaagaagctaaggatctatcaggaaggaagagtaaaagacctgtgataagtcagccacacaagtcatcatctctggtaattcataaagccaggagcaatctttgccttggaactctgtgcagaatacaaagatagcgtatgtggaaaataacatgcttttatctggagctatttaatttaaaaatcagaaattgttttttactgctcagtcaataactcaacacttaatgtgattattgacaaatagcaatttttgcatttgtatatggagtccttagagttgaggaagatattttctggattttggtttttataaactttttaaggttgatcttggcatgttgttttgcagaataagtggctgaatatgtaagaattgtgtttgtatttagcttgtattaaaagtacactgtaataccaataaaac

SEQ ID NO: 6361 - DNA, 4450 bp, Homo sapiens
  source 1..4450: mol_type = unassigned DNA
tctttatacttttgtattgtttaattttttttaacagttgtcttgttttttcttctgcagtgaaaataatggtgacaagaagcccactgcctgattcacataagcaaggcatgctgcagggaagacagggttcttattaatatttcctttcatgtgcttacatatgagttacagttgctaatcctttcccacagtttagcacctagttaaaagaaagggcttcggaatcaggtaagtgtagattaaagttataacggcaaattgctgaacctttggaagcctcggtttttccacctggaaaatggatttttatcttacaggactgtcgtgaggattgatgagctaacattcctaaatcagggagtttgaagtctggcccagggtattttcctcctttcctgaaataatgtgtagttctgaccaagtgagaagaatcataagaatatgggattttgaaaaacatgaaaacatcctaagaaataccaggaaggagtcccacagtgaagcacaaatgaaactcaagatgactgcctaaaataagaaatcatggatcttaggagaaagggggcaaggaagtaaatcaaaggacaaagctgaagaccaagtggaccgaaaagaagatggaatacattttcccaaacactggtgttctctggagttggcttatcaacatcttgtgcaatcggaggatcgtgtggtttacttccagccagctgccccgtggtcctccagccagctccgggggccacagttttcacacgctccgggagcgatccgagagccgccttttcgtggaaagttacgctgccgcctggcaacccccgggaacgtcgggaggggcaagttgctgctcatccctcagtgctcaagtcatgagtagcgaattcctggctgagctgcactgggaggatgggttcgccatcccggtggcgaacgaggagaacaagctactggaagatcagttgtcaaagctgaaggatgaaagagcaagcttgcaagatgagttacgtgagtatgaagagcgaattaattctatgacttctcacttcaaaaatgttaagcaagagctctcaattacacagtctctttgcaaagcaagggagcgtgagactgaaagtgaagaacattttaaggccattgctcaaagagaattgggacgagtgaaagatgaaattcaacggctggaaaatgagatggcttcaatactggaaaagaaaagtgataaagaaaatggcatatttaaagccactcaaaaattggatggtttgaaatgtcaaatgaactgggaccagcaagcattggaggcctggttagaagaatcagctcataaagatagtgatgctctcactctccagaagtatgcacaacaagatgataataaaatcagggcactgactctgcaattagaaagactaactttggaatgtaatcagaaaagaaagatacttgacaacgaacttacagagactataagcgcacagttagaattggataaagcagcacaagattttcgtaagattcataatgaaagacaagaactcattaaacaatgggagaacacaatagaacagatgcagaagagggatggagacatagataactgtgctttggaattagcaaggataaagcaggaaacgagagaaaaagaaaatttggttaaagaaaagatcaagtttttggaaagtgagattgggaataacacagagtttgagaaaagaatttctgtggctgatcgtaaacttttaaaatgtagaacggcatatcaggaccatgaaactagtagaattcagctgaagggtgagctggattctttaaaagccactgtgaatagaacttccagtgatttagaagctctgaggaaaaatatttccaagataaagaaggacattcatgaagaaacagcaaggttacaaaaaactaaaaatcataatgagataatacaaacaaaattaaaggagataactgagaaaaccatgtctgtagaagagaaagctactaatttggaagatatgctaaaggaggaggaaaaagatgtgaaggaagtagatgttcaactgaacctcataaaaggtgtgctgtttaagaaagctcaggagttacagactgagacaatgaaagaaaaagctgttttatcagaaattgaaggaactcgttcctctctgaaacatctcaaccatcagttacaaaaactggattttgaaaccttgaagcagcaagaaattatgtacagccaggattttcacattcaacaagtggaacggagaatgtcacggttaaagggagaaattaattcagaagaaaaacaagcgcttgaagcaaaaattgttgaacttaggaagtctttggaagagaaaaaatctacatgtggccttttggaaacacagatcaagaagcttcataatgatctttattttatcaagaaggcacatagtaaaaacagtgatgaaaaacagtcccttatgaccaaaataaatgaactaaaccttttcatcgacagatcagagaaagaacttgataaagccaaaggttttaagcaggatttgatgatagaggacaatcttttaaaacttgaagttaagcgtactcgagaaatgcttcacagtaaggcagaagaagttctttccctagaaaaaagaaaacagcaattatacacagcaatggaagagcgaactgaagaaatcaaggttcataaaacaatgcttgcgtcacaaataagatatgttgatcaagaacgggaaaacataagcactgagtttcgcgagcggctaagtaaaattgagaagctgaagaatagatatgaaattctgactgttgttatgctgcctcctgaaggagaagaggagaaaacacaggcctattatgtaataaaggtgatgagtatgagctaaaaattcaactagaagaacaaaaaagagctgttgatgaaaaatacagatacaaacaaagacaaatcagagaacttcaagaagacatccagagcatggaaaatacattagatgttatagaacatttggcaaataatgttaaagaaaagttatcagagaagcaggcttattcatttcaactaagtaaagaaacggaggagcagaagccaaaattagaaagagtgaccaaacagtgtgcaaaactcacaaaggaaatccgtcttttgaaagacacaaaagatgaaacaatggaagaacaagacatcaaacttcgtgaaatgaaacagtttcacaaagttattgatgaaatgttagttgatatcatagaagaaaatactgagatccgtattatccttcaaacatactttcaacagagtgggttagaactacctacagctagcacaaaaggcagtcgtcagagctctagatctccttcacatacttcactatcagcaaggtcatctaggagtacaagtacatctacttctcagtcttcaattaaagtactggagcttaaattcccggcctcctcttcactagtaggcagcccttctaggccatctagtgctagtagtagctctagtaatgttaagagcaaaaagagcagcaaataaacattttaatctcttctgaaaaagttgtaaacacaaaaacaaaaatatactttaaaatacaaaacgacccaacacattttatctagtggaaagtgtaaaaacttagtggtaagtgtaaaaactgatagttttaaaaaaaaaggaacgttctcattttctctactgttttcttcatactgaagaaattaatagcagattcttgacaaggctacatgttatacaagcataggaaaaatgctgtatttcactgtaattctgatgttcgtagtgttagaaaatagtttgcttcattatttcacgaaactacactcacttctaatgtaacaatctttcaagaagaaatttctaaagatttactgtactattatgagcgtattgcaatgtgaaaatctcatttaccctacaagacaccaaaattaggttttctttattcaaagtaactatttctcagacttttggggagaaaaattgttaaaggcagtttcttcttttgctataatttttaaccaaaaaatagcatcaacccctacccaccccacccccccaaaaaaaaaccggtaagagaaacactgtatatcaattttaaaatgcagcataaatttagaaaaatcacttctgaccttgaaataaatcacttctgaccttgaaataaacgcattaaagatttgctttcagatacagccaaccaagtataaacaattttgaaattttcttgatttaataaacgatttaatgaaagctaggtatgacttgatttgcaatagaaatttcatttacagttggaggtagactgccaaatgtagtagtttttccagttaacacttcattataacatgtgcccaacactttgtactcttggaatagagtgtggaatattataaaactggattttaaataaatgtattagaattc

SEQ ID NO: 6362 - DNA, 3279 bp, Homo sapiens
  source 1..3279: mol_type = unassigned DNA
agggctcccccggcaattgccgcggcactgtgcaggtgcctgggcttgacgcgggtgctgctcacccgctgtacaagaaggcggatctttgctctgtatcttctctatccgtttgcagtcatgagtagcgaattcctggctgagctgcactgggaggatgggttcgccatcccggtggcgaacgaggagaacaagctactggaagatcagttgtcaaagctgaaggatgaaagagcaagcttgcaagatgagttacgtgagtatgaagagcgaattaattctatgacttctcacttcaaaaatgttaagcaagagctctcaattacacagtctctttgcaaagcaagggagcgtgagactgaaagtgaagaacattttaaggccattgctcaaagagaattgggacgagtgaaagatgaaattcaacggctggaaaatgagatggcttcaatactggaaaagaaaagtgataaagaaaatggcatatttaaagccactcaaaaattggatggtttgaaatgtcaaatgaactgggaccagcaagcattggaggcctggttagaagaatcagctcataaagatagtgatgctctcactctccagaagtatgcacaacaagatgataataaaatcagggcactgactctgcaattagaaagactaactttggaatgtaatcagaaaagaaagatacttgacaacgaacttacagagactataagcgcacagttagaattggataaagcagcacaagattttcgtaagattcataatgaaagacaagaactcattaaacaatgggagaacacaatagaacagatgcagaagagggatggagacatagataactgtgctttggaattagcaaggataaagcaggaaacgagagaaaaagaaaatttggttaaagaaaagatcaagtttttggaaagtgagattgggaataacacagagtttgagaaaagaatttctgtggctgatcgtaaacttttaaaatgtagaacggcatatcaggaccatgaaactagtagaattcagctgaagggtgagctggattctttaaaagccactgtgaatagaacttccagtgatttagaagctctgaggaaaaatatttccaagataaagaaggacattcatgaagaaacagcaaggttacaaaaaactaaaaatcataatgagataatacaaacaaaattaaaggagataactgagaaaaccatgtctgtagaagagaaagctactaatttggaagatatgctaaaggaggaggaaaaagatgtgaaggaagtagatgttcaactgaacctcataaaaggtgtgctgtttaagaaagctcaggagttacagactgagacaatgaaagaaaaagctgttttatcagaaattgaaggaactcgttcctctctgaaacatctcaaccatcagttacaaaaactggattttgaaaccttgaagcagcaagaaattatgtacagccaggattttcacattcaacaagtggaacggagaatgtcacggttaaagggagaaattaattcagaagaaaaacaagcgcttgaagcaaaaattgttgaacttaggaagtctttggaagagaaaaaatctacatgtggccttttggaaacacagatcaagaagcttcataatgatctttattttatcaagaaggcacatagtaaaaacagtgatgaaaaacagtcccttatgaccaaaataaatgaactaaaccttttcatcgacagatcagagaaagaacttgataaagccaaaggttttaagcaggatttgatgatagaggacaatcttttaaaacttgaagttaagcgtactcgagaaatgcttcacagtaaggcagaagaagttctttccctagaaaaaagaaaacagcaattatacacagcaatggaagagcgaactgaagaaatcaaggttcataaaacaatgcttgcgtcacaaataagatatgttgatcaagaacgggaaaacataagcactgagtttcgcgagcggctaagtaaaattgagaagctgaagaatagatatgaaattctgactgttgttatgctgcctcctgaaggagaagaggagaaaacacaggcctattatgtaataaaggctgctcaagaaaaagaagaacttcaaagggaaggtgactgtttggatgccaagatcaacaaagctgaaaaagaaatctacgctctagaaaatacccttcaagtgctgaacagctgtaacaacaattataagcaatcttttaaaaaagtgactccatctagtgatgagtatgagctaaaaattcaactagaagaacaaaaaagagctgttgatgaaaaatacagatacaaacaaagacaaatcagagaacttcaagaagacatccagagcatggaaaatacattagatgttatagaacatttggcaaataatgttaaagaaaagttatcagagaagcaggcttattcatttcaactaagtaaagaaacggaggagcagaagccaaaattagaaagagtgaccaaacagtgtgcaaaactcacaaaggaaatccgtcttttgaaagacacaaaagatgaaacaatggaagaacaagacatcaaacttcgtgaaatgaaacagtttcacaaagttattgatgaaatgttagttgatatcatagaagaaaatactgagatccgtattatccttcaaacatactttcaacagagtgggttagaactacctacagctagcacaaaaggcagtcgtcagagctctagatctccttcacatacttcactatcagcaaggtcatctaggagtacaagtacatctacttctcagtcttcaattaaagtactggagcttaaattcccggcctcctcttcactagtaggcagcccttctaggccatctagtgctagtagtagctctagtaatgttaagagcaaaaagagcagcaaataaacattttaatctcttctgaaaaagttgtaaacacaaaaacaaaaatatactttaaaatacaaaacgacccaacacattttatctagtggaaagtgtaaaaacttagtggtaagtgtaaaaactgatagttttaaaaaaaaaggaacgttctcattttctctactgttttcttcatactgaagaaattaatagcagattcttgacaaggctacatgttatacaagcataggaaaaatgctgtatttcactgtaattctgatgttcgtagtgttagaaaatagtttgcttcattatttcacgaaactacactcacttctaatgtaacaatctttc

SEQ ID NO: 6363 - DNA, 1767 bp, Homo sapiens
  source 1..1767: mol_type = unassigned DNA
gttgacagcgtcgcctagcaacgggaaatggcggaaccgggcggcgcggcgggccggtcccatccggaagatggatcggcttctgagggagagaaggaagggaataatgaaagccacatggtgtcaccaccagagaaggatgatggccagaaaggtgaagaagctgtcggtagcacagagcatcctgaggaagtcacaacccaagcggaagctgcaattgaagagggggaggtggagacagaaggggaagcagcagtggaaggggaagaggaggctgtgtcctatggagatgctgaaagcgaagaggaatattactatacagaaacttcatccccggaagggcaaatcagtgctgcagatacgacttacccgtatttcagtcctcctcaggaactgcctggagaggaggcatacgatagtgttagcggggaggctggtctccaaggcttccagcaagaggccaccggtccaccagaatccagagaaaggagggtcacctccccagagccatcccacggagtcttaggcccgtcggagcaaatgggccaggtcacctctgggccagcagtgggcagattgacaggatccacagaggagccccaggggcaggtgctcccaatgggcgtccagcaccgcttccggctgagccacgggagcgacatcgagtcctcagacctggaggagttcgtctcgcaggagccagtgatccccccaggggtgcccgatgcccaccccagggaaggagacctgccagtgttccaggaccagatccagcagcccagcaccgaggagggggccatggcagagagagtggagtccgaggggagtgacgaggaagcagaagacgaagggtcccagctggtggttttggacccagaccaccccctgatggtaagattccaggctgccctgaagaactacctgaaccgacagatcgaaaagttgaagctggacctccaagagctggttgtggctaccaagcagagccgagcccagcggcaggagctgggggtgaatctctatgaggtgcagcagcacctggtacacctgcagaagctgctggagaagagtcacgaccgccacgcaatggcctcgagcgagcgcaggcagaaggaggaggagctgcaggccgcccgcgctctctacaccaagacctgcgcagccgccaacgaggagcgcaaaaagttggcggctctgcagactgagatggagaacttggccctgcatctcttctacatgcagaacatcgaccaggacatgcgtgacgacatccgcgtgatgacacaagtggtaaagaaggccgagacggagaggatccgggcagaaatcgagaagaaaaagcaggacctgtatgtggaccagctcaccactcgagcccagcaactggaagaagacattgccctgtttgaggctcagtacttggcccaagctgaggacacccggattttaaggaaagcagtgagtgaggcctgcaccgagatcgacgccatcagcgtggagaagaggcgcatcatgcagcaatgggccagcagcctggtgggcatgaagcaccgcgacgaggcgcacagggcggtgctggaggcgctcagcgtgtccctagagcgcttcccaagtcaaaatataaacaccgctcgttcccgcctttctaccacatggcattccgctgggatacttctacggggaagcttcctgcccggggcatcgagggcgttcgcgtccgtctgttatggcggtgctgctgtagataaccggatccgcgaatgctaa

SEQ ID NO: 6364 - DNA, 1464 bp, Homo sapiens
  source 1..1464: mol_type = unassigned DNA
gttgacagcgtcgcctagcaacgggaaatggcggaaccgggcggcgcggcgggccggtcccatccggaagatggatcggcttctgagggagagaaggaagggaataatgaaagccacatggtgtcaccaccagagaaggatgatggccagaaaggtgaagaagctgtcggtagcacagagcatcctgaggaagtcacaacccaagcggaagctgcaattgaagagggggaggtggagacagaaggggaagcagcagtggaaggggaagaggaggctgtgtcctatggagatgctgaaagcgaagaggaatattactatacagaaacttcatccccggaagggcaaatcagtgctgcagatacgacttacccgtatttcagtcctcctcaggaactgcctggagaggaggcatacgatagtgttagcggggaggctggtctccaaggcttccagcaagaggccaccggtccaccagaatccagagaaaggagggtcacctccccagagccatcccacggagtcttaggcccgtcggagcaaatgggccaggtcacctctgggccagcagtgggcagattgacaggatccacagaggagccccaggggcaggtgctcccaatgggcgtccagcaccgcttccggctgagccacgggagcgacatcgagtcctcagacctggaggagttcgtctcgcaggagccagtgatccccccaggggtgcccgatgcccaccccagggaaggagacctgccagtgttccaggaccagatccagcagcccagcaccgaggagggggccatggcagagagagtggagtccgaggggagtgacgaggaagcagaagacgaagggtcccagctggtggttttggacccagaccaccccctgatggtaagattccaggctgccctgaagaactacctgaaccgacagatcgaaaagttgaagctggacctccaagagctggttgtggctaccaagcagagccgagcccagcggcaggagctgggggtgaatctctatgaggtgcagcagcacctggtacacctgcagaagctgctggagaagagtcacgaccgccacgcaatggcctcgagcgagcgcaggcagaaggaggaggagctgcaggccgcccgcgctctctacaccaagacctgcgcagccgccaacgaggagcgcaaaaagttggcggctctgcagactgagatggagaacttggccctgcatctcttctacatgcagaacatcgaccaggacatgcgtgacgacatccgcgtgatgacacaagtggtaaagaaggccgagacggagaggatccgggcagaaatcgagaagaaaaagcagggcgttggagacacaggtgctgccttcattcctaaaaccacccagggtgaccaggtctcgggacgcggaaagaaaaagccgggcactgtggtggcacgtgtctcacccgctgagctttaa

SEQ ID NO: 6365 - DNA, 3120 bp, Homo sapiens
  source 1..3120: mol_type = unassigned DNA
gttgacagcgtcgcctagcaacgggaaatggcggaaccgggcggcgcggcgggccggtcccatccggaagatggatcggcttctgagggagagaaggaagggaataatgaaagccacatggtgtcaccaccagagaaggatgatggccagaaaggtgaagaagctgtcggtagcacagagcatcctgaggaagtcacaacccaagcggaagctgcaattgaagagggggaggtggagacagaaggggaagcagcagtggaaggggaagaggaggctgtgtcctatggagatgctgaaagcgaagaggaatattactatacagaaacttcatccccggaagggcaaatcagtgctgcagatacgacttacccgtatttcagtcctcctcaggaactgcctggagaggaggcatacgatagtgttagcggggaggctggtctccaaggcttccagcaagaggccaccggtccaccagaatccagagaaaggagggtcacctccccagagccatcccacggagtcttaggcccgtcggagcaaatgggccaggtcacctctgggccagcagtgggcagattgacaggatccacagaggagccccaggggcaggtgctcccaatgggcgtccagcaccgcttccggctgagccacgggagcgacatcgagtcctcagacctggaggagttcgtctcgcaggagccagtgatccccccaggggtgcccgatgcccaccccagggaaggagacctgccagtgttccaggaccagatccagcagcccagcaccgaggagggggccatggcagagagagtggagtccgaggggagtgacgaggaagcagaagacgaagggtcccagctggtggttttggacccagaccaccccctgatggtaagattccaggctgccctgaagaactacctgaaccgacagatcgaaaagttgaagctggacctccaagagctggttgtggctaccaagcagagccgagcccagcggcaggagctgggggtgaatctctatgaggtgcagcagcacctggtacacctgcagaagctgctggagaagagtcacgaccgccacgcaatggcctcgagcgagcgcaggcagaaggaggaggagctgcaggccgcccgcgctctctacaccaagacctgcgcagccgccaacgaggagcgcaaaaagttggcggctctgcagactgagatggagaacttggccctgcatctcttctacatgcagaacatcgaccaggacatgcgtgacgacatccgcgtgatgacacaagtggtaaagaaggccgagacggagaggatccgggcagaaatcgagaagaaaaagcaggacctgtatgtggaccagctcaccactcgagcccagcaactggaagaagacattgccctgtttgaggctcagtacttggcccaagctgaggacacccggattttaaggaaagcagtgagtgaggcctgcaccgagatcgacgccatcagcgtggagaagaggcgcatcatgcagcaatgggccagcagcctggtgggcatgaagcaccgcgacgaggcgcacagggcggtgctggaggcgctcagaggatgccagcatcaagccaaatccaccgacggcgagattgaggcctataagaaatccatcatgaaggaggaagaaaagaacgagaagctggcgagcatcctgaaccggacagagacggaagccacactgctgcagaagctcaccacccagtgcctgaccaagcaggtggccctgcagagccagttcaatacctacaggctcaccctgcaggacacagaggatgccctcagccaggaccagctggaacaaatgatactcacggaggagttgcaggccatccgccaagccatccagggcgagctggagctcaggaggaagacggatgctgccatccgggagaagctgcaggagcacatgacctccaacaagaccaccaaatacttcaaccagctcatcctgaggctgcagaaggagaagaccaacatgatgacacatctttccaaaatcaacggtgacattgcccagaccaccctggacatcacacacaccagcagcaggctggacgcacaccagaagaccctggtggagctggaccaggacgtgaagaaagtcaacgagctcatcaccaacagccagagcgagatctcccggcgcacgatcctgatcgagaggaagcaagggctcatcaacttcctcaacaagcagctggagcggatggtctccgagctggggggggaagaagtggggcccctggagcttgaaatcaaaaggctgagcaagctgatcgacgagcacgatggcaaggcggtccaggcccaggtgacctggctgcgcctgcagcaggagatggtcaaggtgacacaggagcaggaggagcagctggcctccctggacgcatccaagaaggagctccacatcatggagcagaagaaactacgagtagaaagcaagattgagcaggagaagaaggagcagaaggagatcgagcaccacatgaaggacctggacaacgacctgaagaagctcaacatgttgatgaataaaaaccggtgcagctcggaggagctggagcagaacaaccgggtgacagagaatgagttcgtgcgctcgctgaaggcctctgagagggagaccatcaagatgcaggacaagctgaaccagctcagcgaggagaaggcgaccctcctgaatcaactggtggaagcagaacaccagattatgctttgggagaaaaaaatccaactggcaaaagagatgcgttcctcagtggattccgagatcggccagacggagatccgggccatgaagggcgagatccacaggatgaagaaatattgcagaacaacacaggacgcacacaggcacgtgcacgaacaacacgggacgcacgcaggcacgtgcacgaagaacacgggacgcgcgcaggcacgtgcacgaacaacacgggacgcgcgcgggcacgtgcacgaacaacacgggacgcgcgcaggcacgtgcacgaacaacacgggacgcgcgcaggcacgtgcacgaacaagggacgcgcgcaggcacgtgcacgaacacaggacacacacagcacgtgcatga

SEQ ID NO: 6366 - DNA, 4287 bp, Homo sapiens
  source 1..4287: mol_type = unassigned DNA
gcgtcgcctagcaacgggaaatggcggaaccgggcggcgcggcgggccggtcccatccggaagatggatcggcttctgagggagagaaggaagggaataatgaaagccacatggtgtcaccaccagagaaggatgatggccagaaaggtgaagaagctgtcggtagcacagagcatcctgaggaagtcacaacccaagcggaagctgcaattgaagagggggaggtggagacagaaggggaagcagcagtggaaggggaagaggaggctgtgtcctatggagatgctgaaagcgaagaggaatattactatacagaaacttcatccccggaagggcaaatcagtgctgcagatacgacttacccgtatttcagtcctcctcaggaactgcctggagaggaggcatacgatagtgttagcggggaggctggtctccaaggcttccagcaagaggccaccggtccaccagaatccagagaaaggagggtcacctccccagagccatcccacggagtcttaggcccgtcggagcaaatgggccaggtcacctctgggccagcagtgggcagattgacaggatccacagaggagccccaggggcaggtgctcccaatgggcgtccagcaccgcttccggctgagccacgggagcgacatcgagtcctcagacctggaggagttcgtctcgcaggagccagtgatccccccaggggtgcccgatgcccaccccagggaaggagacctgccagtgttccaggaccagatccagcagcccagcaccgaggagggggccatggcagagagagtggagtccgaggggagtgacgaggaagcagaagacgaagggtcccagctggtggttttggacccagaccaccccctgatggtaagattccaggctgccctgaagaactacctgaaccgacagatcgaaaagttgaagctggacctccaagagctggttgtggctaccaagcagagccgagcccagcggcaggagctgggggtgaatctctatgaggtgcagcagcacctggtacacctgcagaagctgctggagaagagtcacgaccgccacgcaatggcctcgagcgagcgcaggcagaaggaggaggagctgcaggccgcccgcgctctctacaccaagacctgcgcagccgccaacgaggagcgcaaaaagttggcggctctgcagactgagatggagaacttggccctgcatctcttctacatgcagaacatcgaccaggacatgcgtgacgacatccgcgtgatgacacaagtggtaaagaaggccgagacggagaggatccgggcagaaatcgagaagaaaaagcaggacctgtatgtggaccagctcaccactcgagcccagcaactggaagaagacattgccctgtttgaggctcagtacttggcccaagctgaggacacccggattttaaggaaagcagtgagtgaggcctgcaccgagatcgacgccatcagcgtggagaagaggcgcatcatgcagcaatgggccagcagcctggtgggcatgaagcaccgcgacgaggcgcacagggcggtgctggaggcgctcagaggatgccagcatcaagccaaatccaccgacggcgagattgaggcctataagaaatccatcatgaaggaggaagaaaagaacgagaagctggcgagcatcctgaaccggacagagacggaagccacactgctgcagaagctcaccacccagtgcctgaccaagcaggtggccctgcagagccagttcaatacctacaggctcaccctgcaggacacagaggatgccctcagccaggaccagctggaacaaatgatactcacggaggagttgcaggccatccgccaagccatccagggcgagctggagctcaggaggaagacggatgctgccatccgggagaagctgcaggagcacatgacctccaacaagaccaccaaatacttcaaccagctcatcctgaggctgcagaaggagaagaccaacatgatgacacatctttccaaaatcaacggtgacattgcccagaccaccctggacatcacacacaccagcagcaggctggacgcacaccagaagaccctggtggagctggaccaggacgtgaagaaagtcaacgagctcatcaccaacagccagagcgagatctcccggcgcacgatcctgatcgagaggaagcaagggctcatcaacttcctcaacaagcagctggagcggatggtctccgagctggggggggaagaagtggggcccctggagcttgaaatcaaaaggctgagcaagctgatcgacgagcacgatggcaaggcggtccaggcccaggtgacctggctgcgcctgcagcaggagatggtcaaggtgacacaggagcaggaggagcagctggcctccctggacgcatccaagaaggagctccacatcatggagcagaagaaactacgagtagaaagcaagattgagcaggagaagaaggagcagaaggagatcgagcaccacatgaaggacctggacaacgacctgaagaagctcaacatgttgatgaataaaaaccggtgcagctcggaggagctggagcagaacaaccgggtgacagagaatgagttcgtgcgctcgctgaaggcctctgagagggagaccatcaagatgcaggacaagctgaaccagctcagcgaggagaaggcgaccctcctgaatcaactggtggaagcagaacaccagattatgctttgggagaaaaaaatccaactggcaaaagagatgcgttcctcagtggattccgagatcggccagacggagatccgggccatgaagggcgagatccacaggatgaaggtcaggctcgggcagctgctgaagcagcaggagaagatgatccgtgccatggagttggcggttgcccgcagagagaccgtcaccacccaggccgaggggcagcgcaagatggacaggaaggcgctcacccgcaccgacttccaccacaagcagcttgagctgcgccggaaaatcagggacgttcgcaaggccaccgatgagtgcaccaaaaccgtcctggaactggaagaaacacaaagaaatgtgagcagctccctcctagagaagcaggaaaagctgtcggtgattcaggcagacttcgacacactcgaggccgacctcacccggcttggggccctcaaacgacagaacctttcagagatcgtggccctgcagacacgccttaagcacctgcaggctgtgaaggaggggcgctacgtgttcctgttccgctccaagcagtccctagtgctggagcgccagcgcctggacaagcgactggctctcatcgccaccatcctggaccgcgtgcgggacgagtacccccagttccaggaggccctgcacaaggtcagccagatgatcgccaacaagctcgagtcaccagggccctcctagggagcagcctggactccgccttgcaaggcctccaggaagagatccggaattgtgtttgtcatgagggacttggaatcttttgtgttcctaaaaaccacatgtaccctcagaagggcatcgtttaagagaaataagccagccccacccataggaatctttttagccactcagcaatttaataaaccaggtaaaatcctagcgtttcccatggcatcccatcgcaaagacagagcctgtgactgcagacccacacacccacactcccacactgggcttactcgtccaggtaacactttggtttgcagcactcccaaatctgcacgtgcctctcacaacacaacgctgccacaggtccacaagctggtgggctgagcagaggtgggaaagttaaggcagctccagccagcctggcccgggaggctggtccccccagcacttccctctactaggtgcatctgaaaacccacaaaccaccttctttaccagttttcccatccccaccccttagaactctcaggtcccttttcctgcccccatgtccccatttgagttaaattcagatccacagcttgcaggagaaagtcagtggccccagacacacgtaacagggtgagcactgaaataagagcacgctggggcgtccacaccaagggactacgccccagtctgcccacctatcttttctccatcattaacccagcgctctttctccctggacttccaagtaccaatgaccttggggcttctttgcagtttaaagggaaaatgctctacaaaataatttcactttcaaacatttcagcagaagaataaaatcttttttctgaatatctagtaa

SEQ ID NO: 6367 - DNA, 8429 bp, Homo sapiens
  source 1..8429: mol_type = unassigned DNA
cgctcacgggaaagactatgttttaggtgacccgtgtggcctttttgttgaggcctttaggatacaaggcccccacctaaagacgcgaccctcccgtaggaggggggcagggcccgggggcgggagcacagcggggccccagcctcaggcggcgcgtcactgagcacaaaggagacaacagcgaggcggcagcgggcgctgatcttcgctcgccagccactcgcaattgcggttacagacctgcagctccccctcccccagccggcccgcccgcctttctgtctcctctctccctccgtactggacggccccggtccatttccgggctccggatatttggtatcgattggggccggggacgcggagcaggtggccgcggcggggcagctgggccgccagcttggtgcctcggggaccgtctcccgctgctttggtcaccagcccctgcccgcccgacccgctccgttctccggcctgcgagccctgccggccggactttgcgccgcgtccggcgctgctgctgcgctcggggccccgctcggcgccggcggtgaccgggaagcccgcgttaaaggggcaaccgggaccctggcccggtatggctgaagtcagcatcgaccagtccaagctgcctggagtcaaggaagtatgccgagattttgctgtcctggaggaccacaccctggctcacagcctgcaggaacaagagattgagcatcatttggcatcgaacgttcagcggaaccgtttggtccagcatgatctccaggtggctaagcagctccaagaggaagatctgaaagcgcaggcccagctccagaagcgctacaaagaccttgaacaacaagactgtgaaattgctcaggaaattcaggagaagctggctattgaggcagagagacgacgcattcaggagaagaaggatgaggacatagctcgccttttgcaagaaaaggagttacaggaagagaaaaagagaaagaaacactttccagagttccctgcaacccgtgcttatgcagatagttactattatgaagatggaggaatgaagccaagagtgatgaaagaagctgtatctactccatcacgaatggcccacagggatcaggaatggtatgatgctgaaattgccagaaaactgcaagaagaagaacttttggctacccaggtggacatgagagccgctcaagtagctcaagatgaagaaatcgctcgacttctaatggctgaagaaaagaaagcttacaaaaaagccaaggagcgggagaaatcatctttggacaaaagaaagcaagaccccgagtggaagccaaaaacagctaaagcagcaaattccaagtcaaaagagagtgatgaacctcaccattctaagaatgaaaggccagcacggccaccaccacctatcatgacagatggtgaagatgcggattacactcattttacaaaccagcagagttccacacggcatttctcaaaatcagagtcctctcataaaggttttcattacaaacattaaaaacctaggaatctgccttgaaaatggactcactatagcaaatattactgggtgatacagaatgaattctacacttactttttttctcctgtgtttgcattcctgggatttatcctcaagtgcatttctgaccataagtaattttaattcatttcaaatgttttggttattcatgatcacttgggcagtataagaaaatgtagcttctgaatattggccacctctatgctgcatatacttcttgggatatagtatctaagacctttgtaaactgccattttgttaggtatggagtttggtatctagggagtaggccttatttagcaattcaaattttatggagatgaatgatcaaagtgaaacaatgtttggatgcaacgcagaataaaagaatataagaaatagctttttgttgcattaatgtatgatattttgaaggacagagcctttgctttttgtattctttaagaaaagcacaaccataaagtattttaaaaaaagaaacacttggagcaattgaaatatgttattctgactagatggactgtagaggttttgcatttctcagccctcctggggagattggcctagatagcattctttaacacttcctctgcttttgcctcagtagcaaggctttcctaagctcctgggcaatggaacatttattagtatttattgacaaaaatttagttctctgaaattttaactcatatatatgaaaaactttgtattccatctcttctttttcatttacttgtagagccaaggaaatggaattgaaagatgattgcataagtaatgatgccatccttctctctggctgtagactgaggcttttctcttgcttcaagtcagagcagtatttgttgataacctctcaataatgtttggtttacatgccagtaattaaattaattcaacatgaagttgaatttgatgaagtggtcatctatccaagtatttggtttttgttttgttttgttttgttttttgagttggagtctcgccctgtcacacaggctggagtgcagtggtgcaatcttggctcactgcaacctccgccacctgggctggagcaattcccctgcctcagcctcccaagtagctggaattacaggcatgtgtcaccacacccggctaatttttgtatttttagtaaagagcgggtttcaccatgttggccaggctggtctcgaacccctgacctcaagtgatccacctgccttggcctcccaaggtgctgggattacaggcttaagccaccatgtccagccagccaagtatttggttttaaacatttgtattcctttgtgcaagggattgtattcctctgtacaagacctttaagcacctcttcaagaaatttagtctttgtgtagctgctaaccttactgcaatatttattttcccttattttcccatactacttagttgacaaatggcaatcaagctcacttgttctccctctctctgtctcccccccatgtacacatatatatatcccttcagcttgacttgctattatttttcattgtataaatatgaaattcttggcatttcaatatggcatttgtttagggaaaaaatatgtaggtcactagagaaaaatgttaatttttttcccactgtgaattgccttctgtttgccttatcttttcagatagtctttaaagttgggcaatattcaggcagctatttagaacagtttctcagagtggatttgggtctctcatttgagaaagatttgtagtttcaatgaagtttgtatattataggaatttaagtaaaatcatctgagttaagttttgggcaaatgttaatcagaaagataatctacatccctactttatgtagtcattttggagaaatggaggaaaaggaaaataacaggactttttatagctgtgataaaatgggtaaagaaaaacctccatttaaataaggaaggggagacaaaatggaaggtcctggccttaagtcaaattccagatagtgctttcaatatccaaagcttaggccttgtttacttatagtaatgctatatttttctttatctgccctgtgatttcgcttcgtgtccttcaaagtttttttattgtaattttaaaggaaaaaaacaatgtatttttatttgataactaggcaaaatcatttgccattttttatttcataaatatttatttttctatctcatacaatgatcagttttactttaaaaattctgcatttctcttgcctctcatgtacttcatccagttatttattattgtaaaatgttaactggagatactgcattcaaaaaaaagtcggaccacttaacacttaccaggaatgttagtgtttcagctgttttagtaagtgaccaagtaagctatcaccttgtgatagctaattcaacatctttattgaaaatttgttactttttttaaaggtttttaaaagattacaattttaaaatattttatgtttattttatttttgtgtaaagcaaacacttttaaaataatatcagagtaattattaccctatgaataaggagatagaaatgaaattcagccagttaaatcctcatactctttctcattcaaataatataataatgtttgagactatagaagcaactcaactgtattttaatgaactgccagacacttttcactgtgttctctgctttttactttgtcatttttatataaatgtgaaagcattttgttgttgttgttgttgttcctgctgctagaacacatgcagtttaatttttaggcccacagtgtattatgctttaatgttgtgatgtaaactaatacttctggcctgggaaaacctttctgtttctgtatctttgtcctttggaggccaggcctcattaacaccagtattgttgaataagcacaatatatgacggagccttatcataaggctgcttgacatagacacccactctcctccacattttataaatcattgtttggaagtaaagttagataagagtcaaattaaatgttttgacttgaaaaatatttgacttttgcgttcaaaccactgttagacgtaagtattttattagacataagtattttattttgggactagacagttgctttacatgtatttaagggaacattgtgattttcagaaagtggctttacatactattgaattgctatttcccaagttactttacaaccagcagcagcataccaataaattacaaaagcagaaaatgaaaattaaccctaggtgttctgatgatagagaaatagctaaattagaaaagaaagatatggatagatgcttttaggaggaaaacctttttagaatggcaatgaccacttggatctaggtcaacatattccaaaatgtgtgaccttgggctttgtgtttactgaactcactctagaaaattctggacctgattcattaaccccgcttttcttctctaatgtgtcctgaagctgagctagatgatgagtaaattctttgctgactgttgctcatcactttctctcaaagttagaacttttcagtataaaaataattagcttttaactgattattaattttctttaatagtttctgtcaaaacttgtctaaaatttgtgttgtgccaaattggaaatacccactataatatggtgcattcagtttactccacaagtggttaacattttaagtcctagattttttatgtcttgcctttgtataagcatcgctttggggaataccaagatgattcattattcagtgattattttcttgaaagataactatgatgattggctgtaaaatcttcaccctaataaaggagtgagatctctgtgtaaacagctttctgaaggactgataatagaatagaacttgcagccaaaggctttttcccttttgagaagacggtatttgtgtaaggagtgctaaggtagacttcattgtacatagagtgccatattctgttgaaacgatcataacaaaatcaaaacctcatgcttcagcaaaaaggaaaaaagatttttaaattactttgtctattacttactgctcatagagaagtgactatataaaatggtccaattttctcatttctggtggtgcctgtgagtcttaaagccatatctgcttatcttactgttgatagaatactttttttctttttagcccatgataagtaatatgggcaggtagaagcaaactggagactgtcctgttaatgctgcatggggcacaatgtctttcaaattattggtggaagaatctcttttatccatggcgagaggtaagaatattaaagagtcaggatattgttgctcctggtatttaacaactgtcattagaaatgctgaaatttaattgtagagaagtcaagaaagaaagagtaaactgagaaaatcttactactacagagtcacttttacaatgagacctgcactttatgccagcactgtttgtgaggagcagtactgccttaaattagtttgactctgactgatgtcagtgtacgttacttcctttatgtgactgacagtcagctttccattgagatataacattcacagatgatccccaagtatccttgtcatcagaagctttggaccttttctgccactgacttgtggctgatctgtaacacaataaatacataattttatttcatgttgtctgtccacctctgaataagcagtggcatgaccaaaaagactggtagaaggagagaatttcttggccaaatccttcataccaggtaccacttcttgagtaactgagagttgactgtcttctatggtgactacatagaagatatttccaaaggttctgttatgcagtgaagacattcagattatttgtaagaatttcaccaacacccttgtgtattgaaatgcttaaccattaacagggaaaaaaaaggagaaaaccgaacaaaacagagacatttacttgaaatgggaggtttgctaatgtgaagagtgtttctgttttattacttataagagaaaagcaggaaaacttttgctttgataagaaagacaccagagtggtgattctgtttgatgccacaggctaacacaatcgtgtaatcatgttgagttgtagaaatatatggccctaaaaaccattctctttcccttatatatataaatatgtgaacactgcctagtaacattttaatagatttaagatgcatttgtacattctcagcaaactagaagaaaatgttttttctctttttgagttaacttcatagcatagagaaccagcactgtgcaggtttcagcatttcagataagggcataattaattgtgtaacttaatgccctgttattcattgctgaggttcatataaagaatagaaaaattgaaagatgggtttgggcgacattttcttcccaaaagatcaagtaaggagtaagaacaagtaagggaagacagctaagagaacatactatgacatatcatagaattgggatacatttttgttgcactggatttcaggctatactgctaaaataatttctacctgttaaattttgtgagagggtttttgacatcagaatttttgtatttctggtcaaattggtcttggaaatccctatggtctctaatttcagctcttgctgtaaactgcaagccaaatgctctttctcagaaagagctatatttttctcttcttacaggcaacccaatatttatttcataaagtgttataaatattgagaagatacactggggagatagcatataaaaatgatgctccaaaatgagaattctatatggggctttccctaagaagaatccatcccagcacatattttgaaaaggtgctgaattaaaaagtacaagagtttgctcatataaatcaagttgcccaggaaacctgaggtgatgctatcatttgtctcataatttagaaacgtgatctcttgagagagagactacgcattgcctgggcactttcagattccttaggaagtgcccctttgatatttggaatgtggatatatttataaaacaaatggattgttattccaaatccacatggatttataaccaagccccagaagaataggcagctttgaaatagctagttcgtggaattgaacagaaccttgatggaatgcagttgcctgtgtgaggacagaaaacaaagaggctgcctcagaccacatgcctatctagagattaagtgaatttgtgagggacattttgtggatgccttaaagatgaccagtggtgggttctgatgggaatatatacactcatctggactaggccaatggaagcagtctctttcagttcacctccgtacagcacaagttgttcctgctcatgacctcattgaggaaaatgagaattgtggtgctggtgactttcatgtgtcttgggaggttgaggtgttcaacatcgttaaggcactcccaaaacgcaaacctccttttttaaatgccaattgtacatctacattaattcatctatgcaaacttgtgttttcatggtttgttttttacactatatttctcattaggttctttaaacatcaggtttaatattgatattatgaataatttttaaaccaaagtattctataagtctgtgtgctttgttttcctggatggtttgaccaaggtaaacatcagtcttgtccttctctcttaataaagtcatccatttgttaagtcagtggtctctgtctcatgtttttgttttgtttctttacagcattcaaggacagggaaacttacgagagtcttattataattattattatttacaaaatgaccctaataggtctgtttagtaacagtgaaattttttcttactccatttccatacactttctgtaaatatgtataacatgataatgatgcctggtgtattgaaatcctcaataaatactgccaagtgtggatcagttgga

SEQ ID NO: 6368 - DNA, 2454 bp, Homo sapiens
  source 1..2454: mol_type = unassigned DNA
ggaaagactatgttttaggtgacccgtgtggcctttttgttgaggcctttaggatacaaggcccccacctaaagacgcgaccctcccgtaggaggggggcagggcccgggggcgggagcacagcggggccccagcctcaggcggcgcgtcactgagcacaaaggagacaacagcgaggcggcagcgggcgctgatcttcgctcgccagccactcgcaattgcggttacagacctgcagctccccctcccccagccggcccgcccgcctttctgtctcctctctccctccgtactggacggccccggtccatttccgggctccggatatttggtatcgattggggccggggacgcggagcaggtggccgcggcggggcagctgggccgccagcttggtgcctcggggaccgtctcccgctgctttggtcaccagcccctgcccgcccgacccgctccgttctccggcctgcgagccctgccggccggactttgcgccgcgtccggcgctgctgctgcgctcggggccccgctcggcgccggcggtgaccgggaagcccgcgttaaaggggcaaccgggaccctggcccggtatggctgaagtcagcatcgaccagtccaagctgcctggagtcaaggaagtatgccgagattttgctgtcctggaggaccacaccctggctcacagcctgcaggaacaagagattgagcatcatttggcatcgaacgttcagcggaaccgtttggtccagcatgatctccaggtggctaagcagctccaagaggaagatctgaaagcgcaggcccagctccagaagcgctacaaagaccttgaacaacaagactgtgaaattgctcaggaaattcaggagaagctggctattgaggcagagagacgacgcattcaggagaagaaggatgaggacatagctcgccttttgcaagaaaaggagttacaggaagagaaaaagagaaagaaacactttccagagttccctgcaacccgtgcttatgcagatagttactattatgaagatggagaccaaccagggtcaaggagggccagggaattgggttctggattctcaagaccttgtagactccaaagagatggaaagactgtgaagcacaagaaagagaaaccagaacatccactggagaacttggaagagccagaacaacattgttcatcgaagagatccctgtcatcctctagctcgggcaaagggagggacaatccccatattaacaatgagcagcatgaaaggaaacggtccactcaggagaggcctcggagacctctgcttcccacgatcagtggtgaagtgtttctgagcactgaatgtgatgactgggagactaagattaaccatcagactcgaaattgggaaaaacagtctcgacaccaagatcgactttcacccaagtcctcacaaaaagcagggcttcactgcaaggaagttgtatatgggagggaccatgggcaaggtgagcacagaaaaaggagacacaggcccaggactcctccattctcagagagtgaggagcagctccacctccatgacgcaggaatgaagccaagagtgatgaaagaagctgtatctactccatcacgaatggcccacagggatcaggaatggtatgatgctgaaattgccagaaaactgcaagaagaagaacttttggctacccaggtggacatgagagccgctcaagtagctcaagatgaagaaatcgctcgacttctaatggctgaagaaaagaaagcttacaaaaaagccaaggagcgggagaaatcatctttggacaaaagaaagcaagaccccgagtggaagccaaaaacagctaaagcagcaaattccaagtcaaaagagagtgatgaacctcaccattctaagaatgaaaggccagcacggccaccaccacctatcatgacagatggtgaagatgcggattacactcattttacaaaccagcagagttccacacggcatttctcaaaatcagagtcctctcataaaggttttcattacaaacattaaaaacctaggaatctgccttgaaaatggactcactatagcaaatattactgggtgatacagaatgaattctacacttactttttttctcctgtgtttgcattcctgggatttatcctcaagtgcatttctgaccataagtaattttaattcatttcaaatgttttggttattcatgatcacttgggcagtataagaaaatgtagcttctgaatattggccacctctatgctgcatatacttcttgggatatagtatctaagacctttgtaaactgccattttgttaggtatggagtttggtatctagggagtaggccttatttagcaattcaaattttatggagatgaatgatcaaagtgaaacaatgtttggatgcaacgcagaataaaagaatataagaaatagctttttgttg

SEQ ID NO: 6369 - DNA, 5811 bp, Homo sapiens
  source 1..5811: mol_type = unassigned DNA
agtgcaatactgcccaagcccgggcggggtctctgttctctggcagaggaggtcccttggcagcgggaagcgccctctctttctctcgccgccgctccgagtctgcgccctggtgccaggcgctcagctcggcgctcccctgtgctcgcccggcgcccactcattcgcagcccggccttcgtcgccgccgcctccctgctgctcctcctcctttccccagcccgccgcggccatggcggacagcgccagcgagagcgacacggacggggcggggggcaacagcagcagctcggccgccatgcagtcgtcctgctcgtcgacctcgggcggcggcggtggcggcgggggaggcggcggcggtgggaagtcggggggcattgtcatctcgccgttccgcctggaggagctcaccaaccgcctggcctcgctgcagcaagagaacaaggtgctgaagatagagctggagacctacaaactgaagtgcaaggcactgcaggaggagaaccgcgacctgcgcaaagccagcgtgaccatccaagccagggctgagcaggaagaagaattcattagtaacactttattcaagaaaattcaggctttgcagaaggagaaagaaacccttgctgtaaattatgagaaagaagaagaattcctcactaatgagctctccagaaaattgatgcagttgcagcatgagaaagccgaactagaacagcatcttgaacaagagcaggaatttcaggtcaacaaactgatgaagaaaattaaaaaactggagaatgacaccatttctaagcaacttacattagaacagttgagacgggagaagattgaccttgaaaatacattggaacaagaacaagaagcactagttaatcgcctctggaaaaggatggataagcttgaagctgaaaagcgaatcctgcaggaaaaattagaccagcccgtctctgctccaccatcgcctagagatatctccatggagattgattctccagaaaatatgatgcgtcacatcaggtttttaaagaatgaagtggaacggctgaagaagcaactgagagctgctcagttacagcattcagagaaaatggcacagtatctggaggaggaacgtcacatgagagaagagaacttgaggctccagaggaagctgcagagggagatggagagaagagaagccctctgtcgacagctctccgagagtgagtccagcttagaaatggacgacgaaaggtattttaatgagatgtctgcacaaggattaagacctcgcactgtgtccagcccgatcccttacacaccttctccgagttcaagcaggcctatatcacctggtctatcatatgcaagtcacacggttggtttcacgccaccaacttcactgactagagctggaatgtcttattacaattccccgggtcttcacgtgcagcacatgggaacatcccatggtatcacaaggccttcaccacggagaagcaacagtcctgacaaattcaaacggcccacgccgcctccatctcccaacacacagaccccagtccagccacctccgcctccacctccgccacccatgcagcccacggtcccctcagcagccacctcgcagcctactccttcgcaacattcggcgcacccctcctcccagccttaatgcatgagcttagtctgaatttcaagttgggactcatccaatggagccgtctactcaacgccaaaggcttccttctctggcatatttggatatgacttatttgcactgaggttatctaggcttcactatccattgtgttgtaaatgtttgtcagaaatgcagccagtgttgtgggtctacaacactaaccagacgactttttccatcagtgttttacttgaatcttcatgtacgtccattccctggctggaaccttcgctgtttggtatttggtatttcagcagcagtgtgcaatttttgcttggcccagagcttcattctcctggcttttaggtttgtaaaagaaaaagggatatcttttttatatttttttccatgaatctgcagaaaattactgagctgttgttaccctcctctcattataatagtgtttaccaaacataccaataattcagcactacaattcagacctttgaaaatctggctttcagtgtagaacagaaagttagatgaatcagtgcccaagacatattttctgtttaacagaactttctacagatacattttttacaggttattttcattgtgttattgacatccatgtctctcgtaaaacagatggcccaaagtaatgaatcatgtggctgtaccttctccacataaatgggatggataattatcgtatattaagatgtgattctcttttttatccttaatgttaatctacttaacctggccccctctaacatgagtcgataaatgttgtcctactcaccggtggtttcaatggctaattagaatgtgttatttgatttctgctgcagaaggcagtgtgattgtaacaaaaacaatgcggcttccccctttcgtacttcatttgtgttctcttaaaatagagtttgaacaaatattttaaaggtgcaaaataccattagaaaatactatttgaaatggacattatcgcattatcttggcataatggccagaaaatattgtattgcttggcagaaaagaaaataaggtctaaaggaaagtagcacattagcattgatggctgttcatttcacccagtataagcaagtgcagtgtacaaagaagtatattctgaatacattatttccattcatttagcacaaataaatcatttggtttcactttgcagtggaacactgagtcactcttttcttaacacgtgcaacatcttaatttttgtttttcagcagttgctgttttgtactttggtagtaaagtgatttttaccacctgtgtttgcatatttatatatgctgtggatgaaaataacttactagagaatgtatattttatgacaagaatgtgtatctgttggatataatcagagaactgaaaagtaatttatcagtaatttttaagagtccatgttttgtgacaaccatctctaatagccaactctttattaaacacactcctaaaaataaggaaccatgacattgtagatatttaatattgtacagtatagaaacctccatttttgccttcgaatgcatatttaagagttaacagaatgaaaaaaaaaagtcttgttggataatagtgtttgactagcgttttaagaacttgagagtaaaagcaacaataagattttttcacctcttcctgcttccacccccaaactgagaacatcactcaattgtttggaagaaactgtaggtctatataaattttatttataatgtatgtgtaatatacataatcataatacagttctcagatgcagggaagaagtttggcatttaatcattgaggctttaggtttttgatgtgatcagactgggccatgtcaaacccggaattttcaccaacagttcactcaccctcctggtacattgccattccaaggaattctgagagtaggcaaacaaattttgccttcatggtacagttctcagtttttcttataggagaaatatggtatatgtttataagaatcttttatgagattatagatttcaatgctgtggatagtgtcttgcacccaaacaagaaagtccataatggaatgatcttccctcagcttcctatcgatttagttacctcttgaaagcacaaaaattaaaacattgccatatgttgaatttttaaaaagcacttggagtgagcgaacatttcctgataaatgccttttagagataggttcttgatattcagacatctgcagaaatgttctggttcccaaagtcatttcacttcgaaataaaacacagctccttcaaacagcactttttccacataaatctagttgcctctccctgtggacattcagaactgatagaacaaacactactcttttgaatttgatggttcgtgtcctttaaagtgtttgaggacctatgcagagcctgtaacacttgggtagtacctgctaggacaatttcttggcaattgtcttactactagggatcagtaagatttagattctgagcccataatggcaacagccccctcacctatgggaagctgacttccctcagtcgggcacttctcatgggggctgaacatggttcctgccattctgttacccactctcccaggtgagccctggattggctcccagaaggcctttgtaaaatcagtagccgtcctgcaggcaggtgggagcaacaggggcttcagtagcttcattttcctgtcttgcagacagagacccttggctaccactgtgctgctaataggataagtactctgttgccagattaccatgccttttatacaaaaccaaattaacttacctaatacctgacacctctttgggctctgaactgctttctctcatcaagcatgctagcactctagacagaattctagaaatttggcagatagtggaagcctttaattgaacttactccttcgttgactgaaaggagttttaaattctgagctcctgagatactgactagcaaccatggaatgaatgtgtgaccagaaagtggctttgacaccaagtgctactgtccctttgtaattggcttctaacagaattcaaccagaaataattgataatgtgaatttttgttaattgttcacttgtaggaaaatagaacatgtatcaccctttgttaggtagacatgaacttttcctgcacaaagccttgcttttagagaatgcccaataaggcaagaaaaagcatagtaacttgtgctttgagagctcaatatttgtatcttatcagtacagaagaaatatttctgtgtaacttgatcttctgtctagtacttgtcttataggtaaccaacactgaaaactttgtagtgatgactaccaaagaaatacatagtaaaacaaccttttatttccaaattgttaaagagccagccattgatgctgctacatgagttccatgctcaagagccattgtaagagattaaggggtttctaggtttttggtgattttttgtttgtttttttctttgttttttagggtttttttttcttctttaattttttgattaaaacatacacacagctgttagcataaagtcgtggggggcattttctggaatgctcagcagttctgattaactgccaagcccaggttgcctctcatgaggcaactgaaaaaatcctgtgtcttgatagcatgggtgctgtgtgtgtgcatgtgtgtgtctgcattcatgccttaactcgggttactgcacaactttagttcttgacttagtctgcaccgtcatctagattgtattgtacatctcggtctgaacttcatcctggcaaaaacaaagttgcaggcacaacagtttaagaatgcattcctccagaagagtatctggtcaggttgacccctgagccttctttggacttgatttggaacttagcctggaaagcgaaagtggactgtccaacagaaagatgtcaacaaggaaaagaggagagccaagcgctagcatgccttttgcctctgcatatctgtgcacactgtatgttgttcatgatagcttgtctacaacttgactaggttggagttctggtaatagtggcaatcttgacattcttggtcagagtttagagagatgtaagactttcaattaatgtcttatttactcctttatgttgattagtctttgatacatgtgctgaatcagaaacctaaataaagataattttttaaaatgta

SEQ ID NO: 6370 - DNA, 3546 bp, Homo sapiens
  source 1..3546: mol_type = unassigned DNA
gccggttctttcaggccttccagcgccggagcctcgggcgtgggcaaaaagcgtccatacgcagcctgagccacttgggagcccccagtttccgaggcagaagaacagtgcccaccagcgcagcggggctgcggcccggaaaccctggcggggagccccgagccccggcgggcgcacgccgcgtgggcaccaggcaggcggttggagtacggggcgggggtcggccgagggcgcggggccccggggctccgggctcgcccccgccgctcggggcaggcgcgccgatggcgtttctgaggtgacgccgcccacaccgggcttctccgggggcggaggaaacacctatgaaccctccggcagccttccttgccgggcgccagaacatcgggtcagaagttgagatttccactatcgagaaacaacggaaggagctgcagttgctcattggagaattaaaagatcgagataaagagctcaatgacatggttgcagtgcaccagcaacagcttctttcatgggaagaggatcggcagaaagtgttgacactggaagaacgttgcagcaaattagaaggtgaactacataaaagaactgaaataatcaggtcactcacgaagaaggtaaaagctcttgaatccaatcaaatggaatgccaaacagctctccaaaagacccaactacagcttcaggaaatggctcaaaaggcaacgcattcttctcttctctctgaagaccttgaggctagaaacgaaactctcagcaacacgttagtggaactttctgcccaggtaggacagctacaagctcgagaacaagctcttacgacaatgataaagctaaaggacaaagatattattgaggcagttaatcacattgcagattgttcgggtaaatttaaaatgctagagcatgccctacgtgatgccaagatggcggagacttgtattgtgaaagaaaagcaagattataagcagaaattgaaggcacttaagattgaagtcaacaaactaaaagaggacctcaatgaaaagacgacagaaaataatgagcaacgagaagagatcattcgcctcaagcaagagaaaagttgcctgcacgatgaattgctttttactgtagagagagaaaagaggaaagatgaattgcttaatattgcgaagtcaaagcaagaacgcacaaattcagaactgcacaatctgagacagatttatgtaaaacaacagagtgatctgcagtttcttaatttcaatgtggaaaattctcaggaattaatacagatgtatgactcaaagatggaggaatcaaaggctctggactccagcagagacatgtgtttatcagaccttgaaaataaccacccaaaagtcgatattaagagggaaaaaaatcagaagtcactgtttaaggaccagaaatttgaagccatgttggttcagcaaaataggtcagacaagagctcttgcgatgaatgcaaagagaagaaacaacagatcgatactgtgtttggggagaaaagtgtaattacgctgtcatccatattcaccaaagacttagtagagaaacacaacctcccttggtctctgggaggaaaaacccagattgaacccgaaaacaaaattacattgtgcaagatccacacaaaatcaccaaaatgtcatggcactggggttcagaacgaaggaaaacaaccctcagaaacacccactttatctgatgagaagcagtggcatgatgtcagtgtttacctgggcctgaccaactgtccaagttcaaaacatccagaaaagctggatgtagaatgtcaagatcagatggaaaggtccgaaatctcatgctgccagaaaaatgaagcctgtctgggcgaaagtggcatgtgtgactccaagtgctgccacccgagtaacttcataattgaagccccaggccacatgtctgacgtggagtggatgagtattttcaagccttccaaaatgcagagaattgtccgcctcaaatctgggtgcacctgttcagaaagcatctgtggcacacaacatgactccccggcaagtgagctaattgccatccaagattcccactctttgggttcttcaaaatctgccttgagagaagatgagacggagtcctcttccaataaaaagaactcacctacgagtttgttaatctacaaagatgcaccagcattcaatgaaaaggcttcaattgtgttaccctcccaggatgatttctcgcccacgagcaagctccagcgtttgctggcggaatctcgtcagatggtgacggacctggagctgagcacactgctgcccatcagccatgagaatctcactggcagtgccacaaataagtcagaggtcccagaagagtcagctcaaaaaaatacctttgtcagttattgaaggaaacaaaaggcaacttcagtattcatcgtgatcacgaatttctcatctatgtggaaggcagaaagcagacaccaatactgaatgaatacttaaccgtaaaactgaaagaggattctagttcttcataaacggcacttaattccagctgggagcagaactagaaagttaatttttaaacatctacacttcattttcaagttaaccatttttgtgctgaagaaatattttcatgtgtaagaaagtagaccttattgtacatatagaaagttggaattatgctaagaatgaaaaagacttctctgtaaagatacggactacagttaaatgctagagaagctctttaaaaatgtgaatgtcaaatagagaaagaaccctgcatagaaagtgctgttttaactatctgatttttaaaaaatctgtgcatacatttaaattctaaacaatagcttatcagagtcagctcaaaatatatgagaaacagtattctctcatggttttagcttttgactttgctgtgtaaatagacataaggtgctttgatataaaatataaaatgtaactggaaaatagctcgaggtccttctgtcccaagctgagcagagccccatctttctgggtctatattagtcccacctactgacacaaacaaaagcttgctggaagatcgagttttagacgcatttttaaaaatcttaaagactaaaacacttccattttaacttgtaaagtaatttaattttttaaagattatactatatgcctctgtgtcttctctaaaagaatagatcaacttcagtccataaaagatatttttaatattaaagaaaaaatatgtttccttggtttctttttattttacaggagtaaaataaggaaggaacgttcatcactttaaactgaacctggcaagttaatttcctcaggaatggggatgtatttttttaagcattgcagatatcaaagttctattgtgctgaataaatgcccctttgttaacaggtctcagtgttacttcagagatgattttcatgagcggggaagagccacctcatttagcctttttaattagggtgctgaaaagagaagttgggtgaggtttggttatgttctttatcaatgcgtgctttctccctcaggctgggct

SEQ ID NO: 6371 - DNA, 2339 bp, Homo sapiens
  source 1..2339: mol_type = unassigned DNA
atgccaaacagctctccaaaagacccaactacagcttcaggaaatggctcaaaagtagagagagaaaagaggaaagatgaattgcttaatattgcgaagtcaaagcaagaacgcacaaattcagaactgcacaatctgagacagatttatgtaaaacaacagagtgatctgcagtttcttaatttcaatgtggaaaattctcaggaattaatacagatgtatgactcaaagatggaggaatcaaaggctctggactccagcagagacatgtgtttatcagaccttgaaaataaccacccaaaagtcgatattaagagggaaaaaaatcagaagtcactgtttaaggaccagaaatttgaagccatgttggttcagcaaaataggtcagacaagagctcttgcgatgaatgcaaagagaagaaacaacagatcgatactgtgtttggggagaaaagtgtaattacgctgtcatccatattcaccaaagacttagtagagaaacacaacctcccttggtctctgggaggaaaaacccagattgaacccgaaaacaaaattacattgtgcaagatccacacaaaatcaccaaaatgtcatggcactggggttcagaacgaaggaaaacaaccctcagaaacacccactttatctgatgagaagcagtggcatgatgtcagtgtttacctgggcctgaccaactgtccaagttcaaaacatccagaaaagctggatgtagaatgtcaagatcagatggaaaggtccgaaatctcatgctgccagaaaaatgaagcctgtctgggcgaaagtggcatgtgtgactccaagtgctgccacccgagtaacttcataattgaagccccaggccacatgtctgacgtggagtggatgagtattttcaagccttccaaaatgcagagaattgtccgcctcaaatctgggtgcacctgttcagaaagcatctgtggcacacaacatgactccccggcaagtgagctaattgccatccaagattcccactctttgggttcttcaaaatctgccttgagagaagatgagacggagtcctcttccaataaaaagaactcacctacgagtttgttaatctacaaagatgcaccagcattcaatgaaaaggcttcaattgtgttaccctcccaggatgatttctcgcccacgagcaagctccagcgtttgctggcggaatctcgtcagatggtgacggacctggagctgagcacactgctgcccatcagccatgagaatctcactggcagtgccacaaataagtcagaggtcccagaagagtcagctcaaaaaaatacctttgtcagttattgaaggaaacaaaaggcaacttcagtattcatcgtgatcacgaatttctcatctatgtggaaggcagaaagcagacaccaatactgaatgaatacttaaccgtaaaactgaaagaggattctagttcttcataaacggcacttaattccagctgggagcagaactagaaagttaatttttaaacatctacacttcattttcaagttaaccatttttgtgctgaagaaatattttcatgtgtaagaaagtagaccttattgtacatatagaaagttggaattatgctaagaatgaaaaagacttctctgtaaagatacggactacagttaaatgctagagaagctctttaaaaatgtgaatgtcaaatagagaaagaaccctgcatagaaagtgctgttttaactatctgatttttaaaaaatctgtgcatacatttaaattctaaacaatagcttatcagagtcagctcaaaatatatgagaaacagtattctctcatggttttagcttttgactttgctgtgtaaatagacataaggtgctttgatataaaatataaaatgtaactggaaaatagctcgaggtccttctgtcccaagctgagcagagccccatctttctgggtctatattagtcccacctactgacacaaacaaaagcttgctggaagatcgagttttagacgcatttttaaaaatcttaaagactaaaacacttccattttaacttgtaaagtaatttaattttttaaagattatactatatgcctctgtgtcttctctaaaagaatagatcaacttcagtccataaaagatatttttaatattaaagaaaaaatatgtttccttggtttctttttattttacaggagtaaaataaggaaggaacgttcatcactttaaactgaacctggcaagttaatttcctcaggaatggggatgtatttttttaagcattgcagatatcaaagttctattgtgctgaataaatgcccctttgttaaca

SEQ ID NO: 6372 - DNA, 2936 bp, Homo sapiens
  source 1..2936: mol_type = unassigned DNA
ggttggagtacggggcgggggtcggccgagggcgcggggccccggggctccgggctcgcccccgccgctcggggcaggcgcgccgatggcgtttctgaggtgacgccgcccacaccgggcttctccgggggcggaggaaacacctatgaaccctccggcagccttccttgccgggcgccagaacatcgggtcagaagttgagatttccactatcgagaaacaacggaaggagctgcagttgctcattggagaattaaaagatcgagataaagagctcaatgacatggttgcagtgcaccagcaacagcttctttcatgggaagaggatcggcagaaagtgttgacactggaagaacgttgcagcaaattagaaggtgaactacataaaagaactgaaataatcaggtcactcacgaagaaggtaaaagctcttgaatccaatcaaatggaatgccaaacagctctccaaaagacccaactacagcttcaggaaatggctcaaaaggcaacgcattcttctcttctctctgaagaccttgaggctagaaacgaaactctcagcaacacgttagtggaactttctgcccaggtaggacagctacaagctcgagaacaagctcttacgacaatgataaagctaaaggacaaagatattattgaggcagttaatcacattgcagattgttcgggtaaatttaaaatgctagagcatgccctacgtgatgccaagatggcggagacttgtattgtgaaagaaaagcaagattataagcagaaattgaaggcacttaagattgaagtcaacaaactaaaagaggacctcaatgaaaagacgacagaaaataatgagcaacgagaagagatcattcgcctcaagcaagagaaaagttgcctgcacgatgaattgctttttactgtagagagagaaaagaggaaagatgaattgcttaatattgcgaagtcaaagcaagaacgcacaaattcagaactgcacaatctgagacagatttatgtaaaacaacagagtgatctgcagtttcttaatttcaatgtggaaaattctcaggaattaatacagatgtatgactcaaagatggaggaatcaaaggctctggactccagcagagacatgtgtttatcagaccttgaaaataaccacccaaaagtcgatattaagagggaaaaaaatcagaagtcactgtttaaggaccagaaatttgaagccatgttggttcagcaaaataggtcagacaagagctcttgcgatgaatgcaaagagaagaaacaacagatcgatactgtgtttggggagaaaagtgtaattacgctgtcatccatattcaccaaagacttagtagagaaacacaacctcccttggtctctgggaggaaaaacccagattgaacccgaaaacaaaattacattgtgcaagatccacacaaaatcaccaaaatgtcatggcactggggttcagaacgaaggaaaacaaccctcagaaacacccactttatctgatgagaagcagtggcatgatgtcagtgtttacctgggcctgaccaactgtccaagttcaaaacatccagaaaagctggatgtagaatgtcaagatcagatggaaaggtccgaaatctcatgctgccagaaaaatgaagcctgtctgggcgaaagtggcatgtgtgactccaagtgctgccacccgagtaacttcataattgaagccccaggccacatgtctgacgtggagtggatgagtattttcaagccttccaaaatgcagagaattgtccgcctcaaatctgggtgcacctgttcagaaagcatctgtggcacacaacatgactccccggcaagtgagctaattgccatccaagattcccactctttgggttcttcaaaatctgccttgagagaagatgagacggagtcctcttccaataaaaagaactcacctacgagtttgttaatctacaaagatgcaccagcattcaatgaaaaggcttcaattgtgttaccctcccaggatgatttctcgcccacgagcaagctccagcgtttgctggcggaatctcgtcagatggtgacggacctggagctgagcacactgctgcccatcagccatgagaatctcactggcagtgccacaaatatttctcatctatgtggaaggcagaaagcagacaccaatactgaatgaatacttaaccgtaaaactgaaagaggattctagttcttcataaacggcacttaattccagctgggagcagaactagaaagttaatttttaaacatctacacttcattttcaagttaaccatttttgtgctgaagaaatattttcatgtgtaagaaagtagaccttattgtacatatagaaagttggaattatgctaagaatgaaaaagacttctctgtaaagatacggactacagttaaatgctagagaagctctttaaaaatgtgaatgtcaaatagagaaagaaccctgcatagaaagtgctgttttaactatctgatttttaaaaaatctgtgcatacatttaaattctaaacaatagcttatcagagtcagctcaaaatatatgagaaacagtattctctcatggttttagcttttgactttgctgtgtaaatagacataaggtgctttgatataaaatataaaatgtaactggaaaatagctcgaggtccttctgtcccaagctgagcagagccccatctttctgggtctatattagtcccacctactgacacaaacaaaagcttgctggaagatcgagttttagacgcatttttaaaaatcttaaagactaaaacacttccattttaacttgtaaagtaatttaattttttaaagattatactatatgcctctgtgtcttctctaaaagaatagatcaacttcagtccataaaagatatttttaatattaaagaaa

SEQ ID NO: 6373 - DNA, 2084 bp, Homo sapiens
  source 1..2084: mol_type = unassigned DNA
gatatcctcgttgctaggagactagacgcgtcttacagtgggagagctcagcctcactgatagccggggatctctcctgttcgagggctgagatctccggtcccacaaccgcccacaaccaggggcacttctggaagtcccctttctagggacatttttcttctaagctctgtaacgcgggccgaggcagaccgaggcttctttcccggatccaatcccctgcccccatgcctaagaaagaaaaaatggccaagacgcccctgtccgatgagaagcagctgcttctgtttcagcagaagttgctggcagaggaggagatggccaaaaagaaggagaggctcctcagccagttcttgaaggacaagctggccaaggaggaacacaacagtgctctgaaccttaataagattaacacacagtggagaactgtccttcgggaagtcaagaccagagaacttcataaggacattgagatcctcagccaaacatttgaacgagtggtggactgtaaggacaatgtcatcaagtctttagctaaagacctgtccgaagccgaggagcagtacgcccatgccctgcgcagccacttgcacaatgttgaccagctcttggccctgcagaggcaccggctcagtctcctggaggaaagttacaacatggagctggaagccctaaccaaggagtttgagacagaaaggaagacaattattgaccaacatgagaaagagattcactatctgcaagatatcttcatggccatggagcagaactatatagattctgagtatgaaagcaagctggagttccagagcatgtggaatgatctcaaaaacatgaatttagaagagaagcactttctaagactgcacctggagaacagagtagaagatctgtggagaaagttccaggatgtactcaagaattacactgatgccacagaggatcgaaaggctgcctttgagaccctgcaggtgaaggatgagaagagctccaaagagattgaagtacagatgaaaaaaatacagaaactacaggatgccataactatttcaaaaggcaagatcatgatacacagccgtgagagtgaagatgagaaccggtatatccgtaatgacaaggaattggtccttgtacaactgcgaaaacttaaggcccaaagaactcaggcccgggcagcatcccagaagaacttagtcagactcaccctggaaagtaatgccaccctcaaggccctgagaaagattgttgataagggtgaaaagatccttaaacttgctgaaatatgtaggaaatttgaaaccgaagaagaaaaagtgctgcctttttattcatcagtattgactcctaaggagcaggaggggattcagaagaataatctagaagagcttactgaggagctcaccaaggtgatggtggactacataggaatggagaatttctggaaaaggtacaacaaagtgaaactggagcaactgagcctccaacatagacgagcccagctgctagatatcaatgggaagctgcgggagatgctgaagcagtacttggatggcatctcagtgagtgacgaagtgctgagccagctcaacccactctttatagtcaactatcaaagcaacttactccagcccttgtccatacgtatagcccatccaggcagcacaagcccatctgcaccctggagggaccagagaaggagctttttccttggatcaagttagaagaaatccaaacaacagagaaaggtgagatgattcttggaaagataggagagttggcccacccctggctggagatacaacttaatcacagaaccattgctagaaaagcctccacactcaaaggtgtctctgtcagtgtgtaggagaaaccctaccacagtacctgggcttccaagactcatggggcacccaccatgcccagcttgattaaagacaatggtgtttattaattcatccatttgttcatcaaggttgcatgactattatgtgccaaagaataagcagaacactgctctttaaatgttcttaagtgtttatttataacaggttgttaataaagtaaaagcctgagttggcatatat

SEQ ID NO: 6374 - DNA, 1775 bp, Homo sapiens
  source 1..1775: mol_type = unassigned DNA
gggagagctcagcctcactgatagccggggatctctcctgttcgagggctgagatctccggtcccacaaccgcccacaaccaggggcacttctggaagtcccctttctagggacatttttcttctaagctctgtaacgcgggccgaggcagaccgaggcttctttcccggatccaatcccctgcccccatgcctaagaaagaaaaaatggccaagacgcccctgtccgatgagaagcagctgcttctgtttcagcagaagttgctggcagaggaggagatggccaaaaagaaggagaggctcctcagccagttcttgaaggacaagctggccaaggaggaacacaacagtgctctgaaccttaataagattaacacacagtggagaactgtccttcgggaagtcaagaccagagaacttcataaggacattgagatcctcagccaaacatttgaacgagtggtggactgtaaggacaatgtcatcaagtctttagctaaagacctgtccgaagccgaggagcagtacgcccatgccctgcgcagccacttgcacaatgttgaccagctcttggccctgcagaggcaccggctcagtctcctggaggaaagttacaacatggagctggaagccctaaccaaggagtttgagacagaaaggaagacaattattgaccaacatgagaaagagattcactatctgcaagatatcttcatggccatggagcagaactatatagattctgagtatgaaagcaagctggagttccagagcatgtggaatgatctcaaaaacatgaatttagaagagaagcactttctaagactgcacctggagaacagagtagaagatctgtggagaaagttccaggatgtactcaagaattacactgatgccacagaggatcgaaaggctgcctttgagaccctgcaggtgaaggatgagaagagctccaaagagattgaagtacagatgaaaaaaatacagaaactacaggatgccataactatttcaaaaggcaagatcatgatacacagccgtgagagtgaagatgagaaccggtatatccgtaatgacaaggaattggtccttgtacaactgcgaaaacttaaggcccaaagaactcaggcccgggcagcatcccagaagaacttagtcagactcaccctggaaagtaatgccaccctcaaggccctgagaaagattgttgataagggtgaaaagatccttaaacttgctgaaatatgtaggaaatttgaaaccgaagaagaaaaagtgctgcctttttattcatcagtattgactcctaaggagcaggaggggattcagaagaataatctagaagagcttactgaggagctcaccaaggtgatggtggactacataggaatggagaatttctggaaaaggtacaacaaagtgaaactggagcaactgagcctccaacatagacgagcccagctgctagatatcaatgggaagctgcgggagatgctgaagcagtacttggatggcatctcagtgagtgacgaagtgctgagccagctcaacccactctttatagtcaactatcaaagcaacttactccagcccttgtccatacgtatagcccatccaggtgataaacaacatccaaccacttaaaatataattgaagcagcccagatgatcttccacaacctgtgatctaaggaaaaaaatctttcaactcctagagatttttttttttttttgagaaatgtagggatgttgctattaaaaatttccatggagttt

SEQ ID NO: 6375 - DNA, 3849 bp, Homo sapiens
  source 1..3849: mol_type = unassigned DNA
aacaggagctagaggcgcgcttcgctgaggaaataaatattaatatggaaagcaacttcaatactgagtcatcatctacttttactcttcaaagttcttcagagacattgttttctattcagctattagatttcaaaacaagtttactggaggcattagaagaattgcgtatgagaagggaagcagaaattcattatgaagagcagattggtaaaattattgtggagacacaggaacttaaatggcaaaaggaaactcttcagaatcaaaaggaaacattggcagagcaacacaaggaagcaatggcagtttttaaaaagcagttgcagatgaagatgtgtgccctggaagaagaaaagggaaaatatcaacttgctacagaaataaaggaaaaagaaatagaaggattgaaggaaacattaaaagcactacaggtttctaaatactctttacagaagaaagtgagtgaaatggaacaaaaggtccagttacatcttctggctaaagaagactatcataagcaactgagtgaaattgagaaatattatgccacaataacaggtcaatttggattggtaaaagagaatcatgaaaagttagaacaaaatgtacgggaagcaatacaatcaaacaaaagactttcagctttaaataaaaaacaagaagctgaaatatgcagtttaaagaaggaactaaaaaaagcagcctcagacttgataaagtccaaagtcacatgtcaatataagatgggagaagaaaacatcaatctaacaattaaagaacaaaaatttcaagaacttcaagaaagactcaacatggaattggaattaaatgagaagattaatgaagagattacccatattcaagaagaaaaacaggatatcatcatttctttccaacatatgcagcagttacttcggcaacaaattcaagctaatactgaaatggaggcagaattgaaggtgctaaaagaaaataatcagacccttgaaagagataatgagctgcaaagggagaaggtaaaagaaaatgaagaaaagtttcttaatcttcaaaatgagcatgaaaaagcactaggaacttggaaaagacatgctgaagaacttaatggagaaattaataagattaaaaatgaattatcatcccttaaagaaactcatattaagttacaagaacattataacaaattatgcaatcaaaaaacatttgaggaagacaaaaagtttcagaatgttccagaagtaaataatgaaaacagtgaaatgtcaactgaaaaatcagaaaacaccattatacagaaatataatactgagcaagaaataagggaagaaaatatggagaatttttgttcagatactgaatacagagaaaaagaagaaaaaaaagaaggctcatttatagaggaaataattatagatgatttacagctttttgaaaaaagcttcaagaatgaaattgatactgttgtttctcaggatgaaaatcaaagtgaaatctccttaagcaaaaccctctccttagataaagaagtaattagtcaaggacaaacctcgaatgttacggacaacagaaaatcagttactacagaaataaaagacaagatatgcttggaaaaagacaatggatgtacagaatttaaatcaccaaataatcattttgtagtgttagatacagcaatagaaacagaaaaaatacatctagaaagaaccagaggattagatgttcaccatacagatgtaaatctggaggttgaaaataacaaaacatcatttaacagtattttaaatgagacagcacacaatacatatcacaataataataaagatgtttctgaaaatgagccattcaaacaattcagattgcttccagggactcgagaacatgctctagagaaggaaattacaaatagtgaccaaaccaaagcagatttggactcgtctctagatataaaaaaaaatcctgttccatgtcagaaatatagtttacggaattcaagtaatgttatgttagatgataaacaatgtaaaataaaacaaatacaactgttaactaaaaaaagtgagtgcagcatattactttctaaacaaacttcagattttctgcaagtctgtaatgatactttagagaaatctgaactaactgttccctgtgatatagtaatcgaccaccatgtttcatatgctgcttttagtgctaattcaaaactacttctgaagaactcagataaaaatgtccatagtatgtctatgttggtgaaacctaactcaagccctgggggaaaaactatgtgtaaaaatatgagtgatatgcaaaacagtcaatttaataactgtttgggatacttagaaaacactaatgtgaacatttcccatcttcatcttaacaatgagaatagtcatgcttcacaagccaaagatgtgaaaactgctgttcacatgaaaacttgcacagaaacagagttttccaataaaaagaatcagattgatgagaatcaggtaactgaagccacaaaaaatgacctcttcctttttgtgagcattaatgaaagacagcatacattgttaaataatacagagaaaacagaatcattaaatgacattgtttcaggaaaaatgttcagtgaaggacagctggaggaatcacattcatttcacatagagccatctggagatttagtaaacagaagcggaaggtcaacctttgatctttcaacttcagataaaaaaactgagaaaactccagtatacatgaatttttcagaccccggtccttggtcaaaagtaaatcacattgaaagtcaaacagcgagcagttcgaccccttgcatttctttgttgctgaaggagagaccactagatccatcagaaaacaaaaagatcatttcaatggctctttgtaaaaatattggtgtggatgatgttggaaaggatattggaccagatactaccagcattaacagagttgctgacactttgaataactggagtatccatccagatcccaagggagaacccagtgaagagaagaatgcaatggcaaagactttttatgattcctcttttcccacagaacatgtgaaaacaaagcctctgatatcaactccactacaaagccatttgcaggcaatcaagacgactaaaaatacttctggtgatgatgactggcagagcctcattacgaatcaactaaataaaagtgaaaatttactaagtttagaaaatgacaaccagccaaagaaaagaaaagcagaagagacgttggaaaaaaacaacagattaaaataatgtagataagtgctttcagtagtgaaattatgtaactgaaattctggtatagtttttactagaataaaatgactgttgtatttaaagctctacagtttgtctttgcttttccaagtttttctaatgtgaagaaattgtattactctacttctgtcttctctctgtatattatcctttctttaaagtgctcattgcttcttcaatatccttttttaaagaacagaatttatgtattgtatgacagacattgtgaccccttgtaatttattacttcatatcctctggagtttgtgattttagtataaatttgagacaataactgtccagactaggcaaatttttttagtttataatgttttactatgatttagggcttttttttcaaagaacaaaaattataagcataaaaactcaggtatcagaaagactcaaaaggctgtttttcactttgttcagattttgtttccaggcattaagtgtgtcatacagttgttgccactgctgttttccaaatgtccgatgtgtgctatgactaaaaattgaaaaattaaacacagtgttagtc

SEQ ID NO: 6376 - DNA, 3213 bp, Homo sapiens
  source 1..3213: mol_type = unassigned DNA
ctgcccgcgcgctccacggtgcagagctctaagcgcgcgggctggcaggctgcggcgcgtcaaggtcagcctggagctgggtggcggcctgcctgggggcgggggaccctactggaggcccgggctggggcctcccagcgcctcggccatattgaatagcttcgactggaccgtctttgtctgcgaagtcctgtcccaagttccagccgcgtccctggggcctggggcaggaagagtcgctggcagcccgcgcgccccaacttggagctgggacaccacgtttccagcttggagtgggccttgagccttgggactgacctcgcccccggctcacgtaggcatcctggaaattgattcccccaagtccttggtgggggagccggacttggtcaagactgtacttgttgcaggcgaagagattggaggcgtttggctcgtccctggctagggaggtgagactctccggtcagcgttgctggaactccccccatccagtccctccctcaagactaagggctacagtagtttgttggggctcattgccccctcaccccagatatcaccctggagatcttaaagactctcgagaaaagccacgtggggggctggttcccctggggcttcctgccgtcccccgactgcctcattctttggagcgtccccgatgtctgcaaagatgtggatttggacgtcctcgtggaagccctaaagcccgtggggacatttaagaagatcggcaaggtgttccgcaaggaggaggactccacggtggggatgctgcagatcggggaggacgtcgactatttgctcatcccccgggaggtcaggctggctgggggcgtctggagagtcatctctaagcccgccaccaaggaagcagaatttcgggagcggctgacccagttcctggaagaagagggccgcaccctggaggacgtggcccgcatcatggagaagagcaccccgcacccgccccagccccccaaaaagcccaaggagccccgagtgaggaggagagtgcagcagatggtgactcctccgccccggctggtcgtgggcacgtacgacagcagcaacgccagcgacagcgagttcagcgacttcgagacctccagagacaagagccgccagggcccgcggcggggcaagaaggtgcgcaaaatgcccgtcagctacctgggcagcaagttcctgggaagcgacctggagagtgaggatgatgaggaactggtcgaggccttcctccggcgacaggagaagcagcccagcgcgccgcctgcccgccgccgcgtcaacctgccagtgcccatgtttgaggacaacctggggcctcagctgtccaaagcggacaggtggcgggagtatgtcagccaggtgtcctgggggaagctgaagcggagggtgaagggttgggcgccgagggcgggccccggggtgggcgaggcccggctggcctccaccgcagtggagagcgcaggggtatcatcggcgccagagggcaccagcccgggggatcgcttgggaaacgcgggagatgtttgtgtgccccaggcttcccctaggcgatggaggcccaagatcaactgggcctcctttcggcgccgcaggaaggagcagacagcacccacaggtcagggggcagacatcgaggctgatcaggggggagaggctgcagatagtcaaagggaagaggccatagctgaccagcgggaaggggctgcaggtaatcagagggcaggggccccagctgaccagggggcagaggctgcagataatcagagggaagaggctgcagataatcagagggcaggggccccagctgaggagggggcagaggctgcagataaccagagggaagaggctgcagataatcagagggcagaggccccagctgaccagaggtcacagggcacagataaccacagggaagaggctgcagataatcagagggcggaggccccagctgaccaggggtcagaggttacagataatcaaagggaagaggccgtacatgaccagagggaaagggccccagctgtccagggtgcagataatcagagggcacaggcccgggctggccagagggcagaggctgcacataatcagagggcaggggccccaggtatccaggaagctgaagtctcagctgcccaagggaccacaggaacagctccaggagccagggcccggaaacaggtcaagacagtgaggttccagacccctggacgcttttcgtggttttgcaagcgccggagagccttctggcacactccccggttgccaaccctgcccaagagagtccccagggcaggagaggccaggaacctcagggtgctgagggccgaggccagagcagaagctgagcagggagagcaagaagaccagctgtgaggtgagggctagagacagcccacgggccctccctccaagtgtgggagggagagatgctctgcctctgaacttcaaagtggaggtggagtgctggccacgtctccacctaacaaccctctttattctcttgttaaagttttgttcatgctttgatttttttttaaattttttagagacagggtctcactctgttgcccaggctggagtgcagtggcatgatcataactcactgcagcctcaaacttctggcctcaagtgatcctcctgcctcggcctcccaaaatgctgggattacagatgtgagccaccacacacaccatctgattaaaaaaaaaaaatactgattccttgtagcaacccaaaaaatgtaaagaaagaattcgacacaatggggttgcgtcacctatagttttcatttcctcaaatgcaactcaaggtgctcagcttgataaagggagagagggagggcaggggagaaactgactcctttttccatctcttttttgcctgcacacttaatgtggactgcctccttggacttaaaaagagttgagccaacatgcaaatcaaaaaacatttatgaactgatttcttagctttggacttgacaactgacgaatgctctgggggtgacctggcccttgctgtccgttccactcccatccttgatgatggagacacctgtgtttatgttgtcacttcgcttgccatcctcatgccccgggctctgctggtttggaggggacagggcccttggtttgcacacctcacccgatcttggttataaggtacagtaaaagcgtctgaaaaatgcattcaaaa

SEQ ID NO: 6377 - DNA, 2097 bp, Homo sapiens
  source 1..2097: mol_type = unassigned DNA
acggtgcagagctctaagcgcgcgggctggcaggctgcggcgcgtcaaggtcagcctggagctgggtggcggcctgcctgggggcgggggaccctactggaggcccgggctggggcctcccagcgcctcggccatattgaatagcttcgactggaccgtctttgtctgcgaagtcctgtcccaagttccagccgcgtccctggggcctggggcaggaagagtcgctggcagcccgcgcgccccaacttggagctgggacaccacgtttccagcttggagtgggccttgagccttgggactgacctcgcccccggctcacgtaggcatcctggaaattgattcccccaagtccttggtgggggagccggacttggtcaagactgtacttgttgcaggcgaagagattggaggcgtttggctcgtccctggctagggaggtgagactctccggtcagcgttgctggaactccccccatccagtccctccctcaagactaagggctacagtagtttgttggggctcattgccccctcaccccagatatcaccctggagatcttaaagactctcgagaaaagccacgtggggggctggttcccctggggcttcctgccgtcccccgactgcctcattctttggagcgtccccgatgtctgcaaagatgtggatttggacgtcctcgtggaagccctaaagcccgtggggacatttaagaagatcggcaaggtgttccgcaaggaggaggactccacggtggggatgctgcagatcggggaggacgtcgactatttgctcatcccccgggaggtcaggctggctgggggcgtctggagagtcatctctaagcccgccaccaaggaagcagaatttcgggagcggctgacccagttcctggaagaagagggccgcaccctggaggacgtggcccgcatcatggagaagagcaccccgcacccgccccagccccccaaaaagcccaaggagccccgagtgaggaggagagtgcagcagatggtgactcctccgccccggctggtcgtgggcacgtacgacagcagcaacgccagcgacagcgagttcagcgacttcgagacctccagagacaagagccgccagggcccgcggcggggcaagaaggtgcgcaaaatgcccgtcagctacctgggcagcaagttcctgggaagcgacctggagagtgaggatgatgaggaactggtcgaggccttcctccggcgacaggggctgcaggtaatcagagggcaggggccccagctgaccagggggcagaggctgcagataatcagagggaagaggctgcagataatcagagggcaggggccccagctgaggagggggcagaggctgcagataaccagagggaagaggctgcagataatcagagggcagaggccccagctgaccagaggtcacagggcacagataaccacagggaagaggctgcagataatcagagggcggaggccccagctgaccaggggtcagaggttacagataatcaaagggaagaggccgtacatgaccagagggaaagggccccagctgtccagggtgcagataatcagagggcacaggcccgggctggccagagggcagaggctgcacataatcagagggcaggggccccaggtatccaggaagctgaagtctcagctgcccaagggaccacaggaacagctccaggagccagggcccggaaacaggtcaagacagtgaggttccagacccctggacgcttttcgtggttttgcaagcgccggagagccttctggcacactccccggttgccaaccctgcccaagagagtccccagggcaggagaggccaggaacctcagggtgctgagggccgaggccagagcagaagctgagcagggagagcaagaagaccagctgtgaggtgagggctagagacagcccacgggccctccctccaagtgtgggagggagagatgctctgcctctgaacttcaaagtggaggtggagtgctggccacgtctccacctaacaaccctctttattctcttgttaaagttttgttcatgctttgatttttttttaaattttttagagacaggg

SEQ ID NO: 6378 - DNA, 9667 bp, Homo sapiens
  source 1..9667: mol_type = unassigned DNA
gttactccggcttctccatagagggcggagaaggctggagcgcggcggtgattttgtgccagggattcccagagacgcgctgaaaggctggcagggcttaggaagctggggggttagggacacacattcaagcccccacccccgggaggggaagggggctggaggcgaggcttgagggcggcggaggaatggtgtctgctcggggggaaggggcgagccctgcctgttggtactgaggggctgcgggcagtggaggctccgcgggtcgaaagcggctccatgcccatcggtgggtggaacgtgtagaggtcggaacgccgaggtcgagtctggtggcgcctcggtatccttaacgtggtctctgtttaacgtatttcatttagcccccgttgggattgattcattgggagcagtttcgctggtctggatcctccaggagctggacaaccttgacgggctttttgtcttgggttccagccccctttcccttcctcctcctccagatgccttttctctgcccctcctcgcccggtacagacatttccagcgcaggctgctgctcgtggtgtccgtcgtcgaagccacttcttgggatttcggctcgtttcactctggggtgttttttgaggagggagagtgcccccctcctccacgatgggatttttctcccttgccgaaatggactttcattgatttctacttacttccacgtttagtgaccaattccctaggcgtatttttgtggtagttccttttttcaaatacatactctgtaaaatggagaacgaaatttttactccccttctggagcagttcatgaccagccctttggtcacttgggttaaaacgtttggacctctggccgcaggaaatgggaccaaccttgatgaatatgtggctttggtggatggggtattcttgaaccaggtcatgctccaaattaatcctaaattggagagtcagagagtaaataaaaaagtcaataatgatgcctcacttagaatgcacaatctatccattttggtgagacagataaaattttattaccaggagactttgcagcaattgatcatgatgtcgttgccaaatgtcttaatcattggcaaaaatcccttttctgaacaaggcacagaagaagttaaaaaactgcttttacttttattgggttgtgcagttcagtgtcagaaaaaagaggaatttattgaaagaattcaaggtttagattttgatacaaaagcagcggttgccgcacatattcaagaggtaactcataatcaggaaaatgtgtttgacctgcaatggatggaagtgactgatatgtcgcaggaggacatagaaccactcttgaaaaatatggcattgcatctaaaaagacttatagatgagagagatgaacattcagagactatcatagaactctctgaagagcgggatggtctccattttctaccccatgcctcttcatctgcacagtcaccctgtggttctccaggcatgaagcgaacagaaagtcgacaacatctgtcggtggaactggcagatgctaaagccaagataagaaggcttaggcaggaattggaggaaaagactgagcagttgttggattgtaaacaagaacttgagcaaatggaaatagaactcaaaaggctgcaacaagagaacatgaatttgctttcggatgctcgctctgccagaatgtaccgagatgaattagatgcacttcgagagaaagcagtcagagtcgataagcttgaaagtgaagtcagcagatataaagagagactacatgatattgaattttataaggcaagagttgaggaattaaaagaagacaatcaagttttattagaaacaaaaaccatgttggaagaccaactagagggaactcgtgctcgttctgataaattacatgaattagaaaaagagaacttacaactgaaagctaaacttcatgatatggaaatggaacgagatatggatagaaaaaagattgaagaattaatggaagaaaatatgactttggaaatggcacagaaacaaagtatggatgaatcattacatcttggctgggaactggaacagatatccagaactagtgaactttccgaagcaccccagaaatccctgggccatgaggtgaatgagttgacatcaagtagattattgaagctagagatggaaaatcaaagtttgacaaaaaccgtagaagagcttcggactactgtggattctgtagaaggcaatgcttccaaaatcctgaaaatggaaaaagaaaatcaaaggctcagtaaaaaggttgagattcttgaaaatgagattgttcaagaaaagcaaagtcttcagaattgtcagaatttaagcaaggatctaatgaaggagaaagctcagcttgaaaaaacaatagaaacactgagagaaaattcagagagacagattaagatactggaacaggaaaatgaacatctgaatcaaacagtgtcttccttaaggcagcggtcccagataagtgcagaagcaagagtgaaagacattgaaaaagaaaacaaaattcttcatgaatctatcaaagaaacaagtagcaagctaagcaagattgaatttgaaaaaagacaaattaaaaaagaattggaacattataaagaaaaaggagaacgagctgaagaacttgaaaatgaattgcatcatcttgaaaaagaaaatgaattattacagaaaaaaataactaatttaaaaattacttgtgaaaaaattgaggccttagaacaagaaaattcagagctagaaagagaaaatagaaaattaaaaaaaacattggatagctttaaaaatctgacctttcagttagaatccctagaaaaagagaattcccaacttgatgaggaaaacttagaactgcgaaggaatgtagaatctttgaagtgtgcaagcatgaaaatggctcagctacagctagaaaacaaagaactggaaagtgaaaaagagcaacttaagaagggtttggagctcctgaaagcatctttcaagaaaacagaacgcttagaagttagctaccagggtttagatatagaaaatcaaagactgcaaaaaactttagagaacagcaataaaaaaatccagcaattagagagtgaactacaagacttagagatggaaaatcaaacattgcagaaaaacctagaagaactaaaaatatctagcaaaagactagaacagctggaaaaagaaaataaatcattagagcaagagacttctcaactggaaaaggataagaaacaattggagaaggaaaataagagactccgacaacaagcagaaattaaagataccacattagaagaaaataatgtgaagattggaaatttggaaaaagaaaacaaaaccctatccaaagaaattggtatatataaagaatcttgtgtccgtctgaaagaactagaaaaagaaaataaggagcttgtgaaaagagcaactattgatataaaaacgttggttacactacgtgaggatttggtgagtgaaaagttgaagacccaacagatgaacaatgatctcgaaaaattaactcatgagcttgagaagatagggttaaataaggagcgactcttacatgatgaacaaagtactgatgacagtaggtataaacttttggaatcaaaattagaatccactcttaagaagtctcttgaaataaaagaagaaaaaattgctgctttagaagctcgattagaagaatccacgaattataaccagcaattgcgccaagaacttaaaacagtgaaaaaaaattatgaagctctcaaacagagacaagatgaggaaaggatggtacagagctctcctccaatatctggtgaagacaacaaatgggagcgagaaagtcaagaaacgactagagaacttctgaaagttaaagacagattaattgaagtagaaagaaataatgctacactgcaagcagagaagcaagcgttgaaaactcaactgaagcaacttgagacacagaacaataatttgcaggctcagattcttgcacttcagaggcagacagtgtcattacaagaacagaataccactcttcaaacacagaatgccaagcttcaggttgaaaattccacccttaattcccaaagtacctcactcatgaaccagaatgcccaactcctaatccagcagtcttccttagaaaatgaaaatgaatctgtaatcaaagagcgagaagacctaaaatctctctatgattctctgatcaaagatcatgaaaagctggaacttcttcatgaacgtcaggcttcagagtatgaatctcttatctctaaacatggaactctgaagtctgcccacaaaaatcttgaggtggaacatagagaccttgaagaccgttacaatcagttattaaaacagaaaggacagttggaagatttggaaaaaatgctcaaagtagaacaggaaaaaatgctgcttgaaaataaaaatcatgaaacagtagctgcagaatacaagaaactttgtggtgaaaatgataggctgaatcatacctatagtcaacttttaaaagagactgaagttttacaaactgaccataaaaatttgaaaagtcttctgaataattccaaactggaacaaacaagattagaagctgaattttcaaaactaaaggaacaataccaacaattggatattacatcaaccaagctgaataaccagtgtgagttgctaagccaacttaaaggaaatttagaagaagaaaatcggcatctactagatcaaattcagacattaatgctacagaacagaacacttttggagcagaatatggaaagcaaggatctttttcatgttgaacaaagacagtacattgataagttaaatgaattaagacgtcagaaggagaaactagaagagaaaattatggatcaatacaaattttatgacccatctcctcctagaaggagaggcaactggattactctaaaaatgagaaaattgataaagtctaagaaagatattaatcgggaacgccagaaatctctaacattaacacccacccgctcagactccagtgaaggatttcttcagctccctcatcaagacagtcaagatagttcttcagtaggttcaaactctttagaagatggccagaccttggggaccaagaaaagcagcaccatgaatgacctggtgcagtccatggtcctagcaggacagtggacaggtagtactgagaatttggaggttcctgatgatatttcaacgggtaaaaggagaaaagaattgggagctatggccttctctactacagccatcaacttttcaactgtcaactcttctgcaggcttcagatccaagcagttggttaataataaagatactacatcctttgaagacataagtccacaaggtgttagtgatgattctagtacgggatcaagagttcatgcttcaagaccagccagccttgatagtggcagaacatccactagcaatagcaataataatgcttcactacatgaagtcaaagcaggtgcagttaataaccaaagcaggccacaaagccacagcagtggagaatttagcctgcttcatgaccatgaggcttggtccagcagtggtagcagtccaatccagtacttgaaaagacagaccagatcaagcccagtgctccagcacaaaatatctgaaacactggagagtcgacatcacaagatcaaaactggttcccctggaagtgaagttgttactctacaacagtttttggaagaaagcaataagcttacctcagtacagataaagtcctcaagtcaagagaatcttttagatgaagtaatgaaaagtttgtctgtctcttctgactttttgggaaaagacaaaccagttagctgtggtctggccaggtcagtaagtggaaaaaccccaggggacttctatgatagacggacaactaagcctgagtttttgagacctggtcctcgaaaaactgaagatacctacttcattagttctgcgggaaaacctacaccaggcactcaaggaaaaataaaattagtaaaagaatcttctctgtcacgacaatcaaaagatagtaacccttatgcaactttacctcgtgcaagcagcgtgatctcaactgccgaaggaactacacgaaggacaagcatccatgattttttgaccaaggacagtagactgcctatatcagttgattcaccaccagctgctgctgacagcaacaccactgcagcatctaatgtggacaaagtacaagaaagcagaaattcaaaaagcaggtctagggagcaacaaagctcctaattctattacccactacatgacatgtgggccaagtgagagaaaagtgtccttcagtttctcagtatgaagcctttatttctgaagtaacaagacacctagcaactataggaatcatttttaaaaatctttaaggagacttttaacagtccttcgtgaatagagcaggcaagaaatacaaaccttcattccttgaatcaaggagcactactggattcaactgccaaaattttttaaaggttttaggacttactataccttgtactgttaagatctactgaataaaggacgttctctcactaaggaccaggtgttttaaggttaagtgtttaaagaagtactccaagaacaatctgcttttttcatcatttgttttatgaatttatccatgtttgcttaatgcttctgctaagtgttagccaaaatctagccatttatatttagttgtgtaaacctaaattaaatgctgtagtattttgtggaatgtactatatagcaagatacagagaaaattgttttggcatgtcagagccttatttggttagcagactgcatgtgttgatactttttttttcttaaagccaattattttgatgcaaaagaaattcagtttataagataaatctgaaaaatccataatgaaataggagttataaaaaatttatagtgatattaatctttccatatttcccattaagcaacactaagcattcataagttaacccatggtaaagagtgtttttctgaaacttttttttagtaagatggtttttcagcaaatggcattcccaagataaagctgttgtgctttaactcatttcttttctttggtattgggttatgtatgcgtgtgcatttttttaacttgagagctgactgttgcttaagaagttttcttatggcaaaaataatgtaaataagttactatgatctgcattttgccagaaactcatttataattaaggctatcatttattaatgatttttttctcctttatgatattacattaaagttgataactgttattggtacttttgaaatatttgtatgcatttgttacctttaaacatttggaagaagcacaaaaaaatagatttagttaacccagggaaacatcaatttttttagtagttccaattttatatcacagttttattttcttatgaaatcaaaaaatgcattgatactcattaatgcaaattcattatttaacatcaatatcagagtaatcttcaaggtctgaaatgagaaacatactgactttttaaaattttaacagtgtacttcttaggctttcattaccagctctgaagaactttttggaataattccatattccatagtgtgtggtttatgagttgtgggtttcatcactaacccagtaaccataagaaaagtctctctctctctctctctctctctctctttctctctccctctttctctctctctttcgtaggccagtagcaatgttgtgttcacagtctaatttccaaaagaccatcaataaaaaagagagcatgtttaaattgaaatggaacttagagaacttgagcttacttacgtacttcaatgccaccggtaacttaggttttaccaccaaatgctgttaacgttaaatcattttgaaaatcttggatgaaaggtgctatgtaaatggaaatacaaaggattcttactaacatacaaaaataatgcacaacagaaatatctaaaaccttttccgtagactttgaaacatctctctctctcataactccctggattcaagtagcacattggtaataggtatcagagcagtctagagacaattgcatgtcaaaaaatgtacattcatttttaggtggataaaagtaaacatagaaattatgttatggctaaatacagttagtgggtaacttagatttatattagctagcatctaatttgcacaactagaacacatcccagaacaattactgaaaagctgaaatttaatgggtggtgatgtagcccaatgagggcgaatgacattacagcttgacctctccagaacactaatatcctaaaatacagaacatgctgggttaagtgcattagtgcttcaagcagaaaatgctgaaaacaacgtgtaaagtactgaatctgagtaggctgaccctgagaagggacaattaaagagacaaccaagggaacacattgagactacaaaaatatgaataatctcaattatattcatcacacttttttcataccatttcaagaaacgactagacagtagtaaccacatgaatattttactttctccagtataccttgagaagcaaactttgtaggaagccactcttctcccctaaacaacttctgccaaacaataataaagccaactggaaacgaatcggagccattttcattttcctaaccggggcctgacatgctttaaattatctggctgtattctaaatcaacacctaacccctcaaggaaactgaagaatcaatatacagggtaatagctttggctcagagctccaataatgtgcttcagatctgtccatgtggaaatgctttcatccaaatttttaaattggtggttaccaaagagttcacaaaacaggtttgtatgtagcacctttcatgcaaggcatgcaaaaagcctattttaaaatcactgtgcatattatagagttgtagccacctcacaatgaagtactacagcctgtgctgtcttaatggtttatgtcaggaaatgaaaaagatactgtaccaaatctggaattacaatggggagtaataatgtatactaaatgacttttgtattttaagttactttttgtgagtggtgaatttttgtgtttttcttttcagctacacttagtcctgagatgtattttttctttaagtcttgaatgaatacaaaaggagcccattttataatataaaccttgatgtacatgttgagatatttggacaatgaaaatgccttaaaaggaatgcatatggataaagttgcacttataacacccttcaacaaaatctaattttaaattgtctttttcttttctattaagggttttctttttcagtgtctaccattgtacttataactgttattaaataccaaatcaaataatataaaagctgtaacatttcctttaaaactaatgctaataagggatttagagttgaatggcaaaatgtttattacttggcaatacctgatgtcagtcacaggcatccaactcatgacaagagataccactgtttgttttttaaaaaacatttttcattttgtttctccttcaaaaattaagttggactaacattcacgtatcaaactaatataaaaagaaataaaaccaagaggtgatttttgtaacaa

SEQ ID NO: 6379 - DNA, 9505 bp, Homo sapiens
  source 1..9505: mol_type = unassigned DNA
cgggcagtggaggctccgcgggtcgaaagcggctccatgcccatcggtgggtggaacgtgtagaggtcggaacgccgaggtcgagtctggtggcgcctcggtatccttaacgtggtctctgtttaacgtatttcatttagcccccgttgggattgattcattgggagcagtttcgctggtctggatcctccaggagctggacaaccttgacgggctttttgtcttgggttccagccccctttcccttcctcctcctccagatgccttttctctgcccctcctcgcccggtacagacatttccagcgcaggctgctgctcgtggtgtccgtcgtcgaagccacttcttgggatttcggctcgtttcactctggggtgttttttgaggagggagagtgcccccctcctccacgatgggatttttctcccttgccgaaatggactttcattgatttctacttacttccacgtttagtgaccaattccctaggcgtatttttgtggtagttccttttttcaaatacatactctgtaaaatggagaacgaaatttttactccccttctggagcagttcatgaccagccctttggtcacttgggttaaaacgtttggacctctggccgcaggaaatgggaccaaccttgatgaatatgtggctttggtggatggggtattcttgaaccaggtcatgctccaaattaatcctaaattggagagtcagagagtaaataaaaaagtcaataatgatgcctcacttagaatgcacaatctatccattttggtgagacagataaaattttattaccaggagactttgcagcaattgatcatgatgtcgttgccaaatgtcttaatcattggcaaaaatcccttttctgaacaaggcacagaagaagttaaaaaactgcttttacttttattgggttgtgcagttcagtgtcagaaaaaagaggaatttattgaaagaattcaaggtttagattttgatacaaaagcagcggttgccgcacatattcaagaggtaactcataatcaggaaaatgtgtttgacctgcaatggatggaagtgactgatatgtcgcaggaggacatagaaccactcttgaaaaatatggcattgcatctaaaaagacttatagatgagagagatgaacattcagagactatcatagaactctctgaagagcgggatggtctccattttctaccccatgcctcttcatctgcacagtcaccctgtggttctccaggcatgaagcgaacagaaagtcgacaacatctgtcggtggaactggcagatgctaaagccaagataagaaggcttaggcaggaattggaggaaaagactgagcagttgttggattgtaaacaagaacttgagcaaatggaaatagaactcaaaaggctgcaacaagagaacatgaatttgctttcggatgctcgctctgccagaatgtaccgagatgaattagatgcacttcgagagaaagcagtcagagtcgataagcttgaaagtgaagtcagcagatataaagagagactacatgatattgaattttataaggcaagagttgaggaattaaaagaagacaatcaagttttattagaaacaaaaaccatgttggaagaccaactagagggaactcgtgctcgttctgataaattacatgaattagaaaaagagaacttacaactgaaagctaaacttcatgatatggaaatggaacgagatatggatagaaaaaagattgaagaattaatggaagaaaatatgactttggaaatggcacagaaacaaagtatggatgaatcattacatcttggctgggaactggaacagatatccagaactagtgaactttccgaagcaccccagaaatccctgggccatgaggtgaatgagttgacatcaagtagattattgaagctagagatggaaaatcaaagtttgacaaaaaccgtagaagagcttcggactactgtggattctgtagaaggcaatgcttccaaaatcctgaaaatggaaaaagaaaatcaaaggctcagtaaaaaggttgagattcttgaaaatgagattgttcaagaaaagcaaagtcttcagaattgtcagaatttaagcaaggatctaatgaaggagaaagctcagcttgaaaaaacaatagaaacactgagagaaaattcagagagacagattaagatactggaacaggaaaatgaacatctgaatcaaacagtgtcttccttaaggcagcggtcccagataagtgcagaagcaagagtgaaagacattgaaaaagaaaacaaaattcttcatgaatctatcaaagaaacaagtagcaagctaagcaagattgaatttgaaaaaagacaaattaaaaaagaattggaacattataaagaaaaaggagaacgagctgaagaacttgaaaatgaattgcatcatcttgaaaaagaaaatgaattattacagaaaaaaataactaatttaaaaattacttgtgaaaaaattgaggccttagaacaagaaaattcagagctagaaagagaaaatagaaaattaaaaaaaacattggatagctttaaaaatctgacctttcagttagaatccctagaaaaagagaattcccaacttgatgaggaaaacttagaactgcgaaggaatgtagaatctttgaagtgtgcaagcatgaaaatggctcagctacagctagaaaacaaagaactggaaagtgaaaaagagcaacttaagaagggtttggagctcctgaaagcatctttcaagaaaacagaacgcttagaagttagctaccagggtttagatatagaaaatcaaagactgcaaaaaactttagagaacagcaataaaaaaatccagcaattagagagtgaactacaagacttagagatggaaaatcaaacattgcagaaaaacctagaagaactaaaaatatctagcaaaagactagaacagctggaaaaagaaaataaatcattagagcaagagacttctcaactggaaaaggataagaaacaattggagaaggaaaataagagactccgacaacaagcagaaattaaagataccacattagaagaaaataatgtgaagattggaaatttggaaaaagaaaacaaaaccctatccaaagaaattggtatatataaagaatcttgtgtccgtctgaaagaactagaaaaagaaaataaggagcttgtgaaaagagcaactattgatataaaaacgttggttacactacgtgaggatttggtgagtgaaaagttgaagacccaacagatgaacaatgatctcgaaaaattaactcatgagcttgagaagatagggttaaataaggagcgactcttacatgatgaacaaagtactgatgacaggtataaacttttggaatcaaaattagaatccactcttaagaagtctcttgaaataaaagaagaaaaaattgctgctttagaagctcgattagaagaatccacgaattataaccagcaattgcgccaagaacttaaaacagtgaaaaaaaattatgaagctctcaaacagagacaagatgaggaaaggatggtacagagctctcctccaatatctggtgaagacaacaaatgggagcgagaaagtcaagaaacgactagagaacttctgaaagttaaagacagattaattgaagtagaaagaaataatgctacactgcaagcagagaagcaagcgttgaaaactcaactgaagcaacttgagacacagaacaataatttgcaggctcagattcttgcacttcagaggcagacagtgtcattacaagaacagaataccactcttcaaacacagaatgccaagcttcaggttgaaaattccacccttaattcccaaagtacctcactcatgaaccagaatgcccaactcctaatccagcagtcttccttagaaaatgaaaatgaatctgtaatcaaagagcgagaagacctaaaatctctctatgattctctgatcaaagatcatgaaaagctggaacttcttcatgaacgtcaggcttcagagtatgaatctcttatctctaaacatggaactctgaagtctgcccacaaaaatcttgaggtggaacatagagaccttgaagaccgttacaatcagttattaaaacagaaaggacagttggaagatttggaaaaaatgctcaaagtagaacaggaaaaaatgctgcttgaaaataaaaatcatgaaacagtagctgcagaatacaagaaactttgtggtgaaaatgataggctgaatcatacctatagtcaacttttaaaagagactgaagttttacaaactgaccataaaaatttgaaaagtcttctgaataattccaaactggaacaaacaagattagaagctgaattttcaaaactaaaggaacaataccaacaattggatattacatcaaccaagctgaataaccagtgtgagttgctaagccaacttaaaggaaatttagaagaagaaaatcggcatctactagatcaaattcagacattaatgctacagaacagaacacttttggagcagaatatggaaagcaaggatctttttcatgttgaacaaagacagtacattgataagttaaatgaattaagacgtcagaaggagaaactagaagagaaaattatggatcaatacaaattttatgacccatctcctcctagaaggagaggcaactggattactctaaaaatgagaaaattgataaagtctaagaaagatattaatcgggaacgccagaaatctctaacattaacacccacccgctcagactccagtgaaggatttcttcagctccctcatcaagacagtcaagatagttcttcagtaggttcaaactctttagaagatggccagaccttggggaccaagaaaagcagcatggttgcactgaaaagactgccctttttgaggaacagaccgaaggataaagacaaaatgaaggcctgctaccgtcgttccatgtccatgaatgacctggtgcagtccatggtcctagcaggacagtggacaggtagtactgagaatttggaggttcctgatgatatttcaacgggtaaaaggagaaaagaattgggagctatggccttctctactacagccatcaacttttcaactgtcaactcttctgcaggcttcagatccaagcagttggttaataataaagatactacatcctttgaagacataagtccacaaggtgttagtgatgattctagtacgggatcaagagttcatgcttcaagaccagccagccttgatagtggcagaacatccactagcaatagcaataataatgcttcactacatgaagtcaaagcaggtgcagttaataaccaaagcaggccacaaagccacagcagtggagaatttagcctgcttcatgaccatgaggcttggtccagcagtggtagcagtccaatccagtacttgaaaagacagaccagatcaagcccagtgctccagcacaaaatatctgaaacactggagagtcgacatcacaagatcaaaactggttcccctggaagtgaagttgttactctacaacagtttttggaagaaagcaataagcttacctcagtacagataaagtcctcaagtcaagagaatcttttagatgaagtaatgaaaagtttgtctgtctcttctgactttttgggaaaagacaaaccagttagctgtggtctggccaggtcagtaagtggaaaaaccccaggggacttctatgatagacggacaactaagcctgagtttttgagacctggtcctcgaaaaactgaagatacctacttcattagttctgcgggaaaacctacaccaggcactcaaggaaaaataaaattagtaaaagaatcttctctgtcacgacaatcaaaagatagtaacccttatgcaactttacctcgtgcaagcagcgtgatctcaactgccgaaggaactacacgaaggacaagcatccatgattttttgaccaaggacagtagactgcctatatcagttgattcaccaccagctgctgctgacagcaacaccactgcagcatctaatgtggacaaagtacaagaaagcagaaattcaaaaagcaggtctagggagcaacaaagctcctaattctattacccactacatgacatgtgggccaagtgagagaaaagtgtccttcagtttctcagtatgaagcctttatttctgaagtaacaagacacctagcaactataggaatcatttttaaaaatctttaaggagacttttaacagtccttcgtgaatagagcaggcaagaaatacaaaccttcattccttgaatcaaggagcactactggattcaactgccaaaattttttaaaggttttaggacttactataccttgtactgttaagatctactgaataaaggacgttctctcactaaggaccaggtgttttaaggttaagtgtttaaagaagtactccaagaacaatctgcttttttcatcatttgttttatgaatttatccatgtttgcttaatgcttctgctaagtgttagccaaaatctagccatttatatttagttgtgtaaacctaaattaaatgctgtagtattttgtggaatgtactatatagcaagatacagagaaaattgttttggcatgtcagagccttatttggttagcagactgcatgtgttgatactttttttttcttaaagccaattattttgatgcaaaagaaattcagtttataagataaatctgaaaaatccataatgaaataggagttataaaaaatttatagtgatattaatctttccatatttcccattaagcaacactaagcattcataagttaacccatggtaaagagtgtttttctgaaacttttttttagtaagatggtttttcagcaaatggcattcccaagataaagctgttgtgctttaactcatttcttttctttggtattgggttatgtatgcgtgtgcatttttttaacttgagagctgactgttgcttaagaagttttcttatggcaaaaataatgtaaataagttactatgatctgcattttgccagaaactcatttataattaaggctatcatttattaatgatttttttctcctttatgatattacattaaagttgataactgttattggtacttttgaaatatttgtatgcatttgttacctttaaacatttggaagaagcacaaaaaaatagatttagttaacccagggaaacatcaatttttttagtagttccaattttatatcacagttttattttcttatgaaatcaaaaaatgcattgatactcattaatgcaaattcattatttaacatcaatatcagagtaatcttcaaggtctgaaatgagaaacatactgactttttaaaattttaacagtgtacttcttaggctttcattaccagctctgaagaactttttggaataattccatattccatagtgtgtggtttatgagttgtgggtttcatcactaacccagtaaccataagaaaagtctctctctctctctctctctctctctctttctctctccctctttctctctctctttcgtaggccagtagcaatgttgtgttcacagtctaatttccaaaagaccatcaataaaaaagagagcatgtttaaattgaaatggaacttagagaacttgagcttacttacgtacttcaatgccaccggtaacttaggttttaccaccaaatgctgttaacgttaaatcattttgaaaatcttggatgaaaggtgctatgtaaatggaaatacaaaggattcttactaacatacaaaaataatgcacaacagaaatatctaaaaccttttccgtagactttgaaacatctctctctctcataactccctggattcaagtagcacattggtaataggtatcagagcagtctagagacaattgcatgtcaaaaaatgtacattcatttttaggtggataaaagtaaacatagaaattatgttatggctaaatacagttagtgggtaacttagatttatattagctagcatctaatttgcacaactagaacacatcccagaacaattactgaaaagctgaaatttaatgggtggtgatgtagcccaatgagggcgaatgacattacagcttgacctctccagaacactaatatcctaaaatacagaacatgctgggttaagtgcattagtgcttcaagcagaaaatgctgaaaacaacgtgtaaagtactgaatctgagtaggctgaccctgagaagggacaattaaagagacaaccaagggaacacattgagactacaaaaatatgaataatctcaattatattcatcacacttttttcataccatttcaagaaacgactagacagtagtaaccacatgaatattttactttctccagtataccttgagaagcaaactttgtaggaagccactcttctcccctaaacaacttctgccaaacaataataaagccaactggaaacgaatcggagccattttcattttcctaaccggggcctgacatgctttaaattatctggctgtattctaaatcaacacctaacccctcaaggaaactgaagaatcaatatacagggtaatagctttggctcagagctccaataatgtgcttcagatctgtccatgtggaaatgctttcatccaaatttttaaattggtggttaccaaagagttcacaaaacaggtttgtatgtagcacctttcatgcaaggcatgcaaaaagcctattttaaaatcactgtgcatattatagagttgtagccacctcacaatgaagtactacagcctgtgctgtcttaatggtttatgtcaggaaatgaaaaagatactgtaccaaatctggaattacaatggggagtaataatgtatactaaatgacttttgtattttaagttactttttgtgagtggtgaatttttgtgtttttcttttcagctacacttagtcctgagatgtattttttctttaagtcttgaatgaatacaaaaggagcccattttataatataaaccttgatgtacatgttgagatatttggacaatgaaaatgccttaaaaggaatgcatatggataaagttgcacttataacacccttcaacaaaatctaattttaaattgtctttttcttttctattaagggttttctttttcagtgtctaccattgtacttataactgttattaaataccaaatcaaataatataaaagctgtaacatttcctttaaaactaatgctaataagggatttagagttgaatggcaaaatgtttattacttggcaatacctgatgtcagtcacaggcatccaactcatgacaagagataccactgtttgttttttaaaaaacatttttcattttgtttctccttcaaaaattaagttggactaacattcacgtatcaaactaatataaaaagaaataaaaccaagaggtgatttttgtaacaa

SEQ ID NO: 6380 - DNA, 2880 bp, Homo sapiens
  source 1..2880: mol_type = unassigned DNA
cttttggaatcaaaattagaatccactcttaagaagtctcttgaaataaaagaagaaaaaattgctgctttagaagctcgattagaagaatccacgaattataaccagcaattgcgccaagaacttaaaacagtgaaaaaaaattatgaagctctcaaacagagacaagatgaggaaaggatggtacagagctctcctccaatatctggtgaagacaacaaatgggagcgagaaagtcaagaaacgactagagaacttctgaaagttaaagacagattaattgaagtagaaagaaataatgctacactgcaagcagagaagcaagcgttgaaaactcaactgaagcaacttgagacacagaacaataatttgcaggctcagattcttgcacttcagaggcagacagtgtcattacaagaacagaataccactcttcaaacacagaatgccaagcttcaggttgaaaattccacccttaattcccaaagtacctcactcatgaaccagaatgcccaactcctaatccagcagtcttccttagaaaatgaaaatgaatctgtaatcaaagagcgagaagacctaaaatctctctatgattctctgatcaaagatcatgaaaagctggaacttcttcatgaacgtcaggcttcagagtatgaatctcttatctctaaacatggaactctgaagtctgcccacaaaaatcttgaggtggaacatagagaccttgaagaccgttacaatcagttattaaaacagaaaggacagttggaagatttggaaaaaatgctcaaagtagaacaggaaaaaatgctgcttgaaaataaaaatcatgaaacagtagctgcagaatacaagaaactttgtggtgaaaatgataggctgaatcatacctatagtcaacttttaaaagagactgaagttttacaaactgaccataaaaatttgaaaagtcttctgaataattccaaactggaacaaacaagattagaagctgaattttcaaaactaaaggaacaataccaacaattggatattacatcaaccaagctgaataaccagtgtgagttgctaagccaacttaaaggaaatttagaagaagaaaatcggcatctactagatcaaattcagacattaatgctacagaacagaacacttttggagcagaatatggaaagcaaggatctttttcatgttgaacaaagacagtacattgataagttaaatgaattaagacgtcagaaggagaaactagaagagaaaattatggatcaatacaaattttatgacccatctcctcctagaaggagaggcaactggattactctaaaaatgagaaaattgataaagtctaagaaagatattaatcgggaacgccagaaatctctaacattaacacccacccgctcagactccagtgaaggatttcttcagctccctcatcaagacagtcaagatagttcttcagtaggttcaaactctttagaagatggccagaccttggggaccaagaaaagcagcaccatgaatgacctggtgcagtccatggtcctagcaggacagtggacaggtagtactgagaatttggaggttcctgatgatatttcaacgggtaaaaggagaaaagaattgggagctatggccttctctactacagccatcaacttttcaactgtcaactcttctgcaggcttcagatccaagcagttggttaataataaagatactacatcctttgaagacataagtccacaaggtgttagtgatgattctagtacgggatcaagagttcatgcttcaagaccagccagccttgatagtggcagaacatccactagcaatagcaataataatgcttcactacatgaagtcaaagcaggtgcagttaataaccaaagcaggccacaaagccacagcagtggagaatttagcctgcttcatgaccatgaggcttggtccagcagtggtagcagtccaatccagtacttgaaaagacagaccagatcaagcccagtgctccagcacaaaatatctgaaacactggagagtcgacatcacaagatcaaaactggttcccctggaagtgaagttgttactctacaacagtttttggaagaaagcaataagcttacctcagtacagataaagtcctcaagtcaagagaatcttttagatgaagtaatgaaaagtttgtctgtctcttctgactttttgggaaaagacaaaccagttagctgtggtctggccaggtcagtaagtggaaaaaccccaggggacttctatgatagacggacaactaagcctgagtttttgagacctggtcctcgaaaaactgaagatacctacttcattagttctgcgggaaaacctacaccaggcactcaaggaaaaataaaattagtaaaagaatcttctctgtcacgacaatcaaaagatagtaacccttatgcaactttacctcgtgcaagcagcgtgatctcaactgccgaaggaactacacgaaggacaagcatccatgattttttgaccaaggacagtagactgcctatatcagttgattcaccaccagctgctgctgacagcaacaccactgcagcatctaatgtggacaaagtacaagaaagcagaaattcaaaaagcaggtctagggagcaacaaagctcctaattctattacccactacatgacatgtgggccaagtgctacacttagtcctgagatgtattttttctttaagtcttgaatgaatacaaaaggagcccattttataatataaaccttgatgtacatgttgagatatttggacaatgaaaatgccttaaaaggaatgcatatggataaagttgcacttataacacccttcaacaaaatctaatttta

SEQ ID NO: 6381 - DNA, 6378 bp, Homo sapiens
  source 1..6378: mol_type = unassigned DNA
gccacttcttgggatttcggctcgtttcactctggggtgttttttgaggagggagagtgcccccctcctccacgatgggatttttctcccttgccgaaatggactttcattgatttctacttacttccacgtttagtgaccaattccctaggcgtatttttgtggtagttccttttttcaaatacatactctgtaaaatggagaacgaaatttttactccccttctggagcagttcatgaccagccctttggtcacttgggttaaaacgtttggacctctggccgcaggaaatgggaccaaccttgatgaatatgtggctttggtggatggggtattcttgaaccaggtcatgctccaaattaatcctaaattggagagtcagagagtaaataaaaaagtcaataatgatgcctcacttagaatgcacaatctatccattttggtgagacagataaaattttattaccaggagactttgcagcaattgatcatgatgtcgttgccaaatgtcttaatcattggcaaaaatcccttttctgaacaaggcacagaagaagttaaaaaactgcttttacttttattgggttgtgcagttcagtgtcagaaaaaagaggaatttattgaaagaattcaaggtttagattttgatacaaaagcagcggttgccgcacatattcaagaggtaactcataatcaggaaaatgtgtttgacctgcaatggatggaagtgactgatatgtcgcaggaggacatagaaccactcttgaaaaatatggcattgcatctaaaaagacttatagatgagagagatgaacattcagagactatcatagaactctctgaagagcgggatggtctccattttctaccccatgcctcttcatctgcacagtcaccctgtggttctccaggcatgaagcgaacagaaagtcgacaacatctgtcggtggaactggcagatgctaaagccaagataagaaggcttaggcaggaattggaggaaaagactgagcagttgttggattgtaaacaagaacttgagcaaatggaaatagaactcaaaaggctgcaacaagagaacatgaatttgctttcggatgctcgctctgccagaatgtaccgagatgaattagatgcacttcgagagaaagcagtcagagtcgataagcttgaaagtgaagtcagcagatataaagagagactacatgatattgaattttataaggcaagagttgaggaattaaaagaagacaatcaagttttattagaaacaaaaaccatgttggaagaccaactagagggaactcgtgctcgttctgataaattacatgaattagaaaaagagaacttacaactgaaagctaaacttcatgatatggaaatggaacgagatatggatagaaaaaagattgaagaattaatggaagaaaatatgactttggaaatggcacagaaacaaagtatggatgaatcattacatcttggctgggaactggaacagatatccagaactagtgaactttccgaagcaccccagaaatccctgggccatgaggtgaatgagttgacatcaagtagattattgaagctagagatggaaaatcaaagtttgacaaaaaccgtagaagagcttcggactactgtggattctgtagaaggcaatgcttccaaaatcctgaaaatggaaaaagaaaatcaaaggctcagtaaaaaggttgagattcttgaaaatgagattgttcaagaaaagcaaagtcttcagaattgtcagaatttaagcaaggatctaatgaaggagaaagctcagcttgaaaaaacaatagaaacactgagagaaaattcagagagacagattaagatactggaacaggaaaatgaacatctgaatcaaacagtgtcttccttaaggcagcggtcccagataagtgcagaagcaagagtgaaagacattgaaaaagaaaacaaaattcttcatgaatctatcaaagaaacaagtagcaagctaagcaagattgaatttgaaaaaagacaaattaaaaaagaattggaacattataaagaaaaaggagaacgagctgaagaacttgaaaatgaattgcatcatcttgaaaaagaaaatgaattattacagaaaaaaataactaatttaaaaattacttgtgaaaaaattgaggccttagaacaagaaaattcagagctagaaagagaaaatagaaaattaaaaaaaacattggatagctttaaaaatctgacctttcagttagaatccctagaaaaagagaattcccaacttgatgaggaaaacttagaactgcgaaggaatgtagaatctttgaagtgtgcaagcatgaaaatggctcagctacagctagaaaacaaagaactggaaagtgaaaaagagcaacttaagaagggtttggagctcctgaaagcatctttcaagaaaacagaacgcttagaagttagctaccagggtttagatatagaaaatcaaagactgcaaaaaactttagagaacagcaataaaaaaatccagcaattagagagtgaactacaagacttagagatggaaaatcaaacattgcagaaaaacctagaagaactaaaaatatctagcaaaagactagaacagctggaaaaagaaaataaatcattagagcaagagacttctcaactggaaaaggataagaaacaattggagaaggaaaataagagactccgacaacaagcagaaattaaagataccacattagaagaaaataatgtgaagattggaaatttggaaaaagaaaacaaaaccctatccaaagaaattggtatatataaagaatcttgtgtccgtctgaaagaactagaaaaagaaaataaggagcttgtgaaaagagcaactattgatataaaaacgttggttacactacgtgaggatttggtgagtgaaaagttgaagacccaacagatgaacaatgatctcgaaaaattaactcatgagcttgagaagatagggttaaataaggagcgactcttacatgatgaacaaagtactgatgacaggtataaacttttggaatcaaaattagaatccactcttaagaagtctcttgaaataaaagaagaaaaaattgctgctttagaagctcgattagaagaatccacgaattataaccagcaattgcgccaagaacttaaaacagtgaaaaaaaattatgaagctctcaaacagagacaagatgaggaaaggatggtacagagctctcctccaatatctggtgaagacaacaaatgggagcgagaaagtcaagaaacgactagagaacttctgaaagttaaagacagattaattgaagtagaaagaaataatgctacactgcaagcagagaagcaagcgttgaaaactcaactgaagcaacttgagacacagaacaataatttgcaggctcagattcttgcacttcagaggcagacagtgtcattacaagaacagaataccactcttcaaacacagaatgccaagcttcaggttgaaaattccacccttaattcccaaagtacctcactcatgaaccagaatgcccaactcctaatccagcagtcttccttagaaaatgaaaatgaatctgtaatcaaagagcgagaagacctaaaatctctctatgattctctgatcaaagatcatgaaaagctggaacttcttcatgaacgtcaggcttcagagtatgaatctcttatctctaaacatggaactctgaagtctgcccacaaaaatcttgaggtggaacatagagaccttgaagaccgttacaatcagttattaaaacagaaaggacagttggaagatttggaaaaaatgctcaaagtagaacaggaaaaaatgctgcttgaaaataaaaatcatgaaacagtagctgcagaatacaagaaactttgtggtgaaaatgataggctgaatcatacctatagtcaacttttaaaagagactgaagttttacaaactgaccataaaaatttgaaaagtcttctgaataattccaaactggaacaaacaagattagaagctgaattttcaaaactaaaggaacaataccaacaattggatattacatcaaccaagctgaataaccagtgtgagttgctaagccaacttaaaggaaatttagaagaagaaaatcggcatctactagatcaaattcagacattaatgctacagaacagaacacttttggagcagaatatggaaagcaaggatctttttcatgttgaacaaagacagtacattgataagttaaatgaattaagacgtcagaaggagaaactagaagagaaaattatggatcaatacaaattttatgacccatctcctcctagaaggagaggcaactggattactctaaaaatgagaaaattgataaagtctaagaaagatattaatcgggaacgccagaaatctctaacattaacacccacccgctcagactccagtgaaggatttcttcagctccctcatcaagacagtcaagatagttcttcagtaggttcaaactctttagaagatggccagaccttggggaccaagaaaagcagcatggttgcactgaaaagactgccctttttgaggaacagaccgaaggataaagacaaaatgaaggcctgctaccgtcgttccatgtccatgaatgacctggtgcagtccatggtcctagcaggacagtggacaggtagtactgagaatttggaggttcctgatgatatttcaacgggtaaaaggagaaaagaattgggagctatggccttctctactacagccatcaacttttcaactgtcaactcttctgcaggcttcagatccaagcagttggttaataataaagatactacatcctttgaagacataagtccacaaggtgttagtgatgattctagtacgggatcaagagttcatgcttcaagaccagccagccttgatagtggcagaacatccactagcaatagcaataataatgcttcactacatgaagtcaaagcaggtgcagttaataaccaaagcaggccacaaagccacagcagtggagaatttagcctgcttcatgaccatgaggcttggtccagcagtggtagcagtccaatccagtacttgaaaagacagaccagatcaagcccagtgctccagcacaaaatatctgaaacactggagagtcgacatcacaagatcaaaactggttcccctggaagtgaagttgttactctacaacagtttttggaagaaagcaataagcttacctcagtacagataaagtcctcaagtcaagagaatcttttagatgaagtaatgaaaagtttgtctgtctcttctgactttttgggaaaagacaaaccagttagctgtggtctggccagcgtgatctcaactgccgaaggaactacacgaaggacaagcatccatgattttttgaccaaggacagtagactgcctatatcagttgattcaccaccagctgctgctgacagcaacaccactgcagcatctaatgtggacaaagtacaagaaagcagaaattcaaaaagcaggtctagggagcaacaaagctcctaattctattacccactacatgacatgtgggccaagtgagagaaaagtgtccttcagtttctcagtatgaagcctttatttctgaagtaacaagacacctagcaactataggaatcatttttaaaaatctttaaggagacttttaacagtccttcgtgaatagagcaggcaagaaatacaaaccttcattccttgaatcaaggagcactactggattcaactgccaaaattttttaaaggttttaggacttactataccttgtactgttaagatctactgaataaaggacgttctctcactaaggaccaggtgttttaaggttaagtgtttaaagaagtactccaagaacaatctgcttttttcatcatttgttttatgaatttatccatgtttgcttaatgcttctgctaagtgttagccaaaatctagccatttatatttagttgtgtaaacctaaattaaatgctgtagtattttgtggaatgtactatatagcaagatacagagaaaattgttttggcatgtcagagccttatttggttagcagactgcatgtgttgatactttttttttcttaaagccaattattttgatgcaaaagaaattcagtttataagataaatctgaaaaatccataatgaaataggagttataaaaaatttatagtgatattaatctttccatatttcccattaagcaacactaagcattcataagttaacccatggtaaagagtgtttttctgaaacttttttttagtaagatggtttttcagcaaatggcattcccaag

SEQ ID NO: 6382 - DNA, 4236 bp, Homo sapiens
  source 1..4236: mol_type = unassigned DNA
aaattatggatcaatacaaattttatgacccatctcctcctagaaggagaggcaactggattactctaaaaatgagaaaattgataaagtctaagaaagatattaatcgggaacgccagaaatctctaacattaacacccacccgctcagactccagtgaaggatttcttcagctccctcatcaagacagtcaagatagttcttcagtaggttcaaactctttagaagatggccagaccttggggaccaagaaaagcagcaatactacatcctttgaagacataagtccacaaggtgttagtgatgattctagtacgggatcaagagttcatgcaggtgcagttaataaccaaagcaggccacaaagccacagcagtggagaatttagcctgcttcatgaccatgaggcttggtccagcagtggtagcagtccaatccagtacttgaaaagacagaccagatcaagcccagtgctccagcacaaaatatctgaaacactggagagtcgacatcacaagatcaaaactggttcccctggaagtgaagttgttactctacaacagtttttggaagaaagcaataagcttacctcagtacagataaagtcctcaagtcaagagaatcttttagatgaagtaatgaaaagtttgtctgtctcttctgactttttgggaaaagacaaaccagttagctgtggtctggccaggtcagtaagtggaaaaaccccaggggacttctatgatagacggacaactaagcctgagtttttgagacctggtcctcgaaaaactgaagatacctacttcattagttctgcgggaaaacctacaccaggcactcaaggaaaaataaaattagtaaaagaatcttctctgtcacgacaatcaaaagatagtaacccttatgcaactttacctcgtgcaagcagcgtgatctcaactgccgaaggaactacacgaaggacaagcatccatgattttttgaccaaggacagtagactgcctatatcagttgattcaccaccagctgctgctgacagcaacaccactgcagcatctaatgtggacaaagtacaagaaagcagaaattcaaaaagcaggtctagggagcaacaaagctcctaattctattacccactacatgacatgtgggccaagtgagagaaaagtgtccttcagtttctcagtatgaagcctttatttctgaagtaacaagacacctagcaactataggaatcatttttaaaaatctttaaggagacttttaacagtccttcgtgaatagagcaggcaagaaatacaaaccttcattccttgaatcaaggagcactactggattcaactgccaaaattttttaaaggttttaggacttactataccttgtactgttaagatctactgaataaaggacgttctctcactaaggaccaggtgttttaaggttaagtgtttaaagaagtactccaagaacaatctgcttttttcatcatttgttttatgaatttatccatgtttgcttaatgcttctgctaagtgttagccaaaatctagccatttatatttagttgtgtaaacctaaattaaatgctgtagtattttgtggaatgtactatatagcaagatacagagaaaattgttttggcatgtcagagccttatttggttagcagactgcatgtgttgatactttttttttcttaaagccaattattttgatgcaaaagaaattcagtttataagataaatctgaaaaatccataatgaaataggagttataaaaaatttatagtgatattaatctttccatatttcccattaagcaacactaagcattcataagttaacccatggtaaagagtgtttttctgaaacttttttttagtaagatggtttttcagcaaatggcattcccaagataaagctgttgtgctttaactcatttcttttctttggtattgggttatgtatgcgtgtgcatttttttaacttgagagctgactgttgcttaagaagttttcttatggcaaaaataatgtaaataagttactatgatctgcattttgccagaaactcatttataattaaggctatcatttattaatgatttttttctcctttatgatattacattaaagttgataactgttattggtacttttgaaatatttgtatgcatttgttacctttaaacatttggaagaagcacaaaaaaatagatttagttaacccagggaaacatcaatttttttagtagttccaattttatatcacagttttattttcttatgaaatcaaaaaatgcattgatactcattaatgcaaattcattatttaacatcaatatcagagtaatcttcaaggtctgaaatgagaaacatactgactttttaaaattttaacagtgtacttcttaggctttcattaccagctctgaagaactttttggaataattccatattccatagtgtgtggtttatgagttgtgggtttcatcactaacccagtaaccataagaaaagtctctctctctctctctctctctctctctttctctctccctctttctctctctctttcgtaggccagtagcaatgttgtgttcacagtctaatttccaaaagaccatcaataaaaaagagagcatgtttaaattgaaatggaacttagagaacttgagcttacttacgtacttcaatgccaccggtaacttaggttttaccaccaaatgctgttaacgttaaatcattttgaaaatcttggatgaaaggtgctatgtaaatggaaatacaaaggattcttactaacatacaaaaataatgcacaacagaaatatctaaaaccttttccgtagactttgaaacatctctctctctcataactccctggattcaagtagcacattggtaataggtatcagagcagtctagagacaattgcatgtcaaaaaatgtacattcatttttaggtggataaaagtaaacatagaaattatgttatggctaaatacagttagtgggtaacttagatttatattagctagcatctaatttgcacaactagaacacatcccagaacaattactgaaaagctgaaatttaatgggtggtgatgtagcccaatgagggcgaatgacattacagcttgacctctccagaacactaatatcctaaaatacagaacatgctgggttaagtgcattagtgcttcaagcagaaaatgctgaaaacaacgtgtaaagtactgaatctgagtaggctgaccctgagaagggacaattaaagagacaaccaagggaacacattgagactacaaaaatatgaataatctcaattatattcatcacacttttttcataccatttcaagaaacgactagacagtagtaaccacatgaatattttactttctccagtataccttgagaagcaaactttgtaggaagccactcttctcccctaaacaacttctgccaaacaataataaagccaactggaaacgaatcggagccattttcattttcctaaccggggcctgacatgctttaaattatctggctgtattctaaatcaacacctaacccctcaaggaaactgaagaatcaatatacagggtaatagctttggctcagagctccaataatgtgcttcagatctgtccatgtggaaatgctttcatccaaatttttaaattggtggttaccaaagagttcacaaaacaggtttgtatgtagcacctttcatgcaaggcatgcaaaaagcctattttaaaatcactgtgcatattatagagttgtagccacctcacaatgaagtactacagcctgtgctgtcttaatggtttatgtcaggaaatgaaaaagatactgtaccaaatctggaattacaatggggagtaataatgtatactaaatgacttttgtattttaagttactttttgtgagtggtgaatttttgtgtttttcttttcagctacacttagtcctgagatgtattttttctttaagtcttgaatgaatacaaaaggagcccattttataatataaaccttgatgtacatgttgagatatttggacaatgaaaatgccttaaaaggaatgcatatggataaagttgcacttataacacccttcaacaaaatctaattttaaattgtctttttcttttctattaagggttttctttttcagtgtctaccattgtacttataactgttattaaataccaaatcaaataatat

SEQ ID NO: 6383 - DNA, 9811 bp, Homo sapiens
  source 1..9811: mol_type = unassigned DNA
attggcgggcggcgctggcgggcggcgaggggtggggtgtgatgcggcactgcggttctgaggccgttactccggcttctccatagagggcggagaaggctggagcgcggcggtgattttgtgccagggattcccagagacgcgctgaaaggctggcagggcttaggaagctggggggttagggacacacattcaagcccccacccccgggaggggaagggggctggaggcgaggcttgagggcggcggaggaatggtgtctgctcggggggaaggggcgagccctgcctgttggtactgaggggctgcgggcagtggaggctccgcgggtcgaaagcggctccatgcccatcggtgggtggaacgtgtagaggtcggaacgccgaggtcgagtctggtggcgcctcggtatccttaacgtggtctctgtttaacgtatttcatttagcccccgttgggattgattcattgggagcagtttcgctggtctggatcctccaggagctggacaaccttgacgggctttttgtcttgggttccagccccctttcccttcctcctcctccagatgccttttctctgcccctcctcgcccggtacagacatttccagcgcaggctgctgctcgtggtgtccgtcgtcgaagccacttcttgggatttcggctcgtttcactctggggtgttttttgaggagggagagtgcccccctcctccacgatgggatttttctcccttgccgaaatggactttcattgatttctacttacttccacgtttagtgaccaattccctaggcgtatttttgtggtagttccttttttcaaatacatactctgtaaaatggagaacgaaatttttactccccttctggagcagttcatgaccagccctttggtcacttgggttaaaacgtttggacctctggccgcaggaaatgggaccaaccttgatgaatatgtggctttggtggatggggtattcttgaaccaggtcatgctccaaattaatcctaaattggagagtcagagagtaaataaaaaagtcaataatgatgcctcacttagaatgcacaatctatccattttggtgagacagataaaattttattaccaggagactttgcagcaattgatcatgatgtcgttgccaaatgtcttaatcattggcaaaaatcccttttctgaacaaggcacagaagaagttaaaaaactgcttttacttttattgggttgtgcagttcagtgtcagaaaaaagaggaatttattgaaagaattcaaggtttagattttgatacaaaagcagcggttgccgcacatattcaagaggtaactcataatcaggaaaatgtgtttgacctgcaatggatggaagtgactgatatgtcgcaggaggacatagaaccactcttgaaaaatatggcattgcatctaaaaagacttatagatgagagagatgaacattcagagactatcatagaactctctgaagagcgggatggtctccattttctaccccatgcctcttcatctgcacagtcaccctgtggttctccaggcatgaagcgaacagaaagtcgacaacatctgtcggtggaactggcagatgctaaagccaagataagaaggcttaggcaggaattggaggaaaagactgagcagttgttggattgtaaacaagaacttgagcaaatggaaatagaactcaaaaggctgcaacaagagaacatgaatttgctttcggatgctcgctctgccagaatgtaccgagatgaattagatgcacttcgagagaaagcagtcagagtcgataagcttgaaagtgaagtcagcagatataaagagagactacatgatattgaattttataaggcaagagttgaggaattaaaagaagacaatcaagttttattagaaacaaaaaccatgttggaagaccaactagagggaactcgtgctcgttctgataaattacatgaattagaaaaagagaacttacaactgaaagctaaacttcatgatatggaaatggaacgagatatggatagaaaaaagattgaagaattaatggaagaaaatatgactttggaaatggcacagaaacaaagtatggatgaatcattacatcttggctgggaactggaacagatatccagaactagtgaactttccgaagcaccccagaaatccctgggccatgaggtgaatgagttgacatcaagtagattattgaagctagagatggaaaatcaaagtttgacaaaaaccgtagaagagcttcggactactgtggattctgtagaaggcaatgcttccaaaatcctgaaaatggaaaaagaaaatcaaaggctcagtaaaaaggttgagattcttgaaaatgagattgttcaagaaaagcaaagtcttcagaattgtcagaatttaagcaaggatctaatgaaggagaaagctcagcttgaaaaaacaatagaaacactgagagaaaattcagagagacagattaagatactggaacaggaaaatgaacatctgaatcaaacagtgtcttccttaaggcagcggtcccagataagtgcagaagcaagagtgaaagacattgaaaaagaaaacaaaattcttcatgaatctatcaaagaaacaagtagcaagctaagcaagattgaatttgaaaaaagacaaattaaaaaagaattggaacattataaagaaaaaggagaacgagctgaagaacttgaaaatgaattgcatcatcttgaaaaagaaaatgaattattacagaaaaaaataactaatttaaaaattacttgtgaaaaaattgaggccttagaacaagaaaattcagagctagaaagagaaaatagaaaattaaaaaaaacattggatagctttaaaaatctgacctttcagttagaatccctagaaaaagagaattcccaacttgatgaggaaaacttagaactgcgaaggaatgtagaatctttgaagtgtgcaagcatgaaaatggctcagctacagctagaaaacaaagaactggaaagtgaaaaagagcaacttaagaagggtttggagctcctgaaagcatctttcaagaaaacagaacgcttagaagttagctaccagggtttagatatagaaaatcaaagactgcaaaaaactttagagaacagcaataaaaaaatccagcaattagagagtgaactacaagacttagagatggaaaatcaaacattgcagaaaaacctagaagaactaaaaatatctagcaaaagactagaacagctggaaaaagaaaataaatcattagagcaagagacttctcaactggaaaaggataagaaacaattggagaaggaaaataagagactccgacaacaagcagaaattaaagataccacattagaagaaaataatgtgaagattggaaatttggaaaaagaaaacaaaaccctatccaaagaaattggtatatataaagaatcttgtgtccgtctgaaagaactagaaaaagaaaataaggagcttgtgaaaagagcaactattgatataaaaacgttggttacactacgtgaggatttggtgagtgaaaagttgaagacccaacagatgaacaatgatctcgaaaaattaactcatgagcttgagaagatagggttaaataaggagcgactcttacatgatgaacaaagtactgatgacagtaggtataaacttttggaatcaaaattagaatccactcttaagaagtctcttgaaataaaagaagaaaaaattgctgctttagaagctcgattagaagaatccacgaattataaccagcaattgcgccaagaacttaaaacagtgaaaaaaaattatgaagctctcaaacagagacaagatgaggaaaggatggtacagagctctcctccaatatctggtgaagacaacaaatgggagcgagaaagtcaagaaacgactagagaacttctgaaagttaaagacagattaattgaagtagaaagaaataatgctacactgcaagcagagaagcaagcgttgaaaactcaactgaagcaacttgagacacagaacaataatttgcaggctcagattcttgcacttcagaggcagacagtgtcattacaagaacagaataccactcttcaaacacagaatgccaagcttcaggttgaaaattccacccttaattcccaaagtacctcactcatgaaccagaatgcccaactcctaatccagcagtcttccttagaaaatgaaaatgaatctgtaatcaaagagcgagaagacctaaaatctctctatgattctctgatcaaagatcatgaaaagctggaacttcttcatgaacgtcaggcttcagagtatgaatctcttatctctaaacatggaactctgaagtctgcccacaaaaatcttgaggtggaacatagagaccttgaagaccgttacaatcagttattaaaacagaaaggacagttggaagatttggaaaaaatgctcaaagtagaacaggaaaaaatgctgcttgaaaataaaaatcatgaaacagtagctgcagaatacaagaaactttgtggtgaaaatgataggctgaatcatacctatagtcaacttttaaaagagactgaagttttacaaactgaccataaaaatttgaaaagtcttctgaataattccaaactggaacaaacaagattagaagctgaattttcaaaactaaaggaacaataccaacaattggatattacatcaaccaagctgaataaccagtgtgagttgctaagccaacttaaaggaaatttagaagaagaaaatcggcatctactagatcaaattcagacattaatgctacagaacagaacacttttggagcagaatatggaaagcaaggatctttttcatgttgaacaaagacagtacattgataagttaaatgaattaagacgtcagaaggagaaactagaagagaaaattatggatcaatacaaattttatgacccatctcctcctagaaggagaggcaactggattactctaaaaatgagaaaattgataaagtctaagaaagatattaatcgggaacgccagaaatctctaacattaacacccacccgctcagactccagtgaaggatttcttcagctccctcatcaagacagtcaagatagttcttcagtaggttcaaactctttagaagatggccagaccttggggaccaagaaaagcagcatggttgcactgaaaagactgccctttttgaggaacagaccgaaggataaagacaaaatgaaggcctgctaccgtcgttccatgtccatgaatgacctggtgcagtccatggtcctagcaggacagtggacaggtagtactgagaatttggaggttcctgatgatatttcaacgggtaaaaggagaaaagaattgggagctatggccttctctactacagccatcaacttttcaactgtcaactcttctgcaggcttcagatccaagcagttggttaataataaagatactacatcctttgaagacataagtccacaaggtgttagtgatgattctagtacgggatcaagagttcatgcttcaagaccagccagccttgatagtggcagaacatccactagcaatagcaataataatgcttcactacatgaagtcaaagcaggtgcagttaataaccaaagcaggccacaaagccacagcagtggagaatttagcctgcttcatgaccatgaggcttggtccagcagtggtagcagtccaatccagtacttgaaaagacagaccagatcaagcccagtgctccagcacaaaatatctgaaacactggagagtcgacatcacaagatcaaaactggttcccctggaagtgaagttgttactctacaacagtttttggaagaaagcaataagcttacctcagtacagataaagtcctcaagtcaagagaatcttttagatgaagtaatgaaaagtttgtctgtctcttctgactttttgggaaaagacaaaccagttagctgtggtctggccaggtcagtaagtggaaaaaccccaggggacttctatgatagacggacaactaagcctgagtttttgagacctggtcctcgaaaaactgaagatacctacttcattagttctgcgggaaaacctacaccaggcactcaaggaaaaataaaattagtaaaagaatcttctctgtcacgacaatcaaaagatagtaacccttatgcaactttacctcgtgcaagcagcgtgatctcaactgccgaaggaactacacgaaggacaagcatccatgattttttgaccaaggacagtagactgcctatatcagttgattcaccaccagctgctgctgacagcaacaccactgcagcatctaatgtggacaaagtacaagaaagcagaaattcaaaaagcaggtctagggagcaacaaagctcctaattctattacccactacatgacatgtgggccaagtgagagaaaagtgtccttcagtttctcagtatgaagcctttatttctgaagtaacaagacacctagcaactataggaatcatttttaaaaatctttaaggagacttttaacagtccttcgtgaatagagcaggcaagaaatacaaaccttcattccttgaatcaaggagcactactggattcaactgccaaaattttttaaaggttttaggacttactataccttgtactgttaagatctactgaataaaggacgttctctcactaaggaccaggtgttttaaggttaagtgtttaaagaagtactccaagaacaatctgcttttttcatcatttgttttatgaatttatccatgtttgcttaatgcttctgctaagtgttagccaaaatctagccatttatatttagttgtgtaaacctaaattaaatgctgtagtattttgtggaatgtactatatagcaagatacagagaaaattgttttggcatgtcagagccttatttggttagcagactgcatgtgttgatactttttttttcttaaagccaattattttgatgcaaaagaaattcagtttataagataaatctgaaaaatccataatgaaataggagttataaaaaatttatagtgatattaatctttccatatttcccattaagcaacactaagcattcataagttaacccatggtaaagagtgtttttctgaaacttttttttagtaagatggtttttcagcaaatggcattcccaagataaagctgttgtgctttaactcatttcttttctttggtattgggttatgtatgcgtgtgcatttttttaacttgagagctgactgttgcttaagaagttttcttatggcaaaaataatgtaaataagttactatgatctgcattttgccagaaactcatttataattaaggctatcatttattaatgatttttttctcctttatgatattacattaaagttgataactgttattggtacttttgaaatatttgtatgcatttgttacctttaaacatttggaagaagcacaaaaaaatagatttagttaacccagggaaacatcaatttttttagtagttccaattttatatcacagttttattttcttatgaaatcaaaaaatgcattgatactcattaatgcaaattcattatttaacatcaatatcagagtaatcttcaaggtctgaaatgagaaacatactgactttttaaaattttaacagtgtacttcttaggctttcattaccagctctgaagaactttttggaataattccatattccatagtgtgtggtttatgagttgtgggtttcatcactaacccagtaaccataagaaaagtctctctctctctctctctctctctctctttctctctccctctttctctctctctttcgtaggccagtagcaatgttgtgttcacagtctaatttccaaaagaccatcaataaaaaagagagcatgtttaaattgaaatggaacttagagaacttgagcttacttacgtacttcaatgccaccggtaacttaggttttaccaccaaatgctgttaacgttaaatcattttgaaaatcttggatgaaaggtgctatgtaaatggaaatacaaaggattcttactaacatacaaaaataatgcacaacagaaatatctaaaaccttttccgtagactttgaaacatctctctctctcataactccctggattcaagtagcacattggtaataggtatcagagcagtctagagacaattgcatgtcaaaaaatgtacattcatttttaggtggataaaagtaaacatagaaattatgttatggctaaatacagttagtgggtaacttagatttatattagctagcatctaatttgcacaactagaacacatcccagaacaattactgaaaagctgaaatttaatgggtggtgatgtagcccaatgagggcgaatgacattacagcttgacctctccagaacactaatatcctaaaatacagaacatgctgggttaagtgcattagtgcttcaagcagaaaatgctgaaaacaacgtgtaaagtactgaatctgagtaggctgaccctgagaagggacaattaaagagacaaccaagggaacacattgagactacaaaaatatgaataatctcaattatattcatcacacttttttcataccatttcaagaaacgactagacagtagtaaccacatgaatattttactttctccagtataccttgagaagcaaactttgtaggaagccactcttctcccctaaacaacttctgccaaacaataataaagccaactggaaacgaatcggagccattttcattttcctaaccggggcctgacatgctttaaattatctggctgtattctaaatcaacacctaacccctcaaggaaactgaagaatcaatatacagggtaatagctttggctcagagctccaataatgtgcttcagatctgtccatgtggaaatgctttcatccaaatttttaaattggtggttaccaaagagttcacaaaacaggtttgtatgtagcacctttcatgcaaggcatgcaaaaagcctattttaaaatcactgtgcatattatagagttgtagccacctcacaatgaagtactacagcctgtgctgtcttaatggtttatgtcaggaaatgaaaaagatactgtaccaaatctggaattacaatggggagtaataatgtatactaaatgacttttgtattttaagttactttttgtgagtggtgaatttttgtgtttttcttttcagctacacttagtcctgagatgtattttttctttaagtcttgaatgaatacaaaaggagcccattttataatataaaccttgatgtacatgttgagatatttggacaatgaaaatgccttaaaaggaatgcatatggataaagttgcacttataacacccttcaacaaaatctaattttaaattgtctttttcttttctattaagggttttctttttcagtgtctaccattgtacttataactgttattaaataccaaatcaaataatataaaagctgtaacatttcctttaaaactaatgctaataagggatttagagttgaatggcaaaatgtttattacttggcaatacctgatgtcagtcacaggcatccaactcatgacaagagataccactgtttgttttttaaaaaacatttttcattttgtttctccttcaaaaattaagttggactaacattcacgtatcaaactaatataaaaagaaataaaaccaagaggtgatttttgt

SEQ ID NO: 6384 - DNA, 3024 bp, Homo sapiens
  source 1..3024: mol_type = unassigned DNA
gctgagtgtccccaggcacctgattcagacccacaggaggcagagagtccccttcaggcagctgccatggacccccaggcctcagactggtccccgcaagagtcaggctctcctgtggagacacaggagtccccggagaaggctggccgtagatcctctctccagagccctgcctctgtggccccacctcagggtccagggaccaaaattcaggccccgcagttgctgggaggagagacagagggaagagaggctccccaaggcgagttggtgcctgaggcctgggggttgagacaggagggccctgagcacaagccagggccttcggagcccagctctgtgcagctggaggagcaggagggcccaaaccagggcctggacctggccacgggacaagcagaggccagagagcatgaccagaggctggaagggacggtcagggacccagcctggcaaaaaccacagcagaagtcagaaggggctcttgaggtccaggtctgggaaggcccaatcccaggggagagcctggccagtggtgtcgcagagcaggaggccctcagggaggaggtggcacagttgaggagaaaggctgaggcccttggagatgagctggaagcccaggcccgcaagctggaggcccaaaacacggaggctgcccgcctctccaaggagctggcccaagcgcgaagggcagaggccgaggcccaccgggaggcagaggcccaggcctgggagcaagcccggctgcgggaggcagtggaggctgctggccaggagctggagtctgcgtcccaggaacgggaggcgctggtggaggcgctggcagcagcgggccgggagcggaggcagtgggagcgtgaggggtccaggctgcgggcccagtcggaggccgccgaggaacggatgcaggtgctggagagcgagggccgccagcacttggaggaggctgagagggagcgccgggagaaggaggccctccaggcggagctggagaaagctgtggtgcggggcaaggagttgggggaccggctggagcatttgcagcgtgagctggagcaggcggctctcgagcgccaggaatttctgcgagaaaaggaaagccagcaccagaggtaccagggcttggagcagcggctggaagctgagctgcaggcggcggcgaccagcaaggaggaggcgctgatggagctcaagaccagggccctgcagctggaagaggagctgttccagctgcgccagggccccgcggggctggggcccaaaaagcgtgcggagcctcagctggtggagacccagaatgtgcggcttattgaggtggagcgcagtaatgcgatgctggtggcagagaaggcagctttgcaggggcagctgcagcacctggaggggcagctggggagcctgcagggccgtgcccaggagctgctgctgcagagccagcgggcgcaggagcacagcagccgcctgcaggccgagaagtctgtgctggagattcagggccaggagctgcaccggaagctggaggtgctggaggaggaggtgcgggcggcacggcagtcccaggaggagacccgcgggcagcagcaggccctgcttcgggaccacaaggccctggcacagctgcagcggcggcaggaggccgagctagagggactgctggtgcggcaccgagacctcaaggccaacatgcgggcactggagctggcccaccgggagctgcagggccggcacgagcagctgcaggcccagcgggccagcgtggaggcacaggaggtggccctgctggcagagcgtgaacgcctgatgcaagatgggcatcggcagcggggcctggaggaggagctgcggaggcttcagagcgagcacgacagggctcagatgctgctggcagagttgtctcgggagcggggtgagctgcagggtgaacgcggggagctacggggccggctggcgcggctggagctggagcgggcacagctggagatgcagagccagcagctgcgcgagtccaaccagcagctggacctgagcgcctgccggctgaccacgcagtgtgagctattgacacagctgcgaagtgcccaggaagaggagaaccggcagctgctggctgaagttcaggccctgagccgggagaacagggagctcctggagcgcagcctggagagtcgggaccacctgcaccgcgaacagcgggagtacctggaccagcttaatgccctgcgccgcgagaagcagaagctcgtggagaagatcatggaccaataccgcgtgctggagcctgtgcccctgccccggaccaaggtccccttccccggcacccatgcgccgggcccagagctccctctgcctgcgggatgagaccttggcaggcgggcagcggcggaaactcagctcaaggttcccggtggggcgaagctctgagtcattcagccctggggacacccctaggcaacgattccgacagcgccatccaggccccctgggggcgcccgtctcccacagcaaaggacctggtgtgggatgggagaactccgctgagaccctgcaggaacacgaaacagatgccaaccgagagggccctgaggtacaggaaccggagaaacgtcccctcaccccatccctcagccagtgacaccgtgggaacagcaggcttgggagtgcagccttctcggcactggagtgtcagcggaggccccaggcagcccaagagctcagggagccagggaccccaaggggagtccttggacaaggaggcctgggccctgagatcctccacggtcagcgccggggcccggagatggagctgggacgagtgtgtggacaggggggatggctggcccccacgagcagctccaggctggagttctggttcttccaggtggctcccgctgaggcagcggtctctgggggatcccccagctgaaggaggctggcaggagttggcaagagaaccccctgccctgtccaggtgggaagctgagtcccagtgctgggggactgtggcctgggctgatcttgagcctt

SEQ ID NO: 6385 - DNA, 4915 bp, Homo sapiens
  source 1..4915: mol_type = unassigned DNA
ggcaggtgcagctgccacagtgagacgggcaccccgacccgggcatggaggggggcaaggggcccaggctcagagacttcctgagtgggagtctggctacctgggcgctgggactggccgggctggtcggggaggcggaggactcggagggggaagaagaggaagaggaggaagagccgcccctttggttggagaagagattcctgcgcctcagcgatggggccctgctcctccgggtgctgggcatcattgcccccagctcccgagggggacctcggatgctcagaggccttgacggacctgctgcctggcgagtgtggaacctgaaccacctgtggggccgactgagggacttctaccaggaggagctgcagctgctgatcctgtcgccacccccagacctccagacattgggatttgaccctctctcagaagaagcggtggagcagctggaaggcgttcttcggctactgttgggagcgtcagtacagtgtgagcaccgggaactcttcatccgccacatccagggcctcagtctcgaggtccagagcgagctggccgctgccatccaggaggtgacccagccgggggccggcgtggtgctggcactgtctgggccagatcctggggagctggcacctgccgagctggagatgctgtcccggagcctgatggggacactgtcgaagctggcacgggagcgtgacctgggggcccagcggctggctgaactgctgctggagcgagaacccctctgcttgaggcctgaggctccctctagggctcccgccgagggcccctcgcaccatctggccctgcagctggccaacgccaaggctcagctgcggcgtctgcggcaggagctggaggagaaggccgagctgctgctagactcccaggccgaggtgcagggtttggaggccgaaataagaaggctccgccaggaggcccaggcgctgtcgggacaggccaagcgggccgagctgtaccgcgaggaggcagaggcgctgcgggagcgggccggccgcctgccccgcctgcaggaggagctgaggcgctgccgcgagcggctgcaggcggctgaggcctacaagagtcagctggaggaggagcgggtgctctcgggggtgctggaggcgtccaaggcgctgctggaagagcagctggaggctgcccgagagcgctgcgcccggctgcacgagacccagcgcgagaacctgctgctgcgaacccggctgggcgaggcccatgcggagctggactctctgcggcatcaggtggaccagctggctgaggagaatgtggagctggagctggagcttcagcggagcttggagccacctccaggatcccctggggaggcacccctagcaggagcggccccctcgctgcaagatgaggtgagggaggcagaggctgggcggcttcggacccttgagagggagaaccgggagcttcgggggctgcttcaggtgcttcaggggcagccagggggccagcaccccctgctggaggcaccgagagaggaccctgttcttccagtgctggaggaggctccccagactcctgtggccttcgaccacagccctcagggcttggttcagaaggcaagggatggaggcccccaggccttggacttggctcccccggcattagactcagtgctcgaggcatcagctgagtgtccccaggcacctgattcagacccacaggaggcagagagtccccttcaggcagctgccatggacccccaggcctcagactggtccccgcaagagtcaggctctcctgtggagacacaggagtccccggagaaggctggccgtagatcctctctccagagccctgcctctgtggccccacctcagggtccagggaccaaaattcaggccccgcagttgctgggaggagagacagagggaagagaggctccccaaggcgagttggtgcctgaggcctgggggttgagacaggagggccctgagcacaagccagggccttcggagcccagctctgtgcagctggaggagcaggagggcccaaaccagggcctggacctggccacgggacaagcagaggccagagagcatgaccagaggctggaagggacggtcagggacccagcctggcaaaaaccacagcagaagtcagaaggggctcttgaggtccaggtctgggaaggcccaatcccaggggagagcctggccagtggtgtcgcagagcaggaggccctcagggaggaggtggcacagttgaggagaaaggctgaggcccttggagatgagctggaagcccaggcccgcaagctggaggcccaaaacacggaggctgcccgcctctccaaggagctggcccaagcgcgaagggcagaggccgaggcccaccgggaggcagaggcccaggcctgggagcaagcccggctgcgggaggcagtggaggctgctggccaggagctggagtctgcgtcccaggaacgggaggcgctggtggaggcgctggcagcagcgggccgggagcggaggcagtgggagcgtgaggggtccaggctgcgggcccagtcggaggccgccgaggaacggatgcaggtgctggagagcgagggccgccagcacttggaggaggctgagagggagcgccgggagaaggaggccctccaggcggagctggagaaagctgtggtgcggggcaaggagttgggggaccggctggagcatttgcagcgtgagctggagcaggcggctctcgagcgccaggaatttctgcgagaaaaggaaagccagcaccagaggtaccagggcttggagcagcggctggaagctgagctgcaggcggcggcgaccagcaaggaggaggcgctgatggagctcaagaccagggccctgcagctggaagaggagctgttccagctgcgccagggccccgcggggctggggcccaaaaagcgtgcggagcctcagctggtggagacccagaatgtgcggcttattgaggtggagcgcagtaatgcgatgctggtggcagagaaggcagctttgcaggggcagctgcagcacctggaggggcagctggggagcctgcagggccgtgcccaggagctgctgctgcagagccagcgggcgcaggagcacagcagccgcctgcaggccgagaagtctgtgctggagattcagggccaggagctgcaccggaagctggaggtgctggaggaggaggtgcgggcggcacggcagtcccaggaggagacccgcgggcagcagcaggccctgcttcgggaccacaaggccctggcacagctgcagcggcggcaggaggccgagctagagggactgctggtgcggcaccgagacctcaaggccaacatgcgggcactggagctggcccaccgggagctgcagggccggcacgagcagctgcaggcccagcgggccagcgtggaggcacaggaggtggccctgctggcagagcgtgaacgcctgatgcaagatgggcatcggcagcggggcctggaggaggagctgcggaggcttcagagcgagcacgacagggctcagatgctgctggcagagttgtctcgggagcggggtgagctgcagggtgaacgcggggagctacggggccggctggcgcggctggagctggagcgggcacagctggagatgcagagccagcagctgcgcgagtccaaccagcagctggacctgagcgcctgccggctgaccacgcagtgtgagctattgacacagctgcgaagtgcccaggaagaggagaaccggcagctgctggctgaagttcaggccctgagccgggagaacagggagctcctggagcgcagcctggagagtcgggaccacctgcaccgcgaacagcgggagtacctggaccagcttaatgccctgcgccgcgagaagcagaagctcgtggagaagatcatggaccaataccgcgtgctggagcctgtgcccctgccccggaccaagaagggcagctggctggcagacaaggtgaagaggctgatgcggccccggcgggaggggggcccccctggggggctgcgcctgggggccgatggggctggcagcaccgagagcctggggggccccccggagacggagcttcctgagggcagggaggcagatgggacagggtccccttccccggcacccatgcgccgggcccagagctccctctgcctgcgggatgagaccttggcaggcgggcagcggcggaaactcagctcaaggttcccggtggggcgaagctctgagtcattcagccctggggacacccctaggcaacgattccgacagcgccatccaggccccctgggggcgcccgtctcccacagcaaaggacctggtgtgggatgggagaactccgctgagaccctgcaggaacacgaaacagatgccaaccgagagggccctgaggtacaggaaccggagaaacgtcccctcaccccatccctcagccagtgacaccgtgggaacagcaggcttgggagtgcagccttctcggcactggagtgtcagcggaggccccaggcagcccaagagctcagggagccagggaccccaaggggagtccttggacaaggaggcctgggccctgagatcctccacggtcagcgccggggcccggagatggagctgggacgagtgtgtggacaggggggatggctggcccccacgagcagctccaggctggagttctggttcttccaggtggctcccgctgaggcagcggtctctgggggatcccccagctgaaggaggctggcaggagttggcaagagaaccccctgccctgtccaggtgggaagctgagtcccagtgctgggggactgtggcctgggctgatcttgagccttaactggacatgaggggcatgagaataaagctgaactgcagcctcctga

SEQ ID NO: 6386 - DNA, 2326 bp, Homo sapiens
  source 1..2326: mol_type = unassigned DNA
ctggcagcatcctggcgccccctgcccccccagcccccactgtcagctcctgacttcctgtccctccagccctccgtggccttttccctgtagccaaggtctctcacccgacccacctctgctgagcctctctagctgtctcgctgtcacatggctggggtggcagcccaccgggcgcatccacctttcactgcgcacatgaagaaccgtgggctcagagaggagctggagaaagctgtggtgcggggcaaggagttgggggaccggctggagcatttgcagcgtgagctggagcaggcggctctcgagcgccaggaatttctgcgagaaaaggaaagccagcaccagaggtaccagggcttggagcagcggctggaagctgagctgcaggcggcggcgaccagcaaggaggaggcgctgatggagctcaagaccagggccctgcagctggaagaggagctgttccagctgcgccagggccccgcggggctggggcccaaaaagcgtgcggagcctcagctggtggagacccagaatgtgcggcttattgaggtggagcgcagtaatgcgatgctggtggcagagaaggcagctttgcaggggcagctgcagcacctggaggggcagctggggagcctgcagggccgtgcccaggagctgctgctgcagagccagcgggcgcaggagcacagcagccgcctgcaggccgagaagtctgtgctggagattcagggccaggagctgcaccggaagctggaggtgctggaggaggaggtgcgggcggcacggcagtcccaggaggagacccgcgggcagcagcaggccctgcttcgggaccacaaggccctggcacagctgcagcggcggcaggaggccgagctagagggactgctggtgcggcaccgagacctcaaggccaacatgcgggcactggagctggcccaccgggagctgcagggccggcacgagcagctgcaggcccagcgggccagcgtggaggcacaggaggtggccctgctggcagagcgtgaacgcctgatgcaagatgggcatcggcagcggggcctggaggaggagctgcggaggcttcagagcgagcacgacagggctcagatgctgctggcagagttgtctcgggagcggggtgagctgcagggtgaacgcggggagctacggggccggctggcgcggctggagctggagcgggcacagctggagatgcagagccagcagctgcgcgagtccaaccagcagctggacctgagcgcctgccggctgaccacgcagtgtgagctattgacacagctgcgaagtgcccaggaagaggagaaccggcagctgctggctgaagttcaggccctgagccgggagaacagggagctcctggagcgcagcctggagagtcgggaccacctgcaccgcgaacagcgggagtacctggaccagcttaatgccctgcgccgcgagaagcagaagctcgtggagaagatcatggaccaataccgcgtgctggagcctgtgcccctgccccggaccaagaagggcagctggctggcagacaagggtccccttccccggcacccatgcgccgggcccagagctccctctgcctgcgggatgagaccttggcaggcgggcagcggcggaaactcagctcaaggttcccggtggggcgaagctctgagtcattcagccctggggacacccctaggcaacgattccgacagcgccatccaggccccctgggggcgcccgtctcccacagcaaaggacctggtgtgggatgggagaactccgctgagaccctgcaggaacacgaaacagatgccaaccgagagggccctgaggtacaggaaccggagaaacgtcccctcaccccatccctcagccagtgacaccgtgggaacagcaggcttgggagtgcagccttctcggcactggagtgtcagcggaggccccaggcagcccaagagctcagggagccagggaccccaaggggagtccttggacaaggaggcctgggccctgagatcctccacggtcagcgccggggcccggagatggagctgggacgagtgtgtggacaggggggatggctggcccccacgagcagctccaggctggagttctggttcttccaggtggctcccgctgaggcagcggtctctgggggatcccccagctgaaggaggctggcaggagttggcaagagaaccccctgccctgtccaggtgggaagctgagtcccagtgctgggggactgtggcctgggctgatcttgagccttaactggacatgaggggcatgagaataaagctgaactgca

SEQ ID NO: 6387 - DNA, 4565 bp, Homo sapiens
  source 1..4565: mol_type = unassigned DNA
ctcagggcaggtgcagctgccacagtgagacgggcaccccgacccgggcatggaggggggcaaggggcccaggctcagagacttcctgagtgggagtctggctacctgggcgctgggactggccgggctggtcggggaggcggaggactcggagggggaagaagaggaagaggaggaagagccgcccctttggttggagaagagattcctgcgcctcagcgatggggccctgctcctccgggtgctgggcatcattgcccccagctcccgagggggacctcggatgctcagaggccttgacggacctgctgcctggcgagtgtggaacctgaaccacctgtggggccgactgagggacttctaccaggaggagctgcagctgctgatcctgtcgccacccccagacctccagacattgggatttgaccctctctcagaagaagcggtggagcagctggaaggcgttcttcggctactgttgggagcgtcagtacagtgtgagcaccgggaactcttcatccgccacatccagggcctcagtctcgaggtccagagcgagctggccgctgccatccaggaggtgacccagccgggggccggcgtggtgctggcactgtctgggccagatcctggggagctggcacctgccgagctggagatgctgtcccggagcctgatggggacactgtcgaagctggcacgggagcgtgacctgggggcccagcggctggctgaactgctgctggagcgagaacccctctgcttgaggcctgaggctccctctagggctcccgccgagggcccctcgcaccatctggccctgcagctggccaacgccaaggctcagctgcggcgtctgcggcaggagctggaggagaaggccgagctgctgctagactcccaggccgaggtgcagggtttggaggccgaaataagaaggctccgccaggaggcccaggcgctgtcgggacaggccaagcgggccgagctgtaccgcgaggaggcagaggcgctgcgggagcgggccggccgcctgccccgcctgcaggaggagctgaggcgctgccgcgagcggctgcaggcggctgaggcctacaagagtcagctggaggaggagcgggtgctctcgggggtgctggaggcgtccaaggcgctgctggaagagcagctggaggctgcccgagagcgctgcgcccggctgcacgagacccagcgcgagaacctgctgctgcgaacccggctgggcgaggcccatgcggagctggactctctgcggcatcaggtggaccagctggctgaggagaatgtggagctggagctggagcttcagcggagcttggagccacctccaggatcccctggggaggcacccctagcaggagcggccccctcgctgcaagatgaggtgagggaggcagaggctgggcggcttcggacccttgagagggagaaccgggagcttcgggggctgcttcaggtgcttcaggggcagccagggggccagcaccccctgctggaggcaccgagagaggaccctgttcttccagtgctggaggaggctccccagactcctgtggccttcgaccacagccctcagggcttggttcagaaggcaagggatggaggcccccaggccttggacttggctcccccggcattagactcagtgctcgaggcatcagctgagtgtccccaggcacctgattcagacccacaggaggcagagagtccccttcaggcagctgccatggacccccaggcctcagactggtccccgcaagagtcaggctctcctgtggagacacaggagtccccggagaaggctggccgtagatcctctctccagagccctgcctctgtggccccacctcagggtccagggaccaaaattcaggccccgcagttgctgggaggagagacagagggaagagaggctccccaaggcgagttggtgcctgaggcctgggggttgagacaggagggccctgagcacaagccagggccttcggagcccagctctgtgcagctggaggagcaggagggcccaaaccagggcctggacctggccacgggacaagcagaggccagagagcatgaccagaggctggaagggacggtcagggacccagcctggcaaaaaccacagcagaagtcagaaggggctcttgaggtccaggtctgggaaggcccaatcccaggggagagcctggccagtggtgtcgcagagcaggaggccctcagggaggaggtggcacagttgaggagaaaggctgaggcccttggagatgagctggaagcccaggcccgcaagctggaggcccaaaacacggaggctgcccgcctctccaaggagctggcccaagcgcgaagggcagaggccgaggcccaccgggaggcagaggcccaggcctgggagcaagcccggctgcgggaggcagtggaggctgctggccaggagctggagtctgcgtcccaggaacgggaggcgctggtggaggcgctggcagcagcgggccgggagcggaggcagtgggagcgtgaggggtccaggctgcgggcccagtcggaggccgccgaggaacggatgcaggtgctggagagcgagggccgccagcacttggaggaggctgagagggagcgccgggagaaggaggccctccaggcggagctggagaaagctgtggtgcggggcaaggagttgggggaccggctggagcatttgcagcgtgagctggagcaggcggctctcgagcgccaggaatttctgcgagaaaaggaaagccagcaccagaggtaccagggcttggagcagcggctggaagctgagctgcaggcggcggcgaccagcaaggaggaggcgctgatggagctcaagaccagggccctgcagctggaagaggagctgttccagctgcgccagggccccgcggggctggggcccaaaaagcgtgcggagcctcagctggtggagacccagaatgtgcggcttattgaggtggagcgcagtaatgcgatgctggtggcagagaaggcagctttgcaggggcagctgcagcacctggaggggcagctggggagcctgcagggccgtgcccaggagctgctgctggcagagcgtgaacgcctgatgcaagatgggcatcggcagcggggcctggaggaggagctgcggaggcttcagagcgagcacgacagggctcagatgctgctggcagagttgtctcgggagcggggtgagctgcagggtgaacgcggggagctacggggccggctggcgcggctggagctggagcgggcacagctggagatgcagagccagcagctgcgcgagtccaaccagcagctggacctgagcgcctgccggctgaccacgcagtgtgagctattgacacagctgcgaagtgcccaggaagaggagaaccggcagctgctggctgaagttcaggccctgagccgggagaacagggagctcctggagcgcagcctggagagtcgggaccacctgcaccgcgaacagcgggagtacctggaccagcttaatgccctgcgccgcgagaagcagaagctcgtggagaagatcatggaccaataccgcgtgctggagcctgtgcccctgccccggaccaagaagggcagctggctggcagacaaggtgaagaggctgatgcggccccggcgggaggggggcccccctggggggctgcgcctgggggccgatggggctggcagcaccgagagcctggggggccccccggagacggagcttcctgagggcagggaggcagatgggacagggtccccttccccggcacccatgcgccgggcccagagctccctctgcctgcgggatgagaccttggcaggcgggcagcggcggaaactcagctcaaggttcccggtggggcgaagctctgagtcattcagccctggggacacccctaggcaacgattccgacagcgccatccaggccccctgggggcgcccgtctcccacagcaaaggacctggtgtgggatgggagaactccgctgagaccctgcaggaacacgaaacagatgccaaccgagagggccctgaggtacaggaaccggagaaacgtcccctcaccccatccctcagccagtgacaccgtgggaacagcaggcttgggagtgcagccttctcggcactggagtgtcagcggaggccccaggcagcccaagagctcagggagccagggaccccaaggggagtccttggacaaggaggcctgggccctgagatcctccacggtcagcgccggggcccggagatggagctgggacgagtgtgtggacaggggggatggctggcccccacgagcagctccaggctggagttctggttcttccaggtggctcccgctgaggcagcggtctctgggggatcccccagctgaaggaggctggcaggagttggcaagagaaccccctgccctgtccaggtgggaagctgagtcccagtgctgggggactgtggcctgggctgatcttgagccttaactggacatgaggggcatgagaataaagctgaactgcagcctcctg

SEQ ID NO: 6388 - DNA, 1598 bp, Homo sapiens
  source 1..1598: mol_type = unassigned DNA
cgccttctccttgcttctgggggtcgtggccttgctcccgctgtgcgggaaaagaatccaggcccttccacgcgcgtgtgggtgcgggggccccgaagtgctcgtggttccccgctaggtctccgctggggcaggaaccggaatcatgggtgggaccaccagcacccgccgggtcaccttcgaggcggacgagaatgagaacatcaccgtggtgaagggcatccggctttcggaaaatgtgattgatcgaatgaaggaatcctctccatctggttcgaagtctcagcggtattctggtgcttatggtgcctcagtttctgatgaagaattgaaaagaagagtagctgaggagctggcattggagcaagccaagaaagaatccgaagatcagaaacgactaaagcaagccaaagagctggaccgagagagggctgctgccaatgagcagttaaccagagccatccttcgggagaggatatgtagcgaggaggaacgcgctaaggcaaagcacctggctaggcagctggaagagaaagaccgagtgctaaagaagcaggatgcattctacaaagaacagctggctagactggaggagaggagctcagagttctacagagtcaccactgaacaatatcagaaagctgctgaagaggtggaagcaaagttcaagcgatatgagtctcatccagtctgtgctgatctgcaggccaaaattcttcagtgttaccgtgagaacacccaccagaccctcaaatgctccgctctggccacccagtatatgcactgtgtcaatcatgccaaacagagcatgcttgagaagggaggataaaaactttcagaatgagcaaaacaccatcaacgttaattccagagatggaacattttttttcctagtgagaaaacaacccatttgaagagaagaccactaatgagaagaccactaaagagagacatcaagaatggattcagcagaatcatttcacgttttgaacagcagcagtttgaagggccaaagccttgatcagggatcagtcattaaaggacactcttgagtattagtaaaccctcttatgatgattaaaagagaagggcagccctctccaccttttggtactttctattcaacttgcactgaccataaaatgtttctcttctgaacaagccccatcatttggtgaacctccaccctaacaaagtaggatggggttgggggctaaattaattggagtggggcgaggagagagccagaaaacatagatccgagggcagcagtgctgggtggagagagccagaaaacagatctggaggcagcagtgctggatggaattgtctaggctgtggcatgttggttttgtctttcttttctcctttgattatgtaagagctatttcattataacttattatggtgattatacaggcaagaagacaaaaaggagagaaaatgtacctcttctactggaataatgtttatgattacaagtgagataaggtatttttatcaatatgaaggcaaccttggctgataaaacctctatagtgaatactcacatctttacttcactcactatcaataataaatatattttctgacaaaga

SEQ ID NO: 6389 - DNA, 898 bp, Homo sapiens
  source 1..898: mol_type = unassigned DNA
gtgcgggaaaagaatccaggcccttccacgcgcgtgtgggtgcgggggccccgaagtgctcgtggttccccgctaggtctccgctggggcaggaaccggaatcatgggtgggaccaccagcacccgccgggtcaccttcgaggcggacgagaatgagaacatcaccgtggtgaagggcatccggctttcggaaaatgtgattgatcgaatgaaggaatcctctccatctggttcgaagtctcagcggtattctggtgcttatggtgcctcagtttctgatgaagaattgaaaagaagagtagctgaggagctggcattggagcaagccaagaaagaatccgaagatcagaaacgactaaagcaagccaaagagctggaccgagagagggctgctgccaatgagcagttaaccagagccatccttcgggagaggatatgtagcgaggaggaacgcgctaaggcaaagcacctgataaaagtggagctgctctgggtgaaacctggagtgttgactgcttagcctccacttcggccttcctagaaacccagatgttactcctcggaacctttagtcctcattggagcacagttgggaactcactggacagggaaaatgggaccatggaatggagaactttgaactgaagagtgagggggattttcctagttcactaggcaattgggaaacactaaaactttctaagaagaaggctcatttctagtctctcccattctttaccttagtcacttctctgaaagaccaacccatgaccagctgcaaacagagaacatgaaaggaagtccatgcgtaatgaatcagtttcttcagtgacaaatctggggtcccggttgcatgggcaaatagtgaagccagaatagaggtggtagaccaagaaag

SEQ ID NO: 6390 - DNA, 1684 bp, Homo sapiens
  source 1..1684: mol_type = unassigned DNA
gctacttaaggtcctgctgcgtgagccattgacgtgtttggagctggagacggcctgggtgctggcgaagcggaggccggagttaatacacgaggaactcatgcaaaggaggggactttcggaaatccaaacttagagtgccttgtatttagaatccggaaggaaaaggaaatgaaatgtgaagaaactcatgcaccaaactcgaactgggtatatgtgatgttacctagtaagaagactgttagaatgccctcggtaacacagaggctgagagatcctgacataaatccttgtttgtcggaatctgatgcttccaccagatgtctggatgaaaataactatgacagggaaaggtgttccacttacttcttgaggtacaaaaactgccggagattctggaattctatcgtgatgcagagaagaaagaacggagtgaagccatttatgcctacggcagcagaaagagatgaaatcttgagagcagtgggaaatatgccctattgaatgtttgcattaaaagtgtttatataacttagaagcagatgaatatttctaataaatgattgctgtaatatttaagactgtacacccctcacccagacagaccttaagttcttcaagtggagacagtgaagtcaccccgtgtcctttttgcttgctctcagtgccatgccgatggtatgttgctgttggctgtgttgtggcatgagtttgcatgactttctggaggcatggagttaggtaaggctacatgagaaattgagcttttccactgggttttgaaagaagagtatgatgtgaacaagtaaagactgaatggggctgagatgaaggcaatgtttccaaggaaaggaaatgttatgagcaagagtgtgaggcaagagaagctggaaccacattcagagagtatcctgtagattgctccacctagaatctcaggtgggtggagcagtggtgggagaagactggaaaggtaagttgaaggtaaggaatgtgtggtgggcctcagatcccaggctcattcctcaaatcacttcttacttccctcacttatctttgtttaaataaggttagtacattcactaggggcaaatgggtttttctaaataaatgacataaaaaagaactggttgtctttctttaaagaaagtcttagttacaggattctgtgattaaaatccttaaatattgggttgccttctgcagctgtagtatcagtttttgaaccacagtaatgggaagaaagacaaatggattcccttagaagtaagatttctatttgcaggatgagttgggcagggaaaagggtcagggttcatcaggtgaactcaacactgggatgagactagaacttcactttatgatataaacacaatacgattattcaatgtggtgactggggtagactgtgaagcagccctccttatgcccactgccttttagaatcgtttgttttattcatggtagttttatgaagacatactattattgaatgaaatttaatgtgtacttgaaaacattgcttttgtcccttctcttcatctggtcttgggtcaagaacattgttttaatggctgccgacaatgaactgtctgtctgagtctaaaaccaagctcaggtttctaagccacatgaccttgattgttaaatgtagttatatttgaataaaaaatgaatcatttcc

SEQ ID NO: 6391 - DNA, 1535 bp, Homo sapiens
  source 1..1535: mol_type = unassigned DNA
cgctacttaaggtcctgctgcgtgagccattgacgtgtttggagctggagacggcctgggtgctggcgaagcggaggccggagtaagaagactgttagaatgccctcggtaacacagaggctgagagatcctgacataaatccttgtttgtcggaatctgatgcttccaccagatgtctggatgaaaataactatgacagggaaaggtgttccacttacttcttgaggtacaaaaactgccggagattctggaattctatcgtgatgcagagaagaaagaacggagtgaagccatttatgcctacggcagcagaaagagatgaaatcttgagagcagtgggaaatatgccctattgaatgtttgcattaaaagtgtttatataacttagaagcagatgaatatttctaataaatgattgctgtaatatttaagactgtacacccctcacccagacagaccttaagttcttcaagtggagacagtgaagtcaccccgtgtcctttttgcttgctctcagtgccatgccgatggtatgttgctgttggctgtgttgtggcatgagtttgcatgactttctggaggcatggagttaggtaaggctacatgagaaattgagcttttccactgggttttgaaagaagagtatgatgtgaacaagtaaagactgaatggggctgagatgaaggcaatgtttccaaggaaaggaaatgttatgagcaagagtgtgaggcaagagaagctggaaccacattcagagagtatcctgtagattgctccacctagaatctcaggtgggtggagcagtggtgggagaagactggaaaggtaagttgaaggtaaggaatgtgtggtgggcctcagatcccaggctcattcctcaaatcacttcttacttccctcacttatctttgtttaaataaggttagtacattcactaggggcaaatgggtttttctaaataaatgacataaaaaagaactggttgtctttctttaaagaaagtcttagttacaggattctgtgattaaaatccttaaatattgggttgccttctgcagctgtagtatcagtttttgaaccacagtaatgggaagaaagacaaatggattcccttagaagtaagatttctatttgcaggatgagttgggcagggaaaagggtcagggttcatcaggtgaactcaacactgggatgagactagaacttcactttatgatataaacacaatacgattattcaatgtggtgactggggtagactgtgaagcagccctccttatgcccactgccttttagaatcgtttgttttattcatggtagttttatgaagacatactattattgaatgaaatttaatgtgtacttgaaaacattgcttttgtcccttctcttcatctggtcttgggtcaagaacattgttttaatggctgccgacaatgaactgtctgtctgagtctaaaaccaagctcaggtttctaagccacatgaccttgattgttaaatgtagttatatttgaataaaaaatgaatcattt

SEQ ID NO: 6392 - DNA, 1550 bp, Homo sapiens
  source 1..1550: mol_type = unassigned DNA
ctggagacggcctgggtgctggcgaagcggaggccggagttaatacacgaggaactcatgcaaaggaggggactttcggaaatccaaacttagagtgccttgtatttagaatccggaaggaaaaggaaatgaaatgtgaagaaactcatgcaccaaactcgaactgggtatatgtgatgttacctagtaagaagactgttagaatgccctcggtaacacagaggctgagagatcctgacataaatccttgtttgtcggaatctgatgcttccaccagatgtctggatgaaaataactatgacagggaaaggtgttccacttacttcttgaggtacaaaaactgccggagattctggaattctatcgtgatgcagagaagaaagaacggagtgaagccatttatgcctacggcagcagaaagagatgaaatcttgagagcagtgggaaatatgccctattgaatgtttgcattaaaagtgtttatataacttagaagcagatgaatatttctaataaatgattgctgtaatatttaagactgtacacccctcacccagacagaccttaagttcttcaagtggagacagtgaagtcaccccgtgtcctttttgcttgctctcagtgccatgccgatggtatgttgctgttggctgtgttgtggcatgagtttgcatgactttctggaggcatggagttaggtaaggctacatgagaaattgagcttttccactgggttttgaaagaagagtatgatgtgaacaagtaaagactgaatggggctgagatgaaggcaatgtttccaaggaaaggaaatgttatgagcaagagtgtgaggcaagagaagctggaaccacattcagagagtatcctgtagattgctccacctagaatctcaggtgggtggagcagtggtgggagaagactggaaaggtaagttgaaggtaaggaatgtgtggtgggcctcagatcccaggctcattcctcaaatcacttcttacttccctcacttatctttgtttaaataaggttagtacattcactaggggcaaatgggtttttctaaataaatgacataaaaaagaactggttgtctttctttaaagaaagtcttagttacaggattctgtgattaaaatccttaaatattgggttgccttctgcagctgtagtatcagtttttgaaccacagtaatgggaagaaagacaaatggattcccttagaagtaagatttctatttgcaggatgagttgggcagggaaaagggtcagggttcatcaggtgaactcaacactgggatgagactagaacttcactttatgatataaacacaatacgattattcaatgtggtgactggggtagactgtgaagcagccctccttatgcccactgccttttagaatcgtttgttttattcatggtagttttatgaagacatactattattgaatgaaatttaatgtgtacttgaaaacattgcttttgtcccttctcttcatctggtcttgggtcaagaacattgttttaatggctgccgacaatgaactgtc

SEQ ID NO: 6393 - DNA, 536 bp, Homo sapiens
  source 1..536: mol_type = unassigned DNA
gtgtttggagctggagacggcctgggtgctggcgaagcggaggccggaggtgagtggttcccccgccctacctccgaagcggccgcagaaaagcggggagagaggggtgcccttgggccgtagcggggcccgaatgcacttctgcggcgcggaggcgctcccgccaggcttcgccgcagcgcggacctcttcccgttgctcttcctcccgccacacgggtctgttcgctccgggggcgaggaagatgacctctgcctagtccgggcaaccccagctcttcttccactctcctgtgtagcctctgaagcgcagttaccggccccacccccagttccctgcgttttcctcgccccttgtctctctcggcatggtctcggcacagcaagtaagaagactgttagaatgccctcggtaacacagaggctgagagatcctgacataaatccttgtttgtcggaatctgatgcttccaccagatgtctggatgaaaataactatgacagggaaaggtgttccacttacttcttgaggtacaa

SEQ ID NO: 6394 - DNA, 1805 bp, Homo sapiens
  source 1..1805: mol_type = unassigned DNA
gctggagacggcctgggtgctggcgaagcggaggccggagttaatacacgaggaactcatgcaaaggaggggactttcggaaatccaaacttagagtgccttgtatttagaatccggaaggaaaaggaaatgaaatgtgaagaaactcatgcaccaaactcgaactggtaagaagactgttagaatgccctcggtaacacagaggctgagagatcctgacataaatccttgtttgtcggaatctgatgcttccaccagatgtctggatgaaaataactatgacagggaaaggtgttccacttacttcttgaggtacaaaaactgccggagattctggaattctatcgtgatgcagagaagaaagaacggagtgaagccatttatgcctacggcagcagaaagagatgaaatcttgagagcagtgggaaatatgccctattgaatgtttgcattaaaagtgtttatataacttagaagcagatgaatatttctaataaatgattgctgtaatatttaagactgtacacccctcacccagacagaccttaagttcttcaagtggagacagtgaagtcaccccgtgtcctttttgcttgctctcagtgccatgccgatggtatgttgctgttggctgtgttgtggcatgagtttgcatgactttctggaggcatggagttaggtaaggctacatgagaaattgagcttttccactgggttttgaaagaagagtatgatgtgaacaagtaaagactgaatggggctgagatgaaggcaatgtttccaaggaaaggaaatgttatgagcaagagtgtgaggcaagagaagctggaaccacattcagagagtatcctgtagattgctccacctagaatctcaggtgggtggagcagtggtgggagaagactggaaaggtaagttgaaggtaaggaatgtgtggtgggcctcagatcccaggctcattcctcaaatcacttcttacttccctcacttatctttgtttaaataaggttagtacattcactaggggcaaatgggtttttctaaataaatgacataaaaaagaactggttgtctttctttaaagaaagtcttagttacaggattctgtgattaaaatccttaaatattgggttgccttctgcagctgtagtatcagtttttgaaccacagtaatgggaagaaagacaaatggattcccttagaagtaagatttctatttgcaggatgagttgggcagggaaaagggtcagggttcatcaggtgaactcaacactgggatgagactagaacttcactttatgatataaacacaatacgattattcaatgtggtgactggggtagactgtgaagcagccctccttatgcccactgccttttagaatcgtttgttttattcatggtagttttatgaagacatactattattgaatgaaatttaatgtgtacttgaaaacattgcttttgtcccttctcttcatctggtcttgggtcaagaacattgttttaatggctgccgacaatgaactgtctgtctgagtctaaaaccaagctcaggtttctaagccacatgaccttgattgttaaatgtagttatatttgaataaaaaatgaatcatttccaaaattcttttgatttgtattgactgctataaaaatgatggattaaaataggaccagaaaagaatgaatgcctacctgtgtaagaagtatttttgtatttttaagcacacttgttaaagggcttggaattttaatgtcactcctttgaaggtacataccaatatcaacattcatcttgtaact

SEQ ID NO: 6395 - DNA, 1670 bp, Homo sapiens
  source 1..1670: mol_type = unassigned DNA
gctggagacggcctgggtgctggcgaagcggaggccggagttaatacacgaggaactcatgcaaaggaggggactttcggaaatccaaacttagagtgccttgtatttagaatccggaaggaaaaggaaatgaaatgtgaagaaactcatgcaccaaactcgaactggtaagaagactgttagaatgccctcggtaacacagaggctgagagatcctgacataaatccttgtttgtcgatcctgttctaccttttaaatgatgcctctcttatatctgtaaggaatctgatgcttccaccagatgtctggatgaaaataactatgacagggaaaggtgttccacttacttcttgaggtacaaaaactgccggagattctggaattctatcgtgatgcagagaagaaagaacggagtgaagccatttatgcctacggcagcagaaagagatgaaatcttgagagcagtgggaaatatgccctattgaatgtttgcattaaaagtgtttatataacttagaagcagatgaatatttctaataaatgattgctgtaatatttaagactgtacacccctcacccagacagaccttaagttcttcaagtggagacagtgaagtcaccccgtgtcctttttgcttgctctcagtgccatgccgatggtatgttgctgttggctgtgttgtggcatgagtttgcatgactttctggaggcatggagttaggtaaggctacatgagaaattgagcttttccactgggttttgaaagaagagtatgatgtgaacaagtaaagactgaatggggctgagatgaaggcaatgtttccaaggaaaggaaatgttatgagcaagagtgtgaggcaagagaagctggaaccacattcagagagtatcctgtagattgctccacctagaatctcaggtgggtggagcagtggtgggagaagactggaaaggtaagttgaaggtaaggaatgtgtggtgggcctcagatcccaggctcattcctcaaatcacttcttacttccctcacttatctttgtttaaataaggttagtacattcactaggggcaaatgggtttttctaaataaatgacataaaaaagaactggttgtctttctttaaagaaagtcttagttacaggattctgtgattaaaatccttaaatattgggttgccttctgcagctgtagtatcagtttttgaaccacagtaatgggaagaaagacaaatggattcccttagaagtaagatttctatttgcaggatgagttgggcagggaaaagggtcagggttcatcaggtgaactcaacactgggatgagactagaacttcactttatgatataaacacaatacgattattcaatgtggtgactggggtagactgtgaagcagccctccttatgcccactgccttttagaatcgtttgttttattcatggtagttttatgaagacatactattattgaatgaaatttaatgtgtacttgaaaacattgcttttgtcccttctcttcatctggtcttgggtcaagaacattgttttaatggctgccgacaatgaactgtctgtctgagtctaaaaccaagctcaggtttctaagccacatgaccttgattgttaaatgtagttatatttgaataaaaaatgaatcatttccaaaa

SEQ ID NO: 6396 - DNA, 960 bp, Homo sapiens
  source 1..960: mol_type = unassigned DNA
ccccttcccggaagtgagtccccgagaagcgtgcggcgaggacagaggtgggctcaacaccaagaggccaccaatgaaaacgtgactttttcacattccccgccccttccgtgtgcacgctccccacgaggggctggttcctgaaaggatgtacagaggatccccaaccgcctgcgaaacccaagccgccgcgtaggagcgtgcgttcgggccctcttctcccacctgttcgactccccatccccaggatgtcaacctcagtccctcaaggccatacctggacccaacgggtgaagaaagacgatgaggaggaggacccgctggaccagctgatctcccgctctggctgtgctgcctcccactttgcagtgcaggagtgcatggcccagcaccaggactggcggcaatgccagccacaggtgcaggcgttcaaggattgcatgagtgaacagcaggcgaggcggcaagaggagctgcagaggaggcaagaacaagccggtgcccaccactgagaccccaaaccacctatccccagtagatggccctgccaagaccagcacccagcaagattatagaggaagaaatcctaaatgctggtgtgggaggtctaaaacatggggagagtttttggatctggagttgagagccatgggtttggacatgactggcacaaacagctgtcatatgttcatggtcagatgtcatacattctcagctgtcttgttccaccagtatttaccaggaaaacaaagaatgtgttaagggatgctcccccaccccacatcttaagtcagtgtgccaagtactgagatgattttagggacattttattttaaattaaatttacaatctaatggtaaattgattacctaattagtgcctttctctttcatcacttgttctggatgtttcaatcagtttagtggaaggaaaaataaatggggaaactttttattcaaa

SEQ ID NO: 6397 - DNA, 582 bp, Homo sapiens
  source 1..582: mol_type = unassigned DNA
aggatgtacagaggatccccaaccgcctgcgaaacccaagccgccgcgtaggagcgtgcgttcgggccctcttctcccacctgttcggccagcctccacgatccagctgccaaccatctagcctaccctgatctctgagcaggggtcgtcgtcattttactccagaggagactgaagccaaaagactccccatccccaggatgtcaacctcagtccctcaaggccatacctggacccaacgggtgaagaaagacgatgaggaggaggacccgctggaccagctgatctcccgctctggctgtgctgcctcccactttgcagtgcaggagtgcatggcccagcaccaggactggcggcaatgccagccacaggtgcaggcgttcaaggattgcatgagtgaacagcaggcgaggcggcaagaggagctgcagaggaggcaagaacaagccggtgcccaccactgagaccccaaaccacctatccccagtagatggccctgccaagaccagcacccagcaagattatagaggaagaaatcctaaatgctggtgtgggaggtctaaaacatggggagagtttttg

SEQ ID NO: 6398 - DNA, 1038 bp, Homo sapiens
  source 1..1038: mol_type = unassigned DNA
cattttttttcttttttctttttttttgagatggagttttgctcttattgcccaggagtttgagaccatgctgagcaacatggaaaaaccttgtctctattaaagaatcaaaaaaattagctgagtggtgatgcacacctgtagtcccagctactctggccagggagggactgagggggaaggattgcttgatccctaaagatggaggctacagtgagcctgggcaacaaagcaagacaccctcaaaaaaaaaaaaaaaaaaacaagcatctgtcttcaagcttagagtctcccacgggagacagacacattaaacaggctaaatggtgcagtctggtcagtgctatttataatttaggaaccttacatattatatccctactctaacctgttaatgttctatagactccccatccccaggatgtcaacctcagtccctcaaggccatacctggacccaacgggtgaagaaagacgatgaggaggaggacccgctggaccagctgatctcccgctctggctgtgctgcctcccactttgcagtgcaggagtgcatggcccagcaccaggactggcggcaatgccagccacaggtgcaggcgttcaaggattgcatgagtgaacagcaggcgaggcggcaagaggagctgcagaggaggcaagaacaagccggtgcccaccactgagaccccaaaccacctatccccagtagatggccctgccaagaccagcacccagcaagattatagaggaagaaatcctaaatgctggtgtgggaggtctaaaacatggggagagtttttggatctggagttgagagccatgggtttggacatgactggcacaaacagctgtcatatgttcatggtcagatgtcatacattctcagctgtcttgttccaccagtatttaccaggaaaacaaagaatgtgttaagggatgctcccccaccccacatcttaagtcagtgtgccaagtactgagatgattttagggacattttattttaaattaaatttacaatctaatggtaaattga

SEQ ID NO: 6399 - DNA, 922 bp, Homo sapiens
  source 1..922: mol_type = unassigned DNA
ctcaaagttcaaagtcctcgatacgcctgaggcgcctcaggcctcgtggctgccagcatttttctgctttaagatcctttccatgacttccttgtttaggccagcctccacgatccagctgccaaccatctagcctaccctgatctctgagcaggggtcgtcgtcattttactccagaggagactgaagccaaaagactccccatccccaggatgtcaacctcagtccctcaaggccatacctggacccaacgggtgaagaaagacgatgaggaggaggacccgctggaccagctgatctcccgctctggctgtgctgcctcccactttgcagtgcaggagtgcatggcccagcaccaggactggcggcaatgccagccacaggtgcaggcgttcaaggattgcatgagtgaacagcaggcgaggcggcaagaggagctgcagaggaggcaagaacaagccggtgcccaccactgagaccccaaaccacctatccccagtagatggccctgccaagaccagcacccagcaagattatagaggaagaaatcctaaatgctggtgtgggaggtctaaaacatggggagagtttttggatctggagttgagagccatgggtttggacatgactggcacaaacagctgtcatatgttcatggtcagatgtcatacattctcagctgtcttgttccaccagtatttaccaggaaaacaaagaatgtgttaagggatgctcccccaccccacatcttaagtcagtgtgccaagtactgagatgattttagggacattttattttaaattaaatttacaatctaatggtaaattgattacctaattagtgcctttctctttcatcacttgttctggatgtttcaatcagtttagtggaaggaaaaataaatggggaaactttttattca

SEQ ID NO: 6400 - DNA, 2631 bp, Homo sapiens
  source 1..2631: mol_type = unassigned DNA
atctctcggcttccgttgagcaccaagcaagatggcagcttccgagacggttaggctacggcttcaatttgattacccgccgccagctaccccgcactgtacggccttctggcttctggtcgacttgaacagatgccgagtcgtcacagatctcattagtctcatccgccagcgcttcggcttcagttctggggccttcctaggcctctacctggagggggggctcttgccccccgccgagagcgcgcgccttgtgagagacaacgactgcctcagagttaaattagaagagagaggagttgctgagaattctgtagtcatcagtaatggtgacattaatttatctcttagaaaagcaaagaagcgggcatttcagttagaggagggtgaagaaactgaaccagattgcaaatattcaaagaagcattggaagagtcgagagaacaataacaataatgagaaggtcttggatctggaaccaaaagctgtcacagatcagactgtcagcaaaaaaaacaagagaaaaaataaagcaacctgtggcacagtgggtgatgataacgaagaggccaaaagaaaatcaccaaagaaaaaggagaaatgtgaatataaaaaaaaggctaagaatcccaagtctccgaaagtacaggcagtgaaagactgggccaatcagagatgtagttctccaaaaggttctgctagaaacagccttgttaaagccaaaaggaaaggtagtgtaagcgtttgctcaaaagagagtcccagttcctcctcggagtctgaatcttgtgatgaatctatcagtgatggtcccagcaaagtcactttggaggccagaaattcctcagagaaattaccaactgagttatcaaaggaagaaccctctaccaaaaatacaactgcagacaaactggctataaaacttggctttagccttacccccagcaagggcaagacctctggaacaacatcttccagttcagactctagtgcagagtcagacgaccaatgcttgatgtcatcgagcaccccggagtgtgctgcgggtttcttaaagacagtaggcctttttgcaggaagaggtcgtccaggcccagggctgtcatcacagactgcaggtgctgctggatggaggcgttctggctcaaatggtggtggacaggctcctggtgcttctcccagtgtgtctctccctgctagtttaggaagaggatggggtagagaagagaaccttttttcttggaagggagctaagggacggggcatgcgggggagaggtcgaggacgagggcatcctgtttcctgtgttgtaaatagaagcactgacaaccagaggcaacagcaattaaatgacgtggtaaaaaattcatctactattatccagaatccagtagagacacccaagaaggactatagtctgttaccactgttagcagctgcccctcaagttggagaaaagattgcatttaagcttttggagctaacatccagttactctcctgatgtctctgactacaaggaaggaagaatattaagccacaatccagagacccagcaagtagatatagaaattctttcatccttacctgccttgagagaacctgggaaatttgatttagtttatcacaatgaaaatggagccgaggtagtggagtacgctgtgacacaggagagcaagatcactgtattttggaaagagttgattgacccaagactgattattgaatctccaagtaacacatcaagtacagaacctgcctgagtatgacctctccaccttatagtttatgaatgtcttgtttgtgaaagtgactataacccaaacttttttttttttttaaagaggatttggaagttgtatggatttttttgttatcttcactttactgcataggaaacaatctacctcatcatttaaaatgacatgggtgtcggttttgtagatctttggtttttttgtcaggtttaatttcagttaacaaaatgtaaaacatgacattccctgcagatattgttgtataccagtatggtttcttctctttctttaaatgtttttggccatcaagtagcagtcgtcagtaggagtttataataccaagaatgtgctgcgtatcttgtctcaataagttttaagtaacatttaaaaatattaaagcatgttatttgacctaattttttagcatttgagttgttccattaaatggagcatcttgtaaatttcaagtattttatacttgcaattgttaagagttaacaggtagttggatttgtcgcagacaatgagttaaggaatcctttcacgtttttcccaactttaaaattaaggattctcaggtccctgtgtagagcagtgaaaataagatgtgcgtatgtgtgtgtatgcctggagaattggtgtttcacttcagtgagaggattggctgtgagcttcagaccaggaaatgtgtcatcttgccaggcacctggctgagtgtgctggagtgaggatcttgaacagaaacttccttttctgttattattcactacgaagctaaaatggccaaatatataccgtgaaaattggtttcatttaacaaaagatcagatccctccttcagctgtacacatttttaaataaaatcatattgaact

SEQ ID NO: 6401 - DNA, 1397 bp, Homo sapiens
  source 1..1397: mol_type = unassigned DNA
aggatgtgtagggggcggggcccggcggaagcgtatataaggccgggctcggggacgcccccccctcactcgcgcgttaggaggctcgggtcgttgtggtgcgctgtcttcccgcttgcgtcagggacctgcccgactcagtggccgccatggcatcagatgaaggcaaactttttgttggagggctgagttttgacaccaatgagcagtcgctggagcaggtcttctcaaagtacggacagatctctgaagtggtggttgtgaaagacagggagacccagagatctcggggatttgggtttgtcacctttgagaacattgacgacgctaaggatgccatgatggccatgaatgggaagtctgtagatggacggcagatccgagtagaccaggcaggcaagtcgtcagacaaccgatcccgtgggtaccgtggtggctctgccgggggccggggcttcttccgtgggggccgaggacggggccgtgggttctctagaggaggaggggaccgaggctatggggggaaccggttcgagtccaggagtgggggctacggaggctccagagactactatagcagccggagtcagagtggtggctacagtgaccggagctcgggcgggtcctacagagacagttatgacagttacgctacacacaacgagtaaaaacccttcctgctcaagatcgtccttccaatggctgtgtgtttaaagattgtgggagcttcgctgaacgttaatgtgtagtaaatgcacctccttgtattcccactttcgtagtcatttcggttctgatcttgtcaaacccagcctgaccgcttctgacgccgggatggcctcgttactagacttttctttttaaggaagtgctgtttttttttgagggttttcaaaacattttgaaaagcatttacttttttgaccacgagccatgagttttcaaaaaaatcgggggttgtgtgggtttttggtttttgttttagtttttggttgcgttgcctttttttttttagtggggttggccccatgaagtgggtgccccactcacttctctgagatcgaacggactgtgaatccgctctttgtcggaagctgagcaagctgtggcttttttccaactccgtgtgacgtttctgagtgtagtgtggtaggaccccggcgggtgtggcagcaactgccctggagccccagcccctgcgtccatctgtgctgtgcgccccacagtagacgtgcagacgtccctgagaggttcttgaagatgtttatttatattgtccttttttactggaagacgtacgcatactccatcgatgttgtatttgcagtggctgaggaattcttgtacgcagttttctttggctttacgaagccgattaaaagaccgtgtgaaatgaa

SEQ ID NO: 6402 - DNA, 1543 bp, Homo sapiens
  source 1..1543: mol_type = unassigned DNA
ctcactcgcgcgttaggaggctcgggtcgttgtggtgcgctgtcttcccgcttgcgtcagggacctgcccgactcagtggccgccatggcatcagatgaaggcaaactttttgttggagggctgagttttgacaccaatgagcagtcgctggagcaggtcttctcaaagtacggacagatctctgaagtggtggttgtgaaagacagggagacccagagatctcggggatttgggtttgtcacctttgagaacattgacgacgctaaggatgccatgatggccatgaatgggaagtctgtagatggacggcagatccgagtagaccaggcaggaggaggggaccgaggctatggggggaaccggttcgagtccaggagtgggggctacggaggctccagagactactatagcagccggagtcagagtggtggctacagtgaccggagctcgggcgggtcctacagagacagttatgacagttacggtaagtcacactccgagggcgccacgctgctgtggcctgcggtgggagctcggttcaccttggtgccctctccaagcactttaggctggacactcagaccttgtcactgtgcttgcccagaagaggcgcatctgtcctctcagagccatttctatcgcaggacgcaaaagccaaatgagactgaccaaaaaggcaagggagagcgagggcccgctgggcagtcagctaggtgcatgtgtggccgcaggccagcctccctcggctgtggggggtggttgctccccggccgcaggccgcgccctggtctggcctctggggtgaagctgcctcttgttgcttcggtgcctttacactgtgcctgcttcttgtcctcagctacacacaacgagtaaaaacccttcctgctcaagatcgtccttccaatggctgtgtgtttaaagattgtgggagcttcgctgaacgttaatgtgtagtaaatgcacctccttgtattcccactttcgtagtcatttcggttctgatcttgtcaaacccagcctgaccgcttctgacgccgggatggcctcgttactagacttttctttttaaggaagtgctgtttttttttgagggttttcaaaacattttgaaaagcatttacttttttgaccacgagccatgagttttcaaaaaaatcgggggttgtgtgggtttttggtttttgttttagtttttggttgcgttgcctttttttttttagtggggttggccccatgaagtgggtgccccactcacttctctgagatcgaacggactgtgaatccgctctttgtcggaagctgagcaagctgtggcttttttccaactccgtgtgacgtttctgagtgtagtgtggtaggaccccggcgggtgtggcagcaactgccctggagccccagcccctgcgtccatctgtgctgtgcgccccacagtagacgtgcagacgtccctgagaggttcttgaagatgtttatttatattgtccttttttactggaagacgtacgcatactccatcgatgttgtatttgcagtggctga

SEQ ID NO: 6403 - DNA, 3025 bp, Homo sapiens
  source 1..3025: mol_type = unassigned DNA
actcgcgcgttaggaggctcgggtcgttgtggtgcgctgtcttcccgcttgcgtcagggacctgcccgactcagtggccgccatggcatcagatgaaggcaaactttttgttggagggctgagttttgacaccaatgagcagtcgctggagcaggtcttctcaaagtacggacagatctctgaagtctgtagatggacggcagatccgagtagaccaggcaggcaagtcgtcagacaaccgatcccgtgggtaccgtggtggctctgccgggggccggggcttcttccgtgggggccgaggacggggccgtgggttctctagaggaggaggggaccgaggctatggggggaaccggttcgagtccaggagtgggggctacggaggctccagagactactatagcagccggagtcagagtggtggctacagtgaccggagctcgggcgggtcctacagagacagttatgacagttacggtaagtcacactccgagggcgccacgctgctgtggcctgcggtgggagctcggttcaccttggtgccctctccaagcactttaggctggacactcagaccttgtcactgtgcttgcccagaagaggcgcatctgtcctctcagagccatttctatcgcaggacgcaaaagccaaatgagactgaccaaaaaggcaagggagagcgagggcccgctgggcagtcagctaggtgcatgtgtggccgcaggccagcctccctcggctgtggggggtggttgctccccggccgcaggccgcgccctggtctggcctctggggtgaagctgcctcttgttgcttcggtgcctttacactgtgcctgcttcttgtcctcagctacacacaacgagtaaaaacccttcctgctcaagatcgtccttccaatggctgtgtgtttaaagattgtgggagcttcgctgaacgttaatgtgtagtaaatgcacctccttgtattcccactttcgtagtcatttcggttctgatcttgtcaaacccagcctgaccgcttctgacgccgggatggcctcgttactagacttttctttttaaggaagtgctgtttttttttgagggttttcaaaacattttgaaaagcatttacttttttgaccacgagccatgagttttcaaaaaaatcgggggttgtgtgggtttttggtttttgttttagtttttggttgcgttgcctttttttttttagtggggttggccccatgaagtgggtgccccactcacttctctgagatcgaacggactgtgaatccgctctttgtcggaagctgagcaagctgtggcttttttccaactccgtgtgacgtttctgagtgtagtgtggtaggaccccggcgggtgtggcagcaactgccctggagccccagcccctgcgtccatctgtgctgtgcgccccacagtagacgtgcagacgtccctgagaggttcttgaagatgtttatttatattgtccttttttactggaagacgtacgcatactccatcgatgttgtatttgcagtggctgaggaattcttgtacgcagttttctttggctttacgaagccgattaaaagaccgtgtgaaatgaaccttgctctgacaattcccttgcattgcaccacacactccttgctgcgggctcctgcagccagacctgagcagagagagaaggtggagaagcagcgggtctgcaagccttccctggggcctgcagagctagaaagggaggcccagcagactggcgctggtcagggtaggggagccaggcgggggacgggagcgggcagctcaggcctcagggcagccctgggaggcttctggcagtggtggccagagggctggactgtgcgggcagcttagcagggacagtggacgtgcacctgacgctgacctggactgcctcagtctagaagcaggccagagagcagaggcacgtggcatcccagggcgacctcagacggccagccggttagctagttctgctgttgcttcacgagttctgagcattctctgctagcctatggaagctgcagccctcggaggacagaagtgttgtgcgcccaacagaaccctctgagacgcaagctgctcccttggctagctcatatgtggaaatagccctgtaattcgaggtaactccttccgctcgtgtccacatccctcttgttgagagctcactgaaagtcatgtgcccggggaatgttcctgtgactgttttttgtttttccttttttttttaactttgtttttgtttttttcaattaagctggaactaaagtcaggcccagccattacgctccccacgtgcagccaggtgcagcctgggcccagtcatgcctggctcatagatgaaatcccttaagcaggattgaagaccagtgaacgcccccgccttttggattttttgctcaattgaccgtcttttccagacctctttaagtcacactcttaacttagctttctctgatgtctgttgccgccattagtttttttctagagcccacactggcccacatagctccatcccatacgggtagctggctccagctgcgccaaggtgcagacccgccctgggcatgctggcctgtgacggagcctgaggtcacagccccctgactagcctgagaccttcctaggggctgtggctgtttccggggaggccgggaggggcagctgtgagccctgtggaggacgttgggagtaacgctgctttgctttggcaggttgaaggggcccggccaggactcggggaagggtggcctgagagcagcgatgacctctggggtcactgtcccaggagggacttcacctggaacaagagctggaggcagccgcttgcccaggaggcttgtcccctgaggcgcttcgccagtgaggtgcgggctcagggcctcgagtctctcctggagcacgggctgcggtgcgccggcagcttacggggcggccagtccttgcccacaacgatgtggagccctgtgaaagtcggattcgaataaagggccacgtgtgcacccag

SEQ ID NO: 6404 - DNA, 1333 bp, Homo sapiens
  source 1..1333: mol_type = unassigned DNA
ctcactcgcgcgttaggaggctcgggtcgttgtggtgcgctgtcttcccgcttgcgtcagggacctgcccgactcagtggccgccatggcatcagatgaaggcaaactttttgttggagggctgagttttgacaccaatgagcagtcgctggagcaggtcttctcaaagtacggacagatctctgaagtggtggttgtgaaagacagggagacccagagatctcggggatttgggtttgtcacctttgagaacattgacgacgctaaggatgccatgatggccatgaatgggaagtctgtagatggacggcagatccgagtagaccaggcaggcaagtcgtcagacaaccgatcccgtgggtaccgtggtggctctgccgggggccggggcttcttccgtgggggccgaggacggggccgtgggttctctagaggaggaggggaccgaggctatggggggaaccggttcgagtccaggagtgggggctacggaggctccagagactactatagcagccggagtcagagtggtggctacagtgaccggagctcgggcgggtcctacagagacagttatgacagttacgctacacacaacgagtaaaaacccttcctgctcaagatcgtccttccaatggctgtgtgtttaaagattgtgggagcttcgctgaacgttaatgtgtagtaaatgcacctccttgtattcccactttcgtagtcatttcggttctgatcttgtcaaacccagcctgaccgcttctgacgccgggatggcctcgttactagacttttctttttaaggaagtgctgtttttttttgagggttttcaaaacattttgaaaagcatttacttttttgaccacgagccatgagttttcaaaaaaatcgggggttgtgtgggtttttggtttttgttttagtttttggttgcgttgcctttttttttttagtggggttggccccatgaagtgggtgccccactcacttctctgagatcgaacggactgtgaatccgctctttgtcggaagctgagcaagctgtggcttttttccaactccgtgtgacgtttctgagtgtagtgtggtaggaccccggcgggtgtggcagcaactgccctggagccccagcccctgcgtccatctgtgctgtgcgccccacagtagacgtgcagacgtccctgagaggttcttgaagatgtttatttatattgtccttttttactggaagacgtacgcatactccatcgatgttgtatttgcagtggctgaggaattcttgtacgcagttttctttggctttacgaagccgattaaaagaccgtgtgaaatgaa

SEQ ID NO: 6405 - DNA, 3228 bp, Homo sapiens
  source 1..3228: mol_type = unassigned DNA
gggccgtgctgcttatggcggcgctggagagggggcgctgagctgttgggatgagctttgatccaaaccttctccacaacaatggacataatgggtaccctaatggtacttcagcagcactgcgtgaaactggggttattgaaaaactgttaacctcttacggatttattcagtgttcagaacgtcaagctagacttttcttccactgttcacagtataatggcaacctgcaagacttaaaagtaggagatgatgttgaatttgaagtatcatcggaccgacggactgggaaacccattgctgttaaactggtgaagataaaacaagaaatcctccctgaagaacgaatgaatggacaagaagtgttttatctgacttacacccctgaagatgtcgaagggaacgttcagctggaaactggagataaaataaactttgtaattgataacaataaacatactggtgctgtaagtgctcgcaacattatgctgttgaaaaagaaacaagcccgctgtcagggagtagtttgtgccatgaaggaggcatttggctttattgaaagaggtgatgttgtaaaagagatattctttcactatagtgaatttaagggtgacttagaaaccttacagcctggcgatgatgtggaattcacaatcaaggacagaaatggtaaagaagttgcaacagatgtcagactattgcctcaaggaacagtcatttttgaagatatcagcattgaacattttgaaggaactgtaaccaaagttatcccaaaagtacccagtaaaaaccagaatgacccattgccaggacgcatcaaagttgactttgtgatccctaaagaacttccctttggagacaaagatacgaaatccaaggtgaccctgctggaaggtgaccatgttaggtttaatatttcaacagaccgacgtgacaaattagagcgagcaaccaatatagaagttctgtcaaatacatttcagttcactaatgaagcccgagaaatgggtgtgattgctgccatgagagatggttttggtttcatcaagtgtgtggatcgtgatgttcgtatgttcttccacttcagtgaaattctggatgggaaccagctccatattgcagatgaagtagagtttactgtggttcctgatatgctctctgctcaaagaaatcatgctattaggattaaaaaacttcccaagggcacggtttcatttcattcccattcagatcaccgttttctgggcacggtagaaaaagaagccactttttccaatcctaaaaccactagcccaaataaaggcaaagagaaggaggctgaggatggcattattgcttatgatgactgtggggtgaaactgactattgcttttcaagccaaggatgtggaaggatctacttctcctcaaataggagataaggttgaatttagtattagtgacaaacagaggcctggacagcaggttgcaacttgtgtgcgacttttaggtcgtaattctaactccaagaggctcttgggttatgtggcaactctgaaggataattttggatttattgaaacagccaatcatgataaggaaatctttttccattacagtgagttctctggtgatgttgatagcctggaactgggggacatggtcgagtatagcttgtccaaaggcaaaggcaacaaagtcagtgcagaaaaagtgaacaaaacacactcagtgaatggcattactgaggaagctgatcccaccatttactctggcaaagtaattcgccccctgaggagtgttgatccaacacagactgagtaccaaggaatgattgagattgtggaggagggcgatatgaaaggtgaggtctatccatttggcatcgttgggatggccaacaaaggggattgcctgcagaaaggggagagcgtcaagttccaattgtgtgtcctgggccaaaatgcacaaactatggcttacaacatcacacccctgcgcagggccacagtggaatgtgtgaaagatcagtttggcttcattaactatgaagtaggagatagcaagaagctctttttccatgtgaaagaagttcaggatggcattgagctacaggcaggagatgaggtggagttctcagtgattcttaatcagcgcactggcaagtgcagcgcctgtaatgtttggcgagtctgtgagggccccaaggctgttgcagctcctcgacctgatcggttggtcaatcgcttgaagaatatcactctggatgatgccagtgctcctcgcctaatggttcttcgtcagccaaggggaccagataactcaatggggtttggtgcagaaagaaagatccgtcaagctggtgtcattgactaaccacatccacaaagcacaccattaatccactatgatcaagttggggggaatctggtgaagggttctgaatatctccctcttcatccctcccgaaatctggaatacttattctattgagctattacaccagttttaacaccttcctcgtgttatgtttaaaaaaataaataaatttaagaaaaccattttaaataatgcacagttgcagcctggaaaaacttaaggtggcgccttatagtatcaattttaggagctttatttggtgcatttaacgcaactggtaattgcagaatccactttgcctgtgtaagtgaaaaatatagactgttatcttgttggccctatgaaattctgcacttttcattatatactctaccttcattaattacttctggcaagatgttctgccttagcactcagttgcattcttttcctttttcttcctgttcattatgctttaattctgaggaccatatgagggtagaatatattatcttttaaaaattacaaaaatttgtataggcaaaccatttcttaaagttgatggccaaattttaaaatgttatttttcatatcatttataatcttgtcacaatccacttaaagaagtttggttatatttcagtgaaaattttcttccagagtaggttttttttcgtgggttggggggtaactttactacaattagtaagtatggtgcagaatttcatgcaaatgaggagtgccagcagtgtgataatttaaacatatttaaacaaaaacaaaaaaaatgaatgcacaaacttgctgctgcttagatcactgcagcttctaggacccggtttcttttactgatttaaaaacaaaacaaaaaaaaataaaaaagttgtgcctg

SEQ ID NO: 6406 - DNA, 4006 bp, Homo sapiens
  source 1..4006: mol_type = unassigned DNA
ctacgtaccgggccgtgctgcttatggcggcgctggagagggggcgctgagctgttgggtatgaagtgtaacagaacagactttaccacctgaaactgctgcttcaagttcagatcaggcaaggaacaaacctcgtaacaactaacaagaccaaagaagagtacacttaagttgaagacacaacacttgatctgaaacaagaagtttgtgcctactcaacagctttgaaagagcacttcccaacgctgctagtagtctttgttttcttcagtgctgtactgtgagattgcccggtacagcagcagttgtattctttattagcttggtagatcattttctctcgctcttttttttaatactagcaactttcatcctttgaaacgtgtgctgaaaaagaagaatcagcaaatactactgaaagtgcaatatttgagtatcactgcgagatgagctttgatccaaaccttctccacaacaatggacataatgggtaccctaatggtacttcagcagcactgcgtgaaactggggttattgaaaaactgttaacctcttacggatttattcagtgttcagaacgtcaagctagacttttcttccactgttcacagtataatggcaacctgcaagacttaaaagtaggagatgatgttgaatttgaagtatcatcggaccgacggactgggaaacccattgctgttaaactggtgaagataaaacaagaaatcctccctgaagaacgaatgaatggacaagaagtgttttatctgacttacacccctgaagatgtcgaagggaacgttcagctggaaactggagataaaataaactttgtaattgataacaataaacatactggtgctgtaagtgctcgcaacattatgctgttgaaaaagaaacaagcccgctgtcagggagtagtttgtgccatgaaggaggcatttggctttattgaaagaggtgatgttgtaaaagagatattctttcactatagtgaatttaagggtgacttagaaaccttacagcctggcgatgatgtggaattcacaatcaaggacagaaatggtaaagaagttgcaacagatgtcagactattgcctcaaggaacagtcatttttgaagatatcagcattgaacattttgaaggaactgtaaccaaagttatcccaaaagtacccagtaaaaaccagaatgacccattgccaggacgcatcaaagttgactttgtgatccctaaagaacttccctttggagacaaagatacgaaatccaaggtgaccctgctggaaggtgaccatgttaggtttaatatttcaacagaccgacgtgacaaattagagcgagcaaccaatatagaagttctgtcaaatacatttcagttcactaatgaagcccgagaaatgggtgtgattgctgccatgagagatggttttggtttcatcaagtgtgtggatcgtgatgttcgtatgttcttccacttcagtgaaattctggatgggaaccagctccatattgcagatgaagtagagtttactgtggttcctgatatgctctctgctcaaagaaatcatgctattaggattaaaaaacttcccaagggcacggtttcatttcattcccattcagatcaccgttttctgggcacggtagaaaaagaagccactttttccaatcctaaaaccactagcccaaataaaggcaaagagaaggaggctgaggatggcattattgcttatgatgactgtggggtgaaactgactattgcttttcaagccaaggatgtggaaggatctacttctcctcaaataggagataaggttgaatttagtattagtgacaaacagaggcctggacagcaggttgcaacttgtgtgcgacttttaggtcgtaattctaactccaagaggctcttgggttatgtggcaactctgaaggataattttggatttattgaaacagccaatcatgataaggaaatctttttccattacagtgagttctctggtgatgttgatagcctggaactgggggacatggtcgagtatagcttgtccaaaggcaaaggcaacaaagtcagtgcagaaaaagtgaacaaaacacactcagtgaatggcattactgaggaagctgatcccaccatttactctggcaaagtaattcgccccctgaggagtgttgatccaacacagactgagtaccaaggaatgattgagattgtggaggagggcgatatgaaaggtgaggtctatccatttggcatcgttgggatggccaacaaaggggattgcctgcagaaaggggagagcgtcaagttccaattgtgtgtcctgggccaaaatgcacaaactatggcttacaacatcacacccctgcgcagggccacagtggaatgtgtgaaagatcagtttggcttcattaactatgaagtaggagatagcaagaagctctttttccatgtgaaagaagttcaggatggcattgagctacaggcaggagatgaggtggagttctcagtgattcttaatcagcgcactggcaagtgcagcgcctgtaatgtttggcgagtctgtgagggccccaaggctgttgcagctcctcgacctgatcggttggtcaatcgcttgaagaatatcactctggatgatgccagtgctcctcgcctaatggttcttcgtcagccaaggggaccagataactcaatggggtttggtgcagaaagaaagatccgtcaagctggtgtcattgactaaccacatccacaaagcacaccattaatccactatgatcaagttggggggaatctggtgaagggttctgaatatctccctcttcatccctcccgaaatctggaatacttattctattgagctattacaccagttttaacaccttcctcgtgttatgtttaaaaaaataaataaatttaagaaaaccattttaaataatgcacagttgcagcctggaaaaacttaaggtggcgccttatagtatcaattttaggagctttatttggtgcatttaacgcaactggtaattgcagaatccactttgcctgtgtaagtgaaaaatatagactgttatcttgttggccctatgaaattctgcacttttcattatatactctaccttcattaattacttctggcaagatgttctgccttagcactcagttgcattcttttcctttttcttcctgttcattatgctttaattctgaggaccatatgagggtagaatatattatcttttaaaaattacaaaaatttgtataggcaaaccatttcttaaagttgatggccaaattttaaaatgttatttttcatatcatttataatcttgtcacaatccacttaaagaagtttggttatatttcagtgaaaattttcttccagagtaggttttttttcgtgggttggggggtaactttactacaattagtaagtatggtgcagaatttcatgcaaatgaggagtgccagcagtgtgataatttaaacatatttaaacaaaaacaaaaaaaatgaatgcacaaacttgctgctgcttagatcactgcagcttctaggacccggtttcttttactgatttaaaaacaaaacaaaaaaaaataaaaaagttgtgcctgaaatgaatcttgtttttttttataagtagccgcctggttactgtgtcctgtaaaatacagacacttgacccttggtgtagcttctgttcaactttatatcacgggaatggatgggtctgatttcttggccctcttcttgaattggccatatacagggtccctggccagtggactgaaggctttgtctaagatgacaagggtcagctcaggggatgtgggggagggcggttttatcttcccccttgtcgtttgaggttttgatctctgggtaaagaggccgtttatctttgtaaacacgaaacatttttgctttctccagttttctgttaatggcgaaagaatggaagcgaataaagttttactgatttttgagacactagca

SEQ ID NO: 6407 - DNA, 4076 bp, Homo sapiens
  source 1..4076: mol_type = unassigned DNA
gcttatggcggcgctggagagggggcgctgagctgttgggtatgaagtgtaacagaacagactttaccacctgaaactgctgcttcaagttcagatcaggcaaggaacaaacctcgtaacaactaacaagaccaaagaagagtacacttaagttgaagacacaacacttgatctgaaacaagaagtttgtgcctactcaacagctttgaaagagcacttcccaacgctgctagtagtctttgttttcttcagtgctgtactgtgagattgcccggtacagcagcagttgtattctttattagcttggtagatcattttctctcgctcttttttttaatactagcaactttcatcctttgaaacgtgtgctgaaaaagaagaatcagcaaatactactgaaagtgcaatatttgagtatcactgcgagatgagctttgatccaaaccttctccacaacaatggacataatgggtaccctaatggtacttcagcagcactgcgtgaaactggggttattgaaaaactgttaacctcttacggatttattcagtgttcagaacgtcaagctagacttttcttccactgttcacagtataatggcaacctgcaagacttaaaagtaggagatgatgttgaatttgaagtatcatcggaccgacggactgggaaacccattgctgttaaactggtgaagataaaacaagaaatcctccctgaagaacgaatgaatggacaagttgtgtgcgctgttcctcacaacttagagagtaaatctccagctgccccgggtcagagtccaacagggagtgtatgctacgaacgtaatggggaagtgttttatctgacttacacccctgaagatgtcgaagggaacgttcagctggaaactggagataaaataaactttgtaattgataacaataaacatactggtgctgtaagtgctcgcaacattatgctgttgaaaaagaaacaagcccgctgtcagggagtagtttgtgccatgaaggaggcatttggctttattgaaagaggtgatgttgtaaaagagatattctttcactatagtgaatttaagggtgacttagaaaccttacagcctggcgatgatgtggaattcacaatcaaggacagaaatggtaaagaagttgcaacagatgtcagactattgcctcaaggaacagtcatttttgaagatatcagcattgaacattttgaaggaactgtaaccaaagttatcccaaaagtacccagtaaaaaccagaatgacccattgccaggacgcatcaaagttgactttgtgatccctaaagaacttccctttggagacaaagatacgaaatccaaggtgaccctgctggaaggtgaccatgttaggtttaatatttcaacagaccgacgtgacaaattagagcgagcaaccaatatagaagttctgtcaaatacatttcagttcactaatgaagcccgagaaatgggtgtgattgctgccatgagagatggttttggtttcatcaagtgtgtggatcgtgatgttcgtatgttcttccacttcagtgaaattctggatgggaaccagctccatattgcagatgaagtagagtttactgtggttcctgatatgctctctgctcaaagaaatcatgctattaggattaaaaaacttcccaagggcacggtttcatttcattcccattcagatcaccgttttctgggcacggtagaaaaagaagccactttttccaatcctaaaaccactagcccaaataaaggcaaagagaaggaggctgaggatggcattattgcttatgatgactgtggggtgaaactgactattgcttttcaagccaaggatgtggaaggatctacttctcctcaaataggagataaggttgaatttagtattagtgacaaacagaggcctggacagcaggttgcaacttgtgtgcgacttttaggtcgtaattctaactccaagaggctcttgggttatgtggcaactctgaaggataattttggatttattgaaacagccaatcatgataaggaaatctttttccattacagtgagttctctggtgatgttgatagcctggaactgggggacatggtcgagtatagcttgtccaaaggcaaaggcaacaaagtcagtgcagaaaaagtgaacaaaacacactcagtgaatggcattactgaggaagctgatcccaccatttactctggcaaagtaattcgccccctgaggagtgttgatccaacacagactgagtaccaaggaatgattgagattgtggaggagggcgatatgaaaggtgaggtctatccatttggcatcgttgggatggccaacaaaggggattgcctgcagaaaggggagagcgtcaagttccaattgtgtgtcctgggccaaaatgcacaaactatggcttacaacatcacacccctgcgcagggccacagtggaatgtgtgaaagatcagtttggcttcattaactatgaagtaggagatagcaagaagctctttttccatgtgaaagaagttcaggatggcattgagctacaggcaggagatgaggtggagttctcagtgattcttaatcagcgcactggcaagtgcagcgcctgtaatgtttggcgagtctgtgagggccccaaggctgttgcagctcctcgacctgatcggttggtcaatcgcttgaagaatatcactctggatgatgccagtgctcctcgcctaatggttcttcgtcagccaaggggaccagataactcaatggggtttggtgcagaaagaaagatccgtcaagctggtgtcattgactaaccacatccacaaagcacaccattaatccactatgatcaagttggggggaatctggtgaagggttctgaatatctccctcttcatccctcccgaaatctggaatacttattctattgagctattacaccagttttaacaccttcctcgtgttatgtttaaaaaaataaataaatttaagaaaaccattttaaataatgcacagttgcagcctggaaaaacttaaggtggcgccttatagtatcaattttaggagctttatttggtgcatttaacgcaactggtaattgcagaatccactttgcctgtgtaagtgaaaaatatagactgttatcttgttggccctatgaaattctgcacttttcattatatactctaccttcattaattacttctggcaagatgttctgccttagcactcagttgcattcttttcctttttcttcctgttcattatgctttaattctgaggaccatatgagggtagaatatattatcttttaaaaattacaaaaatttgtataggcaaaccatttcttaaagttgatggccaaattttaaaatgttatttttcatatcatttataatcttgtcacaatccacttaaagaagtttggttatatttcagtgaaaattttcttccagagtaggttttttttcgtgggttggggggtaactttactacaattagtaagtatggtgcagaatttcatgcaaatgaggagtgccagcagtgtgataatttaaacatatttaaacaaaaacaaaaaaaatgaatgcacaaacttgctgctgcttagatcactgcagcttctaggacccggtttcttttactgatttaaaaacaaaacaaaaaaaaataaaaaagttgtgcctgaaatgaatcttgtttttttttataagtagccgcctggttactgtgtcctgtaaaatacagacacttgacccttggtgtagcttctgttcaactttatatcacgggaatggatgggtctgatttcttggccctcttcttgaattggccatatacagggtccctggccagtggactgaaggctttgtctaagatgacaagggtcagctcaggggatgtgggggagggcggttttatcttcccccttgtcgtttgaggttttgatctctgggtaaagaggccgtttatctttgtaaacacgaaacatttttgctttctccagttttctgttaatggcgaaagaatggaagcgaataaagttttactgatttttgagacact

SEQ ID NO: 6408 - DNA, 3774 bp, Homo sapiens
  source 1..3774: mol_type = unassigned DNA
gagagaagcgagatttattcctacgtaccgggccgtgctgcttatggcggcgctggagagggggcgctgagctgttgggtatgaagtgtaacagaacagactttaccacctgaaactgctgcttcaagttcagatcaggcaaggaacaaacctcgtaacaactaacaagaccaaagaagagtacacttaagttgaagacacaacacttgatctgaaacaagaagtttgtgcctactcaacagctttgaaagagcacttcccaacgctgctagtagtctttgttttcttcagtgctgtactgtgagattgcccggtacagcagcagttgtattctttattagcttggtagatcattttctctcgctcttttttttaatactagcaactttcatcctttgaaacgtgtgctgaaaaagaagaatcagcaaatactactgaaagtgcaatatttgagtatcactgcgagctgtttgagatggagaacgtttttactgtgtcatcagatcctcatccctctcctgcagcccctccttcactttctttacccttatcttcatcttctacctcatctgggactaaaaaacaaaagaggaccccaacttatcagagatctatgagctttgatccaaaccttctccacaacaatggacataatgggtaccctaatggtacttcagcagcactgcgtgaaactggggttattgaaaaactgttaacctcttacggatttattcagtgttcagaacgtcaagctagacttttcttccactgttcacagtataatggcaacctgcaagacttaaaagtaggagatgatgttgaatttgaagtatcatcggaccgacggactgggaaacccattgctgttaaactggtgaagataaaacaagaaatcctccctgaagaacgaatgaatggacaagaagtgttttatctgacttacacccctgaagatgtcgaagggaacgttcagctggaaactggagataaaataaactttgtaattgataacaataaacatactggtgctgtaagtgctcgcaacattatgctgttgaaaaagaaacaagcccgctgtcagggagtagtttgtgccatgaaggaggcatttggctttattgaaagaggtgatgttgtaaaagagatattctttcactatagtgaatttaagggtgacttagaaaccttacagcctggcgatgatgtggaattcacaatcaaggacagaaatggtaaagaagttgcaacagatgtcagactattgcctcaaggaacagtcatttttgaagatatcagcattgaacattttgaaggaactgtaaccaaagttatcccaaaagtacccagtaaaaaccagaatgacccattgccaggacgcatcaaagttgactttgtgatccctaaagaacttccctttggagacaaagatacgaaatccaaggtgaccctgctggaaggtgaccatgttaggtttaatatttcaacagaccgacgtgacaaattagagcgagcaaccaatatagaagttctgtcaaatacatttcagttcactaatgaagcccgagaaatgggtgtgattgctgccatgagagatggttttggtttcatcaagtgtgtggatcgtgatgttcgtatgttcttccacttcagtgaaattctggatgggaaccagctccatattgcagatgaagtagagtttactgtggttcctgatatgctctctgctcaaagaaatcatgctattaggattaaaaaacttcccaagggcacggtttcatttcattcccattcagatcaccgttttctgggcacggtagaaaaagaagccactttttccaatcctaaaaccactagcccaaataaaggcaaagagaaggaggctgaggatggcattattgcttatgatgactgtggggtgaaactgactattgcttttcaagccaaggatgtggaaggatctacttctcctcaaataggagataaggttgaatttagtattagtgacaaacagaggcctggacagcaggttgcaacttgtgtgcgacttttaggtcgtaattctaactccaagaggctcttgggttatgtggcaactctgaaggataattttggatttattgaaacagccaatcatgataaggaaatctttttccattacagtgagttctctggtgatgttgatagcctggaactgggggacatggtcgagtatagcttgtccaaaggcaaaggcaacaaagtcagtgcagaaaaagtgaacaaaacacactcagtgaatggcattactgaggaagctgatcccaccatttactctggcaaagtaattcgccccctgaggagtgttgatccaacacagactgagtaccaaggaatgattgagattgtggaggagggcgatatgaaaggtgaggtctatccatttggcatcgttgggatggccaacaaaggggattgcctgcagaaaggggagagcgtcaagttccaattgtgtgtcctgggccaaaatgcacaaactatggcttacaacatcacacccctgcgcagggccacagtggaatgtgtgaaagatcagtttggcttcattaactatgaagtaggagatagcaagaagctctttttccatgtgaaagaagttcaggatggcattgagctacaggcaggagatgaggtggagttctcagtgattcttaatcagcgcactggcaagtgcagcgcctgtaatgtttggcgagtctgtgagggccccaaggctgttgcagctcctcgacctgatcggttggtcaatcgcttgaagaatatcactctggatgatgccagtgctcctcgcctaatggttcttcgtcagccaaggggaccagataactcaatggggtttggtgcagaaagaaagatccgtcaagctggtgtcattgactaaccacatccacaaagcacaccattaatccactatgatcaagttggggggaatctggtgaagggttctgaatatctccctcttcatccctcccgaaatctggaatacttattctattgagctattacaccagttttaacaccttcctcgtgttatgtttaaaaaaataaataaatttaagaaaaccattttaaataatgcacagttgcagcctggaaaaacttaaggtggcgccttatagtatcaattttaggagctttatttggtgcatttaacgcaactggtaattgcagaatccactttgcctgtgtaagtgaaaaatatagactgttatcttgttggccctatgaaattctgcacttttcattatatactctaccttcattaattacttctggcaagatgttctgccttagcactcagttgcattcttttcctttttcttcctgttcattatgctttaattctgaggaccatatgagggtagaatatattatcttttaaaaattacaaaaatttgtataggcaaaccatttcttaaagttgatggccaaattttaaaatgttatttttcatatcatttataatcttgtcacaatccacttaaagaagtttggttatatttcagtgaaaattttcttccagagtaggttttttttcgtgggttggggggtaactttactacaattagtaagtatggtgcagaatttcatgcaaatgaggagtgccagcagtgtgataatttaaacatatttaaacaaaaacaaaaaaaatgaatgcacaaacttgctgctgcttagatcactgcagcttctaggacccggtttcttttactgatttaaaaacaaaacaaaaaaaaa

SEQ ID NO: 6409 - DNA, 4167 bp, Homo sapiens
  source 1..4167: mol_type = unassigned DNA
cagactttaccacctgaaactgctgcttcaagttcagatcaggcaaggaacaaacctcgtaacaactaacaagaccaaagaagagtacacttaagttgaagacacaacacttgatctgaaacaagaagtttgtgcctactcaacagctttgaaagagcacttcccaacgctgctagtagtctttgttttcttcagtgctgtactgtgagattgcccggtacagcagcagttgtattctttattagcttggtagatcattttctctcgctcttttttttaatactagcaactttcatcctttgaaacgtgtgctgaaaaagaagaatcagcaaatactactgaaagtgcaatatttgagtatcactgcgagctgtttgagatggagaacgtttttactgtgtcatcagatcctcatccctctcctgcagcccctccttcactttctttacccttatcttcatcttctacctcatctgggactaaaaaacaaaagaggaccccaacttatcagagatctatgagctttgatccaaaccttctccacaacaatggacataatgggtaccctaatggtacttcagcagcactgcgtgaaactggggttattgaaaaactgttaacctcttacggatttattcagtgttcagaacgtcaagctagacttttcttccactgttcacagtataatggcaacctgcaagacttaaaagtaggagatgatgttgaatttgaagtatcatcggaccgacggactgggaaacccattgctgttaaactggtgaagataaaacaagaaatcctccctgaagaacgaatgaatggacaagttgtgtgcgctgttcctcacaacttagagagtaaatctccagctgccccgggtcagagtccaacagggagtgtatgctacgaacgtaatggggaagtgttttatctgacttacacccctgaagatgtcgaagggaacgttcagctggaaactggagataaaataaactttgtaattgataacaataaacatactggtgctgtaagtgctcgcaacattatgctgttgaaaaagaaacaagcccgctgtcagggagtagtttgtgccatgaaggaggcatttggctttattgaaagaggtgatgttgtaaaagagatattctttcactatagtgaatttaagggtgacttagaaaccttacagcctggcgatgatgtggaattcacaatcaaggacagaaatggtaaagaagttgcaacagatgtcagactattgcctcaaggaacagtcatttttgaagatatcagcattgaacattttgaaggaactgtaaccaaagttatcccaaaagtacccagtaaaaaccagaatgacccattgccaggacgcatcaaagttgactttgtgatccctaaagaacttccctttggagacaaagatacgaaatccaaggtgaccctgctggaaggtgaccatgttaggtttaatatttcaacagaccgacgtgacaaattagagcgagcaaccaatatagaagttctgtcaaatacatttcagttcactaatgaagcccgagaaatgggtgtgattgctgccatgagagatggttttggtttcatcaagtgtgtggatcgtgatgttcgtatgttcttccacttcagtgaaattctggatgggaaccagctccatattgcagatgaagtagagtttactgtggttcctgatatgctctctgctcaaagaaatcatgctattaggattaaaaaacttcccaagggcacggtttcatttcattcccattcagatcaccgttttctgggcacggtagaaaaagaagccactttttccaatcctaaaaccactagcccaaataaaggcaaagagaaggaggctgaggatggcattattgcttatgatgactgtggggtgaaactgactattgcttttcaagccaaggatgtggaaggatctacttctcctcaaataggagataaggttgaatttagtattagtgacaaacagaggcctggacagcaggttgcaacttgtgtgcgacttttaggtcgtaattctaactccaagaggctcttgggttatgtggcaactctgaaggataattttggatttattgaaacagccaatcatgataaggaaatctttttccattacagtgagttctctggtgatgttgatagcctggaactgggggacatggtcgagtatagcttgtccaaaggcaaaggcaacaaagtcagtgcagaaaaagtgaacaaaacacactcagtgaatggcattactgaggaagctgatcccaccatttactctggcaaagtaattcgccccctgaggagtgttgatccaacacagactgagtaccaaggaatgattgagattgtggaggagggcgatatgaaaggtgaggtctatccatttggcatcgttgggatggccaacaaaggggattgcctgcagaaaggggagagcgtcaagttccaattgtgtgtcctgggccaaaatgcacaaactatggcttacaacatcacacccctgcgcagggccacagtggaatgtgtgaaagatcagtttggcttcattaactatgaagtaggagatagcaagaagctctttttccatgtgaaagaagttcaggatggcattgagctacaggcaggagatgaggtggagttctcagtgattcttaatcagcgcactggcaagtgcagcgcctgtaatgtttggcgagtctgtgagggccccaaggctgttgcagctcctcgacctgatcggttggtcaatcgcttgaagaatatcactctggatgatgccagtgctcctcgcctaatggttcttcgtcagccaaggggaccagataactcaatggggtttggtgcagaaagaaagatccgtcaagctggtgtcattgactaaccacatccacaaagcacaccattaatccactatgatcaagttggggggaatctggtgaagggttctgaatatctccctcttcatccctcccgaaatctggaatacttattctattgagctattacaccagttttaacaccttcctcgtgttatgtttaaaaaaataaataaatttaagaaaaccattttaaataatgcacagttgcagcctggaaaaacttaaggtggcgccttatagtatcaattttaggagctttatttggtgcatttaacgcaactggtaattgcagaatccactttgcctgtgtaagtgaaaaatatagactgttatcttgttggccctatgaaattctgcacttttcattatatactctaccttcattaattacttctggcaagatgttctgccttagcactcagttgcattcttttcctttttcttcctgttcattatgctttaattctgaggaccatatgagggtagaatatattatcttttaaaaattacaaaaatttgtataggcaaaccatttcttaaagttgatggccaaattttaaaatgttatttttcatatcatttataatcttgtcacaatccacttaaagaagtttggttatatttcagtgaaaattttcttccagagtaggttttttttcgtgggttggggggtaactttactacaattagtaagtatggtgcagaatttcatgcaaatgaggagtgccagcagtgtgataatttaaacatatttaaacaaaaacaaaaaaaatgaatgcacaaacttgctgctgcttagatcactgcagcttctaggacccggtttcttttactgatttaaaaacaaaacaaaaaaaaataaaaaagttgtgcctgaaatgaatcttgtttttttttataagtagccgcctggttactgtgtcctgtaaaatacagacacttgacccttggtgtagcttctgttcaactttatatcacgggaatggatgggtctgatttcttggccctcttcttgaattggccatatacagggtccctggccagtggactgaaggctttgtctaagatgacaagggtcagctcaggggatgtgggggagggcggttttatcttcccccttgtcgtttgaggttttgatctctgggtaaagaggccgtttatctttgtaaacacgaaacatttttgctttctccagttttctgttaatggcgaaagaatggaagcgaataaagttttactgatttttgagacacta

SEQ ID NO: 6410 - DNA, 626 bp, Homo sapiens
  source 1..626: mol_type = unassigned DNA
attggatgaatcatctctttgctcttatttcaaccttttaattactgatccaccctctttgattacctgacacaacaggaatatctttcgtaacttgaaagtatgaagtgtaacagaacagactttaccacctgaaactgctgcttcaagttcagatcaggcaaggaacaaacctcgtaacaactaacaagaccaaagaagagtacacttaagttgaagacacaacacttgatctgaaacaagaagtttgtgcctactcaacagctttgaaagagcacttcccaacgctgctagtagtctttgttttcttcagtgctgtactgtgagattgcccggtacagcagcagttgtattctttattagcttggtagatcattttctctcgctcttttttttaatactagcaactttcatcctttgaaacgtgtgctgaaaaagaagaatcagcaaatactactgaaagtgcaatatttgagtatcactgcgagatgagctttgatccaaaccttctccacaacaatggacataatgggtaccctaatggtacttcagcagcactgcgtgaaactggggttattgaaaaactgttaacctcttacggatttattcagtgttcagaacgtcaa

SEQ ID NO: 6411 - DNA, 503 bp, Homo sapiens
  source 1..503: mol_type = unassigned DNA
attcctacgtaccgggccgtgctgcttatggcggcgctggagagggggcgctgagctgttgggtatgaagtgtaacagaacagactttaccacctgaaactgctgcttcaagttcagatcaggcaaggaacaaacctcgtaacaactaacaagaccaaagaagagtacacttaagttgaagacacaacacttgatctgaaacaagaagtttgtgcctactcaacagctttgaaagagcacttcccaacgctgctagtagtctttgttttcttcagtgctgtactgtgagattgcccggtacagcagcagttgtattctttattagcttggtagatcattttctctcgctcttttttttaatactagcaactttcatcctttgaaacgtgtgctgaaaaagaagaatcagcaaatactactgaaagtgcaatatttgagtatcactgcgagatatgtatatattctttttctttttaaaacagatgagctttgatccaaacctt

SEQ ID NO: 6412 - DNA, 3459 bp, Homo sapiens
  source 1..3459: mol_type = unassigned DNA
gcgcccggagcccgcaactctcgcgagagaagcgagatttattcctacgtaccgggccgtgctgcttatggcggcgctggagagggggcgctgagctgttgggtatgaagtgtaacagaacagactttaccacctgaaactgctgcttcaagttcagatcaggcaaggaacaaacctcgtaacaactaacaagaccaaagaagagtacacttaagttgaagacacaacacttgatctgaaacaagaagtttgtgcctactcaacagctttgaaagagcacttcccaacgctgctagtagtctttgttttcttcagtgctgtactgtgagattgcccggtacagcagcagttgtattctttattagcttggtagatcattttctctcgctcttttttttaatactagcaactttcatcctttgaaacgtgtgctgaaaaagaagaatcagcaaatactactgaaagtgcaatatttgagtatcactgcgagatgatgttgaatttgaagtatcatcggaccgacggactgggaaacccattgctgttaaactggtgaagataaaacaagaaatcctccctgaagaacgaatgaatggacaagaagtgttttatctgacttacacccctgaagatgtcgaagggaacgttcagctggaaactggagataaaataaactttgtaattgataacaataaacatactggtgctgtaagtgctcgcaacattatgctgttgaaaaagaaacaagcccgctgtcagggagtagtttgtgccatgaaggaggcatttggctttattgaaagaggtgatgttgtaaaagagatattctttcactatagtgaatttaagggtgacttagaaaccttacagcctggcgatgatgtggaattcacaatcaaggacagaaatggtaaagaagttgcaacagatgtcagactattgcctcaaggaacagtcatttttgaagatatcagcattgaacattttgaaggaactgtaaccaaagttatcccaaaagtacccagtaaaaaccagaatgacccattgccaggacgcatcaaagttgactttgtgatccctaaagaacttccctttggagacaaagatacgaaatccaaggtgaccctgctggaaggtgaccatgttaggtttaatatttcaacagaccgacgtgacaaattagagcgagcaaccaatatagaagttctgtcaaatacatttcagttcactaatgaagcccgagaaatgggtgtgattgctgccatgagagatggttttggtttcatcaagtgtgtggatcgtgatgttcgtatgttcttccacttcagtgaaattctggatgggaaccagctccatattgcagatgaagtagagtttactgtggttcctgatatgctctctgctcaaagaaatcatgctattaggattaaaaaacttcccaagggcacggtttcatttcattcccattcagatcaccgttttctgggcacggtagaaaaagaagccactttttccaatcctaaaaccactagcccaaataaaggcaaagagaaggaggctgaggatggcattattgcttatgatgactgtggggtgaaactgactattgcttttcaagccaaggatgtggaaggatctacttctcctcaaataggagataaggttgaatttagtattagtgacaaacagaggcctggacagcaggttgcaacttgtgtgcgacttttaggtcgtaattctaactccaagaggctcttgggttatgtggcaactctgaaggataattttggatttattgaaacagccaatcatgataaggaaatctttttccattacagtgagttctctggtgatgttgatagcctggaactgggggacatggtcgagtatagcttgtccaaaggcaaaggcaacaaagtcagtgcagaaaaagtgaacaaaacacactcagtgaatggcattactgaggaagctgatcccaccatttactctggcaaagtaattcgccccctgaggagtgttgatccaacacagactgagtaccaaggaatgattgagattgtggaggagggcgatatgaaaggtgaggtctatccatttggcatcgttgggatggccaacaaaggggattgcctgcagaaaggggagagcgtcaagttccaattgtgtgtcctgggccaaaatgcacaaactatggcttacaacatcacacccctgcgcagggccacagtggaatgtgtgaaagatcagtttggcttcattaactatgaagtaggagatagcaagaagctctttttccatgtgaaagaagttcaggatggcattgagctacaggcaggagatgaggtggagttctcagtgattcttaatcagcgcactggcaagtgcagcgcctgtaatgtttggcgagtctgtgagggccccaaggctgttgcagctcctcgacctgatcggttggtcaatcgcttgaagaatatcactctggatgatgccagtgctcctcgcctaatggttcttcgtcagccaaggggaccagataactcaatggggtttggtgcagaaagaaagatccgtcaagctggtgtcattgactaaccacatccacaaagcacaccattaatccactatgatcaagttggggggaatctggtgaagggttctgaatatctccctcttcatccctcccgaaatctggaatacttattctattgagctattacaccagttttaacaccttcctcgtgttatgtttaaaaaaataaataaatttaagaaaaccattttaaataatgcacagttgcagcctggaaaaacttaaggtggcgccttatagtatcaattttaggagctttatttggtgcatttaacgcaactggtaattgcagaatccactttgcctgtgtaagtgaaaaatatagactgttatcttgttggccctatgaaattctgcacttttcattatatactctaccttcattaattacttctggcaagatgttctgccttagcactcagttgcattcttttcctttttcttcctgttcattatgctttaattctgaggaccatatgagggtagaatatattatcttttaaaaattacaaaaatttgtataggcaaaccatttcttaaagttgatggccaaattttaaaatgttatttttcatatcatttataatcttgtcacaatccacttaaagaagtttggttatatttcagtgaaaattttcttccagagtaggttttttttcgtgggttggggggtaactttactacaattagtaagtatggtgcagaatttcatgcaaatgaggagtgccagcagtgtgataatttaaacatatttaaacaaaaacaaaaaaaatgaatgcacaaacttgctgctgcttagatcactgcagcttctaggacccggtttcttttactgatttaaaaacaaaacaaaaaaaaataaaaaa

SEQ ID NO: 6413 - DNA, 601 bp, Homo sapiens
  source 1..601: mol_type = unassigned DNA
agatgtgggaactattgagcttacttttcatccctagcaaaaaccccagagccagtgaataaataacttggcagactagctcatgatagcataatggtcaatatggagaaatgttggatggatagcagttagtaagagactgattttagagaagtctccaggtgtatgctgccagatgctatcctcgccctgcttttttcagagacctaatgagtagttctgtgagtacctatgtgctacgtaagcacttattttaggctttttacgtgcagcaactcatttaaccatctcaacaactctgtgagacaggtgttaagatgagctttgatccaaaccttctccacaacaatggacataatgggtaccctaatggtacttcagcagcactgcgtgaaactggggttattgaaaaactgttaacctcttacggatttattcagtgttcagaacgtcaagctagacttttcttccactgttcacagtataatggcaacctgcaagacttaaaagtaggagatgatgttgaatttgaagtatcatcggaccgacggactgggaaacccattgctgttaaactggtgaagataaaacaagaaatcct

SEQ ID NO: 6414 - DNA, 2667 bp, Homo sapiens
  source 1..2667: mol_type = unassigned DNA
tacgtaccgggccgtgctgcttatggcggcgctggagagggggcgctgagctgttgggatgagctttgatccaaaccttctccacaacaatggacataatgggtaccctaatggtacttcagcagcactgcgtgaaactggggttattgaaaaactgttaacctcttacggatttattcagtgttcagaacgtcaagctagacttttcttccactgttcacagtataatggcaacctgcaagacttaaaagtaggagatgatgttgaatttgaagtatcatcggaccgacggactgggaaacccattgctgttaaactggtgaagataaaacaagaaatcctccctgaagaacgaatgaatggacaagttgtgtgcgctgttcctcacaacttagagagtaaatctccagctgccccgggtcagagtccaacagggagtgtatgctacgaacgtaatggggaagtgttttatctgacttacacccctgaagatgtcgaagggaacgttcagctggaaactggagataaaataaactttgtaattgataacaataaacatactggtgctgtaagtgctcgcaacattatgctgttgaaaaagaaacaagcccgctgtcagggagtagtttgtgccatgaaggaggcatttggctttattgaaagaggtgatgttgtaaaagagatattctttcactatagtgaatttaagggtgacttagaaaccttacagcctggcgatgatgtggaattcacaatcaaggacagaaatggtaaagaagttgcaacagatgtcagactattgcctcaaggaacagtcatttttgaagatatcagcattgaacattttgaaggaactgtaaccaaagttatcccaaaagtacccagtaaaaaccagaatgacccattgccaggacgcatcaaagttgactttgtgatccctaaagaacttccctttggagacaaagatacgaaatccaaggtgaccctgctggaaggtgaccatgttaggtttaatatttcaacagaccgacgtgacaaattagagcgagcaaccaatatagaagttctgtcaaatacatttcagttcactaatgaagcccgagaaatgggtgtgattgctgccatgagagatggttttggtttcatcaagtgtgtggatcgtgatgttcgtatgttcttccacttcagtgaaattctggatgggaaccagctccatattgcagatgaagtagagtttactgtggttcctgatatgctctctgctcaaagaaatcatgctattaggattaaaaaacttcccaagggcacggtttcatttcattcccattcagatcaccgttttctgggcacggtagaaaaagaagccactttttccaatcctaaaaccactagcccaaataaaggcaaagagaaggaggctgaggatggcattattgcttatgatgactgtggggtgaaactgactattgcttttcaagccaaggatgtggaaggatctacttctcctcaaataggagataaggttgaatttagtattagtgacaaacagaggcctggacagcaggttgcaacttgtgtgcgacttttaggtcgtaattctaactccaagaggctcttgggttatgtggcaactctgaaggataattttggatttattgaaacagccaatcatgataaggaaatctttttccattacagtgagttctctggtgatgttgatagcctggaactgggggacatggtcgagtatagcttgtccaaaggcaaaggcaacaaagtcagtgcagaaaaagtgaacaaaacacactcagtgaatggcattactgaggaagctgatcccaccatttactctggcaaagtaattcgccccctgaggagtgttgatccaacacagactgagtaccaaggaatgattgagattgtggaggagggcgatatgaaaggtgaggtctatccatttggcatcgttgggatggccaacaaaggggattgcctgcagaaaggggagagcgtcaagttccaattgtgtgtcctgggccaaaatgcacaaactatggcttacaacatcacacccctgcgcagggccacagtggaatgtgtgaaagatcagtttggcttcattaactatgaagtaggagatagcaagaagctctttttccatgtgaaagaagttcaggatggcattgagctacaggcaggagatgaggtggagttctcagtgattcttaatcagcgcactggcaagtgcagcgcctgtaatgtttggcgagtctgtgagggccccaaggctgttgcagctcctcgacctgatcggttggtcaatcgcttgaagaatatcactctggatgatgccagtgctcctcgcctaatggttcttcgtcagccaaggggaccagataactcaatggggtttggtgcagaaagaaagatccgtcaagctggtgtcattgactaaccacatccacaaagcacaccattaatccactatgatcaagttggggggaatctggtgaagggttctgaatatctccctcttcatccctcccgaaatctggaatacttattctattgagctattacaccagttttaacaccttcctcgtgttatgtttaaaaaaataaataaatttaagaaaaccattttaaataatgcacagttgcagcctg

SEQ ID NO: 6415 - DNA, 1796 bp, Homo sapiens
  source 1..1796: mol_type = unassigned DNA
gcgaggagcccaagagagagcgcgcagcacgaagctcgagccgcctccgccgcgcgaccccacctcggccgccgccgcctgcgccgcgagatccgccccggcctccccgagagcgagccccggccgccgcgaccaccagccgcgctaaccgccgaccaaccgccaccgaggcgcctgagcgagagcagaggaggaggaggcatgagtgaggcgggcgaggccaccaccaccaccaccaccaccctcccgcaggctccgacggaggcggccgccgcggctccccaggaccccgcgcccaagagcccggtgggcagcggtgcgccccaggccgcggccccggcgcccgccgcccacgtcgcaggaaaccccggtggggacgcggcccccgcagccacgggcaccgcggccgccgcctctttagccaccgccgccggcagcgaagacgcggagaaaaaagttctcgccaccaaagtccttggcactgtcaaatggttcaacgtcagaaatggatatggatttataaatcgaaatgacaccaaagaagatgtatttgtacatcagactgccatcaagaagaataacccacggaaatatctgcgcagtgtaggagatggagaaactgtagagtttgatgtggttgaaggagagaagggtgcagaagctgccaatgtgactggcccggatggagttcctgtggaagggagtcgttacgctgcagatcggcgccgttacagacgtggctactatggaaggcgccgtggccctccccggaattacgctggggaggaggaggaggaagggagcggcagcagtgaaggatttgacccccctgccactgataggcagttctctggggcccggaatcagctgcgccgcccccagtatcgccctcagtaccggcagcggcggttcccgccttaccacgtgggacagacctttgaccgtcgctcacgggtcttaccccatcccaacagaatacaggctggtgagattggagagatgaaggatggagtcccagagggagcacaacttcagggaccggttcatcgaaatccaacttaccgcccaaggtaccgtagcaggggacctcctcgcccacgacctgccccagcagttggagaggctgaagataaagaaaatcagcaagccaccagtggtccaaaccagccgtctgttcgccgtggataccggcgtccctacaattaccggcgtcgcccgcgtcctcctaacgctccttcacaagatggcaaagaggccaaggcaggtgaagcaccaactgagaaccctgctccacccacccagcagagcagtgctgagtaacaccaggctcctcaggcaccttcaccatcggcaggtgacctaaagaattaatgaccattcagaaataaagcaaaaagcaggccacaaccttaaccaacaccaaagaaacatccaagcaataaagtggaagactaaccaagatttggacattggaatgtttactgttattctttaagaaacaactacaaaaagaaaatgtcaacaaatttttccagcaagctgagaacctgggaattcctgcacggaagacaagagagtagcctctccagtttcagcaaccgctaggtttctattttttttcctggtttttactgttttggtaatatatatattgaaacaagaaatattaataccacatggggagaaccccaaccaaagaaatctgaaatatatagtaaatgcttttttttccgtttttgttcattttggatgctggtgctaaacctccaagtgtcatgatttaaaaaaaaaaaaaa

SEQ ID NO: 6416 - DNA, 1713 bp, Homo sapiens
  source 1..1713: mol_type = unassigned DNA
gagcccaagagagagcgcgcagcacgaagctcgagccgcctccgccgcgcgaccccacctcggccgccgccgcctgcgccgcgagatccgccccggcctccccgagagcgagccccggccgccgcgaccaccagccgcgctaaccgccgaccaaccgccaccgaggcgcctgagcgagagcagaggaggaggaggcatgagtgaggcgggcgaggccaccaccaccaccaccaccaccctcccgcaggctccgacggaggcggccgccgcggctccccaggaccccgcgcccaagagcccggtgggcagcggtgcgccccaggccgcggccccggcgcccgccgcccacgtcgcaggaaaccccggtggggacgcggcccccgcagccacgggcaccgcggccgccgcctctttagccaccgccgccggcagcgaagacgcggagaaaaaagttctcgccaccaaagtccttggcactgtcaaatggttcaacgtcagaaatggatatggatttataaatcgaaatgacaccaaagaagatgtatttgtacatcagactgccatcaagaagaataacccacggaaatatctgcgcagtgtaggagatggagaaactgtagagtttgatgtggttgaaggagagaagggtgcagaagctgccaatgtgactggcccggatggagttcctgtggaagggagtcgttacgctgcagatcggcgccgttacagacgtggctactatggaaggcgccgtggccctccccggaatgctggtgagattggagagatgaaggatggagtcccagagggagcacaacttcagggaccggttcatcgaaatccaacttaccgcccaaggtaccgtagcaggggacctcctcgcccacgacctgccccagcagttggagaggctgaagataaagaaaatcagcaagccaccagtggtccaaaccagccgtctgttcgccgtggataccggcgtccctacaattaccggcgtcgcccgcgtcctcctaacgctccttcacaagatggcaaagaggccaaggcaggtgaagcaccaactgagaaccctgctccacccacccagcagagcagtgctgagtaacaccaggctcctcaggcaccttcaccatcggcaggtgacctaaagaattaatgaccattcagaaataaagcaaaaagcaggccacaaccttaaccaacaccaaagaaacatccaagcaataaagtggaagactaaccaagatttggacattggaatgtttactgttattctttaagaaacaactacaaaaagaaaatgtcaacaaatttttccagcaagctgagaacctgggaattcctgcacggaagacaagagagtagcctctccagtttcagcaaccgctaggtttctattttttttcctggtttttactgttttggtaatatatatattgaaacaagaaatattaataccacatggggagaaccccaaccaaagaaatctgaaatatatagtaaatgcttttttttccgtttttgttcattttggatgctggtgctaaacctccaagtgtcatgatttaaaaaaaaaaaaaatttatgtccttcttatttatttctaggatgaggggaggataacatttttgctttcttatgtgactctctttgaaaatgtgcagtaagaaattcctcaaaaataaaatttttacccttcagaggacagaa

SEQ ID NO: 6417 - DNA, 526 bp, Homo sapiens
  source 1..526: mol_type = unassigned DNA
ccacaccagctgtcccactcaccatggagaagatcctgatcctcctgcttgtcgccctctctgtggcctatgcagctcctggcccccgggggatcattatcaacctggagaacggtgagctctgcatgaatagtgcccagtgtaagagcaattgctgccagcattcaagtgcgctgggcctggcccgctgcacatccatggccagcgagaacagcgagtgctctgtcaagacgctctatgggatttactacaagtgtccctgtgagcgtggcctgacctgtgagggagacaagaccatcgtgggctccatcaccaacaccaactttggcatctgccatgacgctggacgctccaagcagtgagactgcccacccactcccacacctagcccagaatgctgtaggccactaggcgcaggggcatctctcccctgctccagcgcatctcccgggctggccacctccttgaccagcatatctgttttctgattgcgctcttcacaattaaaggcctcctgcaaaccttt

SEQ ID NO: 6418 - DNA, 416 bp, Homo sapiens
  source 1..416: mol_type = unassigned DNA
ctgtctcccgccacccacaccagctgtcccactcaccatggagaagatcctgatcctcctgcttgtcgccctctctgtggcctatgcagctcctggcccccgggggatcattatcaacctgacgctctatgggatttactacaagtgtccctgtgagcgtggcctgacctgtgagggagacaagaccatcgtgggctccatcaccaacaccaactttggcatctgccatgacgctggacgctccaagcagtgagactgcccacccactcccacacctagcccagaatgctgtaggccactaggcgcaggggcatctctcccctgctccagcgcatctcccgggctggccacctccttgaccagcatatctgttttctgattgcgctcttcacaattaaaggcctcctgcaaacctt

SEQ ID NO: 6419 - DNA, 1569 bp, Homo sapiens
  source 1..1569: mol_type = unassigned DNA
aggaaaaagtgctgcaaaggatataaatttgttcttggacaatgcatcccagaagattacgacgtttgtgccgaggctccctgtgaacagcagtgcacggacaactttggccgagtgctgtgtacttgttatccgggataccgatatgaccgggagagacaccggaagcgggagaagccatactgtctggatattgatgagtgtgccagcagcaatgggacgctgtgtgcccacatctgcatcaataccttgggcagctaccgctgcgagtgccgggaaggctacatccgggaagatgatgggaagacatgtaccaggggagacaaatatcccaatgacactggccatgagaagtctgagaacatggtgaaagccggaacttgctgtgccacatgcaaggagttctaccagatgaagcagaccgtgctgcagctgaagcaaaagattgctctgctccccaacaatgcagctgacctgggcaagtatatcactggtgacaaggtgctggcctcaaacacctaccttccaggacctcctggcctgcctgggggccagggccctcccgggtccaccaggggcaccaggaagagatggttctaagggggagagaggagcgcctgggcccagagggtctccaggaccccctggttctttcgacttcctgctacttatgctggctgacatccgcaatgacatcactgagctgcaggaaaaggtgttcgggcaccggactcactcttcagcagaggagttccctttacctcaggaatttcccagctacccagaagccatggacctgggctctggagatgaccatccaagaagaactgagacaagagacttgagagcccccagagacttctacccatagcacatcccaacaccgtcacgccaaaggaagagaaagatcaactcacctgcagttaaaccatctaaagagaagaaagaccactggagacctagaaaacatacatttttctcttctcttctcctgacgtctctccactcctcttcttccaaatacgatgctattttcagagtcccctcctaggcctgcagacatgagggagtgaatgattgatttacctgcttctcactaagagtccattggggtggtttgcattgtaacttttcttttacatcctatttttccaggaactttggatttaagtactctcacagtgtcttaaatcataaattcttgaagttaaatttggcagagtatcaaaagggggaaaatgacaaagtgagctctaagaaaatgtgaggctacttctaagatgtgtgttcacaatagaccataactcctctagtatcaaaattggggctcttcagttaaaaaggggtggggaggacaaacgtgtcgatgtgctttggtggagaattttttccttgtgcttctagtagactttaaatattgtatccctttgtcaaaccttgtttcccaaattcaattaaagagaggagagaattgaatggcgtttagagaagatagaaaagaatcacagtcatatatttactgttatatagattgccacattctaaaattcaaatacggtgcttaaggtt

SEQ ID NO: 6420 - DNA, 1919 bp, Homo sapiens
  source 1..1919: mol_type = unassigned DNA
atggtgccgccgcctccgagccggggaggagctgccaggggccagctgggcaggagcctgggtccgctgctgctgctcctggcgttgggacacacgtggacctacagagaggagccggaggacggcgacagagaaatctgctcagagagcaaaatcgcgacgactaaatacccgtgtctgaagtcttcaggcgagctcaccacatgctacaggaaaaagtgctgcaaaggatataaatttgttcttggacaatgcatcccagaagattacgacgtttgtgccgaggctccctgtgaacagcagtgcacggacaactttggccgagtgctgtgtacttgttatccgggataccgatatgaccgggagagacaccggaagcgggagaagccatactgtctggatattgatgagtgtgccagcagcaatgggacgctgtgtgcccacatctgcatcaataccttgggcagctaccgctgcgagtgccgggaaggctacatccgggaagatgatgggaagacatgtaccaggggagacaaatatcccaatgacactggccatgagaagtctgagaacatggtgaaagccggaacttgctgtgccacatgcaaggagttctaccagatgaagcagaccgtgctgcagctgaagcaaaagattgctctgctccccaacaatgcagctgacctgggcaagtatatcactggtgacaaggtgctggcctcaaacacctaccttccaggacctcctggcctgcctgggggccagggccctcccggctcaccaggaccaaagggaagcccaggcttccccggtatgccaggccctcctgggcagcccggcccacggggctcaatgggacccatgggaccatctcctgatctgtcccacattaagcaaggccggaggggccctgtgggtccaccaggggcaccaggaagagatggttctaagggggagagaggagcgcctgggcccagagggtctccaggaccccctggttctttcgacttcctgctacttatgctggctgacatccgcaatgacatcactgagctgcaggaaaaggtgttcgggcaccggactcactcttcagcagaggagttccctttacctcaggaatttcccagctacccagaagccatggacctgggctctggagatgaccatccaagaagaactgagacaagagacttgagagcccccagagacttctacccatagcacatcccaacaccgtcacgccaaaggaagagaaagatcaactcacctgcagttaaaccatctaaagagaagaaagaccactggagacctagaaaacatacatttttctcttctcttctcctgacgtctctccactcctcttcttccaaatacgatgctattttcagagtcccctcctaggcctgcagacatgagggagtgaatgattgatttacctgcttctcactaagagtccattggggtggtttgcattgtaacttttcttttacatcctatttttccaggaactttggatttaagtactctcacagtgtcttaaatcataaattcttgaagttaaatttggcagagtatcaaaagggggaaaatgacaaagtgagctctaagaaaatgtgaggctacttctaagatgtgtgttcacaatagaccataactcctctagtatcaaaattggggctcttcagttaaaaaggggtggggaggacaaacgtgtcgatgtgctttggtggagaattttttccttgtgcttctagtagactttaaatattgtatccctttgtcaaaccttgtttcccaaattcaattaaagagaggagagaattgaatggcgtttagagaagatagaaaagaatcacagtcatatatttactgttatatagattgccacattctaaaattcaaatacggtgcttaaggtt

SEQ ID NO: 6421 - DNA, 815 bp, Homo sapiens
  source 1..815: mol_type = unassigned DNA
agaaggtttaaggccggaaagggaaatgaaggggcccggcgctaaccctctaaggacctgttttgcttctgtttaaaccaaatgggcagtctgtcattacacacaccctgggtcttcatatgtggccgccaggtaggagcatcacagtcaagctacgggagaaaacagtttccaggaaactggaaatgaacggcccgagtgctttccaggggctcatctgtgggaagtataatggaatgtgcttacaagggccagcaggagtgcctggtcgagacgggagccctggggccaatggcattccgggtacacctgggatcccaggtcgggatggattcaaaggagaaaagggggaatgtctgagggaaagctttgaggagtcctggacacccaactacaagcagtgttcatggagttcattgaattatggcatagatcttgggaaaattgcggagtgtacatttacaaagatgcgttcaaatagtgctctaagagttttgttcagtggctcacttcggctaaaatgcagaaatgcatgctgtcagcgttggtatttcacattcaatggagctgaatgttcaggacctcttcccattgaagctataatttatttggaccaaggaagccctgaaatgaattcaacaattaatattcatcgcacttcttctgtggaaggactttgtgaaggaattggtgctggattagtggatgttgctatctgggttggtacttgttcagattacccaaaaggagatgcttctactggatggaattcagtttctcgcatcattattgaagaactaccaaactacctcttt

SEQ ID NO: 6422 - DNA, 1271 bp, Homo sapiens
  source 1..1271: mol_type = unassigned DNA
gggagggagagaggcgcgcgggtgaaaggcgcattgatgcagcctgcggcggcctcggagcgcggcggagccagacgctgaccacgttcctctcctcggtctcctccgcctccagctccgcgctgcccggcagccgggagccatgcgaccccagggccccgccgcctccccgcagcggctccgcggcctcctgctgctcctgctgctgcagctgcccgcgccgtcgagcgcctctgagatccccaaggggaagcaaaaggcgcagctccggcagagggaggtggtggacctgtataatggaatgtgcttacaagggccagcaggagtgcctggtcgagacgggagccctggggccaatggcattccgggtacacctgggatcccaggtcgggatggattcaaaggagaaaagggggaatgtctgagggaaagctttgaggagtcctggacacccaactacaagcagtgttcatggagttcattgaattatggcatagatcttgggaaaattgcggagtgtacatttacaaagatgcgttcaaatagtgctctaagagttttgttcagtggctcacttcggctaaaatgcagaaatgcatgctgtcagcgttggtatttcacattcaatggagctgaatgttcaggacctcttcccattgaagctataatttatttggaccaaggaagccctgaaatgaattcaacaattaatattcatcgcacttcttctgtggaaggactttgtgaaggaattggtgctggattagtggatgttgctatctgggttggtacttgttcagattacccaaaaggagatgcttctactggatggaattcagtttctcgcatcattattgaagaactaccaaaataaatgctttaattttcatttgctacctctttttttattatgccttggaatggttcacttaaatgacattttaaataagtttatgtatacatctgaatgaaaagcaaagctaaatatgtttacagaccaaagtgtgatttcacactgtttttaaatctagcattattcattttgcttcaatcaaaagtggtttcaatattttttttagttggttagaatactttcttcatagtcacattctctcaacctataatttggaatattgttgtggtcttttgttttttctcttagtatagcatttttaaaaaaatataaaagctaccaatctttgtacaatttgtaaatgttaagaattttttttatatctgttaaataaaaattatttccaacaaccttaata

SEQ ID NO: 6423 - DNA, 1198 bp, Homo sapiens
  source 1..1198: mol_type = unassigned DNA
agaaggtttaaggccggaaagggaaatgaaggggcccggcgctaaccctctaaggacctgttttgcttctgtttaaaccaaatgggcagtctgtcattacacacaccctgggtcttcatatgtggccgccaggtaggagcatcacagtcaagctacgggagaaaacagtttccaggaaactggaaatgaacggcccgagtgctttccaggggctcatctgtgggaagtataatggaatgtgcttacaagggccagcaggagtgcctggtcgagacgggagccctggggccaatggcattccgggtacacctgggatcccaggtcgggatggattcaaaggagaaaagggggaatgtctgagggaaagctttgaggagtcctggacacccaactacaagcagtgttcatggagttcattgaattatggcatagatcttgggaaaattgcggagtgtacatttacaaagatgcgttcaaatagtgctctaagagttttgttcagtggctcacttcggctaaaatgcagaaatgcatgctgtcagcgttggtatttcacattcaatggagctgaatgttcaggacctcttcccattgaagctataatttatttggaccaaggaagccctgaaatgaattcaacaattaatattcatcgcacttcttctgtggaaggactttgtgaaggaattggtgctggattagtggatgttgctatctgggttggtacttgttcagattacccaaaaggagatgcttctactggatggaattcagtttctcgcatcattattgaagaactaccaaaataaatgctttaattttcatttgctacctctttttttattatgccttggaatggttcacttaaatgacattttaaataagtttatgtatacatctgaatgaaaagcaaagctaaatatgtttacagaccaaagtgtgatttcacactgtttttaaatctagcattattcattttgcttcaatcaaaagtggtttcaatattttttttagttggttagaatactttcttcatagtcacattctctcaacctataatttggaatattgttgtggtcttttgttttttctcttagtatagcatttttaaaaaaatataaaagctaccaatctttgtacaatttgtaaatgttaagaattttttttatatctgttaaataaaaattatttccaacaa

SEQ ID NO: 6424 - DNA, 6380 bp, Homo sapiens
  source 1..6380: mol_type = unassigned DNA
atggaactatctcctgagtgctgcaagttgtaacgggcaccgctgagcctgtttccctttggagcacttcttatctagaagcagtgtttagtttcttccaaactgggccacttcgtccacctactctgttctgagtaaggaaacagcctccaagcatcagcagagcccagatgagcacgggccgcggagccgcttagcagtctcccgggacccagctccggaggagccgcaagcatgcaccctgggttgtggctgctcctggttacgttgtgcctgaccgaggaactggcagcagcgggagagaagtcttatggaaagccatgtgggggccaggactgcagtgggagctgtcagtgttttcctgagaaaggagcgagaggacgacctggaccaattggaattcaaggcccaacaggtcctcaaggattcactggctctactggtttatcgggattgaaaggagaaaggggtttcccaggccttctgggaccttatggaccaaaaggagataagggtcccatgggagttcctggctttcttggcatcaatgggattccgggccaccctggacaaccaggccccagaggcccacctggtctggatggctgtaatggaactcaaggagctgttggatttccaggccctgatggctatcctgggcttctcggaccacccgggcttcctggtcagaaaggatcaaaaggtgaccctgtccttgctccaggtagtttcaaaggaatgaagggggatcctgggctgcctggactggatggaatcactggcccacaaggagcacccggatttcctggagctgtaggacctgcaggaccaccaggattacaaggtcctccagggcctcctggtcctcttggtcctgatgggaatatggggctaggttttcaaggagagaaaggagtcaagggggatgttggcctccctggcccagcaggacctccaccatctactggagagctggaattcatgggattccccaaagggaagaaaggatccaagggtgaaccagggcctaagggttttccaggcataagtggccctccaggcttcccgggccttggaactactggagaaaagggagaaaagggagaaaagggaatccctggtttgccaggacctaggggtcccatgggttcagaaggagtccaaggccctccagggcaacagggcaagaaagggaccctgggatttcctgggcttaatggattccaaggaattgagggtcaaaagggtgacattggcctgccaggcccagatgttttcatcgatatagatggtgctgtgatctcaggtaatcctggagatcctggtgtacctggcctcccaggccttaaaggagatgaaggcatccaaggcctacgtggcccttctggtgtccctggattgccagcattatcaggtgtcccaggagccctagggcctcagggatttccagggctgaagggggaccaaggaaacccaggccgtaccacaattggagcagctggcctccctggcagagatggtttgccaggcccaccaggtccaccaggcccacctagtccagaatttgagactgaaactctacacaacaaagagtcagggttccctggtctccgaggagaacaaggtccaaaaggaaacctaggcctcaaaggaataaaaggagactcaggtttctgtgcttgtgacggtggtgttcccaacactggaccacccggggaaccaggcccacctggtccatggggtctcataggccttccaggccttaaaggagccagaggagatcgaggctctgggggtgcacagggcccagcaggggctccaggcttagttgggcctctgggtccttcaggacccaaaggaaagaagggggaaccaattctcagtacaatccaaggaatgccaggagatcggggtgattctggctcccagggcttccgtggtgtaataggagaaccaggcaaggacggagtaccaggtttaccaggtctgccaggccttccgggtgatggtggacagggcttcccaggtgaaaaggggttacctggacttcctggtgaaaaaggccatcctggtccacctggcctcccaggaaatgggttaccaggacttcctggaccccgtgggcttcctggagataaaggcaaggatggattaccgggacaacaaggccttcccggatctaagggaatcaccctgccctgtattattcctgggtcatacggtccatcaggatttccaggcactcccggattcccaggccctaaagggtctcgaggcctccctgggaccccaggccagcctgggtcaagtggaagtaaaggagagccagggagtccaggattggttcatcttcctgaattaccaggatttcctggacctcgtggggagaagggcttgcctgggtttcctgggctccctggaaaagatggcttgcctgggatgattggcagtccaggcttacctggttccaagggagccactggtgacatctttggtgctgaaaatggtgctccgggggaacaaggcctacaaggattaacagggcacaaaggatttcttggagactctggccttccaggactcaagggtgtgcacgggaagcctggcttactaggccccaaaggtgagcggggcagccctgggacaccaggacaggtgggacagccaggcaccccaggatctagtggtccatatggcatcaagggcaaatctgggctcccaggagcaccaggcttcccaggcatctcaggacatcctggaaagaaaggaacaagaggcaagaaaggtcctcctggatcaattgtaaagaaagggctgccagggctaaaaggccttcctggaaatccaggcctagtaggactgaaaggaagcccaggctctccaggggtcgctgggttgccagccctctctggacccaagggagagaaggggtctgttggattcgtaggttttccaggaataccaggtctgcctggtattcctggaacaagaggattaaaaggaattccaggatcaactggaaaaatgggaccatctggacgtgctggtactcctggtgaaaagggagacagaggcaatccggggccagtcggaatacctagtccaagacgtccaatgtcaaacctttggctcaaaggagacaaaggctctcaaggctcagccggatccaatggatttcctgggccaagaggtgacaaaggagaggctggtcgacctggaccaccaggcctacctggagctcctggcctcccaggcattatcaaaggagttagtggaaagccagggccccctggcttcatgggaatccggggcttacctggcctgaaggggtcctctgggatcacaggtttcccaggaatgccaggagaaagtggttcacaaggtatcagagggtcgcctggactcccaggagcatctggtctcccaggcctgaaaggagacaacggccagacagttgaaatttccggtagcccaggacccaagggacagcctggcgaatctggttttaaaggcacaaaaggaagagatggactaataggcaatataggcttccctggaaacaaaggtgaagatggaaaagttggtgtttctggagatgttggccttcctggagctccaggatttccaggagttgccggcatgagaggagaaccaggacttccaggttcttctggtcaccaaggggcaattgggcctctaggatcccccggattaataggacccaaaggcttccctggatttcctggtttacatggactgaatgggcttccgggcaccaagggtacccatggcactccaggacctagtatcaccggtgtgcctgggcctgctggtctccctggacccaaaggagaaaaaggatatccaggaattggcatcggagctccagggaagccgggcctgagagggcaaaaaggtgatcgaggtttcccaggtctccagggccctgctggtctccccggtgccccaggcatctccttgccctcactcatagcaggacagcctggtgaccccgggcgaccaggcctagatggagaacgaggccgcccaggccccgctggacccccaggtccccctgggccatcctcgaatcaaggcgacaccggagaccctggcttccctggaattccaggtttttctggcctccctggagagctaggactgaaaggcatgagaggtgagcctggcttcatggggactccaggcaaggttgggccacctggagacccaggatttcccggaatgaaggggaaggcagggccaagaggctcttctggcctccaaggtgatcctggacaaacaccaactgcagaagctgtccaggttcctcctggacccttgggtctaccagggatcgatggcatccctggcctcactggggaccctggggctcaaggccctgtaggcctacaaggctccaaaggtttacctggcatccccggtaaagatggccccagtgggctcccaggcccacctggggctcttggtgatcctggtctgcctggactgcaaggccctccaggatttgaaggagctccagggcagcaaggccccttcgggatgcctggaatgcctggccagagcatgagagtgggctacacgttggtaaagcacagccagtcggaacaggtgcccccgtgtcccatcgggatgagccagctgtgggtggggtacagcttactgtttgtggaggggcaagagaaagcccacaaccaggacctgggctttgctggctcctgtctgccccgcttcagcaccatgcccttcatctactgcaacatcaacgaggtgtgccactatgccaggcgcaatgataaatcttactggctctccactaccgcccctatccccatgatgcccgtcagccagacccagattccccagtacatcagccgctgctctgtgtgtgaggcaccctcgcaagccattgctgtgcacagccaggacatcaccatcccgcagtgccccctgggctggcgcagcctctggattgggtactctttcctcatgcacactgccgctggtgccgagggtggaggccagtccctggtctcacctggctcctgcctagaggactttcgggccactcctttcatcgaatgcagtggtgcccgaggcacctgccactactttgcaaacaagtacagtttctggttgaccacagtggaggagaggcagcagtttggggagttgcctgtgtctgaaacgctgaaagctgggcagctccacactcgagtcagtcgctgccaggtgtgtatgaaaagcctgtagggtggcacctgccactctgccccttgccctcccctgcccctcacaacagtcacctcacaaacctgaatggtctgaagaaggaaggcctgagcccctttgcctgtcaagttgtacattggagtctcatttgggctagactaccggacactcgtcaccccagccctcgggtccatagagatgagcccaccctgctgagatctgctgtcctgtttctgtcaagctggtgctactgtttgatttggatgattgtgtgactattcatggctacctcagaaagatttgatgggccacaactgtcttagactgctagctttctccttaccgtcttgatcggaaagctcttcctaatcgctaatcagtcatttcttcatgtacagaggtcagcacacattatttggcttaaaccagaacccagtgtttccacacttaaattctctaaccgaatattcatggatggctcaagtctgcacagagcaagtcctcactcttcaaggaggcccactgtgtctaggcaggcaagagaattgaaatgaggtgccacccagtagcccagagtgagctttagctctctctagaatgagcaagactgggccccacatggcttagagaggcttgaaggccagcagctgggttgggggtggtggtcattaatggcatatggtcctagacaaaccatctcctccttgccggctccccctccagccagagacagaggatgtggcctggttcaaagtaaagcagaggatgcaacaaatgtggccaagcctatcaaaggaaatgagaatgacagccttttttcctgggccagaagtagaggggtgggtgcgtaaggatgtgtgagttttgcttttgactccaggaacaaaaaggtaaatcccacatcccagtttctcagaagtccctgtttattccaaatgccatccagatgtgtgcaatgtggcaaactgaagctgcacagtgttggtttccttgtattctgaggatgttaaagactttgttaaatggttatccaattgctctttcacaggtagcctattaaactattttaatatgtttttttaaacctcataaaaatctagcacactcttctcttgagcagttagcagacc

SEQ ID NO: 6425 - DNA, 4238 bp, Homo sapiens
  source 1..4238: mol_type = unassigned DNA
tccttgccctccgctctcactctggctgggagcagaaggcagcctcggtctctgggcggcggcggcggcccactctgccctggccgcgctgtgtggtgaccgcaggccccagacatgagggcggcccgtgctctgctgcccctgctgctgcaggcctgctggacagccgcgcaggatgagccggagaccccgagggccgtggccttccaggactgccccgtggacctgttctttgtgctggacacctctgagagcgtggccctgaggctgaagccctacggggccctcgtggacaaagtcaagtccttcaccaagcgcttcatcgacaacctgagggacaggtactaccgctgtgaccgaaacctggtgtggaacgcaggcgcgctgcactacagtgacgaggtggagatcatccaaggcctcacgcgcatgcctggcggccgcgacgcactcaaaagcagcgtggacgcggtcaagtactttgggaagggcacctacaccgactgcgctatcaagaaggggctggagcagctcctcgtggggggctcccacctgaaggagaataagtacctgattgtggtgaccgacgggcaccccctggagggctacaaggaaccctgtggggggctggaggatgctgtgaacgaggccaagcacctgggcgtcaaagtcttctcggtggccatcacacccgaccacctggagccgcgtctgagcatcatcgccacggaccacacgtaccggcgcaacttcacggcggctgactggggccagagccgcgacgcagaggaggccatcagccagaccatcgacaccatcgtggacatgatcaaaaataacgtggagcaagtgtgctgctccttcgaatgccagcctgcaagaggacctccggggctccggggcgaccccggctttgagggagaacgaggcaagccggggctcccaggagagaagggagaagccggagatcctggaagacccggggacctcggacctgttgggtaccagggaatgaagggagaaaaagggagccgtggggagaagggctccaggggacccaagggctacaagggagagaagggcaagcgtggcatcgacggggtggacggcgtgaagggggagatggggtacccaggcctgccaggctgcaagggctcgcccgggtttgacggcattcaaggaccccctggccccaagggagaccccggtgcctttggactgaaaggagaaaagggcgagcctggagctgacggggaggcggggagaccagggagctcgggaccatctggagacgagggccagccgggagagcctgggccccccggagagaaaggagaggcgggcgacgaggggaacccaggacctgacggtgcccccggggagcggggtggccctggagagagaggaccacgggggaccccaggcacgcggggaccaagaggagaccctggtgaagctggcccgcagggtgatcagggaagagaaggccccgttggtgtccctggagacccgggcgaggctggccctatcggacctaaaggctaccgaggcgatgagggtcccccagggtccgagggtgccagaggagccccaggacctgccggaccccctggagacccggggctgatgggtgaaaggggagaagacggccccgctggaaatggcaccgagggcttccccggcttccccgggtatccgggcaacaggggcgctcccgggataaacggcacgaagggctaccccggcctcaagggggacgagggagaagccggggaccccggagacgataacaacgacattgcaccccgaggagtcaaaggagcaaaggggtaccggggtcccgagggcccccagggacccccaggacaccaaggaccgcctgggccggacgaatgcgagattttggacatcatcatgaaaatgtgctcttgctgtgaatgcaagtgcggccccatcgacctcctgttcgtgctggacagctcagagagcattggcctgcagaacttcgagattgccaaggacttcgtcgtcaaggtcatcgaccggctgagccgggacgagctggtcaagttcgagccagggcagtcgtacgcgggtgtggtgcagtacagccacagccagatgcaggagcacgtgagcctgcgcagccccagcatccggaacgtgcaggagctcaaggaagccatcaagagcctgcagtggatggcgggcggcaccttcacgggggaggccctgcagtacacgcgggaccagctgctgccgcccagcccgaacaaccgcatcgccctggtcatcactgacgggcgctcagacactcagagggacaccacaccgctcaacgtgctctgcagccccggcatccaggtggtctccgtgggcatcaaagacgtgtttgacttcatcccaggctcagaccagctcaatgtcatttcttgccaaggcctggcaccatcccagggccggcccggcctctcgctggtcaaggagaactatgcagagctgctggaggatgccttcctgaagaatgtcaccgcccagatctgcatagacaagaagtgtccagattacacctgccccatcacgttctcctccccggctgacatcaccatcctgctggacggctccgccagcgtgggcagccacaactttgacaccaccaagcgcttcgccaagcgcctggccgagcgcttcctcacagcgggcaggacggaccccgcccacgacgtgcgggtggcggtggtgcagtacagcggcacgggccagcagcgcccagagcgggcgtcgctgcagttcctgcagaactacacggccctggccagtgccgtcgatgccatggactttatcaacgacgccaccgacgtcaacgatgccctgggctatgtgacccgcttctaccgcgaggcctcgtccggcgctgccaagaagaggctgctgctcttctcagatggcaactcgcagggcgccacgcccgctgccatcgagaaggccgtgcaggaagcccagcgggcaggcatcgagatcttcgtggtggtcgtgggccgccaggtgaatgagccccacatccgcgtcctggtcaccggcaagacggccgagtacgacgtggcctacggcgagagccacctgttccgtgtccccagctaccaggccctgctccgcggtgtcttccaccagacagtctccaggaaggtggcgctgggctagcccaccctgcacgccggcaccaaaccctgtcctcccacccctccccactcatcactaaacagagtaaaatgtgatgcgaattttcccgaccaacctgattcgctagattttttttaaggaaaagcttggaaagccaggacacaacgctgctgcctgctttgtgcagggtcctccggggctcagccctgagttggcatcacctgcgcagggccctctggggctcagccctgagctagtgtcacctgcacagggccctctgaggctcagccctgagctggcgtcacctgtgcagggccctctggggctcagccctgagctggcctcacctgggttccccaccccgggctctcctgccctgccctcctgcccgccctccctcctgcctgcgcagctccttccctaggcacctctgtgctgcatcccaccagcctgagcaagacgccctctcggggcctgtgccgcactagcctccctctcctctgtccccatagctggtttttcccaccaatcctcacctaacagttactttacaattaaactcaaagcaagctcttctcctcagcttggggcagccattggcctctgtctcgttttgggaaaccaaggtcaggaggccgttgcagacataaatctcggcgactcggccccgtctcctgagggtcctgctggtgaccggcctggaccttggccctacagccctggaggccgctgctgaccagcactgaccccgacctcagagagtactcgcaggggcgctggctgcactcaagaccctcgagattaacggtgctaaccccgtctgctcctccctcccgcagagactggggcctggactggacatgagagccccttggtgccacagagggctgtgtcttactagaaacaacgcaaacctctccttcctcagaatagtgatgtgttcgacgttttatcaaaggccccctttctatgttcatgttagttttgctccttctgtgtttttttctgaaccatatccatgttgctgacttttccaaataaaggttttcactcctctc

SEQ ID NO: 6426 - DNA, 2163 bp, Homo sapiens
  source 1..2163: mol_type = unassigned DNA
gcagaaggcagcctcggtctctgggcggcggcggcggcccactctgccctggccgcgctgtgtggtgaccgcaggccccagacatgagggcggcccgtgctctgctgcccctgctgctgcaggcctgctggacagccgcgcaggatgagccggagaccccgagggccgtggccttccaggactgccccgtggacctgttctttgtgctggacacctctgagagcgtggccctgaggctgaagccctacggggccctcgtggacaaagtcaagtccttcaccaagcgcttcatcgacaacctgagggacaggtactaccgctgtgaccgaaacctggtgtggaacgcaggcgcgctgcactacagtgacgaggtggagatcatccaaggcctcacgcgcatgcctggcggccgcgacgcactcaaaagcagcgtggacgcggtcaagtactttgggaagggcacctacaccgactgcgctatcaagaaggggctggagcagctcctcgtggggggctcccacctgaaggagaataagtacctgattgtggtgaccgacgggcaccccctggagggctacaaggaaccctgtggggggctggaggatgctgtgaacgaggccaagcacctgggcgtcaaagtcttctcggtggccatcacacccgaccacctggagccgcgtctgagcatcatcgccacggaccacacgtaccggcgcaacttcacggcggctgactggggccagagccgcgacgcagaggaggccatcagccagaccatcgacaccatcgtggacatgatcaaaaataacgtggagcaagtgtgctgctccttcgaatgccagcctgcaagaggacctccggggctccggggcgaccccggctttgagggagaacgaggcaagccggggctcccaggagagaagggagaagccggagatcctggaagacccggggacctcggacctgttgggtaccagggaatgaagggagaaaaagggagccgtggggagaagggctccaggggacccaagggctacaagggagagaagggcaagcgtggcatcgacggggtggacggcgtgaagggggagatggggtacccaggcctgccaggctgcaagggctcgcccgggtttgacggcattcaaggaccccctggccccaagggagaccccggtgcctttggactgaaaggagaaaagggcgagcctggagctgacggggaggcggggagaccagggagctcgggaccatctggagacgagggccagccgggagagcctgggccccccggagagaaaggagaggcgggcgacgaggggaacccaggacctgacggtgcccccggggagcggggtggccctggagagagaggaccacgggggaccccaggcacgcggggaccaagaggagaccctggtgaagctggcccgcagggtgatcagggaagagaaggccccgttggtgtccctggagacccgggcgaggctggccctatcggacctaaaggctaccgaggcgatgagggtcccccagggtccgagggtgccagaggagccccaggacctgccggaccccctggagacccggggctgatgggtgaaaggggagaagacggccccgctggaaatggcaccgagggcttccccggcttccccgggtatccgggcaacaggggcgctcccgggataaacggcacgaagggctaccccggcctcaagggggacgagggagaagccggggaccccggagacgataacaacgacattgcaccccgtctcctgagggtcctgctggtgaccggcctggaccttggccctacagccctggaggccgctgctgaccagcactgaccccgacctcagagagtactcgcaggggcgctggctgcactcaagaccctcgagattaacggtgctaaccccgtctgctcctccctcccgcagagactggggcctggactggacatgagagccccttggtgccacagagggctgtgtcttactagaaacaacgcaaacctctccttcctcagaatagtgatgtgttcgacgttttatcaaaggccccctttctatgttcatgttagttttgctccttctgtgtttttttctgaaccatatccatgttgctgacttttccaaataaaggttttcactcctc

SEQ ID NO: 6427 - DNA, 2004 bp, Homo sapiens
  source 1..2004: mol_type = unassigned DNA
agaaggcagcctcggtctctgggcggcggcggcggcccactctgccctggccgcgctgtgtggtgaccgcaggccccagacatgagggcggcccgtgctctgctgcccctgctgctgcaggcctgctggacagccgcgcaggatgagccggagaccccgagggccgtggccttccaggactgccccgtggacctgttctttgtgctggacacctctgagagcgtggccctgaggctgaagccctacggggccctcgtggacaaagtcaagtccttcaccaagcgcttcatcgacaacctgagggacaggtactaccgctgtgaccgaaacctggtgtggaacgcaggcgcgctgcactacagtgacgaggtggagatcatccaaggcctcacgcgcatgcctggcggccgcgacgcactcaaaagcagcgtggacgcggtcaagtactttgggaagggcacctacaccgactgcgctatcaagaaggggctggagcagctcctcgtggggggctcccacctgaaggagaataagtacctgattgtggtgaccgacgggcaccccctggagggctacaaggaaccctgtggggggctggaggatgctgtgaacgaggccaagcacctgggcgtcaaagtcttctcggtggccatcacacccgaccacctggagccgcgtctgagcatcatcgccacggaccacacgtaccggcgcaacttcacggcggctgactggggccagagccgcgacgcagaggaggccatcagccagaccatcgacaccatcgtggacatgatcaaaaataacgtggagcaagtgtgctgctccttcgaatgccagcctgcaagaggacctccggggctccggggcgaccccggctttgagggagaacgaggcaagccggggctcccaggagagaagggagaagccggagatcctggaagacccggggacctcggacctgttgggtaccagggaatgaagggagaaaaagggagccgtggggagaagggctccaggggacccaagggctacaagggagagaagggcaagcgtggcatcgacggggtggacggcgtgaagggggagatggggtacccaggcctgccaggctgcaagggctcgcccgggtttgacggcattcaaggaccccctggccccaagggagaccccggtgcctttggactgaaaggagaaaagggcgagcctggagctgacggggaggcggggagaccagggagctcgggaccatctggagacgagggccagccgggagagcctgggccccccggagagaaaggagaggcgggcgacgaggggaacccaggacctgacggtgcccccggggagcggggtggccctggagagagaggaccacgggggaccccaggcacgcggggaccaagaggagaccctggtgaagctggcccgcagggtgatcagggaagagaaggccccgttggtgtccctggagacccgggcgaggctggccctatcggacctaaaggctaccgaggcgatgagggtcccccagggtccgagggtgccagaggagccccaggacctgccggaccccctggagacccggggctgatgggtgaaaggggagaagacggccccgctggaaatggcaccgagggcttccccggcttccccgggtatccgggcaacaggggcgctcccgggataaacggcacgaagggctaccccggcctcaagggggacgagggagaagccggggaccccggagacgataacaacgacattgcaccccgaggagtcaaaggagcaaaggggtaccggggtcccgagggcccccagggacccccaggacaccaaggaccgcctgggccggacgaatgcgagattttggacatcatcatgaaaatgtgctcctgcagaatgcaagtgcggccccatcgacctcctgttcgtgctggacagctcagagagcattggcctgcagaacttcgagagccacctgttccgtgtccccagctacca

SEQ ID NO: 6428 - DNA, 3461 bp, Homo sapiens
  source 1..3461: mol_type = unassigned DNA
cggccgcggttccctccctgctgcttactcggcgcccgcgcctcgggccgtcgggagcggagcctcctcgggaccaggacttcagggccacaggtgctgccaagatgctccagggcacctgctccgtgctcctgctctggggaatcctgggggccatccaggcccagcagcaggaggtcatctcgccggacactaccgagagaaacaacaactgcccagagaagaccgactgccccatccacgtgtacttcgtgctggacacctcggagagcgtcaccatgcagtcccccacggacatcctgctcttccacatgaagcagttcgtgccgcagttcatcagccagctgcagaacgagttctacctggaccaggtggcgctgagctggcgctacggcggcctgcacttctctgaccaggtggaggtgttcagcccaccgggcagcgaccgggcctccttcatcaagaacctgcagggcatcagctccttccgccgcggcaccttcaccgactgcgcgctggccaacatgacggagcagatccggcaggaccgcagcaagggcaccgtccacttcgccgtggtcatcaccgacggccacgtcaccggcagcccctgcgggggcatcaagctgcaggccgagcgggcccgcgaggagggcatccggctcttcgccgtggcccccaaccagaacctgaaggagcagggcctgcgggacatcgccagcacgccgcacgagctctaccgcaacgactacgccaccatgctgcccgactccaccgagatcgaccaggacaccatcaaccgcatcatcaaggtcatgaaacacgaagcctacggagagtgctacaaggtgagctgcctggaaatccctgggccctctggccccaagggctaccgtggacagaagggtgccaagggcaacatgggtgagccgggagagcctggccagaagggaagacagggagacccgggcatcgaaggccccattggattcccaggacccaagggcgttcctggcttcaaaggagagaagggtgaatttggagccgacggtcgcaagggggcccctggcctggctggcaagaacgggaccgatggacagaagggcaagctggggcgcatcggacctcctggctgcaagggagaccctggaaaccggggccccgacggttacccgggggaagcagggagtccaggggagcgaggagaccaaggcggcaagggggaccctggccgcccaggacgcagagggcccccgggagaaatcggggccaagggaagcaaggggtatcaaggcaacagtggagccccaggaagtcctggtgtgaaaggagccaagggcgggcctgggccccgcggacccaaaggcgagccggggcgcaggggagaccccggcaccaagggcagcccaggcagcgatggccccaagggggagaagggggaccctggccctgaggggccccgcggcctggctggagaggttggcaacaaaggagccaagggagaccgaggcttgcctggacccagaggcccccagggagctcttggggagcccggaaagcagggatctcggggagaccccggtgatgcaggaccccgtggagactcaggacagccaggccccaagggagaccccggcaggcctggattcagctacccaggaccccgaggagcacccggagaaaaaggcgagcccggcccacgcggccccgagggaggccgaggcgactttggcttgaaaggagaacctgggaggaaaggagagaaaggagagcctgcggatcctggtccccctggtgagccaggccctcgggggccaagaggagtcccaggacccgagggtgagcccggcccccctggagaccccggtctcacggagtgtgacgtcatgacctacgtgagggagacctgcgggtgctgcgactgtgagaagcgctgtggcgccctggacgtggtcttcgtcatcgacagctccgagagcattgggtacaccaacttcacactggagaagaacttcgtcatcaacgtggtcaacaggctgggtgccatcgctaaggaccccaagtccgagacagggacgcgtgtgggcgtggtgcagtacagccacgagggcacctttgaggccatccagctggacgacgaacgtatcgactccctgtcgagcttcaaggaggctgtcaagaacctcgagtggattgcgggcggcacctggacaccctcagccctcaagtttgcctacgaccgcctcatcaaggagagccggcgccagaagacacgtgtgtttgcggtggtcatcacggacgggcgccacgaccctcgggacgatgacctcaacttgcgggcgctgtgcgaccgcgacgtcacagtgacggccatcggcatcggggacatgttccacgagaagcacgagagtgaaaacctctactccatcgcctgcgacaagccacagcaggtgcgcaacatgacgctgttctccgacctggtcgctgagaagttcatcgatgacatggaggacgtcctctgcccggaccctcagatcgtgtgcccagaccttccctgccaaacagagctgtccgtggcacagtgcacgcagcggcccgtggacatcgtcttcctgctggacggctccgagcggctgggtgagcagaacttccacaaggcccggcgcttcgtggagcaggtggcgcggcggctgacgctggcccggagggacgacgaccctctcaacgcacgcgtggcgctgctgcagtttggtggccccggcgagcagcaggtggccttcccgctgagccacaacctcacggccatccacgaggcgctggagaccacacaatacctgaactccttctcgcacgtgggcgcaggcgtggtgcacgccatcaatgccatcgtgcgcagcccgcgtggcggggcccggaggcacgcagagctgtccttcgtgttcctcacggacggcgtcacgggcaacgacagtctgcacgagtcggcgcactccatgcgcaagcagaacgtggtacccaccgtgctggccttgggcagcgacgtggacatggacgtgctcaccacgctcagcctgggtgaccgcgccgccgtgttccacgagaaggactatgacagcctggcgcaacccggcttcttcgaccgcttcatccgctggatctgctagcgccgccgcccgggccccgcagtcgagggtcgtgagcccaccccgtccatggtgctaagcgggcccgggtcccacacggccagcaccgctgctcactcggacgacgccctgggcctgcacctctccagctcctcccacggggtccccgtagccccggcccccgcccagccccaggtctccccaggccctccgcaggctgcccggcctccctccccctgcagccatcccaaggctcctgacctacctggcccctgagctctggagcaagccctgacccaataaaggctttgaacccat

SEQ ID NO: 6429 - DNA, 3446 bp, Homo sapiens
  source 1..3446: mol_type = unassigned DNA
gcttactcggcgcccgcgcctcgggccgtcgggagcggagcctcctcgggaccaggacttcagggccacaggtgctgccaagatgctccagggcacctgctccgtgctcctgctctggggaatcctgggggccatccaggcccagcagcaggaggtcatctcgccggacactaccgagagaaacaacaactgcccagagaagaccgactgccccatccacgtgtacttcgtgctggacacctcggagagcgtcaccatgcagtcccccacggacatcctgctcttccacatgaagcagttcgtgccgcagttcatcagccagctgcagaacgagttctacctggaccaggtggcgctgagctggcgctacggcggcctgcacttctctgaccaggtggaggtgttcagcccaccgggcagcgaccgggcctccttcatcaagaacctgcagggcatcagctccttccgccgcggcaccttcaccgactgcgcgctggccaacatgacggagcagatccggcaggaccgcagcaagggcaccgtccacttcgccgtggtcatcaccgacggccacgtcaccggcagcccctgcgggggcatcaagctgcaggccgagcgggcccgcgaggagggcatccggctcttcgccgtggcccccaaccagaacctgaaggagcagggcctgcgggacatcgccagcacgccgcacgagctctaccgcaacgactacgccaccatgctgcccgactccaccgagatcgaccaggacaccatcaaccgcatcatcaaggtcatgaaacacgaagcctacggagagtgctacaaggtgagctgcctggaaatccctgggccctctggccccaagggctaccgtggacagaagggtgccaagggcaacatgggtgagccgggagagcctggccagaagggaagacagggagacccgggcatcgaaggccccattggattcccaggacccaagggcgttcctggcttcaaaggagagaagggtgaatttggagccgacggtcgcaagggggcccctggcctggctggcaagaacgggaccgatggacagaagggcaagctggggcgcatcggacctcctggctgcaagggagaccctggaaaccggggccccgacggttacccgggggaagcagggagtccaggggagcgaggagaccaaggcggcaagggggaccctggccgcccaggacgcagagggcccccgggagaaatcggggccaagggaagcaaggggtatcaaggcaacagtggagccccaggaagtcctggtgtgaaaggagccaagggcgggcctgggccccgcggacccaaaggcgagccggggcgcaggggagaccccggcaccaagggcagcccaggcagcgatggccccaagggggagaagggggaccctggccctgaggggccccgcggcctggctggagaggttggcaacaaaggagccaagggagaccgaggcttgcctggacccagaggcccccagggagctcttggggagcccggaaagcagggatctcggggagaccccggtgatgcaggaccccgtggagactcaggacagccaggccccaagggagaccccggcaggcctggattcagctacccaggaccccgaggagcacccggagaaaaaggcgagcccggcccacgcggccccgagggaggccgaggcgactttggcttgaaaggagaacctgggaggaaaggagagaaaggagagcctgcggatcctggtccccctggtgagccaggccctcgggggccaagaggagtcccaggacccgagggtgagcccggcccccctggagaccccggtctcacggagtgtgacgtcatgacctacgtgagggagacctgcgggtgctgcgactgtgagaagcgctgtggcgccctggacgtggtcttcgtcatcgacagctccgagagcattgggtacaccaacttcacactggagaagaacttcgtcatcaacgtggtcaacaggctgggtgccatcgctaaggaccccaagtccgagacagggacgcgtgtgggcgtggtgcagtacagccacgagggcacctttgaggccatccagctggacgacgaacgtatcgactccctgtcgagcttcaaggaggctgtcaagaacctcgagtggattgcgggcggcacctggacaccctcagccctcaagtttgcctacgaccgcctcatcaaggagagccggcgccagaagacacgtgtgtttgcggtggtcatcacggacgggcgccacgaccctcgggacgatgacctcaacttgcgggcgctgtgcgaccgcgacgtcacagtgacggccatcggcatcggggacatgttccacgagaagcacgagagtgaaaacctctactccatcgcctgcgacaagccacagcaggtgcgcaacatgacgctgttctccgacctggtcgctgagaagttcatcgatgacatggaggacgtcctctgcccggaccctcagatcgtgtgcccagaccttccctgccaaacaggtttggacggagctgttttgtgctgaaaggttttctcggggtccgtggtgtcccccaaaggtgccaccgtgcgggtctcctagctccctgccagcttcctgtccctgtgctcactgcccccacgcctcctgccaaggccgagccacacacccgctccacctgcatttcctctaccgactcgccagcccaaatgccgctcttcactctggcctcgctgagcggctgcccgaggaggagctctaggccgacgcccaccgcaggccttacagtcttctctggacgctcccttgcagatgcaccgtggcctggcggcgagcccccggtcaccttcctccgcacggaagaggggccggacgccaccttccccaggaccattcccctgatccaacagttgctaaacgccacggagctcacgcaggacccggccgcctactcccagctggtggccgtgctggtctacaccgccgagcgggccaagttcgccaccggggtagagcggcaggactggatggagctgttcattgacacctttaagctggtgcacagggacatcgtgggggaccccgagaccgcgctggccctctgctaaagcccgggcacccgcccagccgggctgggccctccctgccacactagcttcccagggctgcccccgacaggctggctctcagtggaggccagagatctggaatcggggtcagcggggctacagtccttccaggggctctggggcagctcccagcctcttcccatgctggtggccaccgtgtcccttgctgcggctgcatcttccagtctctcctccgtcttcctgtggccgctctctttataagaaccctggtcattgaatttaaggcccaccccaagtccagaatgacctcgcaagacccttaactcactccc

SEQ ID NO: 6430 - DNA, 3153 bp, Homo sapiens
  source 1..3153: mol_type = unassigned DNA
gcttactcggcgcccgcgcctcgggccgtcgggagcggagcctcctcgggaccaggacttcagggccacaggtgctgccaagatgctccagggcacctgctccgtgctcctgctctggggaatcctgggggccatccaggcccagcagcaggaggtcatctcgccggacactaccgagagaaacaacaactgcccagagaagaccgactgccccatccacgtgtacttcgtgctggacacctcggagagcgtcaccatgcagtcccccacggacatcctgctcttccacatgaagcagttcgtgccgcagttcatcagccagctgcagaacgagttctacctggaccaggtggcgctgagctggcgctacggcggcctgcacttctctgaccaggtggaggtgttcagcccaccgggcagcgaccgggcctccttcatcaagaacctgcagggcatcagctccttccgccgcggcaccttcaccgactgcgcgctggccaacatgacggagcagatccggcaggaccgcagcaagggcaccgtccacttcgccgtggtcatcaccgacggccacgtcaccggcagcccctgcgggggcatcaagctgcaggccgagcgggcccgcgaggagggcatccggctcttcgccgtggcccccaaccagaacctgaaggagcagggcctgcgggacatcgccagcacgccgcacgagctctaccgcaacgactacgccaccatgctgcccgactccaccgagatcgaccaggacaccatcaaccgcatcatcaaggtcatgaaacacgaagcctacggagagtgctacaaggtgagctgcctggaaatccctgggccctctggccccaagggctaccgtggacagaagggtgccaagggcaacatgggtgagccgggagagcctggccagaagggaagacagggagacccgggcatcgaaggccccattggattcccaggacccaagggcgttcctggcttcaaaggagagaagggtgaatttggagccgacggtcgcaagggggcccctggcctggctggcaagaacgggaccgatggacagaagggcaagctggggcgcatcggacctcctggctgcaagggagaccctggaaaccggggccccgacggttacccgggggaagcagggagtccaggggagcgaggagaccaaggcggcaagggggaccctggccgcccaggacgcagagggcccccgggagaaatcggggccaagggaagcaaggggtatcaaggcaacagtggagccccaggaagtcctggtgtgaaaggagccaagggcgggcctgggccccgcggacccaaaggcgagccggggcgcaggggagaccccggcaccaagggcagcccaggcagcgatggccccaagggggagaagggggaccctggccctgaggggccccgcggcctggctggagaggttggcaacaaaggagccaagggagaccgaggcttgcctggacccagaggcccccagggagctcttggggagcccggaaagcagggatctcggggagaccccggtgatgcaggaccccgtggagactcaggacagccaggccccaagggagaccccggcaggcctggattcagctacccaggaccccgaggagcacccggagaaaaaggcgagcccggcccacgcggccccgagggaggccgaggcgactttggcttgaaaggagaacctgggaggaaaggagagaaaggagagcctgcggatcctggtccccctggtgagccaggccctcgggggccaagaggagtcccaggacccgagggtgagcccggcccccctggagaccccggtctcacggagtgtgacgtcatgacctacgtgagggagacctgcgggtgctgcgactgtgagaagcgctgtggcgccctggacgtggtcttcgtcatcgacagctccgagagcattgggtacaccaacttcacactggagaagaacttcgtcatcaacgtggtcaacaggctgggtgccatcgctaaggaccccaagtccgagacagggacgcgtgtgggcgtggtgcagtacagccacgagggcacctttgaggccatccagctggacgacgaacgtatcgactccctgtcgagcttcaaggaggctgtcaagaacctcgagtggattgcgggcggcacctggacaccctcagccctcaagtttgcctacgaccgcctcatcaaggagagccggcgccagaagacacgtgtgtttgcggtggtcatcacggacgggcgccacgaccctcgggacgatgacctcaacttgcgggcgctgtgcgaccgcgacgtcacagtgacggccatcggcatcggggacatgttccacgagaagcacgagagtgaaaacctctactccatcgcctgcgacaagccacagcaggtgcgcaacatgacgctgttctccgacctggtcgctgagaagttcatcgatgacatggaggacgtcctctgcccggaccctcagatcgtgtgcccagaccttccctgccaaacagatgcaccgtggcctggcggcgagcccccggtcaccttcctccgcacggaagaggggccggacgccaccttccccaggaccattcccctgatccaacagttgctaaacgccacggagctcacgcaggacccggccgcctactcccagctggtggccgtgctggtctacaccgccgagcgggccaagttcgccaccggggtagagcggcaggactggatggagctgttcattgacacctttaagctggtgcacagggacatcgtgggggaccccgagaccgcgctggccctctgctaaagcccgggcacccgcccagccgggctgggccctccctgccacactagcttcccagggctgcccccgacaggctggctctcagtggaggccagagatctggaatcggggtcagcggggctacagtccttccaggggctctggggcagctcccagcctcttcccatgctggtggccaccgtgtcccttgctgcggctgcatcttccagtctctcctccgtcttcctgtggccgctctctttataagaaccctggtcattgaatttaaggcccaccccaagtccagaatgacctcgcaagacccttaactcactccc

SEQ ID NO: 6431 - DNA, 3101 bp, Homo sapiens
  source 1..3101: mol_type = unassigned DNA
gacttcagggccacaggtgctgccaagatgctccagggcacctgctccgtgctcctgctctggggaatcctgggggccatccaggcccagcagcaggaggtcatctcgccggacactaccgagagaaacaacaactgcccagagaagaccgactgccccatccacgtgtacttcgtgctggacacctcggagagcgtcaccatgcagtcccccacggacatcctgctcttccacatgaagcagttcgtgccgcagttcatcagccagctgcagaacgagttctacctggaccaggtggcgctgagctggcgctacggcggcctgcacttctctgaccaggtggaggtgttcagcccaccgggcagcgaccgggcctccttcatcaagaacctgcagggcatcagctccttccgccgcggcaccttcaccgactgcgcgctggccaacatgacggagcagatccggcaggaccgcagcaagggcaccgtccacttcgccgtggtcatcaccgacggccacgtcaccggcagcccctgcgggggcatcaagctgcaggccgagcgggcccgcgaggagggcatccggctcttcgccgtggcccccaaccagaacctgaaggagcagggcctgcgggacatcgccagcacgccgcacgagctctaccgcaacgactacgccaccatgctgcccgactccaccgagatcgaccaggacaccatcaaccgcatcatcaaggtcatgaaacacgaagcctacggagagtgctacaaggtgagctgcctggaaatccctgggccctctggccccaagggctaccgtggacagaagggtgccaagggcaacatgggtgagccgggagagcctggccagaagggaagacagggagacccgggcatcgaaggccccattggattcccaggacccaagggcgttcctggcttcaaaggagagaagggtgaatttggagccgacggtcgcaagggggcccctggcctggctggcaagaacgggaccgatggacagaagggcaagctggggcgcatcggacctcctggctgcaagggagaccctggaaaccggggccccgacggttacccgggggaagcagggagtccaggggagcgaggagaccaaggcggcaagggggaccctggccgcccaggacgcagagggcccccgggagaaatcggggccaagggaagcaaggggtatcaaggcaacagtggagccccaggaagtcctggtgtgaaaggagccaagggcgggcctgggccccgcggacccaaaggcgagccggggcgcaggggagaccccggcaccaagggcagcccaggcagcgatggccccaagggggagaagggggaccctggccctgaggggccccgcggcctggctggagaggttggcaacaaaggagccaagggagaccgaggcttgcctggacccagaggcccccagggagctcttggggagcccggaaagcagggatctcggggagaccccggtgatgcaggaccccgtggagactcaggacagccaggccccaagggagaccccggcaggcctggattcagctacccaggaccccgaggagcacccggagaaaaaggcgagcccggcccacgcggccccgagggaggccgaggcgactttggcttgaaaggagaacctgggaggaaaggagagaaaggagagcctgcggatcctggtccccctggtgagccaggccctcgggggccaagaggagtcccaggacccgagggtgagcccggcccccctggagaccccggtctcacggagtgtgacgtcatgacctacgtgagggagacctgcgggtgctgcgactgtgagaagcgctgtggcgccctggacgtggtcttcgtcatcgacagctccgagagcattgggtacaccaacttcacactggagaagaacttcgtcatcaacgtggtcaacaggctgggtgccatcgctaaggaccccaagtccgagacagggacgcgtgtgggcgtggtgcagtacagccacgagggcacctttgaggccatccagctggacgacgaacgtatcgactccctgtcgagcttcaaggaggctgtcaagaacctcgagtggattgcgggcggcacctggacaccctcagccctcaagtttgcctacgaccgcctcatcaaggagagccggcgccagaagacacgtgtgtttgcggtggtcatcacggacgggcgccacgaccctcgggacgatgacctcaacttgcgggcgctgtgcgaccgcgacgtcacagtgacggccatcggcatcggggacatgttccacgagaagcacgagagtgaaaacctctactccatcgcctgcgacaagccacagcaggtgcgcaacatgacgctgttctccgacctggtcgctgagaagttcatcgatgacatggaggacgtcctctgcccggaccctcagatcgtgtgcccagaccttccctgccaaacagatgcaccgtggcctggcggcgagcccccggtcaccttcctccgcacggaagaggggccggacgccaccttccccaggaccattcccctgatccaacagttgctaaacgccacggagctcacgcaggacccggccgcctactcccagctggtggccgtgctggtctacaccgccgagcgggccaagttcgccaccggggtagagcggcaggactggatggagctgttcattgacacctttaagctggtgcacagggacatcgtgggggaccccgagaccgcgctggccctctgctaaagcccgggcacccgcccagccgggctgggccctccctgccacactagcttcccagggctgcccccgacaggctggctctcagtggaggccagagatctggaatcggggtcagcggggctacagtccttccaggggctctggggcagctcccagcctcttcccatgctggtggccaccgtgtcccttgctgcggctgcatcttccagtctctcctccgtcttcctgtggccgctctctttataagaaccctggtcattgaatttaaggcccaccccaagtccagaatgacctcgcaagacccttaactcactcccgtc

SEQ ID NO: 6432 - DNA, 3430 bp, Homo sapiens
  source 1..3430: mol_type = unassigned DNA
ctgggggtgtctgagcgacccccacccctgttgcaggacttcagggccacaggtgctgccaagatgctccagggcacctgctccgtgctcctgctctggggaatcctgggggccatccaggcccagcagcaggaggtcatctcgccggacactaccgagagaaacaacaactgcccagagaagaccgactgccccatccacgtgtacttcgtgctggacacctcggagagcgtcaccatgcagtcccccacggacatcctgctcttccacatgaagcagttcgtgccgcagttcatcagccagctgcagaacgagttctacctggaccaggtggcgctgagctggcgctacggcggcctgcacttctctgaccaggtggaggtgttcagcccaccgggcagcgaccgggcctccttcatcaagaacctgcagggcatcagctccttccgccgcggcaccttcaccgactgcgcgctggccaacatgacggagcagatccggcaggaccgcagcaagggcaccgtccacttcgccgtggtcatcaccgacggccacgtcaccggcagcccctgcgggggcatcaagctgcaggccgagcgggcccgcgaggagggcatccggctcttcgccgtggcccccaaccagaacctgaaggagcagggcctgcgggacatcgccagcacgccgcacgagctctaccgcaacgactacgccaccatgctgcccgactccaccgagatcgaccaggacaccatcaaccgcatcatcaaggtcatgaaacacgaagcctacggagagtgctacaaggtgagctgcctggaaatccctgggccctctggccccaagggctaccgtggacagaagggtgccaagggcaacatgggtgagccgggagagcctggccagaagggaagacagggagacccgggcatcgaaggccccattggattcccaggacccaagggcgttcctggcttcaaaggagagaagggtgaatttggagccgacggtcgcaagggggcccctggcctggctggcaagaacgggaccgatggacagaagggcaagctggggcgcatcggacctcctggctgcaagggagaccctggaaaccggggccccgacggttacccgggggaagcagggagtccaggggagcgaggagaccaaggcggcaagggggaccctggccgcccaggacgcagagggcccccgggagaaatcggggccaagggaagcaaggggtatcaaggcaacagtggagccccaggaagtcctggtgtgaaaggagccaagggcgggcctgggccccgcggacccaaaggcgagccggggcgcaggggagaccccggcaccaagggcagcccaggcagcgatggccccaagggggagaagggggaccctggccctgaggggccccgcggcctggctggagaggttggcaacaaaggagccaagggagaccgaggcttgcctggacccagaggcccccagggagctcttggggagcccggaaagcagggatctcggggagaccccggtgatgcaggaccccgtggagactcaggacagccaggccccaagggagaccccggcaggcctggattcagctacccaggaccccgaggagcacccggagaaaaaggcgagcccggcccacgcggccccgagggaggccgaggcgactttggcttgaaaggagaacctgggaggaaaggagagaaaggagagcctgcggatcctggtccccctggtgagccaggccctcgggggccaagaggagtcccaggacccgagggtgagcccggcccccctggagaccccggtctcacggagtgtgacgtcatgacctacgtgagggagacctgcgggtgctgcgactgtgagaagcgctgtggcgccctggacgtggtcttcgtcatcgacagctccgagagcattgggtacaccaacttcacactggagaagaacttcgtcatcaacgtggtcaacaggctgggtgccatcgctaaggaccccaagtccgagacagggacgcgtgtgggcgtggtgcagtacagccacgagggcacctttgaggccatccagctggacgacgaacgtatcgactccctgtcgagcttcaaggaggctgtcaagaacctcgagtggattgcgggcggcacctggacaccctcagccctcaagtttgcctacgaccgcctcatcaaggagagccggcgccagaagacacgtgtgtttgcggtggtcatcacggacgggcgccacgaccctcgggacgatgacctcaacttgcgggcgctgtgcgaccgcgacgtcacagtgacggccatcggcatcggggacatgttccacgagaagcacgagagtgaaaacctctactccatcgcctgcgacaagccacagcaggtgcgcaacatgacgctgttctccgacctggtcgctgagaagttcatcgatgacatggaggacgtcctctgcccggaccctcagatcgtgtgcccagaccttccctgccaaacaggtttggacggagctgttttgtgctgaaaggttttctcggggtccgtggtgtcccccaaaggtgccaccgtgcgggtctcctagctccctgccagcttcctgtccctgtgctcactgcccccacgcctcctgccaaggccgagccacacacccgctccacctgcatttcctctaccgactcgccagcccaaatgccgctcttcactctggcctcgctgagcggctgcccgaggaggagctctaggccgacgcccaccgcaggccttacagtcttctctggacgctcccttgcagatgcaccgtggcctggcggcgagcccccggtcaccttcctccgcacggaagaggggccggacgccaccttccccaggaccattcccctgatccaacagttgctaaacgccacggagctcacgcaggacccggccgcctactcccagctggtggccgtgctggtctacaccgccgagcgggccaagttcgccaccggggtagagcggcaggactggatggagctgttcattgacacctttaagctggtgcacagggacatcgtgggggaccccgagaccgcgctggccctctgctaaagcccgggcacccgcccagccgggctgggccctccctgccacactagcttcccagggctgcccccgacaggctggctctcagtggaggccagagatctggaatcggggtcagcggggctacagtccttccaggggctctggggcagctcccagcctcttcccatgctggtggccaccgtgtcccttgctgcggctgcatcttccagtctctcctccgtcttcctgtggccgctctctttataagaaccctggtcattgaatttaaggcccaccccaagtccagaatgacctcgcaagacccttaactcactcccgtc

SEQ ID NO: 6433 - DNA, 919 bp, Homo sapiens
  source 1..919: mol_type = unassigned DNA
ggcggctccccagggcggcgggacccgggctgacagcgacccgcagcccctgccgggccgcccacacccgccctgggactccgccggggcgctggtggaaccgctgggcctgggtctccactgctggcaaccgaacggatcggccctctgtggagccgcaggtgtgcgggcgagcggcgcccatccgggctgtgccagcagaaccccggtgcccgcgcctaggacgcccctggagaagggaccttccctttggggtcggaacccagaaaggaggggcctgcgatccgcggagctccttgttcttgggataacacagctctggcttggaggcccccttgcacttcgactctggacttcagggccacaggtgctgccaagatgctccagggcacctgctccgtgctcctgctctggggaatcctgggggccatccaggcccagcagcaggaggtcatctcgccggacactaccgagagaaacaacaactgcccagagaagaccgactgccccatccacgtgtacttcgtgctggacacctcggagagcgtcaccatgcagtcccccacggacatcctgctcttccacatgaagcagttcgtgccgcagttcatcagccagctgcagaacgagttctacctggaccaggtggcgctgagctggcgctacggcggcctgcacttctctgaccaggtggaggtgttcagcccaccgggcagcgaccgggcctccttcatcaagaacctgcagggcatcagctccttccgccgcggcaccttcaccgactgcgcgctggccaacatgacggagcagatccggcaggaccgcagcaagggcaccgtccacttcgccgtggtcatcaccgacggccacgtcaccggcagcccctgcgggggcatcaagctgcaggccgagcgggccc

SEQ ID NO: 6434 - DNA, 5705 bp, Homo sapiens
  source 1..5705: mol_type = unassigned DNA
agagaagagtgtccagctcctccagaggctgcccgcccgccgctccttccctgcccacctactatgaggagcagctcctcccacctgcccataaaagccaagtgcatgttaccagcagcggatcacagcccttccccgatcctctccgtgggagccagcgagcctctctccctgatcttacgtgctcaagggagctcacacgttcaccaactcacccttgaagtcatctcaagaacaaaagacaactgaaagaagctgttgtgaaggcagagcagcatctgctgaagagacagaaaccagccccagaggtgtcacaggaaggcaccagcaaggacattggtctttgatttgattcagcagtcctgtcaagtataaatgtgatggctgtgctgcctggccctctgcagctgctgggagtgctgcttaccatttccctgagttccatcaggctcattcaggctggtgcctactatgggatcaagccgctgccacctcaaattcctcctcagatgccaccacaaattccacaataccagcccctgggtcagcaagtacctcacatgcctttggccaaagatggccttgccatgggcaaggagatgccccacttgcagtatggcaaagagtatccacacctaccccaatatatgaaggaaattcaaccggcgccaagaatgggcaaggaagccgtacccaagaaaggcaaagaaataccattagccagtttacgaggggaacaaggtccccgtggagagcctggcccaagaggaccacctgggccccctggtttgccaggtcatgggatacctggaattaaaggaaaaccagggccacagggatatccaggagttggaaagccaggtatgcctggaatgccagggaagccaggagccatgggcatgcctggggcaaaaggagaaattggacagaaaggggaaattgggcctatggggatcccaggaccacaaggacctccagggcctcatggacttcctggcattgggaagccaggtgggccagggttaccagggcaaccaggaccaaagggtgatcgaggacccaaaggactaccaggacctcaaggccttcggggtcctaaaggagacaagggcttcgggatgccaggtgcgccaggtgtaaaggggcctccagggatgcacggccctcccggccctgttggactgccaggagtgggcaaaccaggagtgacaggcttccctgggccccagggccccctgggaaagccaggggctccaggagaacctgggccacaaggccctattggggtaccgggggttcaaggacctcctgggatacccggaattggaaagccaggccaggatgggatcccaggccagccaggatttccaggtggcaaaggggagcaaggactgccagggctaccaggacccccaggccttccagggattgggaaaccaggcttcccaggacccaaaggtgaccggggcatgggaggtgttcctggggctcttggaccaagaggggagaaaggaccaataggtgccccaggaatagggggtcctccaggagagccaggcctgcctggaatcccaggtcctatgggccctccaggtgctattggttttcctggacccaaaggagaaggtgggattgtagggccacaggggccaccaggtcccaagggtgagccagggcttcaaggcttcccaggaaagccaggtttccttggtgaagtagggcctcctggcatgaggggtttgccaggtcccatagggcccaagggggaagctgggcaaaaaggtgtaccaggactccctggtgttccagggcttctcggacctaagggagagccaggaatcccaggggatcagggtttacagggccccccaggtatcccagggattgggggccctagtggccccattggaccacctgggattccaggccccaaaggggagccgggcctcccagggccccctgggttccctggtatagggaaacccggagtggcaggacttcatggccccccagggaagcctggtgcccttggtcctcaaggccagcctggccttccaggacccccaggccctccaggacctccaggacccccagctgtgatgccccctacaccaccaccccagggagagtatctgccagatatggggctgggaattgatggcgtgaaacccccccatgcctacggggctaagaaaggcaagaatggagggccagcctatgagatgcctgcatttaccgccgagctaaccgcacctttcccaccggtgggggccccagtgaagtttaacaaactgctgtataacggcagacagaactacaacccgcagacaggcatcttcacctgtgaggtccctggtgtctactactttgcataccacgttcactgcaaggggggcaacgtgtgggttgctctattcaagaacaacgagcccgtgatgtacacgtacgacgagtacaaaaagggcttcctggaccaggcatctgggagtgcagtgctgctgctcaggcccggagaccgggtgttcctccagatgccctcagaacaggctgcaggactgtatgccgggcagtatgtccactcctccttttcaggatatttattgtatcccatgtaaaaacaaaaaaacaaaaaacaaagaaaagaaagagattttatagaagaaaatgacacaccaaaaaatccaaatgaaaaacataattgcttcaaaacacttacacagttggaaagttatatgtaagtgaaaatttggaccattgtgtacaaataaaaactaagatgcatgtttaatactccacacagcagcctgtaattgcgaatgatgggatagagttatgtatcaagtactgacacttggttgtacccactggaatcatattagctgttttatgttatatgcttccacagtaacctgcttattcagatcagtcaaaatatatcagtatgaaagatcatagctaatgaaaggcactcactcatattgtttactttaaaatatttataaatatgccttaaagaaatacaaatgataacaattacataccgtatttacttgcttaatttcctctgtatttgtgtagatactttgacatggaatatatggtggggagacccgtagtgttaccgccccagtgggagggggccctggggaccctggtaatgctttagtcaaagggatatctctcttgtatcagaggctgtgtcttttagtaacaggagtcctcgtcagaattgcgtgtctgttgtctctaaaagaatgggtgaaccaatcggcctttgtgaatttattcagtgccttctctgtaccaagcactgggtaaggcacttttgtggagcattagacagtaaccctcaaggagctagagaaccggatgggagacatgagcagtaattaactcacttgttccccagagtttctatttgttttgattttctttttctgtgacttattttcctattttctttcctccatgtaattttcactatggcccaactaatataaacacctggaaattacaaggaaaaaaaattcttcctctaataactttccaaatttgtggaatatttatttgtaatagcagttatcagttatgcttatatagcattaaaaattctcctcctttgactacacacacaaccacagtgtggttctaatcatggagatatcagtaatttttagtaactgaattttgaggacatttctctgtttagcatgtatgcaaactgatatgtaatctgaggttccaaagtcaatttttttcttttttttttgagatggagtcttactctgtcacccaggctggagtgcagtagcacgatcttggcttactgcaacctctacctcctaggttcaagcaattgtcctgtctcagcctcccgagtactgggactactgtcttgcgccaccatgcctggctaatttttgtatatttagtaaagatgggttttcgccatgttggccaggctggtctcaaactcctggcctcaagtgatgcacctgcctcagccttccaaagtgctgggattacaggcatgagccaccgtgcccggccaaagtcagctttcaaaatccaagccataattggtgaggggggagtttcagaattacatagaaaaattaatatttgaaaaaataattctgaaatttcgaatttaaaaacagatgtgctgcttctgggtgtaggtagtaaaagtataggaaaagaactgtttccttagaagcggactgtggaagggctatgtagaatgtcaaagggcaacaagagcctgtgtttttaatgtcatcctgtactcggcacaaatcaaaggccaatacaagtctgaaaagcagaaataaatatttttccaggtttttgcttgggcacatactaactgctttgggcattctaatctggtctccaaacaccaaagacccatttcgagcctgctattagcctgctgctgactctatcacttggagcaataatgtggggttatggtggtggaatcttgtatatttttgtcaaaaataaaaccatgagttaaggggatagatatagatggaaaaatacacaaataaatacggtatgaaaacacatggaaatgtgtctttgtcaaatctgaatcattattaccatcacaaaaattcttctcttggccaatatctcatttccctatatagtatacaagcaccatttcttctcaatttttaagaagagaaattagtccattaccacaggggttcttgtcactactaattatacaacaatcttttcccaacaaaaagatgtcctccacaacctttgttttcaaagcagacagcatctatgtggccaaatatactttgggttgttcttgaggatactggttttgggctgatgactatggtgggcagcatggatccattgggctccttctgctaaacagccacattgaaatggtttaaaagcaagtcagatcaggtgatttgtaaaattgtatttatctgtacatgtatgggcttttaattcccaccaagaaagagagaaattatctttttagttaaaaccaaatttcacttttcaaaatatcttccaacttatttattggttgtcactcaattgcctatatatatatatatatgtgtgtgtgtgtgtgtgtgcgcgtgagcgcacgtgtgtgtatgcgtgcgcatgtgtgtgtatgtgtattatcagacataggtttctaacttttagatagaagaggagcaacatctatgccaaatactgtgcattctacaatggtgctaatctcagacctaaatgatactccatttaatttaaaaaagagttttaaataattatctatgtgcctgtatttcccttttgagtgctgcacaacatgttaacatattagtgtaaaagcagatgaaacaaccacgtgttctaaagtctagggattgtgctataatccctatttagttcaaaattaaccagaattcttccatgtgaaatggaccaaactcatattattgttatgtaaatacagagttttaatgcagtatgacatcccacaggggaaaagaatgtctgtagtgggtgactgttatcaaatattttatagaatacaatgaacggtgaacagactggtaacttgtttgagttcccatgacagatttgagacttgtcaatagcaaatcatttttgtatttaaatttttgtactgatttgaaaaacatcattaaatatctttaaaagtatgtttctca

SEQ ID NO: 6435 - DNA, 2596 bp, Homo sapiens
  source 1..2596: mol_type = unassigned DNA
ccgatcctctccgtgggagccagcgagcctctctccctgatcttacgtgctcaagaagctgttgtgaaggcagagcagcatctgctgaagagacagaaaccagccccagaggtgtcacaggaaggcaccagcaaggacattggtctttgatttgattcagcagtcctgtcaagtataaatgtgatggctgtgctgcctggccctctgcagctgctgggagtgctgcttaccatttccctgagttccatcaggctcattcaggctggtgcctactatgggatcaagccgctgccacctcaaattcctcctcagatgccaccacaaattccacaataccagcccctgggtcagcaagtacctcacatgcctttggccaaagatggccttgccatgggcaaggagatgccccacttgcagtatggcaaagagtatccacacctaccccaatatatgaaggaaattcaaccggcgccaagaatgggcaaggaagccgtacccaagaaaggcaaagaaataccattagccagtttacgaggggaacaaggtccccgtggagagcctggcccaagaggaccacctgggccccctggtttgccaggtcatgggatacctggaattaaaggaaaaccagggccacagggatatccaggagttggaaagccaggtatgcctggaatgccagggaagccaggagccatgggcatgcctggggcaaaaggagaaattggacagaaaggggaaattgggcctatggggatcccaggaccacaaggacctccagggcctcatggacttcctggcattgggaagccaggtgggccagggttaccagggcaaccaggaccaaagggtgatcgaggacccaaaggactaccaggacctcaaggccttcggggtcctaaaggagacaagggcttcgggatgccaggtgcgccaggtgtaaaggggcctccagggatgcacggccctcccggccctgttggactgccaggagtgggcaaaccaggagtgacaggcttccctgggccccagggccccctgggaaagccaggggctccaggagaacctgggccacaaggccctattggggtaccgggggttcaaggacctcctgggatacccggaattggaaagccaggccaggatgggatcccaggccagccaggatttccaggtggcaaaggggagcaaggactgccagggctaccaggacccccaggccttccagggattgggaaaccaggcttcccaggacccaaaggtgaccggggcatgggaggtgttcctggggctcttggaccaagaggggagaaaggaccaataggtgccccaggaatagggggtcctccaggagagccaggcctgcctggaatcccaggtcctatgggccctccaggtgctattggttttcctggacccaaaggagaaggtgggattgtagggccacaggggccaccaggtcccaagggtgagccagggcttcaaggcttcccaggaaagccaggtttccttggtgaagtagggcctcctggcatgaggggtttgccaggtcccatagggcccaagggggaagctgggcaaaaaggtgtaccaggactccctggtgttccagggcttctcggacctaagggagagccaggaatcccaggggatcagggtttacagggccccccaggtatcccagggattgggggccctagtggccccattggaccacctgggattccaggccccaaaggggagccgggcctcccagggccccctgggttccctggtatagggaaacccggagtggcaggacttcatggccccccagggaagcctggtgcccttggtcctcaaggccagcctggccttccaggacccccaggccctccaggacctccaggacccccagctgtgatgccccctacaccaccaccccagggagagtatctgccagatatggggctgggaattgatggcgtgaaacccccccatgcctacggggctaagaaaggcaagaatggagggccagcctatgagatgcctgcatttaccgccgagctaaccgcacctttcccaccggtgggggccccagtgaagtttaacaaactgctgtataacggcagacagaactacaacccgcagacaggcatcttcacctgtgaggtccctggtgtctactactttgcataccacgttcactgcaaggggggcaacgtgtgggttgctctattcaagaacaacgagcccgtgatgtacacgtacgacgagtacaaaaagggcttcctggaccaggcatctgggagtgcagtgctgctgctcaggcccggagaccgggtgttcctccagatgccctcagaacaggctgcaggactgtatgccgggcagtatgtccactcctccttttcaggatatttattgtatcccatgtaaaaacaaaaaaacaaaaaacaaagaaaagaaagagattttatagaagaaaatgacacaccaaaaaatccaaatgaaaaacataattgcttcaaaacacttacacagttggaaagttatatgtaagtgaaaatttggaccattgtgtacaaataaaaactaagatgcatgtttaatactc

SEQ ID NO: 6436 - DNA, 659 bp, Homo sapiens
  source 1..659: mol_type = unassigned DNA
agagaagagtgtccagctcctccagaggctgcccgcccgccgctccttccctgcccacctactatgaggagcagctcctcccacctgcccataaaagccaagtgcatgttaccagcagcggatcacagcccttccccgatcctctccgtgggagccagcgagcctctctccctgatcttacgtgctcaagaagctgttgtgaaggcagagcagcatctgctgaagagacagaaaccagccccagaggtgtcacaggaaggcaccagcaaggacattggtctttgatttgattcagcagtcctgtcaagtataaatgtgatggctgtgctgcctggccctctgcagctgctgggagtgctgcttaccatttccctgagttccatcaggctcattcaggctggtgcctactatgggatcaagccgctgccacctcaaattcctcctcagatgccaccacaaattccacaataccagcccctgggtcagcaagtacctcacatgcctttggccaaagatggccttgccatgggcaaggagatgccccacttgcagtatggcaaagagtatccacacctaccccaatatatgaaggaaattcaaccggcgccaagaatgggcaaggaagccgtacccaagaaaggcaaagaaataccattagc

SEQ ID NO: 6437 - DNA, 2061 bp, Homo sapiens
  source 1..2061: mol_type = unassigned DNA
atggtagcggagcgcacccacaaagcggcagccaccggtgcccgcggccctggggagttgggcgcgcccgggacggtggctctggtggcggcgcgggcggagcgcggcgcacggctgccgagtccagggtcgtgcgggctgctgacgctggccctctgctcgctggcactcagcctgctcgcccactttcggacggccgagctgcaggcccgggtgctgcgcctggaagcggagcgcggggagcagcaaatggagacggctattttgggacgagtcaatcaactgctggacgagaaatggaagctccactcaaggaggcgccgggaggccccaaagacatctccaggatgtaactgcccaccaggacctcctggtcccactggaagacccggactcccaggggacaaaggtgccattgggatgcctggacgtgtggggtcccccggagacgctgggctgtccatcattggtccccgcggcccccctggtcaaccaggaactagaggtttccctggatttccgggtcccattgggctggacggcaaaccgggccacccaggaccaaagggcgacatgggtctgacgggtcccccaggacagccgggaccccagggacaaaaaggagaaaagggtcagtgtggagagtacccacaccggctgctgcctctcctcaattcagtgcgactggctccacccccggtcataaaaaggcggacgttccagggcgaacagagccaggccagcatccaaggtccaccagggcccccaggcccccctggaccaagtggacctctggggcacccaggactgccagggcctatggggccacctggcttacctgggcctcctggaccaaagggagacccagggatccagggctaccacggccggaagggagaacggggcatgccagggatgccaggcaagcatggagccaagggggcgcccggaattgccgtggctgggatgaagggtgagccagggatcccaggaaccaagggtgagaagggggctgaaggctcccctgggcttcctggcctcctggggcagaagggagagaaaggcgatgctggcaactccattggaggaggcagaggggaacctggccctccagggctccctgggcccccagggccaaagggagaagcaggtgtcgatggccaggttggccccccagggcagccaggagacaagggggagcgtggagcagctggagaacagggaccagatggccccaagggctccaagggagaaccagggaaaggagagatggtggattacaatggaaacatcaatgaggctctccaggagatccggacgctggccttgatggggcctcctggtcttcctgggcaaattggcccacctggagctccagggattccaggccagaagggggagattggactgccaggccctccaggacacgatggggaaaagggacctcgcggtaaaccaggagacatgggccctcctggtccccaaggccccccaggaaaggatggacctccaggagtgaagggagaaaacgggcacccagggagcccaggagagaagggggaaaaaggggagacaggacaagcaggctcaccgggagagaaaggagaagccggggagaagggcaatccaggagcagaggttcctgggctgccagggccagaggggcctcccggacctccggggctccaaggtgttcctggaccaaagggggaagcaggactagatggagcaaaaggagagaaaggcttccagggagaaaaaggagaccgtggtcccctgggactacccggtactccaggaccaattggagttccaggcccagcgggaccaaagggcgagaggggcagcaaaggagaccctgggatgacaggaccaacgggagcagctgggcttcctggtttacatggaccacccggggacaagggaaaccggggggagagggggaagaaaggctctagagggcctaaaggggataagggagaccaaggagcgcctggattagatgccccctgcccattgggcgaagatggcttaccagtccaaggctgctggaacaagtga

SEQ ID NO: 6438 - DNA, 3134 bp, Homo sapiens
  source 1..3134: mol_type = unassigned DNA
atatcctcccctgggctgaaggcactcttgtcctccaagcctcccctacagcagtgttcatgggcagctggagcagggctgcctacccattgctactcccaggagctcaggactggctccagacccctggcatctggagcagaagcaacatcaaagcagggattggccaactcccacccctaatgccaaacaggccaggcactgggagcactcagaggcgtgacgaatctcagcctgtctccggctagtgttccctggccagtccgctttgggccctgcctcacaatgacgggctcatcattcagcctcgctcatctgctcatcatttcaggactgctctgttactcggcaggctgcttggcccttcccagcctggatcagaagaagcgtggtggccacaaagcatgctgcctgctgacgcctcctccaccaccactgttcccaccaccattcttcagaggtggccgaagtccgcttctctccccagacatgaagaatctcatgctggaactggagacctcgcagtccccgtgcatgcaaggctcgctaggctcccctgggcctcccggcccccagggtccaccggggcttcctggcaagacaggaccaaagggagaaaagggggagcttggccgaccaggaaggaagggtagacctggccccccaggtgttcctggcatgcctgggcccatcggttggccaggccctgaaggacccaggggtgaaaaaggtgacctgggtatgatgggcttgccagggtcaagaggaccaatgggctccaagggctaccctggatccagaggggaaaagggatccagaggtgaaaagggtgacctgggtcccaaaggagaaaagggtttcccaggatttcctggaatgttggggcagaaaggtgaaatgggtccaaaaggtgaacctgggatagcaggacaccgaggacccacaggaagaccaggaaaacgaggcaagcagggacagaaaggggatagtggagttatgggcccaccaggcaagcctgggccttctggtcaacctggccgtccggggcccccaggccccccacctgcaggacaacttataatgggacccaaaggggaaagaggatttcccgggcctccaggaagatgtctttgtggacccactatgaatgtgaataacccttcctacggggaatctgtgtatgggcccagttccccgcgagttcctgtgatttttgtggtcaacaaccaggaggagcttgagaggctgaacacccaaaacgccattgccttccgcagagaccagagatctctgtacttcaaggacagccttggctggctccccatccagctgacccctttctaccctgtggattacactgcagaccagcacggcacctgtggggatgggctcctgcagcctggggaggagtgtgacgacggtaacagcgatgtgggtgacgactgcatccgctgtcaccgtgcctactgtggagatggtcaccggcatgagggtgtggaggactgtgacggctctgactttggctacctgacatgcgagacctatctccctgggtcatatggagacctgcaatgcacccagtactgctacatcgactccacgccctgccgctacttcacctgagggccgtgaggagaaggtgggctgcgccccacagaactggcagcagcttctccactgtcatcaaactggccatgtcctggccccgtctccaccaacctttgtgtgacaaaaacaaggacaaattcctgctactaagacatgctgttaactcagtctgactggaagaatttaggaccactgcatcctgtcttaatccaaggtactggaaaaccttccacatgcccaacctgagacctgttccccatcgctaccatttggccaaacaaccggctacaatgctcttcctcttctggaatgttgctgacccaggccgtggacttggctgagcactgttagacacacacagacctgcaggctgttttagaatgttttgatctctttggggaatctggagtacaggcctctccgcccctgaccaccgaaacgtgcaggcattctcactcacactgggcagcccgctgtcgggtctctctaggcctatgaaccacaaagcagggaagtgggcacgttctctcggggtggctcacagctttgaacctgccaaaggacccctcgactggccacagcccagcccagcctgacgtggatgtggctgcccaggaaaagacttaactgtgaaaaagtactgagaacccacctgacccaggcttgccccaagcagaggctagagaagaggctcctcttctcagtgtttcccaaaggggcggctcttgtggtttcaaaatctctggcaccatcttgacctcttggctctctctgcactttgccccctgtctcaaaaatgtccctcatgtccatttcctgtccaggagactcatgaggactgtgtgacctgcacaagcccacacctgggcaggctgttggtgtctccttggtccttaggcagatactcccctgagtccccgatctagggccagctgcagagggctctctctaggcagagcgttcctggccagagctctacctctttgcctcctgctgacccctgacagcgtcccgtggcatttctttcatgtctgcatattgcatagccttgtcctcctgtgtgcctgagctcctcccttttcaataagattattagtcgtgcatgtctgtgagctgcctttcatcaccatttttcctgagtagggcttagttttattctggaaagacatctccaaggtgaggtccacccccacagcagacctcaagtagaaattgcccaatttttaccagctggagggacacccttgggtttttgtacgaagctatttaatgagcctgtgtcttggggactcagcaggctggagcttggggcctggtggaccatcacctggtgtctgtaggtggacccggtctcccacaggtgacatcaacctgagggtggcgtctttagagacaggcacatgggcagccctgttcccttcgcctctactgcgaggcctggggagatgttgttttcatgctgcttccaccatcacactggggtttctggatgggaaataaaaaaataaaggcagttcatttcccca

SEQ ID NO: 6439 - DNA, 3147 bp, Homo sapiens
  source 1..3147: mol_type = unassigned DNA
cacacgcacacacacacacacaaacacacgcgcacgcaaacagcagtgaggaagagaaaagcagagataagcaaggctccgcagcagcctcctttctaacttgaccctcgccagaccctggccagcatggttgtcctgaatccaatgactttgggaatttatcttcagcttttcttcctctctatcgtgtctcagccgactttcatcaacagcgttcttccaatctcagcagcccttcccagcctggatcagaagaagcgtggtggccacaaagcatgctgcctgctgacgcctcctccaccaccactgttcccaccaccattcttcagaggtggccgaagtccgcttctctccccagacatgaagaatctcatgctggaactggagacctcgcagtccccgtgcatgcaaggctcgctaggctcccctgggcctcccggcccccagggtccaccggggcttcctggcaagacaggaccaaagggagaaaagggggagcttggccgaccaggaaggaagggtagacctggccccccaggtgttcctggcatgcctgggcccatcggttggccaggccctgaaggacccaggggtgaaaaaggtgacctgggtatgatgggcttgccagggtcaagaggaccaatgggctccaagggctaccctggatccagaggggaaaagggatccagaggtgaaaagggtgacctgggtcccaaaggagaaaagggtttcccaggatttcctggaatgttggggcagaaaggtgaaatgggtccaaaaggtgaacctgggatagcaggacaccgaggacccacaggaagaccaggaaaacgaggcaagcagagttcaagaactccttgcacattaccaagacggcccccagtgccatgtggacaaggcagccggtcacctgtcaccgttgtggctggaaaggagtcccaagcctgcctgctccccagatttgaggaagattacatttcatcagggacagaaaggggatagtggagttatgggcccaccaggcaagcctgggccttctggtcaacctggccgtccggggcccccaggccccccacctgcaggacaacttataatgggacccaaaggggaaagaggatttcccgggcctccaggaagatgtctttgtggacccactatgaatgtgaataacccttcctacggggaatctgtgtatgggcccagttccccgcgagttcctgtgatttttgtggtcaacaaccaggaggagcttgagaggctgaacacccaaaacgccattgccttccgcagagaccagagatctctgtacttcaaggacagccttggctggctccccatccagctgacccctttctaccctgtggattacactgcagaccagcacggcacctgtggggatgggctcctgcagcctggggaggagtgtgacgacggtaacagcgatgtgggtgacgactgcatccgctgtcaccgtgcctactgtggagatggtcaccggcatgagggtgtggaggactgtgacggctctgactttggctacctgacatgcgagacctatctccctgggtcatatggagacctgcaatgcacccagtactgctacatcgactccacgccctgccgctacttcacctgagggccgtgaggagaaggtgggctgcgccccacagaactggcagcagcttctccactgtcatcaaactggccatgtcctggccccgtctccaccaacctttgtgtgacaaaaacaaggacaaattcctgctactaagacatgctgttaactcagtctgactggaagaatttaggaccactgcatcctgtcttaatccaaggtactggaaaaccttccacatgcccaacctgagacctgttccccatcgctaccatttggccaaacaaccggctacaatgctcttcctcttctggaatgttgctgacccaggccgtggacttggctgagcactgttagacacacacagacctgcaggctgttttagaatgttttgatctctttggggaatctggagtacaggcctctccgcccctgaccaccgaaacgtgcaggcattctcactcacactgggcagcccgctgtcgggtctctctaggcctatgaaccacaaagcagggaagtgggcacgttctctcggggtggctcacagctttgaacctgccaaaggacccctcgactggccacagcccagcccagcctgacgtggatgtggctgcccaggaaaagacttaactgtgaaaaagtactgagaacccacctgacccaggcttgccccaagcagaggctagagaagaggctcctcttctcagtgtttcccaaaggggcggctcttgtggtttcaaaatctctggcaccatcttgacctcttggctctctctgcactttgccccctgtctcaaaaatgtccctcatgtccatttcctgtccaggagactcatgaggactgtgtgacctgcacaagcccacacctgggcaggctgttggtgtctccttggtccttaggcagatactcccctgagtccccgatctagggccagctgcagagggctctctctaggcagagcgttcctggccagagctctacctctttgcctcctgctgacccctgacagcgtcccgtggcatttctttcatgtctgcatattgcatagccttgtcctcctgtgtgcctgagctcctcccttttcaataagattattagtcgtgcatgtctgtgagctgcctttcatcaccatttttcctgagtagggcttagttttattctggaaagacatctccaaggtgaggtccacccccacagcagacctcaagtagaaattgcccaatttttaccagctggagggacacccttgggtttttgtacgaagctatttaatgagcctgtgtcttggggactcagcaggctggagcttggggcctggtggaccatcacctggtgtctgtaggtggacccggtctcccacaggtgacatcaacctgagggtggcgtctttagagacaggcacatgggcagccctgttcccttcgcctctactgcgaggcctggggagatgttgttttcatgctgcttccaccatcacactggggtttctggatgggaaataaaaaaataaaggcagttcatttcccca

SEQ ID NO: 6440 - DNA, 1482 bp, Homo sapiens
  source 1..1482: mol_type = unassigned DNA
acacacaaacacacgcgcacgcaaacagcagtgaggaagagaaaagcagagataagcaaggctccgcagcagcctcctttctaacttgaccctcgccagaccctggccagcatggttgtcctgaatccaatgactttgggaatttatcttcagcttttcttcctctctatcgtgtctcagccgactttcatcaacagcgttcttccaatctcagcagcccttcccagcctggatcagaagaagcgtggtggccacaaagcatgctgcctgctgacgcctcctccaccaccactgttcccaccaccattcttcagaggtggccgaagtccgggtccaccggggcttcctggcaagacaggaccaaagggagaaaagggggagcttggccgaccaggaaggaagggtagacctggccccccaggtgttcctggcatgcctgggcccatcggttggccaggccctgaaggacccaggggtgaaaaaggtgacctgggtatgatgggcttgccagggtcaagaggaccaatgggctccaagggctaccctggatccagaggggaaaagggatccagaggtgaaaagggtgacctgggtcccaaaggagaaaagggtttcccaggatttcctggaatgttggggcagaaaggtgaaatgggtccaaaaggtgaacctgggatagcaggacaccgaggacccacaggaagaccaggaaaacgaggcaagcagggacagaaaggggatagtggagttatgggcccaccaggcaagcctgggccttctggtcaacctggccgtccggggcccccaggccccccacctgcaggacaacttataatgggacccaaaggggaaagaggatttcccgggcctccaggaagatgtctttgtggacccactatgaatgtgaataacccttcctacggggaatctgtgtatgggcccagttccccgcgagttcctgtgatttttgtggtcaacaaccaggaggagcttgagaggctgaacacccaaaacgccattgccttccgcagagaccagagatctctgtacttcaaggacagccttggctggctccccatccagctgacccctttctaccctgtggattacactgcagaccagcacggcacctgtggggatgggctcctgcagcctggggaggagtgtgacgacggtaacagcgatgtgggtgacgactgcatccgctgtcaccgtgcctactgtggagatggtcaccggcatgagggtgtggaggactgtgacggctctgactttggctacctgacatgcgagacctatctccctgggtcatatggagacctgcaatgcacccagtactgctacatcgactccacgccctgccgctacttcacctgagggccgtgaggagaaggtgggctgcgccccacagaactggcagcagcttctccactgtcatcaaactggccatgtcctggccccgtctccaccaacctttgtgtg

SEQ ID NO: 6441 - DNA, 2978 bp, Homo sapiens
  source 1..2978: mol_type = unassigned DNA
cacacgcacacacacacacacaaacacacgcgcacgcaaacagcagtgaggaagagaaaagcagagataagcaaggctccgcagcagcctcctttctaacttgaccctcgccagaccctggccagcatggttgtcctgaatccaatgactttgggaatttatcttcagcttttcttcctctctatcgtgtctcagccgactttcatcaacagcgttcttccaatctcagcagcccttcccagcctggatcagaagaagcgtggtggccacaaagcatgctgcctgctgacgcctcctccaccaccactgttcccaccaccattcttcagaggtggccgaagtccgcttctctccccagacatgaagaatctcatgctggaactggagacctcgcagtccccgtgcatgcaaggctcgctaggctcccctgggcctcccggcccccagggtccaccggggcttcctggcaagacaggaccaaagggagaaaagggtagacctggccccccaggtgttcctggcatgcctgggcccatcggttggccaggccctgaaggacccaggggtgaaaaaggtgacctgggtatgatgggcttgccagggtcaagaggaccaatgggctccaagggctaccctggatccagaggggaaaagggatccagaggtgaaaagggtgacctgggtcccaaaggagaaaagggtttcccaggatttcctggaatgttggggcagaaaggtgaaatgggtccaaaaggtgaacctgggatagcaggacaccgaggacccacaggaagaccaggaaaacgaggcaagcagggacagaaaggggatagtggagttatgggcccaccaggcaagcctgggccttctggtcaacctggccgtccggggcccccaggccccccacctgcaggacaacttataatgggacccaaaggggaaagaggatttcccgggcctccaggaagatgtctttgtggacccactatgaatgtgaataacccttcctacggggaatctgtgtatgggcccagttccccgcgagttcctgtgatttttgtggtcaacaaccaggaggagcttgagaggctgaacacccaaaacgccattgccttccgcagagaccagagatctctgtacttcaaggacagccttggctggctccccatccagctgacccctttctaccctgtggattacactgcagaccagcacggcacctgtggggatgggctcctgcagcctggggaggagtgtgacgacggtaacagcgatgtgggtgacgactgcatccgctgtcaccgtgcctactgtggagatggtcaccggcatgagggtgtggaggactgtgacggctctgactttggctacctgacatgcgagacctatctccctgggtcatatggagacctgcaatgcacccagtactgctacatcgactccacgccctgccgctacttcacctgagggccgtgaggagaaggtgggctgcgccccacagaactggcagcagcttctccactgtcatcaaactggccatgtcctggccccgtctccaccaacctttgtgtgacaaaaacaaggacaaattcctgctactaagacatgctgttaactcagtctgactggaagaatttaggaccactgcatcctgtcttaatccaaggtactggaaaaccttccacatgcccaacctgagacctgttccccatcgctaccatttggccaaacaaccggctacaatgctcttcctcttctggaatgttgctgacccaggccgtggacttggctgagcactgttagacacacacagacctgcaggctgttttagaatgttttgatctctttggggaatctggagtacaggcctctccgcccctgaccaccgaaacgtgcaggcattctcactcacactgggcagcccgctgtcgggtctctctaggcctatgaaccacaaagcagggaagtgggcacgttctctcggggtggctcacagctttgaacctgccaaaggacccctcgactggccacagcccagcccagcctgacgtggatgtggctgcccaggaaaagacttaactgtgaaaaagtactgagaacccacctgacccaggcttgccccaagcagaggctagagaagaggctcctcttctcagtgtttcccaaaggggcggctcttgtggtttcaaaatctctggcaccatcttgacctcttggctctctctgcactttgccccctgtctcaaaaatgtccctcatgtccatttcctgtccaggagactcatgaggactgtgtgacctgcacaagcccacacctgggcaggctgttggtgtctccttggtccttaggcagatactcccctgagtccccgatctagggccagctgcagagggctctctctaggcagagcgttcctggccagagctctacctctttgcctcctgctgacccctgacagcgtcccgtggcatttctttcatgtctgcatattgcatagccttgtcctcctgtgtgcctgagctcctcccttttcaataagattattagtcgtgcatgtctgtgagctgcctttcatcaccatttttcctgagtagggcttagttttattctggaaagacatctccaaggtgaggtccacccccacagcagacctcaagtagaaattgcccaatttttaccagctggagggacacccttgggtttttgtacgaagctatttaatgagcctgtgtcttggggactcagcaggctggagcttggggcctggtggaccatcacctggtgtctgtaggtggacccggtctcccacaggtgacatcaacctgagggtggcgtctttagagacaggcacatgggcagccctgttcccttcgcctctactgcgaggcctggggagatgttgttttcatgctgcttccaccatcacactggggtttctggatgggaaataaaaaaataaaggcagttcatttcccca

SEQ ID NO: 6442 - DNA, 2991 bp, Homo sapiens
  source 1..2991: mol_type = unassigned DNA
cacacgcacacacacacacacaaacacacgcgcacgcaaacagcagtgaggaagagaaaagcagagataagcaaggctccgcagcagcctcctttctaacttgaccctcgccagaccctggccagcatggttgtcctgaatccaatgactttgggaatttatcttcagcttttcttcctctctatcgtgtctcagccgactttcatcaacagcgttcttccaatctcagcagcccttcccagcctggatcagaagaagcgtggtggccacaaagcatgctgcctgctgacgcctcctccaccaccactgttcccaccaccattcttcagaggtggccgaagtccgcttctctccccagacatgaagaatctcatgctggaactggagacctcgcagtccccgtgcatgcaaggctcgctaggctcccctgggcctcccggcccccagggtccaccggggcttcctggcaagacaggaccaaagggagaaaagggggagcttggccgaccaggaaggaagggtagacctggccccccaggtgttcctggcatgcctgggcccatcggttggccaggccctgaaggacccaggggtgaaaaaggtgacctgggtatgatgggcttgccagggtcaagaggaccaatgggctccaagggctaccctggatccagaggggaaaagggatccagaggtgaaaagggtgacctgggtcccaaaggagaaaagggtttcccaggatttcctggaatgttggggcagaaaggtgaaatgggtccaaaaggtgaacctgggatagcaggacaccgaggacccacaggaagaccaggaaaacgaggcaagcagggacagaaaggggatagtggagttatgggcccaccaggcaagcctgggccttctggtcaacctggccgtccggggcccccaggccccccacctgcaggacaacttataatgggacccaaaggggaaagaggatttcccgggcctccaggaagatgtctttgtggacccactatgaatgtgaataacccttcctacggggaatctgtgtatgggcccagttccccgcgagttcctgtgatttttgtggtcaacaaccaggaggagcttgagaggctgaacacccaaaacgccattgccttccgcagagaccagagatctctgtacttcaaggacagccttggctggctccccatccagctgacccctttctaccctgtggattacactgcagaccagcacggcacctgtggggatgggctcctgcagcctggggaggagtgtgacgacggtaacagcgatgtgggtgacgactgcatccgctgtcaccgtgcctactgtggagatggtcaccggcatgagggtgtggaggactgtgacggctctgactttggctacctgacatgcgagacctatctccctgggtcatatggagacctgcaatgcacccagtactgctacatcgactccacgccctgccgctacttcacctgagggccgtgaggagaaggtgggctgcgccccacagaactggcagcagcttctccactgtcatcaaactggccatgtcctggccccgtctccaccaacctttgtgtgacaaaaacaaggacaaattcctgctactaagacatgctgttaactcagtctgactggaagaatttaggaccactgcatcctgtcttaatccaaggtactggaaaaccttccacatgcccaacctgagacctgttccccatcgctaccatttggccaaacaaccggctacaatgctcttcctcttctggaatgttgctgacccaggccgtggacttggctgagcactgttagacacacacagacctgcaggctgttttagaatgttttgatctctttggggaatctggagtacaggcctctccgcccctgaccaccgaaacgtgcaggcattctcactcacactgggcagcccgctgtcgggtctctctaggcctatgaaccacaaagcagggaagtgggcacgttctctcggggtggctcacagctttgaacctgccaaaggacccctcgactggccacagcccagcccagcctgacgtggatgtggctgcccaggaaaagacttaactgtgaaaaagtactgagaacccacctgacccaggcttgccccaagcagaggctagagaagaggctcctcttctcagtgtttcccaaaggggcggctcttgtggtttcaaaatctctggcaccatcttgacctcttggctctctctgcactttgccccctgtctcaaaaatgtccctcatgtccatttcctgtccaggagactcatgaggactgtgtgacctgcacaagcccacacctgggcaggctgttggtgtctccttggtccttaggcagatactcccctgagtccccgatctagggccagctgcagagggctctctctaggcagagcgttcctggccagagctctacctctttgcctcctgctgacccctgacagcgtcccgtggcatttctttcatgtctgcatattgcatagccttgtcctcctgtgtgcctgagctcctcccttttcaataagattattagtcgtgcatgtctgtgagctgcctttcatcaccatttttcctgagtagggcttagttttattctggaaagacatctccaaggtgaggtccacccccacagcagacctcaagtagaaattgcccaatttttaccagctggagggacacccttgggtttttgtacgaagctatttaatgagcctgtgtcttggggactcagcaggctggagcttggggcctggtggaccatcacctggtgtctgtaggtggacccggtctcccacaggtgacatcaacctgagggtggcgtctttagagacaggcacatgggcagccctgttcccttcgcctctactgcgaggcctggggagatgttgttttcatgctgcttccaccatcacactggggtttctggatgggaaataaaaaaataaaggc

SEQ ID NO: 6443 - DNA, 2937 bp, Homo sapiens
  source 1..2937: mol_type = unassigned DNA
atatcctcccctgggctgaaggcactcttgtcctccaagcctcccctacagcagtgttcatgggcagctggagcagggctgcctacccattgctactcccaggagctcaggactggctccagacccctggcatctggagcagaagcaacatcaaagcagggattggccaactcccacccctaatgccaaacaggccaggcactgggagcactcagaggcgtgacgaatctcagcctgtctccggctagtgttccctggccagtccgctttgggccctgcctcacaatgacgggctcatcattcagcctcgctcatctgctcatcatttcaggactgctctgttactcggcaggctgcttggcccttcccagcctggatcagaagaagcgtggtggccacaaagcatgctgcctgctgacgcctcctccaccaccactgttcccaccaccattcttcagaggtggccgaagtccgcttctctccccagacatgaagaatctcatgctggaactggagacctcgcagtccccgtgcatgcaaggctcgctaggctcccctgggcctcccggcccccagggtccaccggggcttcctggcaagacaggaccaaagggagaaaagggggagcttggccgaccaggaaggaagggtagacctggccccccaggtgttcctggcatgcctgggcccatcggttggccaggccctgaaggacccaggggtgaaaaaggtgacctgggtatgatgggcttgccagggtcaagaggaccaatgggctccaagggctaccctggatccagaggggaaaagggatccagaggtgaaaagggtgacctgggtcccaaaggagaaaagggtttcccaggatttcctggaatgttggggcagaaaggtgaaatgggtccaaaaggtgaacctgggatagcaggacaccgaggacccacaggaagaccaggaaaacgaggcaagcagggacagaaaggggatagtggagttatgggcccaccaggcaagcctgggccttctggtcaacctggccgtccggggcccccaggccccccacctgcaggacaacttataatgggacccaaaggggaaagaggatttcccgggcctccaggaagatgtctttgtggacccactatgaatgtgaataacccttcctacggggaatctgtgtatgggcccagttccccgcgagttcctgtgatttttgtggtcaacaaccaggaggagcttgagaggctgaacacccaaaacgccattgccttccgcagagaccagagatctctgtacttcaaggacagccttggctggctccccatccagctgacccctttctaccctgtggattacactgcagaccagcacggcacctgtggggatgggctcctgcagcctggggaggagtgtgacgacggtaacagcgatgtgggtgacgactgcatccgctgtcaccgtgcctactgtggagatggtcaccggcatgagggtgtggaggactgtgacggctctgactttggctacctgacatgcgagacctatctccctgggtcatatggagacctgcaatgcacccagtactgctacatcgactccacgccctgccgctacttcacctgagggccgtgaggagaaggtgggctgcgccccacagaactggcagcagcttctccactgtcatcaaactggccatgtcctggccccgtctccaccaacctttgtgtgacaaaaacaaggacaaattcctgctactaagacatgctgttaactcagtctgactggaagaatttaggaccactgcatcctgtcttaatccaaggtactggaaaaccttccacatgcccaacctgagacctgttccccatcgctaccatttggccaaacaaccggctacaatgctcttcctcttctggaatgttgctgacccaggccgtggacttggctgagcactgttagacacacacagacctgcaggctgttttagaatgttttgatctctttggggaatctggagtacaggcctctccgcccctgaccaccgaaacgtgcaggcattctcactcacactgggcagcccgctgtcgggtctctctaggcctatgaaccacaaagcagggaagtgggcacgttctctcggggtggctcacagctttgaacctgccaaaggacccctcgactggccacagcccagcccagcctgacgtggatgtggctgcccaggaaaagacttaactgtgaaaaagtactgagaacccacctgacccaggcttgccccaagcagaggctagagaagaggctcctcttctcagtgtttcccaaaggggcggctcttgtggtttcaaaatctctggcaccatcttgacctcttggctctctctgcactttgccccctgtctcaaaaatgtccctcatgtccatttcctgtccaggagactcatgaggactgtgtgacctgcacaagcccacacctgggcaggctgttggtgtctccttggtccttaggcagatactcccctgagtccccgatctagggccagctgcagagggctctctctaggcagagcgttcctggccagagctctacctctttgcctcctgctgacccctgacagcgtcccgtggcatttctttcatgtctgcatattgcatagccttgtcctcctgtgtgcctgagctcctcccttttcaataagattattagtcgtgcatgtctgtgagctgcctttcatcaccatttttcctgagtagggcttagttttattctggaaagacatctccaaggtggacccggtctcccacaggtgacatcaacctgagggtggcgtctttagagacaggcacatgggcagccctgttcccttcgcctctactgcgaggcctggggagatgttgttttcatgctgcttccaccatcacactggggtttctggatgg

SEQ ID NO: 6444 - DNA, 582 bp, Homo sapiens
  source 1..582: mol_type = unassigned DNA
atttcaggactgctctgttactcggcaggctgcttggcccttcccagcctggatcagaagaagcgtggtggccacaaagcatgctgcctgctgacgcctcctccaccaccactgttcccaccaccattcttcagaggtggccgaagtccgggtccaccggggcttcctggcaagacaggaccaaagggagaaaagggggagcttggccgaccaggaaggaagggtagacctggccccccaggtgttcctggcatgcctgggcccatcggttggccaggccctgaaggacccaggggtgaaaaaggtgacctgggtatgatgggcttgccagggtcaagaggaccaatgggctccaagggctaccctggatccagaggggaaaagggatccagaggtgaaaagggtgacctgggtcccaaaggagaaaagggtttcccaggatttcctggaatgttggggcagaaaggtgaaatgggtccaaaaggtgaacctgggatagcaggacaccgaggacccacaggaagaccaggaaaacgaggcaagcagggacagaaaggggatagtggagttatgggcccacca

SEQ ID NO: 6445 - DNA, 2849 bp, Homo sapiens
  source 1..2849: mol_type = unassigned DNA
atgacgggctcatcattcagcctcgctcatctgctcatcatttcaggactgctctgttactcggcaggctgcttggcccttcccagcctggatcagaagaagcgtggtggccacaaagcatgctgcctgctgacgcctcctccaccaccactgttcccaccaccattcttcagaggtggccgaagtccgcttctctccccagacatgaagaatctcatgctggaactggagacctcgcagtccccgtgcatgcaaggctcgctaggctcccctgggcctcccggcccccagggtccaccggggcttcctggcaagacaggaccaaagggagaaaagggggagcttggccgaccaggaaggaagggtagacctggccccccaggtgttcctggcatgcctgggcccatcggttggccaggccctgaaggacccaggggtgaaaaaggtgacctgggtatgatgggcttgccagggtcaagaggaccaatgggctccaagggctaccctggatccagaggggaaaagggatccagaggtgaaaagggtgacctgggtcccaaaggagaaaagtgcaatcctctcttgcttctctttccttctttccagggtgaaatgggtccaaaaggtgaacctgggatagcaggacaccgaggacccacaggaagaccaggaaaacgaggcaagcagggacagaaaggggatagtggagttatgggcccaccaggcaagcctgggccttctggtcaacctggccgtccggggcccccaggccccccacctgcaggacaacttataatgggacccaaaggggaaagaggatttcccgggcctccaggaagatgtctttgtggacccactatgaatgtgaataacccttcctacggggaatctgtgtatgggcccagttccccgcgagttcctgtgatttttgtggtcaacaaccaggaggagcttgagaggctgaacacccaaaacgccattgccttccgcagagaccagagatctctgtacttcaaggacagccttggctggctccccatccagctgacccctttctaccctgtggattacactgcagaccagcacggcacctgtggggatgggctcctgcagcctggggaggagtgtgacgacggtaacagcgatgtgggtgacgactgcatccgctgtcaccgtgcctactgtggagatggtcaccggcatgagggtgtggaggactgtgacggctctgactttggctacctgacatgcgagacctatctccctgggtcatatggagacctgcaatgcacccagtactgctacatcgactccacgccctgccgctacttcacctgagggccgtgaggagaaggtgggctgcgccccacagaactggcagcagcttctccactgtcatcaaactggccatgtcctggccccgtctccaccaacctttgtgtgacaaaaacaaggacaaattcctgctactaagacatgctgttaactcagtctgactggaagaatttaggaccactgcatcctgtcttaatccaaggtactggaaaaccttccacatgcccaacctgagacctgttccccatcgctaccatttggccaaacaaccggctacaatgctcttcctcttctggaatgttgctgacccaggccgtggacttggctgagcactgttagacacacacagacctgcaggctgttttagaatgttttgatctctttggggaatctggagtacaggcctctccgcccctgaccaccgaaacgtgcaggcattctcactcacactgggcagcccgctgtcgggtctctctaggcctatgaaccacaaagcagggaagtgggcacgttctctcggggtggctcacagctttgaacctgccaaaggacccctcgactggccacagcccagcccagcctgacgtggatgtggctgcccaggaaaagacttaactgtgaaaaagtactgagaacccacctgacccaggcttgccccaagcagaggctagagaagaggctcctcttctcagtgtttcccaaaggggcggctcttgtggtttcaaaatctctggcaccatcttgacctcttggctctctctgcactttgccccctgtctcaaaaatgtccctcatgtccatttcctgtccaggagactcatgaggactgtgtgacctgcacaagcccacacctgggcaggctgttggtgtctccttggtccttaggcagatactcccctgagtccccgatctagggccagctgcagagggctctctctaggcagagcgttcctggccagagctctacctctttgcctcctgctgacccctgacagcgtcccgtggcatttctttcatgtctgcatattgcatagccttgtcctcctgtgtgcctgagctcctcccttttcaataagattattagtcgtgcatgtctgtgagctgcctttcatcaccatttttcctgagtagggcttagttttattctggaaagacatctccaaggtgaggtccacccccacagcagacctcaagtagaaattgcccaatttttaccagctggagggacacccttgggtttttgtacgaagctatttaatgagcctgtgtcttggggactcagcaggctggagcttggggcctggtggaccatcacctggtgtctgtaggtggacccggtctcccacaggtgacatcaacctgagggtggcgtctttagagacaggcacatgggcagccctgttcccttcgcctctactgcgaggcctggggagatgttgttttcatgctgcttccaccatcacactggggtttctggatgggaaataaaaaaataaaggcagttcatttcccca

SEQ ID NO: 6446 - DNA, 3146 bp, Homo sapiens
  source 1..3146: mol_type = unassigned DNA
gcaccgaggcgcggagcgcggcgcacggcggtgcccagggccgcgggcgggcaggcgggagcgcggtgggtggccggccttggacgggtatggcggaccggcggcgcgcgtggaacaccgaggacgacctgcccgtgtacctggcgcggccgggcagcgcggcgcagaccccgcgccagaagtacggcggcatgttcgccgcggtggagggcgcctacgagaacaagaccatcgacttcgacgcctacagtgtgggccgccgcggctcggcgcgcacgccgcgcagcgctggccggcccgacgcggtcgggctgccagggccgggaggcagcgaggacacggccagcgacgtgagcgagccctcgggctccgcggtcagctctcccggagagcgcgacgagcggccgccgacgctgcgcatccgccgccccgcgccccgcgacctgcccctcggccgggacaatggccagagtgaccgactcctcatcaaaggtggacggatcatcaacgatgaccaatccctttatgctgacgtctacctggaggatggacttatcaaacaaataggagagaacttaatcgttcctggtggagtgaagaccattgaagccaacgggcggatggttattcccggaggtattgatgtcaacacgtacctgcagaagccctcccaggggatgactgcggctgatgacttcttccaagggaccagggcggcactggtgggcgggaccacgatgatcattgaccatgttgttcctgaacctgggtccagcctactgacctctttcgagaagtggcacgaagcagctgacaccaaatcctgctgtgattactccctccacgtggacatcacaagctggtacgatggcgttcgggaggagctggaggtgctggtgcaggacaaaggcgtcaattccttccaagtctacatggcctataaggatgtctaccaaatgtccgacagccagctctatgaagcctttaccttccttaagggcctgggagctgtgatcttggtccatgcagaaaatggagatttgatagctcaggaacaaaagcggatcctggagatgggcatcacgggtcccgagggccatgccctgagcagacctgaagagctggaggccgaggcggtgttccgggccatcaccattgcgggccggatcaactgccctgtgtacatcaccaaggtcatgagcaagagtgcagccgacatcatcgctctggccaggaagaaagggcccctagtttttggagagcccattgccgccagcctggggaccgatggcacccattactggagcaagaactgggccaaggctgcggcgttcgtgacttcccctcccctgagcccggaccctaccacgcccgactacttgacctccctactggcctgtggggacttgcaggtcacaggcagcggccactgtccctacagcactgcccagaaggcggtgggcaaggacaactttaccctgatccccgagggtgtcaacgggatagaggagcggatgacggtcgtctgggacaaggcggtggctactggcaaaatggatgagaaccagtttgtcgctgtcaccagcaccaatgcagccaagatctttaacctgtacccaaggaaagggcggattgccgtgggctcggatgccgacgtggtcatctgggaccccgacaagttgaagaccataacagccaaaagtcacaagtcggcggtggagtacaacatcttcgagggtatggagtgccacggctccccactagtggtcatcagccagggcaagatcgtctttgaagacggaaacatcaacgtcaacaagggcatgggccgcttcattccgcggaaggcgttcccggagcacctgtaccagcgcgtcaaaatcaggaataaggtttttggattgcaaggggtttccaggggcatgtatgacggtcctgtgtacgaggtaccagctacacccaaatatgcaactcccgctccttcagccaaatcttcgccttctaaacaccagcccccacccatcagaaacctccaccagtccaacttcagcttatcaggtgcccagatagatgacaacaatcccaggcgcaccggccaccgcatcgtggcgccccctggtggccgctccaacatcaccagcctcggttgaacgtggatgcgcggaggagctagcctgaaggattctgggaatcatgtccatcccttttcctgtcagtgtttttgaaacccacagttttagttggtgctgatggagggagggggaagtcgaaggatgctctttcccttttctgtttaggaagaagtggtactagtgtggtgtgtttgcttggaaattccttgccccacagttgtgttcatgctgaatccacctcggagcatggtgttttcattcccccttcctagtgaaccacaggttttagcattgtcttgttctgtcccttccacttctaactccactggctccatgattctctgagtggtggttcctttgcaccctgtagatgttctaggatagttgatgcatgttactaaattacgtatgcaagtctgtgagtgcgtctgaggggacatcgccaaggactgactgagacacgatgccgagacctcaagccctgaggggcagtcccaaaacccttacagtgaagatgtttactcattgcccccacctctggtccacactagaaagaagctcgccccacctccacctgtgagatccgtgaattctcggaatggcaggggaagccttgcactaggttgcagagaagcatcctccacatcctgtgtcagaaaccctggtctccgtggcacttgtaactcaccgtgctgtcttctggtctgtgtgtgttcttcaagccagctctaggcttcaggccgagccaggttcacactcagaaagaggtctccccatccccattcggggctgacgatggggggctgatggctgcccctgcgtggcctgagtcctggtccctctgaggcagttgacggggcagtcagatttttaaagttttgtacaaagttttcctttgtaatcactcccatttttacttaacaaccaacttgttgtggctcttatttctgaattcaaagcttgtgaaaaaataaagaaaatgaactgcccactgacctgactagggcactttca

SEQ ID NO: 6447 - DNA, 2911 bp, Homo sapiens
  source 1..2911: mol_type = unassigned DNA
ccgatccgggcggtgctggcagccggagcggcggcgggcgggccgagcagccggggcagccgcgcgtgggcatccacgggcgccgagcctccgtccgtgtctctatccctcccgggcctttgtcagcgcgcccgctgggagcggggccgagagcgccggttccagtcagacagccccgcaggtcagcggccgggccgagggcgccagagggggccatgtcgtaccagggcaagaagagcatcccgcacatcacgagtgaccgactcctcatcaaaggtggacggatcatcaacgatgaccaatccctttatgctgacgtctacctggaggatggacttatcaaacaaataggagagaacttaatcgttcctggtggagtgaagaccattgaagccaacgggcggatggttattcccggaggtattgatgtcaacacgtacctgcagaagccctcccaggggatgactgcggctgatgacttcttccaagggaccagggcggcactggtgggcgggaccacgatgatcattgaccatgttgttcctgaacctgggtccagcctactgacctctttcgagaagtggcacgaagcagctgacaccaaatcctgctgtgattactccctccacgtggacatcacaagctggtacgatggcgttcgggaggagctggaggtgctggtgcaggacaaaggcgtcaattccttccaagtctacatggcctataaggatgtctaccaaatgtccgacagccagctctatgaagcctttaccttccttaagggcctgggagctgtgatcttggtccatgcagaaaatggagatttgatagctcaggaacaaaagcggatcctggagatgggcatcacgggtcccgagggccatgccctgagcagacctgaagagctggaggccgaggcggtgttccgggccatcaccattgcgggccggatcaactgccctgtgtacatcaccaaggtcatgagcaagagtgcagccgacatcatcgctctggccaggaagaaagggcccctagtttttggagagcccattgccgccagcctggggaccgatggcacccattactggagcaagaactgggccaaggctgcggcgttcgtgacttcccctcccctgagcccggaccctaccacgcccgactacttgacctccctactggcctgtggggacttgcaggtcacaggcagcggccactgtccctacagcactgcccagaaggcggtgggcaaggacaactttaccctgatccccgagggtgtcaacgggatagaggagcggatgacggtcgtctgggacaaggcggtggctactggcaaaatggatgagaaccagtttgtcgctgtcaccagcaccaatgcagccaagatctttaacctgtacccaaggaaagggcggattgccgtgggctcggatgccgacgtggtcatctgggaccccgacaagttgaagaccataacagccaaaagtcacaagtcggcggtggagtacaacatcttcgagggtatggagtgccacggctccccactagtggtcatcagccagggcaagatcgtctttgaagacggaaacatcaacgtcaacaagggcatgggccgcttcattccgcggaaggcgttcccggagcacctgtaccagcgcgtcaaaatcaggaataaggtttttggattgcaaggggtttccaggggcatgtatgacggtcctgtgtacgaggtaccagctacacccaaatatgcaactcccgctccttcagccaaatcttcgccttctaaacaccagcccccacccatcagaaacctccaccagtccaacttcagcttatcaggtgcccagatagatgacaacaatcccaggcgcaccggccaccgcatcgtggcgccccctggtggccgctccaacatcaccagcctcggttgaacgtggatgcgcggaggagctagcctgaaggattctgggaatcatgtccatcccttttcctgtcagtgtttttgaaacccacagttttagttggtgctgatggagggagggggaagtcgaaggatgctctttcccttttctgtttaggaagaagtggtactagtgtggtgtgtttgcttggaaattccttgccccacagttgtgttcatgctgaatccacctcggagcatggtgttttcattcccccttcctagtgaaccacaggttttagcattgtcttgttctgtcccttccacttctaactccactggctccatgattctctgagtggtggttcctttgcaccctgtagatgttctaggatagttgatgcatgttactaaattacgtatgcaagtctgtgagtgcgtctgaggggacatcgccaaggactgactgagacacgatgccgagacctcaagccctgaggggcagtcccaaaacccttacagtgaagatgtttactcattgcccccacctctggtccacactagaaagaagctcgccccacctccacctgtgagatccgtgaattctcggaatggcaggggaagccttgcactaggttgcagagaagcatcctccacatcctgtgtcagaaaccctggtctccgtggcacttgtaactcaccgtgctgtcttctggtctgtgtgtgttcttcaagccagctctaggcttcaggccgagccaggttcacactcagaaagaggtctccccatccccattcggggctgacgatggggggctgatggctgcccctgcgtggcctgagtcctggtccctctgaggcagttgacggggcagtcagatttttaaagttttgtacaaagttttcctttgtaatcactcccatttttacttaacaaccaacttgttgtggctcttatttctgaattcaaagcttgtgaaaaaataaagaaaatgaactgcccactga

SEQ ID NO: 6448 - DNA, 2764 bp, Homo sapiens
  source 1..2764: mol_type = unassigned DNA
ctggtacggggaacctaggacttaacaactccaaggaagggagtgtaggagttggggagggacagtgtccccatctgcaatttccggtcattgacagggattttaggccccgctgagagccagggatgcatgaatgcgtggagggaaatgagttgtaaacagagtgtaggggaacctggcatctccatgctgctttgctgcagctaatatgttttgcacccggggtacatcattttacctctgtaagcctcaatttcctgtctgtaaaatgggaaaattatgcctagtgttcctgggatactgagctggcttctctgtgaagctaaaacctcacctctattttaaggcccaggtgtctctggcctcctgccctggattaggggactggcccctggggtggtgaaggtcagggccccagcccccaaccacagtgctgggggagctgtaccaagcctaggccaccctcgctctggatggcaacttgaaagcagaaaagatgagtagtttcataggacctgtggggttggatttcgcatgcagaaaatgaacaacgaagtggtggacaagagtgaccgactcctcatcaaaggtggacggatcatcaacgatgaccaatccctttatgctgacgtctacctggaggatggacttatcaaacaaataggagagaacttaatcgttcctggtggagtgaagaccattgaagccaacgggcggatggttattcccggaggtattgatgtcaacacgtacctgcagaagccctcccaggggatgactgcggctgatgacttcttccaagggaccagggcggcactggtgggcgggaccacgatgatcattgaccatgttgttcctgaacctgggtccagcctactgacctctttcgagaagtggcacgaagcagctgacaccaaatcctgctgtgattactccctccacgtggacatcacaagctggtacgatggcgttcgggaggagctggaggtgctggtgcaggacaaaggcgtcaattccttccaagtctacatggcctataaggatgtctaccaaatgtccgacagccagctctatgaagcctttaccttccttaagggcctgggagctgtgatcttggtccatgcagaaaatggagatttgatagctcaggaacaaaagcggatcctggagatgggcatcacgggtcccgagggccatgccctgagcagacctgaagagctggaggccgaggcggtgttccgggccatcaccattgcgggccggatcaactgccctgtgtacatcaccaaggtcatgagcaagagtgcagccgacatcatcgctctggccaggaagaaagggcccctagtttttggagagcccattgccgccagcctggggaccgatggcacccattactggagcaagaactgggccaaggctgcggcgttcgtgacttcccctcccctgagcccggaccctaccacgcccgactacttgacctccctactggcctgtggggacttgcaggtcacaggcagcggccactgtccctacagcactgcccagaaggcggtgggcaaggacaactttaccctgatccccgagggtgtcaacgggatagaggagcggatgacggtcgtctgggacaaggcggtggctactggcaaaatggatgagaaccagtttgtcgctgtcaccagcaccaatgcagccaagatctttaacctgtacccaaggaaagggcggattgccgtgggctcggatgccgacgtggtcatctgggaccccgacaagttgaagaccataacagccaaaagtcacaagtcggcggtggagtacaacatcttcgagggtatggagtgccacggctccccactagtggtcatcagccagggcaagatcgtctttgaagacggaaacatcaacgtcaacaagggcatgggccgcttcattccgcggaaggcgttcccggagcacctgtaccagcgcgtcaaaatcaggaataaggtttttggattgcaaggggtttccaggggcatgtatgacggtcctgtgtacgaggtaccagctacacccaaatatgcaactcccgctccttcagccaaatcttcgccttctaaacaccagcccccacccatcagaaacctccaccagtccaacttcagcttatcaggtgcccagatagatgacaacaatcccaggcgcaccggccaccgcatcgtggcgccccctggtggccgctccaacatcaccagcctcggttgaacgtggatgcgcggaggagctagcctgaaggattctgggaatcatgtccatcccttttcctgtcagtgtttttgaaacccacagttttagttggtgctgatggagggagggggaagtcgaaggatgctctttcccttttctgtttaggaagaagtggtactagtgtggtgtgtttgcttggaaattccttgccccacagttgtgttcatgctgaatccacctcggagcatggtgttttcattcccccttcctagtgaaccacaggttttagcattgtcttgttctgtcccttccacttctaactccactggctccatgattctctgagtggtggttcctttgcaccctgtagatgttctaggatagttgatgcatgttactaaattacgtatgcaagtctgtgagtgcgtctgaggggacatcgccaaggactgactgagacacgatgccgagacctcaagccctgaggggcagtcccaaaacccttacagtgaagatgtttactcattgcccccac

SEQ ID NO: 6449 - DNA, 2795 bp, Homo sapiens
  source 1..2795: mol_type = unassigned DNA
agccggggcagccgcgcgtgggcatccacgggcgccgagcctccgtccgtgtctctatccctcccggtcagcggccgggccgagggcgccagagggggccatgtcgtaccagggcaagaagagcatcccgcacatcacgagtgaccgactcctcatcaaaggtggacggatcatcaacgatgaccaatccctttatgctgacgtctacctggaggatggacttatcaaacaaataggagagaacttaatcgttcctggtggagtgaagaccattgaagccaacgggcggatggttattcccggaggtattgatgtcaacacgtacctgcagaagccctcccaggggatgactgcggctgatgacttcttccaagggaccagggcggcactggtgggcgggaccacgatgatcattgaccatgttgttcctgaacctgggtccagcctactgacctctttcgagaagtggcacgaagcagctgacaccaaatcctgctgtgattactccctccacgtggacatcacaagctggtacgatggcgttcgggaggagctggaggtgctggtgcaggacaaaggcgtcaattccttccaagtctacatggcctataaggatgtctaccaaatgtccgacagccagctctatgaagcctttaccttccttaagggcctgggagctgtgatcttggtccatgcagaaaatggagatttgatagctcaggaacaaaagcggatcctggagatgggcatcacgggtcccgagggccatgccctgagcagacctgaagagctggaggccgaggcggtgttccgggccatcaccattgcgggccggatcaactgccctgtgtacatcaccaaggtcatgagcaagagtgcagccgacatcatcgctctggccaggaagaaagggcccctagtttttggagagcccattgccgccagcctggggaccgatggcacccattactggagcaagaactgggccaaggctgcggcgttcgtgacttcccctcccctgagcccggaccctaccacgcccgactacttgacctccctactggcctgtggggacttgcaggtcacaggcagcggccactgtccctacagcactgcccagaaggcggtgggcaaggacaactttaccctgatccccgagggtgtcaacgggatagaggagcggatgacggtcgtctgggacaaggcggtggctactggcaaaatggatgagaaccagtttgtcgctgtcaccagcaccaatgcagccaagatctttaacctgtacccaaggaaagggcggattgccgtgggctcggatgccgacgtggtcatctgggaccccgacaagttgaagaccataacagccaaaagtcacaagtcggcggtggagtacaacatcttcgagggtatggagtgccacggctccccactagtggtcatcagccagggcaagatcgtctttgaagacggaaacatcaacgtcaacaagggcatgggccgcttcattccgcggaaggcgttcccggagcacctgtaccagcgcgtcaaaatcaggaataaggtttttggattgcaaggggtttccaggggcatgtatgacggtcctgtgtacgaggtaccagctacacccaaatatgcaactcccgctccttcagccaaatcttcgccttctaaacaccagcccccacccatcagaaacctccaccagtccaacttcagcttatcaggtgcccagatagatgacaacaatcccaggcgcaccggccaccgcatcgtggcgccccctggtggccgctccaacatcaccagcctcggttgaacgtggatgcgcggaggagctagcctgaaggattctgggaatcatgtccatcccttttcctgtcagtgtttttgaaacccacagttttagttggtgctgatggagggagggggaagtcgaaggatgctctttcccttttctgtttaggaagaagtggtactagtgtggtgtgtttgcttggaaattccttgccccacagttgtgttcatgctgaatccacctcggagcatggtgttttcattcccccttcctagtgaaccacaggttttagcattgtcttgttctgtcccttccacttctaactccactggctccatgattctctgagtggtggttcctttgcaccctgtagatgttctaggatagttgatgcatgttactaaattacgtatgcaagtctgtgagtgcgtctgaggggacatcgccaaggactgactgagacacgatgccgagacctcaagccctgaggggcagtcccaaaacccttacagtgaagatgtttactcattgcccccacctctggtccacactagaaagaagctcgccccacctccacctgtgagatccgtgaattctcggaatggcaggggaagccttgcactaggttgcagagaagcatcctccacatcctgtgtcagaaaccctggtctccgtggcacttgtaactcaccgtgctgtcttctggtctgtgtgtgttcttcaagccagctctaggcttcaggccgagccaggttcacactcagaaagaggtctccccatccccattcggggctgacgatggggggctgatggctgcccctgcgtggcctgagtcctggtccctctgaggcagttgacggggcagtcagatttttaaagttttgtacaaagttttcctttgtaatcactcccatttttacttaacaaccaacttgttgtggctcttatttctgaattcaaagcttgtgaaaaaataaagaaaatgaactgcccactg

SEQ ID NO: 6450 - DNA, 1266 bp, Homo sapiens
  source 1..1266: mol_type = unassigned DNA
tttggcatttctgggagacccttttctgaggaaccacagcaatgaatggctttgcatccttgcttcgaagaaaccaatttatcctcctggtactatttcttttgcaaattcagagtctgggtctggatattgatagccgtcctaccgctgaagtctgtgccacacacacaatttcaccaggacccaaaggagatgatggtgaaaaaggagatccaggagaagagggaaagcatggcaaagtgggacgcatggggccgaaaggaattaaaggagaactgggtgatatgggagatcagggcaatattggcaagactgggcccattgggaagaagggtgacaaaggggaaaaaggtttgcttggaatacctggagaaaaaggcaaagcaggtactgtctgtgattgtggaagataccggaaatttgttggacaactggatattagtattgctcggctcaagacatctatgaagtttgtcaagaatgtgatagcagggattagggaaactgaagagaaattctactacatcgtgcaggaagagaagaactacagggaatccctaacccactgcaggattcggggtggaatgctagccatgcccaaggatgaagctgccaacacactcatcgctgactatgttgccaagagtggcttctttcgggtgttcattggcgtgaatgaccttgaaagggagggacagtacatgttcacagacaacactccactgcagaactatagcaactggaatgagggggaacccagcgacccctatggtcatgaggactgtgtggagatgctgagctctggcagatggaatgacacagagtgccatcttaccatgtactttgtctgtgagttcatcaagaagaaaaagtaacttccctcatcctacgtatttgctattttcctgtgaccgtcattacagttattgttatccatcctttttttcctgattgtactacatttgatctgagtcaacatagctagaaaatgctaaactgaggtatggagcctccatcatcatgctcttttgtgatgattttcatattttcacacatggtatattattgacccaataactcgccaggttacatgggtcttgagagagaattttaattactaattgtgcacgagatagttggttgtctatatgtcaaatgagttgttctcttggtatttgctctaccatctctccctagagcactctgtgtctatcccagtggataatttcccagtttactggtgatgattaggaaggttgttgatgg

SEQ ID NO: 6451 - DNA, 1381 bp, Homo sapiens
  source 1..1381: mol_type = unassigned DNA
cttctccctgcgcctgggactgcggccgcctctctaaatagcagccatgaggcgcctgggggcagtgtcctcgcgggccagcgacgggcaggacgccccgttcgcctagcgcgtgctcaggagttggtgtcctgcctgcgctcaggatgagggggaatctggccctggtgggcgttctaatcagcctggccttcctgtcactgctgccatctggacatcctcagccggctggcgatgacgcctgctctgtgcagatcctcgtccctggcctcaaaggggatgcgggagagaagggagacaaaggcgcccccggacggcctggaagagtcggccccacgggagaaaaagcagtcacagccagtcgtgacagcttctgacatctccaaaaggaagtgcacctcgtcctttgtagaaatgggatcacagggagacatgggggacaaaggacagaaaggcagtgtgggtcgtcatggaaaaattggtcccattggctctaaaggtgagaaaggagattccggtgacataggaccccctggtcctaatggagaaccaggcctcccatgtgagtgcagccagctgcgcaaggccatcggggagatggacaaccaggtctctcagctgaccagcgagctcaagttcatcaagaatgctgtcgccggtgtgcgcgagacggagagcaagatctacctgctggtgaaggaggagaagcgctacgcggacgcccagctgtcctgccagggccgcgggggcacgctgagcatgcccaaggacgaggctgccaatggcctgatggccgcatacctggcgcaagccggcctggcccgtgtcttcatcggcatcaacgacctggagaaggagggcgccttcgtgtactctgaccactcccccatgcggaccttcaacaagtggcgcagcggtgagcccaacaatgcctacgacgaggaggactgcgtggagatggtggcctcgggcggctggaacgacgtggcctgccacaccaccatgtacttcatgtgtgagtttgacaaggagaacatgtgagcctcaggctggggctgcccattgggggccccacatgtccctgcagggttggcagggacagagcccagaccatggtgccagccagggagctgtccctctgtgaagggtggaggctcactgagtagagggctgttgtctaaactgagaaaatggcctatgcttaagaggaaaatgaaagtgttcctggggtgctgtctctgaagaagcagagtttcattacctgtattgtagccccaatgtcattatgtaattattacccagaattgctcttccataaagcttgtgcctttgtccaagctatacaataaaatctttaagtagtgcagtagttaagtccaaa

SEQ ID NO: 6452 - DNA, 1259 bp, Homo sapiens
  source 1..1259: mol_type = unassigned DNA
gccatgaggcgcctgggggcagtgtcctcgcgggccagcgacgggcaggacgccccgttcgcctagcgcgtgctcaggagttggtgtcctgcctgcgctcaggatgagggggaatctggccctggtgggcgttctaatcagcctggccttcctgtcactgctgccatctggacatcctcagccggctggcgatgacgcctgctctgtgcagatcctcgtccctggcctcaaaggggatgcgggagagaagggagacaaaggcgcccccggacggcctggaagagtcggccccacgggagaaaaaggagacatgggggacaaaggacagaaaggcagtgtgggtcgtcatggaaaaattggtcccattggctctaaaggtgagaaaggagattccggtgacataggaccccctggtcctaatggagaaccaggcctcccatgtgagtgcagccagctgcgcaaggccatcggggagatggacaaccaggtctctcagctgaccagcgagctcaagttcatcaagaatgctgtcgccggtgtgcgcgagacggagagcaagatctacctgctggtgaaggaggagaagcgctacgcggacgcccagctgtcctgccagggccgcgggggcacgctgagcatgcccaaggacgaggctgccaatggcctgatggccgcatacctggcgcaagccggcctggcccgtgtcttcatcggcatcaacgacctggagaaggagggcgccttcgtgtactctgaccactcccccatgcggaccttcaacaagtggcgcagcggtgagcccaacaatgcctacgacgaggaggactgcgtggagatggtggcctcgggcggctggaacgacgtggcctgccacaccaccatgtacttcatgtgtgagtttgacaaggagaacatgtgagcctcaggctggggctgcccattgggggccccacatgtccctgcagggttggcagggacagagcccagaccatggtgccagccagggagctgtccctctgtgaagggtggaggctcactgagtagagggctgttgtctaaactgagaaaatggcctatgcttaagaggaaaatgaaagtgttcctggggtgctgtctctgaagaagcagagtttcattacctgtattgtagccccaatgtcattatgtaattattacccagaattgctcttccataaagcttgtgcctttgtccaagctatacaataaaatctttaagtagtgcagtagttaagtccaaa

SEQ ID NO: 6453 - DNA, 1311 bp, Homo sapiens
  source 1..1311: mol_type = unassigned DNA
ggacggtggacgcagcgcagacaggaagctccccgagataacgctgcggccgggcggcctgatttgctgggctgtctgatggcccgggccgaggcttctccctgcgcctgggactgcggccgcctctctaaatagcagccatgaggcgcctgggggcagtgtcctcgcgggccagcgacgggcaggacgccccgttcgcctagcgcgtgctcaggagttggtgtcctgcctgcgctcaggatgagggggaatctggccctggtgggcgttctaatcagcctggccttcctgtcactgctgccatctggacatcctcagccggctggcgatgacgcctgctctgtgcagatcctcgtccctggcctcaaaggggatgcgggagagaagggagacaaaggcgcccccggacggcctggaagagtcggccccacgggagaaaaaggtgagaaaggagattccggtgacataggaccccctggtcctaatggagaaccaggcctcccatgtgagtgcagccagctgcgcaaggccatcggggagatggacaaccaggtctctcagctgaccagcgagctcaagttcatcaagaatgctgtcgccggtgtgcgcgagacggagagcaagatctacctgctggtgaaggaggagaagcgctacgcggacgcccagctgtcctgccagggccgcgggggcacgctgagcatgcccaaggacgaggctgccaatggcctgatggccgcatacctggcgcaagccggcctggcccgtgtcttcatcggcatcaacgacctggagaaggagggcgccttcgtgtactctgaccactcccccatgcggaccttcaacaagtggcgcagcggtgagcccaacaatgcctacgacgaggaggactgcgtggagatggtggcctcgggcggctggaacgacgtggcctgccacaccaccatgtacttcatgtgtgagtttgacaaggagaacatgtgagcctcaggctggggctgcccattgggggccccacatgtccctgcagggttggcagggacagagcccagaccatggtgccagccagggagctgtccctctgtgaagggtggaggctcactgagtagagggctgttgtctaaactgagaaaatggcctatgcttaagaggaaaatgaaagtgttcctggggtgctgtctctgaagaagcagagtttcattacctgtattgtagccccaatgtcattatgtaattattacccagaattgctcttccataaagcttgtgcctttgtccaagctatacaataaaatctttaagtagtgcagt

SEQ ID NO: 6454 - DNA, 1303 bp, Homo sapiens
  source 1..1303: mol_type = unassigned DNA
agatttgggagaaggatttcaaatgacttcccttcgagctgcagggctatcttgggcatcttgacctccacacatttctgggagaactcctcgtgcagcaggacatcaggtggcaaaggtgatctgcccacctcagcctcccaaagtgctggaattacaggtgtgagccactgcgcctggtcttgttttccaagttgtaacgcccttcacgatgaagaaacaaagaggagttggtgtcctgcctgcgctcaggatgagggggaatctggccctggtgggcgttctaatcagcctggccttcctgtcactgctgccatctggacatcctcagccggctggcgatgacgcctgctctgtgcagatcctcgtccctggcctcaaaggggatgcgggagagaagggagacaaaggcgcccccggacggcctggaagagtcggccccacgggagaaaaaggagacatgggggacaaaggacagaaaggcagtgtgggtcgtcatggaaaaattggtcccattggctctaaaggtgagaaaggagattccggtgacataggaccccctggtcctaatggagaaccaggcctcccatgtgagtgcagccagctgcgcaaggccatcggggagatggacaaccaggtctctcagctgaccagcgagctcaagttcatcaagaatgctgtcgccggtgtgcgcgagacggagagcaagatctacctgctggtgaaggaggagaagcgctacgcggacgcccagctgtcctgccagggccgcgggggcacgctgagcatgcccaaggacgaggctgccaatggcctgatggccgcatacctggcgcaagccggcctggcccgtgtcttcatcggcatcaacgacctggagaaggagggcgccttcgtgtactctgaccactcccccatgcggaccttcaacaagtggcgcagcggtgagcccaacaatgcctacgacgaggaggactgcgtggagatggtggcctcgggcggctggaacgacgtggcctgccacaccaccatgtacttcatgtgtgagtttgacaaggagaacatgtgagcctcaggctggggctgcccattgggggccccacatgtccctgcagggttggcagggacagagcccagaccatggtgccagccagggagctgtccctctgtgaagggtggaggctcactgagtagagggctgttgtctaaactgagaaaatggcctatgcttaagaggaaaatgaaagtgttcctggggtgctgtctctgaagaagcagagtttcattacctgtattgtagccc

SEQ ID NO: 6455 - DNA, 1134 bp, Homo sapiens
  source 1..1134: mol_type = unassigned DNA
cagaagttttggtgaaagtggctttggccctgactttgtggtagcgtgtgtgggtttgtgagtggaaccttcagctttaggttggaaacggtggctgtggagagctggacttttggctgtggaggtcacgtccctgcccaatgtggtgggtgcctccgagtccctacggttgtcttccctgcgccctgccaggagacatgggggacaaaggacagaaaggcagtgtgggtcgtcatggaaaaattggtcccattggctctaaaggtgagaaaggagattccggtgacataggaccccctggtcctaatggagaaccaggcctcccatgtgagtgcagccagctgcgcaaggccatcggggagatggacaaccaggtctctcagctgaccagcgagctcaagttcatcaagaatgctgtcgccggtgtgcgcgagacggagagcaagatctacctgctggtgaaggaggagaagcgctacgcggacgcccagctgtcctgccagggccgcgggggcacgctgagcatgcccaaggacgaggctgccaatggcctgatggccgcatacctggcgcaagccggcctggcccgtgtcttcatcggcatcaacgacctggagaaggagggcgccttcgtgtactctgaccactcccccatgcggaccttcaacaagtggcgcagcggtgagcccaacaatgcctacgacgaggaggactgcgtggagatggtggcctcgggcggctggaacgacgtggcctgccacaccaccatgtacttcatgtgtgagtttgacaaggagaacatgtgagcctcaggctggggctgcccattgggggccccacatgtccctgcagggttggcagggacagagcccagaccatggtgccagccagggagctgtccctctgtgaagggtggaggctcactgagtagagggctgttgtctaaactgagaaaatggcctatgcttaagaggaaaatgaaagtgttcctggggtgctgtctctgaagaagcagagtttcattacctgtattgtagccccaatgtcattatgtaattattacccagaattgctcttccataaagcttgtgcctttgtccaagctatacaataaaatctttaagtagtgcagta

SEQ ID NO: 6456 - DNA, 1134 bp, Homo sapiens
  source 1..1134: mol_type = unassigned DNA
cagaagttttggtgaaagtggctttggccctgactttgtggtagcgtgtgtgggtttgtgagtggaaccttcagctttaggttggaaacggtggctgtggagagctggacttttggctgtggaggtcacgtccctgcccaatgtggtgggtgcctccgagtccctacggttgtcttccctgcgccctgccaggggatgcgggagagaagggagacaaaggcgcccccggacggcctggaagagtcggccccacgggagaaaaaggtgagaaaggagattccggtgacataggaccccctggtcctaatggagaaccaggcctcccatgtgagtgcagccagctgcgcaaggccatcggggagatggacaaccaggtctctcagctgaccagcgagctcaagttcatcaagaatgctgtcgccggtgtgcgcgagacggagagcaagatctacctgctggtgaaggaggagaagcgctacgcggacgcccagctgtcctgccagggccgcgggggcacgctgagcatgcccaaggacgaggctgccaatggcctgatggccgcatacctggcgcaagccggcctggcccgtgtcttcatcggcatcaacgacctggagaaggagggcgccttcgtgtactctgaccactcccccatgcggaccttcaacaagtggcgcagcggtgagcccaacaatgcctacgacgaggaggactgcgtggagatggtggcctcgggcggctggaacgacgtggcctgccacaccaccatgtacttcatgtgtgagtttgacaaggagaacatgtgagcctcaggctggggctgcccattgggggccccacatgtccctgcagggttggcagggacagagcccagaccatggtgccagccagggagctgtccctctgtgaagggtggaggctcactgagtagagggctgttgtctaaactgagaaaatggcctatgcttaagaggaaaatgaaagtgttcctggggtgctgtctctgaagaagcagagtttcattacctgtattgtagccccaatgtcattatgtaattattacccagaattgctcttccataaagcttgtgcctttgtccaagctatacaataaaatctttaagtagtgcagta

SEQ ID NO: 6457 - DNA, 1062 bp, Homo sapiens
  source 1..1062: mol_type = unassigned DNA
cagaagttttggtgaaagtggctttggccctgactttgtggtagcgtgtgtgggtttgtgagtggaaccttcagctttaggttggaaacggtggctgtggagagctggacttttggctgtggaggtcacgtccctgcccaatgtggtgggtgcctccgagtccctacggttgtcttccctgcgccctgccaggtgagaaaggagattccggtgacataggaccccctggtcctaatggagaaccaggcctcccatgtgagtgcagccagctgcgcaaggccatcggggagatggacaaccaggtctctcagctgaccagcgagctcaagttcatcaagaatgctgtcgccggtgtgcgcgagacggagagcaagatctacctgctggtgaaggaggagaagcgctacgcggacgcccagctgtcctgccagggccgcgggggcacgctgagcatgcccaaggacgaggctgccaatggcctgatggccgcatacctggcgcaagccggcctggcccgtgtcttcatcggcatcaacgacctggagaaggagggcgccttcgtgtactctgaccactcccccatgcggaccttcaacaagtggcgcagcggtgagcccaacaatgcctacgacgaggaggactgcgtggagatggtggcctcgggcggctggaacgacgtggcctgccacaccaccatgtacttcatgtgtgagtttgacaaggagaacatgtgagcctcaggctggggctgcccattgggggccccacatgtccctgcagggttggcagggacagagcccagaccatggtgccagccagggagctgtccctctgtgaagggtggaggctcactgagtagagggctgttgtctaaactgagaaaatggcctatgcttaagaggaaaatgaaagtgttcctggggtgctgtctctgaagaagcagagtttcattacctgtattgtagccccaatgtcattatgtaattattacccagaattgctcttccataaagcttgtgcctttgtccaagctatacaataaaatctttaagtagtgcagta

SEQ ID NO: 6458 - DNA, 3134 bp, Homo sapiens
  source 1..3134: mol_type = unassigned DNA
agagcggcgcgcgcggcagccccgaggcagcagagcgcggagccgggagcgcggggagcgcgggccggcggcggcgagggaggacgggggcgcagacggccggcgcgcggcgcggctaccatgggcgtgcggtgagcagccgctcgggacgacttcctcggctgcgcggcgctcgcgcggagctccccggccggcggtgcgtccccacggtcaccatgaaagacgacttcgcagaggaggaggaggtgcaatccttcggttacaagcggtttggtattcaggaaggaacacaatgtaccaaatgtaaaaataactgggcactgaagttttctatcatattattatacattttgtgtgccttgctaacaatcacagtagccattttgggatataaagttgtagagaaaatggacaatgtcacaggtggcatggaaacatctcgccaaacctatgatgacaagctcacagcagtggaaagtgacctgaaaaaattaggtgaccaaactgggaagaaagctatcagcaccaactcagaactctccaccttcagatcagacattctagatctccgtcagcaacttcgtgagattacagaaaaaaccagcaagaacaaggatacgctggagaagttacaggcgagcggggatgctctggtggacaggcagagtcaattgaaagaaactttggagaataactctttcctcatcaccactgtaaacaaaaccctccaggcgtataatggctatgtcacgaatctgcagcaagataccagcgtgctccagggcaatctgcagaaccaaatgtattctcataatgtggtcatcatgaacctcaacaacctgaacctgacccaggtgcagcagaggaacctcatcacgaatctgcagcggtctgtggatgacacaagccaggctatccagcgaatcaagaacgactttcaaaatctgcagcaggtttttcttcaagccaagaaggacacggattggctgaaggagaaagtgcagagcttgcagacgctggctgccaacaactctgcgttggccaaagccaacaacgacaccctggaggatatgaacagccagctcaactcattcacaggtcagatggagaacatcaccactatctctcaagccaacgagcagaacctgaaagacctgcaggacttacacaaagatgcagagaatagaacagccatcaagttcaaccaactggaggaacgcttccagctctttgagacggatattgtgaacatcattagcaatatcagttacacagcccaccacctgcggacgctgaccagcaatctaaatgaagtcaggaccacttgcacagatacccttaccaaacacacagatgatctgacctccttgaataataccctggccaacatccgtttggattctgtttctctcaggatgcaacaagatttgatgaggtcgaggttagacactgaagtagccaacttatcagtgattatggaagaaatgaagctagtagactccaagcatggtcagctcatcaagaattttacaatactacaaggtccaccgggccccaggggtccaagaggtgacagaggatcccagggaccccctggcccaactggcaacaagggacagaaaggagagaagggggagcctggaccacctggccctgcgggtgagagaggcccaattggaccagctggtccccccggagagcgtggcggcaaaggatctaaaggctcccagggccccaaaggctcccgtggttcccctgggaagcccggccctcagggctccagtggggacccaggccccccgggcccaccaggcaaagagggactccccggccctcagggccctcctggcttccagggacttcagggcaccgttggggagcctggggtgcctggacctcggggactgccaggcttgcctggggtaccaggcatgccaggccccaagggcccccccggccctcctggcccatcaggagcggtggtgcccctggccctgcagaatgagccaaccccagcaccggaggacaatggctgcccgcctcactggaagaacttcacagacaaatgctactatttttcagttgagaaagaaatttttgaggatgcaaagcttttctgtgaagacaagtcttcacatcttgttttcataaacactagagaggaacagcaatggataaaaaaacagatggtagggagagagagccactggatcggcctcacagactcagagcgtgaaaatgaatggaagtggctggatgggacatctccagactacaaaaattggaaagctggacagccggataactggggtcatggccatgggccaggagaagactgtgctgggttgatttatgctgggcagtggaacgatttccaatgtgaagacgtcaataacttcatttgcgaaaaagacagggagacagtactgtcatctgcattataacggactgtgatgggatcacatgagcaaattttcagctctcaaaggcaaaggacactcctttctaattgcatcaccttctcatcagattgaaaaaaaaaaagcactgaaaaccaattactgaaaaaaaattgacagctagtgttttttaccatccgtcattacccaaagacttgggaactaaaatgttccccagggtgatatgctgattttcattgtgcacatggactgaatcacatagattctcctccgtcagtaaccgtgcgattatacaaattatgtcttccaaagtatggaacactccaatcagaaaaaggttatcattggtcgttgagttatgggaagaacttaagcatatactgtgtaaacagtgccatacatttctaaaatcccaagtgtaggaaaaatatgcagacatacagatatataggccaactattagtaataatatgaaatatacttaaagagcttttaaaactttgtatttttgtacaaaatatttgtcttttacaatttttttcctttttttttttttgtcattttaccgacataatacatggagccaaagaaaacaataatggtactaataaaaactcctagggtttcctgtcagatttaattctacccagtggcaaagaattttttcaattgtggctttaaaaaaataattaaatatacatgtgtatatatata

SEQ ID NO: 6459 - DNA, 3989 bp, Homo sapiens
  source 1..3989: mol_type = unassigned DNA
gaagggcagacagagtgtccaaaagcgtgagagcacgaagtgaggagaaggtggagaagagagaagaggaagaggaagaggaagagaggaagcggagggaactgcggccaggctaaaaggggaagaagaggatcagcccaaggaggaggaagaggaaaacaagacaaacagccagtgcagaggagaggaacgtgtgtccagtgtcccgatccctgcggagctagtagctgagagctctgtgccctgggcaccttgcagccctgcacctgcctgccacttccccaccgaggccatgggcccaggagttctgctgctcctgctggtggccacagcttggcatggtcagggaatcccagtgatagagcccagtgtccctgagctggtcgtgaagccaggagcaacggtgaccttgcgatgtgtgggcaatggcagcgtggaatgggatggccccccatcacctcactggaccctgtactctgatggctccagcagcatcctcagcaccaacaacgctaccttccaaaacacggggacctatcgctgcactgagcctggagaccccctgggaggcagcgccgccatccacctctatgtcaaagaccctgcccggccctggaacgtgctagcacaggaggtggtcgtgttcgaggaccaggacgcactactgccctgtctgctcacagacccggtgctggaagcaggcgtctcgctggtgcgtgtgcgtggccggcccctcatgcgccacaccaactactccttctcgccctggcatggcttcaccatccacagggccaagttcattcagagccaggactatcaatgcagtgccctgatgggtggcaggaaggtgatgtccatcagcatccggctgaaagtgcagaaagtcatcccagggcccccagccttgacactggtgcctgcagagctggtgcggattcgaggggaggctgcccagatcgtgtgctcagccagcagcgttgatgttaactttgatgtcttcctccaacacaacaacaccaagctcgcaatccctcaacaatctgactttcataataaccgttaccaaaaagtcctgaccctcaacctcgatcaagtagatttccaacatgccggcaactactcctgcgtggccagcaacgtgcagggcaagcactccacctccatgttcttccgggtggtagagagtgcctacttgaacttgagctctgagcagaacctcatccaggaggtgaccgtgggggaggggctcaacctcaaagtcatggtggaggcctacccaggcctgcaaggttttaactggacctacctgggacccttttctgaccaccagcctgagcccaagcttgctaatgctaccaccaaggacacatacaggcacaccttcaccctctctctgccccgcctgaagccctctgaggctggccgctactccttcctggccagaaacccaggaggctggagagctctgacgtttgagctcacccttcgataccccccagaggtaagcgtcatatggacattcatcaacggctctggcacccttttgtgtgctgcctctgggtacccccagcccaacgtgacatggctgcagtgcagtggccacactgataggtgtgatgaggcccaagtgctgcaggtctgggatgacccataccctgaggtcctgagccaggagcccttccacaaggtgacggtgcagagcctgctgactgttgagaccttagagcacaaccaaacctacgagtgcagggcccacaacagcgtggggagtggctcctgggccttcatacccatctctgcaggagcccacacgcatcccccggatgagttcctcttcacaccagtggtggtcgcctgcatgtccatcatggccttgctgctgctgctgctcctgctgctattgtacaagtataagcagaagcccaagtaccaggtccgctggaagatcatcgagagctatgagggcaacagttatactttcatcgaccccacgcagctgccttacaacgagaagtgggagttcccccggaacaacctgcagtttggtaagaccctcggagctggagcctttgggaaggtggtggaggccacggcctttggtctgggcaaggaggatgctgtcctgaaggtggctgtgaagatgctgaagtccacggcccatgctgatgagaaggaggccctcatgtccgagctgaagatcatgagccacctgggccagcacgagaacatcgtcaaccttctgggagcctgtacccatggaggccctgtactggtcatcacggagtactgttgctatggcgacctgctcaactttctgcgaaggaaggctgaggccatgctgggacccagcctgagccccggccaggaccccgagggaggcgtcgactataagaacatccacctcgagaagaaatatgtccgcagggacagtggcttctccagccagggtgtggacacctatgtggagatgaggcctgtctccacttcttcaaatgactccttctctgagcaagacctggacaaggaggatggacggcccctggagctccgggacctgcttcacttctccagccaagtagcccagggcatggccttcctcgcttccaagaattgcatccaccgggacgtggcagcgcgtaacgtgctgttgaccaatggtcatgtggccaagattggggacttcgggctggctagggacatcatgaatgactccaactacattgtcaagggcaatgcccgcctgcctgtgaagtggatggccccagagagcatctttgactgtgtctacacggttcagagcgacgtctggtcctatggcatcctcctctgggagatcttctcacttgggctgaatccctaccctggcatcctggtgaacagcaagttctataaactggtgaaggatggataccaaatggcccagcctgcatttgccccaaagaatatatacagcatcatgcaggcctgctgggccttggagcccacccacagacccaccttccagcagatctgctccttccttcaggagcaggcccaagaggacaggagagagcgggactataccaatctgccgagcagcagcagaagcggtggcagcggcagcagcagcagtgagctggaggaggagagctctagtgagcacctgacctgctgcgagcaaggggatatcgcccagcccttgctgcagcccaacaactatcagttctgctgaggagttgacgacagggagtaccactctcccctcccacaaacttcaactcctccatggatggggcgacacggggagaacatacaaactctgccttcggtcatttcactcaacagctcggcccagctctgaaacttgggaaggtgagggattcaggggaggtcagaggatcccacttcctgagcatgggccatcactgccagtcaggggctgggggctgagccctcacccccccctcccctactgttctcatggtgttggcctcgtgtttgctatgccaactagtagaaccttctttcctaatccccttatcttcatggaaatggactgactttatgcctatgaagtccccaggagctacactgatactgagaaaaccaggctctttggggctagacagactggcagagagtgagatctccctctctgagaggagcagcagatgctcacagaccacactcagctcaggccccttggagcaggatggctcctctaagaatctcacaggacctcttagtctctgccctatacgccgccttcactccacagcctcacccctcccacccccatactggtactgctgtaatgagccaagtggcagctaaaagttgggggtgttctgcccagtcccgtcattctgggctagaaggcaggggaccttggcatgtggctggccacaccaagcaggaagcacaaactcccccaagctgactcatcctaactaacagtcacgccgtgggatgtctctgtccacattaaactaacagcattaatgcagtca

SEQ ID NO: 6460 - DNA, 2145 bp, Homo sapiens
  source 1..2145: mol_type = unassigned DNA
ggttgccttgcctagctaaaaggggaagaagaggatcagcccaaggaggaggaagaggaaaacaagacaaacagccagtgcagaggagaggaacgtgtgtccagtgtcccgatccctgcggagctagtagctgagagctctgtgccctgggcaccttgcagccctgcacctgcctgccacttccccaccgaggccatgggcccaggagttctgctgctcctgctggtggccacagcttggcatggtcagggaatcccagtgatagagcccagtgtccctgagctggtcgtgaagccaggagcaacggtgaccttgcgatgtgtgggcaatggcagcgtggaatgggatggccccccatcacctcactggaccctgtactctgatggctccagcagcatcctcagcaccaacaacgctaccttccaaaacacggggacctatcgctgcactgagcctggagaccccctgggaggcagcgccgccatccacctctatgtcaaagaccctgcccggccctggaacgtgctagcacaggaggtggtcgtgttcgaggaccaggacgcactactgccctgtctgctcacagacccggtgctggaagcaggcgtctcgctggtgcgtgtgcgtggccggcccctcatgcgccacaccaactactccttctcgccctggcatggcttcaccatccacagggccaagttcattcagagccaggactatcaatgcagtgccctgatgggtggcaggaaggtgatgtccatcagcatccggctgaaagtgcagaaagtcatcccagggcccccagccttgacactggtgcctgcagagctggtgcggattcgaggggaggctgcccagatcgtgtgctcagccagcagcgttgatgttaactttgatgtcttcctccaacacaacaacaccaagctcgcaatccctcaacaatctgactttcataataaccgttaccaaaaagtcctgaccctcaacctcgatcaagtagatttccaacatgccggcaactactcctgcgtggccagcaacgtgcagggcaagcactccacctccatgttcttccgggtggtagagagtgcctacttgaacttgagctctgagcagaacctcatccaggaggtgaccgtgggggaggggctcaacctcaaagtcatggtggaggcctacccaggcctgcaaggttttaactggacctacctgggacccttttctgaccaccagcctgagcccaagcttgctaatgctaccaccaaggacacatacaggcacaccttcaccctctctctgccccgcctgaagccctctgaggctggccgctactccttcctggccagaaacccaggaggctggagagctctgacgtttgagctcacccttcgataccccccagaggtaagcgtcatatggacattcatcaacggctctggcacccttttgtgtgctgcctctgggtacccccagcccaacgtgacatggctgcagtgcagtggccacactgataggtgtgatgaggcccaagtgctgcaggtctgggatgacccataccctgaggtcctgagccaggagcccttccacaaggtgacggtgcagagcctgctgactgttgagaccttagagcacaaccaaacctacgagtgcagggcccacaacagcgtggggagtggctcctgggccttcatacccatctctgcaggagcccacacgcatcccccggatgagttcctcttcacaccagtggtggtcgcctgcatgtccatcatggccttgctgctgctgctgctcctgctgctattgtacaagtataagcagaagcccaagtaccaggtccgctggaagatcatcgagagctatgagggcaacagttatactttcatcgaccccacgcagctgccttacaacgagaagtgggagttcccccggaacaacctgcagtttggtaagaccctcggagctggagcctttgggaaggtggtggaggccacggcctttggtctgggcaaggaggatgctgtcctgaaggtggctgtgaagatgctgaagtccacggcccatgctgatgagaaggaggcctcaggactataccaatctgccgagcagcagcagaagcggtggcagcggcagcagcagcagtga

SEQ ID NO: 6461 - DNA, 3697 bp, Homo sapiens
  source 1..3697: mol_type = unassigned DNA
ggatcagcccaaggaggaggaagaggaaaacaagacaaacagccagtgcagaggagaggaacgtgtgtccagtgtcccgatccctgcggagctagtagctgagagctctgtgccctgggcaccttgcagccctgcacctgcctgccacttccccaccgaggccatgggcccaggagttctgctgctcctgctggtggccacagcttggcatggtcagggaatcccagtgatagagcccagtgtccctgagctggtcgtgaagccaggagcaacggtgaccttgcgatgtgtgggcaatggcagcgtggaatgggatggccccccatcacctcactggaccctgtactctgatggctccagcagcatcctcagcaccaacaacgctaccttccaaaacacggggacctatcgctgcactgagcctggagaccccctgggaggcagcgccgccatccacctctatgtcaaagaccctgcccggccctggaacgtgctagcacaggaggtggtcgtgttcgaggaccaggacgcactactgccctgtctgctcacagacccggtgctggaagcaggcgtctcgctggtgcgtgtgcgtggccggcccctcatgcgccacaccaactactccttctcgccctggcatggcttcaccatccacagggccaagttcattcagagccaggactatcaatgcagtgccctgatgggtggcaggaaggtgatgtccatcagcatccggctgaaagtgcagaaagtcatcccagggcccccagccttgacactggtgcctgcagagctggtgcggattcgaggggaggctgcccagatcgtgtgctcagccagcagcgttgatgttaactttgatgtcttcctccaacacaacaacaccaagctcgcaatccctcaacaatctgactttcataataaccgttaccaaaaagtcctgaccctcaacctcgatcaagtagatttccaacatgccggcaactactcctgcgtggccagcaacgtgcagggcaagcactccacctccatgttcttccgggtggtagagagtgcctacttgaacttgagctctgagcagaacctcatccaggaggtgaccgtgggggaggggctcaacctcaaagtcatggtggaggcctacccaggcctgcaaggttttaactggacctacctgggacccttttctgaccaccagcctgagcccaagcttgctaatgctaccaccaaggacacatacaggcacaccttcaccctctctctgccccgcctgaagccctctgaggctggccgctactccttcctggccagaaacccaggaggctggagagctctgacgtttgagctcacccttcgataccccccagaggtaagcgtcatatggacattcatcaacggctctggcacccttttgtgtgctgcctctgggtacccccagcccaacgtgacatggctgcagtgcagtggccacactgataggtgtgatgaggcccaagtgctgcaggtctgggatgacccataccctgaggtcctgagccaggagcccttccacaaggtgacggtgcagagcctgctgactgttgagaccttagagcacaaccaaacctacgagtgcagggcccacaacagcgtggggagtggctcctgggccttcatacccatctctgcaggagcccacacgcatcccccggatgagttcctcttcacaccagtggtggtcgcctgcatgtccatcatggccttgctgctgctgctgctcctgctgctattgtacaagtataagcagaagcccaagtaccaggtccgctggaagatcatcgagagctatgagggcaacagttatactttcatcgaccccacgcagctgccttacaacgagaagtgggagttcccccggaacaacctgcagtttggtaagaccctcggagctggagcctttgggaaggtggtggaggccacggcctttggtctgggcaaggaggatgctgtcctgaaggtggctgtgaagatgctgaagtccacggcccatgctgatgagaaggaggccctcatgtccgagctgaagatcatgagccacctgggccagcacgagaacatcgtcaaccttctgggagcctgtacccatggagggacagtggcttctccagccagggtgtggacacctatgtggagatgaggcctgtctccacttcttcaaatgactccttctctgagcaagacctggacaaggaggatggacggcccctggagctccgggacctgcttcacttctccagccaagtagcccagggcatggccttcctcgcttccaagaattgcatccaccgggacgtggcagcgcgtaacgtgctgttgaccaatggtcatgtggccaagattggggacttcgggctggctagggacatcatgaatgactccaactacattgtcaagggcaatgcccgcctgcctgtgaagtggatggccccagagagcatctttgactgtgtctacacggttcagagcgacgtctggtcctatggcatcctcctctgggagatcttctcacttgggctgaatccctaccctggcatcctggtgaacagcaagttctataaactggtgaaggatggataccaaatggcccagcctgcatttgccccaaagaatatatacagcatcatgcaggcctgctgggccttggagcccacccacagacccaccttccagcagatctgctccttccttcaggagcaggcccaagaggacaggagagagcgggactataccaatctgccgagcagcagcagaagcggtggcagcggcagcagcagcagtgagctggaggaggagagctctagtgagcacctgacctgctgcgagcaaggggatatcgcccagcccttgctgcagcccaacaactatcagttctgctgaggagttgacgacagggagtaccactctcccctcccacaaacttcaactcctccatggatggggcgacacggggagaacatacaaactctgccttcggtcatttcactcaacagctcggcccagctctgaaacttgggaaggtgagggattcaggggaggtcagaggatcccacttcctgagcatgggccatcactgccagtcaggggctgggggctgagccctcacccccccctcccctactgttctcatggtgttggcctcgtgtttgctatgccaactagtagaaccttctttcctaatccccttatcttcatggaaatggactgactttatgcctatgaagtccccaggagctacactgatactgagaaaaccaggctctttggggctagacagactggcagagagtgagatctccctctctgagaggagcagcagatgctcacagaccacactcagctcaggccccttggagcaggatggctcctctaagaatctcacaggacctcttagtctctgccctatacgccgccttcactccacagcctcacccctcccacccccatactggtactgctgtaatgagccaagtggcagctaaaagttgggggtgttctgcccagtcccgtcattctgggctagaaggcaggggaccttggcatgtggctggccacaccaagcaggaagcacaaactcccccaagctgactcatcctaactaacagtcacgccgtgggatgtctctgtccacattaaactaacagcattaatgcagtca

SEQ ID NO: 6462 - DNA, 921 bp, Homo sapiens
  source 1..921: mol_type = unassigned DNA
atgggcccaggagttctgctgctcctgctggtggccacagcttggcatggtcagggaatcccagtgatagagcccagtgtccctgagctggtcgtgaagccaggagcaacggtgaccttgcgatgtgtgggcaatggcagcgtggaatgggatggccccccatcacctcactggaccctgtactctgatggctccagcagcatcctcagcaccaacaacgctaccttccaaaacacggggacctatcgctgcactgagcctggagaccccctgggaggcagcgccgccatccacctctatgtcaaagaccctgcccggccctggaacgtgctagcacaggaggtggtcgtgttcgaggaccaggacgcactactgccctgtctgctcacagacccggtgctggaagcaggcgtctcgctggtgcgtgtgcgtggccggcccctcatgcgccacaccaactactccttctcgccctggcatggcttcaccatccacagggccaagttcattcagagccaggactatcaatgcagtgccctgatgggtggcaggaaggtgatgtccatcagcatccggctgaaagtgcagaaagtcatcccagggcccccagccttgacactggtgcctgcagagctggtgcggattcgaggggaggctgcccagatcgtgtgctcagccagcagcgttgatgttaactttgatgtcttcctccaacacaacaacaccaagctcgcaatccctcaacaatctgactttcataataaccgttaccaaaaagtcctgaccctcaacctcgatcaagtagatttccaacatgccggcaactactcctgcgtggccagcaacgtgcagggcaagcactccacctccatgttcttccgggtggtaggcacaccttcaccctctctctgccccgcctga

SEQ ID NO: 6463 - DNA, 1628 bp, Homo sapiens
  source 1..1628: mol_type = unassigned DNA
agcaggtggaaggagaggaagcggatgccgtggggtttacagcaggaaaatccgtggagacagcagatccgagaagcggcgatgtttgcgtagaaccctgtacgtgcttccttcggcctgtcgctcttcccttctctctgaccagcaccatgcttctcctggtgacaagccttctgctctgtgagttaccacacccagcattcctcctgatcccagagaaatcggatctgcgaacagtggcaccagcctctagtctcaatgtgaggtttgactccaggacgatgaatttaagctgggactgccaagaaaacacaaccttcagcaagtgtttcttaactgacaagaagaacagagtcgtggaacccaggctcagtaacaacgaatgttcgtgcacatttcgtgaaatttgtctgcatgaaggagtcacatttgaggttcacgtgaatactagtcaaagaggatttcaacagaaactgctttatccaaattcaggaagggagggtaccgctgctcagaatttctcctgtttcatctacaatgcggatttaatgaactgtacctgggcgaggggtccgacggccccccgtgacgtccagtattttttgtacatacgaaactcaaagagaaggagggagatccggtgtccttattacatacaagactcaggaacccatgtgggatgtcacctggataacctgtcaggattaacgtctcgcaattactttctggttaacggaaccagccgagaaattggcatccaattctttgattcacttttggacacaaagaaaatagaacgattcaaccctcccagcaatgtcaccgtacgttgcaacacgacgcactgcctcgtacggtggaaacagcccaggacctatcagaagctgtcgtacctggactttcagtaccagctggacgtccacagaaagaatacccagcctggcacggaaaacctactgattaatgtttctggtgatttggaaaatagatacaactttccaagctctgagcccagagcaaaacacagtgtgaagatcagagctgcagacgtccgcatcttgaattggagctcctggagtgaagccattgaatttgatcatctgggaggaattcaccccagaggaagggaaaggctaccgcgaagaggtcttgaccgtgaaggaaattacctgagacccagagggtgtaggaatggcatggacatctccgcctccgcgacacgggggaactgttttcttgatgatgctgtgaacctttatatcattttctatgtttttatttaaaaacatgacatttggggccaggcgcggtggctcacgcctgtaatcccagcactttgggaggccaaggcaggcggatcacctgaggtcaggagttcaagaccagcctgcccaacatggtgaaaccccatctggactaaaaatgcagaaatttacccaggcacggcggcggacgcccatcatcccagctacttgggaggctgaggcaggagaattgcttgaacccgtgaggcggaggttgtagtgagccaagatcgcaccattgcacaccaacctgcgtgacagagcaagattgcatctcaaaacaaacaataataataaataataaaaacctgatatttggctggg

SEQ ID NO: 6464 - DNA, 1410 bp, Homo sapiens
  source 1..1410: mol_type = unassigned DNA
agcaggtggaaggagaggaagcggatgccgtggggtttacagcaggaaaatccgtggagacagcagatccgagaagcggcgatgtttgcgtagaaccctgtacgtgcttccttcggcctgtcgctcttcccttctctctgaccagcaccatgcttctcctggtgacaagccttctgctctgtgagttaccacacccagcattcctcctgatcccagagaaatcggatctgcgaacagtggcaccagcctctagtctcaatgtgaggtttgactccaggacgatgaatttaagctgggactgccaagaaaacacaaccttcagcaagtgtttcttaactgacaagaagaacagagtcgtggaacccaggctcagtaacaacgaatgttcgtgcacatttcgtgaaatttgtctgcatgaaggagtcacatttgaggttcacgtgaatactagtcaaagaggatttcaacagaaactgctttatccaaattcaggaagggagggtaccgctgctcagaatttctcctgtttcatctacaatgcggatttaatgaactgtacctgggcgaggggtccgacggccccccgtgacgtccagtattttttgtacatacgaaactcaaagagaaggagggagatccggtgtccttattacatacaagactcaggaacccatgtgggatgtcacctggataacctgtcaggattaacgtctcgcaattactttctggttaacggaaccagccgagaaattggcatccaattctttgattcacttttggacacaaagaaaataggttccttaggatacagcggctgttcccgccagttccacagatcaaagacaaactgaatgataaccatgaggtggaagacgagatcatctgggaggaattcaccccagaggaagggaaaggctaccgcgaagaggtcttgaccgtgaaggaaattacctgagacccagagggtgtaggaatggcatggacatctccgcctccgcgacacgggggaactgttttcttgatgatgctgtgaacctttatatcattttctatgtttttatttaaaaacatgacatttggggccaggcgcggtggctcacgcctgtaatcccagcactttgggaggccaaggcaggcggatcacctgaggtcaggagttcaagaccagcctgcccaacatggtgaaaccccatctggactaaaaatgcagaaatttacccaggcacggcggcggacgcccatcatcccagctacttgggaggctgaggcaggagaattgcttgaacccgtgaggcggaggttgtagtgagccaagatcgcaccattgcacaccaacctgcgtgacagagcaagattgcatctcaaaacaaacaataataataaataataaaaacctgatatttggctggg

SEQ ID NO: 6465 - DNA, 1756 bp, Homo sapiens
  source 1..1756: mol_type = unassigned DNA
ctctgaagggagctactcagaagcgggagtctccgagagaagaaaagcaggtggaaggagaggaagcggatgccgtggggtttacagcaggaaaatccgtggagacagcagatccgagaagcggcgatgtttgcgtagaaccctgtacgtgcttccttcggcctgtcgctcttcccttctctctgaccagcaccatgcttctcctggtgacaagccttctgctctgtgagttaccacacccagcattcctcctgatcccagagaaatcggatctgcgaacagtggcaccagcctctagtctcaatgtgaggtttgactccaggacgatgaatttaagctgggactgccaagaaaacacaaccttcagcaagtgtttcttaactgacaagaagaacagagtcgtggaacccaggctcagtaacaacgaatgttcgtgcacatttcgtgaaatttgtctgcatgaaggagtcacatttgaggttcacgtgaatactagtcaaagaggatttcaacagaaactgctttatccaaattcaggaagggagggtaccgctgctcagaatttctcctgtttcatctacaatgcggatttaatgaactgtacctgggcgaggggtccgacggccccccgtgacgtccagtattttttgtacatacgaaactcaaagagaaggagggagatccggtgtccttattacatacaagactcaggaacccatgtgggatgtcacctggataacctgtcaggattaacgtctcgcaattactttctggttaacggaaccagccgagaaattggcatccaattctttgattcacttttggacacaaagaaaatagaacgattcaaccctcccagcaatgtcaccgtacgttgcaacacgacgcactgcctcgtacggtggaaacagcccaggacctatcagaagctgtcgtacctggactttcagtaccagctggacgtccacagaaagaatacccagcctggcacggaaaacctactgattaatgtttctggtgatttggaaaatagatacaactttccaagctctgagcccagagcaaaacacagtgtgaagatcagagctgcagacgtccgcatcttgaattggagctcctggagtgaagccattgaatttggttccttaggatacagcggctgttcccgccagttccacagatcaaagacaaactgaatgataaccatgaggtggaagacgagatcatctgggaggaattcaccccagaggaagggaaaggctaccgcgaagaggtcttgaccgtgaaggaaattacctgagacccagagggtgtaggaatggcatggacatctccgcctccgcgacacgggggaactgttttcttgatgatgctgtgaacctttatatcattttctatgtttttatttaaaaacatgacatttggggccaggcgcggtggctcacgcctgtaatcccagcactttgggaggccaaggcaggcggatcacctgaggtcaggagttcaagaccagcctgcccaacatggtgaaaccccatctggactaaaaatgcagaaatttacccaggcacggcggcggacgcccatcatcccagctacttgggaggctgaggcaggagaattgcttgaacccgtgaggcggaggttgtagtgagccaagatcgcaccattgcacaccaacctgcgtgacagagcaagattgcatctcaaaacaaacaataataataaataataaaaacctgatatttggctgggc

SEQ ID NO: 6466 - DNA, 1283 bp, Homo sapiens
  source 1..1283: mol_type = unassigned DNA
ttctctctgaccagcaccatgcttctcctggtgacaagccttctgctctgtgagttaccacacccagcattcctcctgatcccagagaaatcggatctgcgaacagtggcaccagcctctagtctcaatgtgaggtttgactccaggacgatgaatttaagctgggactgccaagaaaacacaaccttcagcaagtgtttcttaactgacaagaagaacagagtcgtggaacccaggctcagtaacaacgaatgttcgtgcacatttcgtgaaatttgtctgcatgaaggagtcacatttgaggttcacgtgaatactagtcaaagaggatttcaacagaaactgctttatccaaattcaggaagggagggtaccgctgctcagaatttctcctgtttcatctacaatgcggatttaatgaactgtacctgggcgaggggtccgacggccccccgtgacgtccagtattttttgtacatacgaaactcaaagagaaggagggagatccggtgtccttattacatacaagactcaggaacccatgtgggatgtcacctggataacctgtcaggattaacgtctcgcaattactttctggttaacggaaccagccgagaaattggcatccaattctttgattcacttttggacacaaagaaaatagaacgattcaaccctcccagcaatgtcaccgtacgttgcaacacgacgcactgcctcgtacggtggaaacagcccaggacctatcagaagctgtcgtacctggactttcagtaccagctggacgtccacagaaagaatacccagcctggcacggaaaacctactgattaatgtttctggtgatttggaaaatagatacaactttccaagctctgagcccagagcaaaacacagtgtgaagatcagagctgcagacgtccgcatcttgaattggagctcctggagtgaagccattgaatttggttccttaggatacagcggctgttcccgccagttccacagatcaaagacaaactgaatgataaccatgaggtggaagacgagatcatctgggaggaattcaccccagaggaagggaaaggctaccgcgaagaggtcttgaccgtgaaggaaattacctgagacccagagggtgtaggaatggcatggacatctccgcctccgcgacacgggggaactgttttcttgatgatgctgtgaacctttatatcattttctatgtttttatttaaaaacatgacatttggggccaggcgcggtggctcacgcctgtaatcccag

SEQ ID NO: 6467 - DNA, 1720 bp, Homo sapiens
  source 1..1720: mol_type = unassigned DNA
ctctgaagggagctactcagaagcgggagtctccgagagaagaaaagcaggtggaaggagaggaagcggatgccgtggggtttacagcaggaaaatccgtggagacagcagatccgagaagcggcgatgtttgcgtagaaccctgtacgtgcttccttcggcctgtcgctcttcccttctctctgaccagcaccatgcttctcctggtgacaagccttctgctctgtgagttaccacacccagcattcctcctgatcccagagaaatcggatctgcgaacagtggcaccagcctctagtctcaatgtgaggtttgactccaggacgatgaatttaagctgggactgccaagaaaacacaaccttcagcaagtgtttcttaactgacaagaagaacagagtcgtggaacccaggctcagtaacaacgaatgttcgtgcacatttcgtgaaatttgtctgcatgaaggagtcacatttgaggttcacgtgaatactagtcaaagaggatttcaacagaaactgctttatccaaattcaggaagggagggtaccgctgctcagaatttctcctgtttcatctacaatgcggatttaatgaactgtacctgggcgaggggtccgacggccccccgtgacgtccagtattttttgtacatacgaaactcaaagagaaggagggagatccggtgtccttattacatacaagactcaggaacccatgtgggatgtcacctggataacctgtcaggattaacgtctcgcaattactttctggttaacggaaccagccgagaaattggcatccaattctttgattcacttttggacacaaagaaaatagaacgattcaaccctcccagcaatgtcaccgtacgttgcaacacgacgcactgcctcgtacggtggaaacagcccaggacctatcagaagctgtcgtacctggactttcagtaccagctggacgtccacagaaagaatacccagcctggcacggaaaacctactggtagttctgacgacgggaacctcggctctgtgtacatttatgtgctcctaatcgtgggaacccttgtctgtggcatcgtcctcggcttcctctttaaaaggttccttaggatacagcggctgttcccgccagttccacagatcaaagacaaactgaatgataaccatgaggtggaagacgagatcatctgggaggaattcaccccagaggaagggaaaggctaccgcgaagaggtcttgaccgtgaaggaaattacctgagacccagagggtgtaggaatggcatggacatctccgcctccgcgacacgggggaactgttttcttgatgatgctgtgaacctttatatcattttctatgtttttatttaaaaacatgacatttggggccaggcgcggtggctcacgcctgtaatcccagcactttgggaggccaaggcaggcggatcacctgaggtcaggagttcaagaccagcctgcccaacatggtgaaaccccatctggactaaaaatgcagaaatttacccaggcacggcggcggacgcccatcatcccagctacttgggaggctgaggcaggagaattgcttgaacccgtgaggcggaggttgtagtgagccaagatcgcaccattgcacaccaacctgcgtgacagagcaagattgcatctcaaaacaaacaataataataaataataaaaacctgatatttggctgggc

SEQ ID NO: 6468 - DNA, 1601 bp, Homo sapiens
  source 1..1601: mol_type = unassigned DNA
ccgagagaagaaaagcaggtggaaggagaggaagcggatgccgtggggtttacagcaggaaaatccgtggagacagcagatccgagaagcggcgatgtttgcgtagaaccctgtacgtgcttccttcggcctgtcgctcttcccttctctctgaccagcaccatgcttctcctggtgacaagccttctgctctgtgagttaccacacccagcattcctcctgatcccagagaaatcggatctgcgaacagtggcaccagcctctagtctcaatgtgaggtttgactccaggacgatgaatttaagctgggactgccaagaaaacacaaccttcagcaagtgtttcttaactgacaagaagaacagagtcgtggaacccaggctcagtaacaacgaatgttcgtgcacatttcgtgaaatttgtctgcatgaaggagtcacatttgaggttcacgtgaatactagtcaaagaggatttcaacagaaactgctttatccaaattcaggaagggagggtaccgctgctcagaatttctcctgtttcatctacaatgcggatttaatgaactgtacctgggcgaggggtccgacggccccccgtgacgtccagtattttttgtacatacgaaactcaaagagaaggagggagatccggtgtccttattacatacaagactcaggaacccatgtgggatgtcacctggataacctgtcaggattaacgtctcgcaattactttctggttaacggaaccagccgagaaattggcatccaattctttgattcacttttggacacaaagaaaatagaacgattcaaccctcccagcaatgtcaccgtacgttgcaacacgacgcactgcctcgtacggtggaaacagcccaggacctatcagaagctgtcgtacctggactttcagtaccagctggacgtccacagaaagaatacccagcctggcacggaaaacctactgattaatgtttctggtgatttggaaaatagatacaactttccaagctctgagcccagagcaaaacacagtgtgaagatcagagctgcagacgtccgcatcttgaattggagctcctggagtgaagccattgaatttggttctgacgacgggaacctcggctctgtgtacatttatgtgctcctaatcgtgggaacccttgtctgtggcatcgtcctcggcttcctctttaaaaggttccttaggatacagcggctgttcccgccagttccacagatcaaagacaaactgaatgataaccatgaggtggaagacgagatgggaccgcagcgtcaccaccggtgtggctggaatctgtatcccactcctgggccttctcccgggtcggggtcttctccaaggttggggtcagagtcatctctgtgagctccatcaggagaaactgaggcagggtggtggtcaagaaaaggaggagaagacggtagagagggccaggcacggtggctcatgcctgtcatcccagcactttgggaggttgaggcatgtggatcatctgaggtcagaggttcgagaccagcctggccaacgtggtgaaaccccatctctgctaaaaatacaaaaaattagctggg

SEQ ID NO: 6469 - DNA, 2291 bp, Homo sapiens
  source 1..2291: mol_type = unassigned DNA
ggagctactcagaagcgggagtctccgagagaagaaaagcaggtggaaggagaggaagcggatgccgtggggtttacagcaggaaaatccgtggagacagcagatccgagaagcggcgatgtttgcgtagaaccctgtacgtgcttccttcggcctgtcgctcttcccttctctctgaccagcaccatgcttctcctggtgacaagccttctgctctgtgagttaccacacccagcattcctcctgatcccagagaaatcggatctgcgaacagtggcaccagcctctagtctcaatgtgaggtttgactccaggacgatgaatttaagctgggactgccaagaaaacacaaccttcagcaagtgtttcttaactgacaagaagaacagagtcgtggaacccaggctcagtaacaacgaatgttcgtgcacatttcgtgaaatttgtctgcatgaaggagtcacatttgaggttcacgtgaatactagtcaaagaggatttcaacagaaactgctttatccaaattcaggaagggagggtaccgctgctcagaatttctcctgtttcatctacaatgcggatttaatgaactgtacctgggcgaggggtccgacggccccccgtgacgtccagtattttttgtacatacgaaactcaaagagaaggagggagatccggtgtccttattacatacaagactcaggaacccatgtgggatgtcacctggataacctgtcaggattaacgtctcgcaattactttctggttaacggaaccagccgagaaattggcatccaattctttgattcacttttggacacaaagaaaatagaacgattcaaccctcccagcaatgtcaccgtacgttgcaacacgacgcactgcctcgtacggtggaaacagcccaggacctatcagaagctgtcgtacctggactttcagtaccagctggacgtccacagaaagaatacccagcctggcacggaaaacctactgattaatgtttctggtgatttggaaaatagatacaactttccaagctctgagcccagagcaaaacacagtgtgaagatcagagctgcagacgtccgcatcttgaattggagctcctggagtgaagccattgaatttggttctgacgacgggaacctcggctctgtgtacatttatgtgctcctaatcgtgggaacccttgtctgtggcatcgtcctcggcttcctctttaaaaggttccttaggatacagcggctgttcccgccagttccacagatcaaagacaaactgaatgataaccatgaggtggaagacgagatcatctgggaggaattcaccccagaggaagggaaaggctaccgcgaagaggtcttgaccgtgaaggaaattacctgagacccagagggtgtaggaatggcatggacatctccgcctccgcgacacgggggaactgttttcttgatgatgctgtgaacctttatatcattttctatgtttttatttaaaaacatgacatttggggccaggcgcggtggctcacgcctgtaatcccagcactttgggaggccaaggcaggcggatcacctgaggtcaggagttcaagaccagcctgcccaacatggtgaaaccccatctggactaaaaatgcagaaatttacccaggcacggcggcggacgcccatcatcccagctacttgggaggctgaggcaggagaattgcttgaacccgtgaggcggaggttgtagtgagccaagatcgcaccattgcacaccaacctgcgtgacagagcaagattgcatctcaaaacaaacaataataataaataataaaaacctgatatttggctgggcgccgtggctcatgcctgtaatcctaacactttggaggattgctggagacaggagtttaagaccagtctgggcaacatagcaagaccctgtctctacaaaaaaggcaaaaattagctgggcgtggtggcttgtgcctgtagtgccagctatctgggaggctgaggcgggaggatcacttgagttcaagctgacagtaagctatgattgcaccgttgcactccagcctgggtaacaaactaagaccccatctctctgtctcaaaaaaagtgatacttcgcaaagatgcttagactccaagaagcttttgcatctctttccaacccaactactgaggtactgtgtagcctcctccttgaataactaacctggtgagctgagattgcgccattgcaatccagcctgggcaacaagagcaaaactccatcacatttaaaaaaaaaaaaaaa

SEQ ID NO: 6470 - DNA, 1816 bp, Homo sapiens
  source 1..1816: mol_type = unassigned DNA
ctctgaagggagctactcagaagcgggagtctccgagagaagaaaagcaggtggaaggagaggaagcggatgccgtggggtttacagcaggaaaatccgtggagacagcagatccgagaagcggcgatgtttgcgtagaaccctctcttcccttctctctgaccagcaccatgcttctcctggtgacaagccttctgctctgtgagttaccacacccagcattcctcctgatcccagagaaatcggatctgcgaacagtggcaccagcctctagtctcaatgtgaggtttgactccaggacgatgaatttaagctgggactgccaagaaaacacaaccttcagcaagtgtttcttaactgacaagaagaacagagtcgtggaacccaggctcagtaacaacgaatgttcgtgcacatttcgtgaaatttgtctgcatgaaggagtcacatttgaggttcacgtgaatactagtcaaagaggatttcaacagaaactgctttatccaaattcaggaagggagggtaccgctgctcagaatttctcctgtttcatctacaatgcggatttaatgaactgtacctgggcgaggggtccgacggccccccgtgacgtccagtattttttgtacatacgaaactcaaagagaaggagggagatccggtgtccttattacatacaagactcaggaacccatgtgggatgtcacctggataacctgtcaggattaacgtctcgcaattactttctggttaacggaaccagccgagaaattggcatccaattctttgattcacttttggacacaaagaaaatagaacgattcaaccctcccagcaatgtcaccgtacgttgcaacacgacgcactgcctcgtacggtggaaacagcccaggacctatcagaagctgtcgtacctggactttcagtaccagctggacgtccacagaaagaatacccagcctggcacggaaaacctactgattaatgtttctggtgatttggaaaatagatacaactttccaagctctgagcccagagcaaaacacagtgtgaagatcagagctgcagacgtccgcatcttgaattggagctcctggagtgaagccattgaatttggttctgacgacgggaacctcggctctgtgtacatttatgtgctcctaatcgtgggaacccttgtctgtggcatcgtcctcggcttcctctttaaaaggttccttaggatacagcggctgttcccgccagttccacagatcaaagacaaactgaatgataaccatgaggtggaagacgagatcatctgggaggaattcaccccagaggaagggaaaggctaccgcgaagaggtcttgaccgtgaaggaaattacctgagacccagagggtgtaggaatggcatggacatctccgcctccgcgacacgggggaactgttttcttgatgatgctgtgaacctttatatcattttctatgtttttatttaaaaacatgacatttggggccaggcgcggtggctcacgcctgtaatcccagcactttgggaggccaaggcaggcggatcacctgaggtcaggagttcaagaccagcctgcccaacatggtgaaaccccatctggactaaaaatgcagaaatttacccaggcacggcggcggacgcccatcatcccagctacttgggaggctgaggcaggagaattgcttgaacccgtgaggcggaggttgtagtgagccaagatcgcaccattgcacaccaacctgcgtgacagagcaagattgcatctcaaaacaaacaataataataaataataaaaacctga

SEQ ID NO: 6471 - DNA, 802 bp, Homo sapiens
  source 1..802: mol_type = unassigned DNA
agaagcgggagtctccgagagaagaaaagcaggtggaaggagaggaagcggatgccgtggggctcttcccttctctctgaccagcaccatgcttctcctggtgacaagccttctgctctgtgagttaccacacccagcattcctcctgatcccagagaaatcggatctgcgaacagtggcaccagcctctagtctcaatgtgaggtttgactccaggacgatgaatttaagctgggactgccaagaaaacacaaccttcagcaagtgtttcttaactgacaagaagaacagagtcgtggaacccaggctcagtaacaacgaatgttcgtgcacatttcgtgaaatttgtctgcatgaaggagtcacatttgaggttcacgtgaatactagtcaaagaggatttcaacagaaactgctttatccaaattcaggaagggagggtaccgctgctcagaatttctcctgtttcatctacaatgcggatttaatgaactgtacctgggcgaggggtccgacggccccccgtgacgtccagtattttttgtacatacgaaactcaaagagaaggagggagatccggtgtccttattacatacaagactcaggaacccatgtgggatgtcacctggataacctgtcaggattaacgtctcgcaattactttctggttaacggaaccagccgagaaattggcatccaattctttgattcacttttggacacaaagaaaatagaacgattcaaccctcccagcaatgtcaccgtacgttgcaacacgacgcactgcctcgtacggtggaaa

SEQ ID NO: 6472 - DNA, 1787 bp, Homo sapiens
  source 1..1787: mol_type = unassigned DNA
ctcttcccttctctctgaccagcaccatgcttctcctggtgacaagccttctgctctgtgagttaccacacccagcattcctcctgatcccagagaaatcggatctgcgaacagtggcaccagcctctagtctcaatgtgaggtttgactccaggacgatgaatttaagctgggactgccaagaaaacacaaccttcagcaagtgtttcttaactgacaagaagaacagagtcgtggaacccaggctcagtaacaacgaatgttcgtgcacatttcgtgaaatttgtctgcatgaaggagtcacatttgaggttcacgtgaatactagtcaaagaggatttcaacagaaactgctttatccaaattcaggaagggagggtaccgctgctcagaatttctcctgtttcatctacaatgcggatttaatgaactgtacctgggcgaggggtccgacggccccccgtgacgtccagtattttttgtacatacgaaactcaaagagaaggagggagatccggtgtccttattacatacaagactcaggaacccatgtgggatgtcacctggataacctgtcaggattaacgtctcgcaattactttctggttaacggaaccagccgagaaattggcatccaattctttgattcacttttggacacaaagaaaatagaacgattcaaccctcccagcaatgtcaccgtacgttgcaacacgacgcactgcctcgtacggtggaaacagcccaggacctatcagaagctgtcgtacctggactttcagtaccagctggacgtccacagaaagaatacccagcctggcacggaaaacctactgattaatgtttctggtgatttggaaaatagatacaactttccaagctctgagcccagagcaaaacacagtgtgaagatcagagctgcagacgtccgcatcttgaattggagctcctggagtgaagccattgaatttgggtctcactctgtcacccaggctggagtgcaatggcacaatctcggctcactgcaacctccgtctcccaggctcaagcgattctcctgcctcagactcccaggttctgacgacgggaacctcggctctgtgtacatttatgtgctcctaatcgtgggaacccttgtctgtggcatcgtcctcggcttcctctttaaaaggttccttaggatacagcggctgttcccgccagttccacagatcaaagacaaactgaatgataaccatgaggtggaagacgagatcatctgggaggaattcaccccagaggaagggaaaggctaccgcgaagaggtcttgaccgtgaaggaaattacctgagacccagagggtgtaggaatggcatggacatctccgcctccgcgacacgggggaactgttttcttgatgatgctgtgaacctttatatcattttctatgtttttatttaaaaacatgacatttggggccaggcgcggtggctcacgcctgtaatcccagcactttgggaggccaaggcaggcggatcacctgaggtcaggagttcaagaccagcctgcccaacatggtgaaaccccatctggactaaaaatgcagaaatttacccaggcacggcggcggacgcccatcatcccagctacttgggaggctgaggcaggagaattgcttgaacccgtgaggcggaggttgtagtgagccaagatcgcaccattgcacaccaacctgcgtgacagagcaagattgcatctcaaaacaaacaataataataaataataaaaacctgatatttggctgggc

SEQ ID NO: 6473 - DNA, 856 bp, Homo sapiens
  source 1..856: mol_type = unassigned DNA
ctccgagagaagaaaagcaggtggaaggagaggaagcggatgccgtggggtttacagcaggaaaatccgtggagacagcagatccgagaagcggcgatgtttgcgtagaaccctgtcagctgagccatgacccatgaaccatggaagcttgactctagattgaccatcttgagatgccaaagatgtccacgtcctaatcccatgtgggagacagaataatggccctgcagaccttcccagctggccatgacccctcatttgaccagctcttcccttctctctgaccagcaccatgcttctcctggtgacaagccttctgctctgtgagttaccacacccagcattcctcctgatcccagagaaatcggatctgcgaacagtggcaccagcctctagtctcaatgtgaggtttgactccaggacgatgaatttaagctgggactgccaagaaaacacaaccttcagcaagtgtttcttaactgacaagaagaacagagtcgtggaacccaggctcagtaacaacgaatgttcgtgcacatttcgtgaaatttgtctgcatgaaggagtcacatttgaggttcacgtgaatactagtcaaagaggatttcaacagaaactgctttatccaaattcaggaagggagggtaccgctgctcagaatttctcctgtttcatctacaatgcggatttaatgaactgtacctgggcgaggggtccgacggccccccgtgacgtccagtattttttgtacatacgaaactcaaagagaaggagggagatccggtgtccttattacatacaagactcaggaacccatgtgggatgtcacctggataacctgtcaggattaacgtct

SEQ ID NO: 6474 - DNA, 1981 bp, Homo sapiens
  source 1..1981: mol_type = unassigned DNA
ctctgaagggagctactcagaagcgggagtctccgagagaagaaaagcaggtggaaggagaggaagcggatgccgtggggtttacagcaggaaaatccgtggagacagcagatccgagaagcggcgatgtttgcgtagaaccctgtcagctgagccatgacccatgaaccatggaagcttgactctagattgaccatcttgagatgccaaagatgtccacgtcctaatcccatgtgggagacagaataatggccctgcagaccttcccagctggccatgacccctcatttgaccagctcttcccttctctctgaccagcaccatgcttctcctggtgacaagccttctgctctgtgagttaccacacccagcattcctcctgatcccagagaaatcggatctgcgaacagtggcaccagcctctagtctcaatgtgaggtttgactccaggacgatgaatttaagctgggactgccaagaaaacacaaccttcagcaagtgtttcttaactgacaagaagaacagagtcgtggaacccaggctcagtaacaacgaatgttcgtgcacatttcgtgaaatttgtctgcatgaaggagtcacatttgaggttcacgtgaatactagtcaaagaggatttcaacagaaactgctttatccaaattcaggaagggagggtaccgctgctcagaatttctcctgtttcatctacaatgcggatttaatgaactgtacctgggcgaggggtccgacggccccccgtgacgtccagtattttttgtacatacgaaactcaaagagaaggagggagatccggtgtccttattacatacaagactcaggaacccatgtgggatgtcacctggataacctgtcaggattaacgtctcgcaattactttctggttaacggaaccagccgagaaattggcatccaattctttgattcacttttggacacaaagaaaatagaacgattcaaccctcccagcaatgtcaccgtacgttgcaacacgacgcactgcctcgtacggtggaaacagcccaggacctatcagaagctgtcgtacctggactttcagtaccagctggacgtccacagaaagaatacccagcctggcacggaaaacctactgattaatgtttctggtgatttggaaaatagatacaactttccaagctctgagcccagagcaaaacacagtgtgaagatcagagctgcagacgtccgcatcttgaattggagctcctggagtgaagccattgaatttggttctgacgacgggaacctcggctctgtgtacatttatgtgctcctaatcgtgggaacccttgtctgtggcatcgtcctcggcttcctctttaaaaggttccttaggatacagcggctgttcccgccagttccacagatcaaagacaaactgaatgataaccatgaggtggaagacgagatcatctgggaggaattcaccccagaggaagggaaaggctaccgcgaagaggtcttgaccgtgaaggaaattacctgagacccagagggtgtaggaatggcatggacatctccgcctccgcgacacgggggaactgttttcttgatgatgctgtgaacctttatatcattttctatgtttttatttaaaaacatgacatttggggccaggcgcggtggctcacgcctgtaatcccagcactttgggaggccaaggcaggcggatcacctgaggtcaggagttcaagaccagcctgcccaacatggtgaaaccccatctggactaaaaatgcagaaatttacccaggcacggcggcggacgcccatcatcccagctacttgggaggctgaggcaggagaattgcttgaacccgtgaggcggaggttgtagtgagccaagatcgcaccattgcacaccaacctgcgtgacagagcaagattgcatctcaaaacaaacaataataataaataataaaaacctgatatttggctgggc

SEQ ID NO: 6475 - DNA, 1622 bp, Homo sapiens
  source 1..1622: mol_type = unassigned DNA
ctctgaagggagctactcagaagcgggagtctccgagagaagaaaagcaggtggaaggagaggaagcggatgccgtggggctcttcccttctctctgaccagcaccatgcttctcctggtgacaagccttctgctctgtgagttaccacacccagcattcctcctgatcccagagaaatcggctcagtaacaacgaatgttcgtgcacatttcgtgaaatttgtctgcatgaaggagtcacatttgaggttcacgtgaatactagtcaaagaggatttcaacagaaactgctttatccaaattcaggaagggagggtaccgctgctcagaatttctcctgtttcatctacaatgcggatttaatgaactgtacctgggcgaggggtccgacggccccccgtgacgtccagtattttttgtacatacgaaactcaaagagaaggagggagatccggtgtccttattacatacaagactcaggaacccatgtgggatgtcacctggataacctgtcaggattaacgtctcgcaattactttctggttaacggaaccagccgagaaattggcatccaattctttgattcacttttggacacaaagaaaatagaacgattcaaccctcccagcaatgtcaccgtacgttgcaacacgacgcactgcctcgtacggtggaaacagcccaggacctatcagaagctgtcgtacctggactttcagtaccagctggacgtccacagaaagaatacccagcctggcacggaaaacctactgattaatgtttctggtgatttggaaaatagatacaactttccaagctctgagcccagagcaaaacacagtgtgaagatcagagctgcagacgtccgcatcttgaattggagctcctggagtgaagccattgaatttggttctgacgacgggaacctcggctctgtgtacatttatgtgctcctaatcgtgggaacccttgtctgtggcatcgtcctcggcttcctctttaaaaggttccttaggatacagcggctgttcccgccagttccacagatcaaagacaaactgaatgataaccatgaggtggaagacgagatcatctgggaggaattcaccccagaggaagggaaaggctaccgcgaagaggtcttgaccgtgaaggaaattacctgagacccagagggtgtaggaatggcatggacatctccgcctccgcgacacgggggaactgttttcttgatgatgctgtgaacctttatatcattttctatgtttttatttaaaaacatgacatttggggccaggcgcggtggctcacgcctgtaatcccagcactttgggaggccaaggcaggcggatcacctgaggtcaggagttcaagaccagcctgcccaacatggtgaaaccccatctggactaaaaatgcagaaatttacccaggcacggcggcggacgcccatcatcccagctacttgggaggctgaggcaggagaattgcttgaacccgtgaggcggaggttgtagtgagccaagatcgcaccattgcacaccaacctgcgtgacagagcaagattgcatctcaaaacaaacaataataataaataataaaaacctgatatttggctgggc

SEQ ID NO: 6476 - DNA, 4866 bp, Homo sapiens
  source 1..4866: mol_type = unassigned DNA
gcctagaggctccagaagaagactggtctctcccaccacacagaggcctggaggaggcagaggccaggagggagaggtcccaagagcctgtgaaatgggtctggcctggctcccagctgggcaggaacacaggacttcaggacactaaggaccctgtcatgcccatggccagcacccaccagtgctggtgcctgcctgtccagagctgaccagggagatggtgctggcccaggggctgctctccatggccctgctggccctgtgctgggagcgcagcctggcaggggcagaagaaaccatcccgctgcagaccctgcgctgctacaacgactacaccagccacatcacctgcaggtgggcagacacccaggatgcccagcggctcgtcaacgtgaccctcattcgccgggtgaatgaggacctcctggagccagtgtcctgtgacctcagtgatgacatgccctggtcagcctgcccccatccccgctgcgtgcccaggagatgtgtcattccctgccagagttttgtcgtcactgacgttgactacttctcattccaaccagacaggcctctgggcacccggctcaccgtcactctgacccagcatgtccagcctcctgagcccagggacctgcagatcagcaccgaccaggaccacttcctgctgacctggagtgtggcccttgggagtccccagagccactggttgtccccaggggatctggagtttgaggtggtctacaagcggcttcaggactcttgggaggacgcagccatcctcctctccaacacctcccaggccaccctggggccagagcacctcatgcccagcagcacctacgtggcccgagtacggacccgcctggccccaggttctcggctctcaggacgtcccagcaagtggagcccagaggtttgctgggactcccagccaggggatgaggcccagccccagaacctggagtgcttctttgacggggccgccgtgctcagctgctcctgggaggtgaggaaggaggtggccagctcggtctcctttggcctattctacaagcccagcccagatgcaggctctgctgtgctcctcagggaggaagagtgctccccagtgctgagggaggggctcggcagcctccacaccaggcaccactgccagattcccgtgcccgaccccgcgacccacggccaatacatcgtctctgttcagccaaggagggcagagaaacacataaagagctcagtgaacatccagatggcccctccatccctcaacgtgaccaaggatggagacagctacagcctgcgctgggaaacaatgaaaatgcgatacgaacacatagaccacacatttgagatccagtacaggaaagacacggccacgtggaaggacagcaagaccgagaccctccagaacgcccacagcatggccctgccagccctggagccctccaccaggtactgggccagggtgagggtcaggacctcccgcaccggctacaacgggatctggagcgagtggagtgaggcgcgctcctgggacaccgagtcggtgctgcctatgtgggtgctggccctcatcgtgatcttcctcaccatcgctgtgctcctggccctccgcttctgtggcatctacgggtacaggctgcgcagaaagtgggaggagaagatccccaaccccagcaagagccacctgttccagaacgggagcgcagagctttggcccccaggcagcatgtcggccttcactagcgggagtcccccacaccaggggccgtggggcagccgcttccctgagctggagggggtgttccctgtaggattcggggacagcgaggtgtcacctctcaccatagaggaccccaagcatgtctgtgatccaccatctgggcctgacacgactccagctgcctcagatctacccacagagcagccccccagcccccagccaggcccgcctgccgcctcccacacacctgagaaacaggcttccagctttgacttcaatgggccctacctggggccgccccacagccgctccctacctgacatcctgggccagccggagcccccacaggagggtgggagccagaagtccccacctccagggtccctggagtacctgtgtctgcctgctggggggcaggtgcaactggtccctctggcccaggcgatgggaccaggacaggccgtggaagtggagagaaggccgagccagggggctgcagggagtccctccctggagtccgggggaggccctgcccctcctgctcttgggccaagggtgggaggacaggaccaaaaggacagccctgtggctatacccatgagctctggggacactgaggaccctggagtggcctctggttatgtctcctctgcagacctggtattcaccccaaactcaggggcctcgtctgtctccctagttccctctctgggcctcccctcagaccagacccccagcttatgtcctgggctggccagtggaccccctggagccccaggccctgtgaagtcagggtttgagggctatgtggagctccctccaattgagggccggtcccccaggtcaccaaggaacaatcctgtcccccctgaggccaaaagccctgtcctgaacccaggggaacgcccggcagatgtgtccccaacatccccacagcccgagggcctccttgtcctgcagcaagtgggcgactattgcttcctccccggcctggggcccggccctctctcgctccggagtaaaccttcttccccgggacccggtcctgagatcaagaacctagaccaggcttttcaagtcaagaagcccccaggccaggctgtgccccaggtgcccgtcattcagctcttcaaagccctgaagcagcaggactacctgtctctgcccccttgggaggtcaacaagcctggggaggtgtgttgagacccccaggcctagacaggcaaggggatggagagggcttgccttccctcccgcctgaccttcctcagtcatttctgcaaagccaaggggcagcctcctgtcaaggtagctagaggcctgggaaaggagatagccttgctccggcccccttgaccttcagcaaatcacttctctccctgcgctcacacagacacacacacacacacgtacatgcacacatttttcctgtcaggttaacttatttgtaggttctgcattattagaactttctagatatactcattccatctccccctcatttttttaatcaggtttccttgcttttgccatttttcttccttcttttttcactgatttattatgagagtggggctgaggtctgagctgagccttatcagactgagatgcggctggttgtgttgaggacttgtgtgggctgcctgtccccggcagtcgctgatgcacatgacatgattctcatctgggtgcagaggtgggaggcaccaggtgggcacccgtgggggttagggcttggaagagtggcacaggactgggcacgctcagtgaggctcagggaattcagactagcctcgattgtcactccgagaaatgggcatggtattgggggtcgggggggcggtgcaagggacgcacatgagagactgtttgggagcttctggggagccctgctagttgtctcagtgatgtctgtgggacctccagtcccttgagaccccacgtcatgtagagaagttaacggcccaagtggtgggcaggctggcgggacctggggaacatcaggagaggagtccagagcccacgtctactgcggaaaagtcaggggaaactgccaaacaaaggaaaatgccccaaaggcatatatgctttagggcctttggtccaaatggcccgggtggccactcttccagatagaccaggcaactctccctcccaccggccacagatgaggggctgctgatctatgcctgggcctgcaccagggattatggttcttttaaatctttgcctttcagatacaggaaaaataatggcattaaattgctttaatttgcattattttagttatccagtttgcacatatttttataggtatcttaggcatcgattggtattttttaactgggccaagcccattaaggtctttcttctgttgggtgctatcattttctgattaagtctttttgactattgacatacagtctttcacagatggtggagtgtttttcccccaaatctgttgtttgtcttataatgttgtatatgaggttttatggtgtatgaatatgaatgcttctgtaatgtcaaacagatccctagtaaactccttcttcacttttactgtcagatttacaaaggtcctcccattgcaaagcagtgtttgtcctaatttatatattgtttttctagttcattttgtgtttccaacttttcatgtaaaattttaattatttttgaatgtgtggatgtgagactgaggtgccttttggtactgaaattctttttccatgtacctgaagtgttacttttgtgatataggaaatccttgtatatatactttattggtccctaggcttcctattttgttaccttgctttctctatggcatccaccattttgattgttctacttttatgatatgttttcataagtggttaagcaagtattctcgttacttttgctcttaaatccctattcattacagcaatgttggtggtcaaagaaaatgataaacaacttgaatgttcaatggtcctgaaatacataacaacattttagtacattgtaaagtagaatcctctgttcataatgaacaagatgaaccaatgtggattagaaagaagtccgagatattaattccaaaatatccagacattgttaaagggaaaaaattgcaataaaatatttgtaacataaaa

SEQ ID NO: 6477 - DNA, 4863 bp, Homo sapiens
  source 1..4863: mol_type = unassigned DNA
actctgcctagaggctccagaagaagactggtctctcccaccacacagaggcctggaggaggcagaggccaggagggagaggtcccaagagcctgtgaaatgggtctggcctggctcccagctgggcaggaacacaggacttcaggacactaaggaccctgtcatgcccatggccagcacccaccagtgctggtgcctgcctgtccagagctgaccagggagatggtgctggcccaggggctgctctccatggccctgctggccctgtgctgggagcgcagcctggcaggggcagaagaaaccatcccgctgcagaccctgcgctgctacaacgactacaccagccacatcacctgcaggtgggcagacacccaggatgcccagcggctcgtcaacgtgaccctcattcgccgggtgaatgaggacctcctggagccagtgtcctgtgacctcagtgatgacatgccctggtcagcctgcccccatccccgctgcgtgcccaggagatgtgtcattccctgccagagttttgtcgtcactgacgttgactacttctcattccaaccagacaggcctctgggcacccggctcaccgtcactctgacccagcatgtccagcctcctgagcccagggacctgcagatcagcaccgaccaggaccacttcctgctgacctggagtgtggcccttgggagtccccagagccactggttgtccccaggggatctggagtttgaggtggtctacaagcggcttcaggactcttgggaggacgcagccatcctcctctccaacacctcccaggccaccctggggccagagcacctcatgcccagcagcacctacgtggcccgagtacggacccgcctggccccaggttctcggctctcaggacgtcccagcaagtggagcccagaggtttgctgggactcccagccaggggatgaggcccagccccagaacctggagtgcttctttgacggggccgccgtgctcagctgctcctgggaggtgaggaaggaggtggccagctcggtctcctttggcctattctacaagcccagcccagatgcaggggaggaagagtgctccccagtgctgagggaggggctcggcagcctccacaccaggcaccactgccagattcccgtgcccgaccccgcgacccacggccaatacatcgtctctgttcagccaaggagggcagagaaacacataaagagctcagtgaacatccagatggcccctccatccctcaacgtgaccaaggatggagacagctacagcctgcgctgggaaacaatgaaaatgcgatacgaacacatagaccacacatttgagatccagtacaggaaagacacggccacgtggaaggacagcaagaccgagaccctccagaacgcccacagcatggccctgccagccctggagccctccaccaggtactgggccagggtgagggtcaggacctcccgcaccggctacaacgggatctggagcgagtggagtgaggcgcgctcctgggacaccgagtcggtgctgcctatgtgggtgctggccctcatcgtgatcttcctcaccatcgctgtgctcctggccctccgcttctgtggcatctacgggtacaggctgcgcagaaagtgggaggagaagatccccaaccccagcaagagccacctgttccagaacgggagcgcagagctttggcccccaggcagcatgtcggccttcactagcgggagtcccccacaccaggggccgtggggcagccgcttccctgagctggagggggtgttccctgtaggattcggggacagcgaggtgtcacctctcaccatagaggaccccaagcatgtctgtgatccaccatctgggcctgacacgactccagctgcctcagatctacccacagagcagccccccagcccccagccaggcccgcctgccgcctcccacacacctgagaaacaggcttccagctttgacttcaatgggccctacctggggccgccccacagccgctccctacctgacatcctgggccagccggagcccccacaggagggtgggagccagaagtccccacctccagggtccctggagtacctgtgtctgcctgctggggggcaggtgcaactggtccctctggcccaggcgatgggaccaggacaggccgtggaagtggagagaaggccgagccagggggctgcagggagtccctccctggagtccgggggaggccctgcccctcctgctcttgggccaagggtgggaggacaggaccaaaaggacagccctgtggctatacccatgagctctggggacactgaggaccctggagtggcctctggttatgtctcctctgcagacctggtattcaccccaaactcaggggcctcgtctgtctccctagttccctctctgggcctcccctcagaccagacccccagcttatgtcctgggctggccagtggaccccctggagccccaggccctgtgaagtcagggtttgagggctatgtggagctccctccaattgagggccggtcccccaggtcaccaaggaacaatcctgtcccccctgaggccaaaagccctgtcctgaacccaggggaacgcccggcagatgtgtccccaacatccccacagcccgagggcctccttgtcctgcagcaagtgggcgactattgcttcctccccggcctggggcccggccctctctcgctccggagtaaaccttcttccccgggacccggtcctgagatcaagaacctagaccaggcttttcaagtcaagaagcccccaggccaggctgtgccccaggtgcccgtcattcagctcttcaaagccctgaagcagcaggactacctgtctctgcccccttgggaggtcaacaagcctggggaggtgtgttgagacccccaggcctagacaggcaaggggatggagagggcttgccttccctcccgcctgaccttcctcagtcatttctgcaaagccaaggggcagcctcctgtcaaggtagctagaggcctgggaaaggagatagccttgctccggcccccttgaccttcagcaaatcacttctctccctgcgctcacacagacacacacacacacacgtacatgcacacatttttcctgtcaggttaacttatttgtaggttctgcattattagaactttctagatatactcattccatctccccctcatttttttaatcaggtttccttgcttttgccatttttcttccttcttttttcactgatttattatgagagtggggctgaggtctgagctgagccttatcagactgagatgcggctggttgtgttgaggacttgtgtgggctgcctgtccccggcagtcgctgatgcacatgacatgattctcatctgggtgcagaggtgggaggcaccaggtgggcacccgtgggggttagggcttggaagagtggcacaggactgggcacgctcagtgaggctcagggaattcagactagcctcgattgtcactccgagaaatgggcatggtattgggggtcgggggggcggtgcaagggacgcacatgagagactgtttgggagcttctggggagccctgctagttgtctcagtgatgtctgtgggacctccagtcccttgagaccccacgtcatgtagagaagttaacggcccaagtggtgggcaggctggcgggacctggggaacatcaggagaggagtccagagcccacgtctactgcggaaaagtcaggggaaactgccaaacaaaggaaaatgccccaaaggcatatatgctttagggcctttggtccaaatggcccgggtggccactcttccagatagaccaggcaactctccctcccaccggccacagatgaggggctgctgatctatgcctgggcctgcaccagggattatggttcttttaaatctttgcctttcagatacaggaaaaataatggcattaaattgctttaatttgcattattttagttatccagtttgcacatatttttataggtatcttaggcatcgattggtattttttaactgggccaagcccattaaggtctttcttctgttgggtgctatcattttctgattaagtctttttgactattgacatacagtctttcacagatggtggagtgtttttcccccaaatctgttgtttgtcttataatgttgtatatgaggttttatggtgtatgaatatgaatgcttctgtaatgtcaaacagatccctagtaaactccttcttcacttttactgtcagatttacaaaggtcctcccattgcaaagcagtgtttgtcctaatttatatattgtttttctagttcattttgtgtttccaacttttcatgtaaaattttaattatttttgaatgtgtggatgtgagactgaggtgccttttggtactgaaattctttttccatgtacctgaagtgttacttttgtgatataggaaatccttgtatatatactttattggtccctaggcttcctattttgttaccttgctttctctatggcatccaccattttgattgttctacttttatgatatgttttcataagtggttaagcaagtattctcgttacttttgctcttaaatccctattcattacagcaatgttggtggtcaaagaaaatgataaacaacttgaatgttcaatggtcctgaaatacataacaacattttagtacattgtaaagtagaatcctctgttcataatgaacaagatgaaccaatgtggattagaaagaagtccgagatattaattccaaaatatccagacattgttaaagggaaaaaattgcaataaaatatttgtaacataaaacaaagtgaaa

SEQ ID NO: 6478 - DNA, 969 bp, Homo sapiens
  source 1..969: mol_type = unassigned DNA
ggttcccacctccgggactttgctcctgcagggccttggctggggttctctccctgcttcagccgctagcaccctccttgtgcctgaagcccgcactgggatgctcctgggctcttgagaaaccatcccgctgcagaccctgcgctgctacaacgactacaccagccacatcacctgcaggtgggcagacacccaggatgcccagcggctcgtcaacgtgaccctcattcgccgggtgaatgaggacctcctggagccagtgtcctgtgacctcagtgatgacatgccctggtcagcctgcccccatccccgctgcgtgcccaggagatgtgtcattccctgccagagttttgtcgtcactgacgttgactacttctcattccaaccagacaggcctctgggcacccggctcaccgtcactctgacccagcatgtccagcctcctgagcccagggacctgcagatcagcaccgaccaggaccacttcctgctgacctggagtgtggcccttgggagtccccagagccactggttgtccccaggggatctggagtttgaggtggtctacaagcggcttcaggactcttgggaggacgcagccatcctcctctccaacacctcccaggccaccctggggccagagcacctcatgcccagcagcacctacgtggcccgagtacggacccgcctggccccaggttctcggctctcaggacgtcccagcaagtggagcccagaggtttgctgggactcccagccaggggatgaggcccagccccagaacctggagtgcttctttgacggggccgccgtgctcagctgctcctgggaggtgaggaaggaggtggccagctcggtctcctttggcctattctacaagcccagcccagatgcaggggaggaagagtgctccccagtgctgagggaggggctcggcagcctccacaccaggcaccactgccagattcc

SEQ ID NO: 6479 - DNA, 2765 bp, Homo sapiens
  source 1..2765: mol_type = unassigned DNA
agaccaaggagagatggcgctagcctgggagttcacagatgggaaaactgaggccctggagggacctcctggagccagtgtcctgtgacctcagtgatgacatgccctggtcagcctgcccccatccccgctgcgtgcccaggagatgtgtcattccctgccagagttttgtcgtcactgacgttgactacttctcattccaaccagacaggcctctgggcacccggctcaccgtcactctgacccagcatgtccagcctcctgagcccagggacctgcagatcagcaccgaccaggaccacttcctgctgacctggagtgtggcccttgggagtccccagagccactggttgtccccaggggatctggagtttgaggtggtctacaagcggcttcaggactcttgggaggacgcagccatcctcctctccaacacctcccaggccaccctggggccagagcacctcatgcccagcagcacctacgtggcccgagtacggacccgcctggccccaggttctcggctctcaggacgtcccagcaagtggagcccagaggtttgctgggactcccagccaggggatgaggcccagccccagaacctggagtgcttctttgacggggccgccgtgctcagctgctcctgggaggtgaggaaggaggtggccagctcggtctcctttggcctattctacaagcccagcccagatgcaggctctgctgtgctcctcagggaggaagagtgctccccagtgctgagggaggggctcggcagcctccacaccaggcaccactgccagattcccgtgcccgaccccgcgacccacggccaatacatcgtctctgttcagccaaggagggcagagaaacacataaagagctcagtgaacatccagatggcccctccatccctcaacgtgaccaaggatggagacagctacagcctgcgctgggaaacaatgaaaatgcgatacgaacacatagaccacacatttgagatccagtacaggaaagacacggccacgtggaaggacagcaagaccgagaccctccagaacgcccacagcatggccctgccagccctggagccctccaccaggtactgggccagggtgagggtcaggacctcccgcaccggctacaacgggatctggagcgagtggagtgaggcgcgctcctgggacaccgagtcggtgctgcctatgtgggtgctggccctcatcgtgatcttcctcaccatcgctgtgctcctggccctccgcttctgtggcatctacgggtacaggctgcgcagaaagtgggaggagaagatccccaaccccagcaagagccacctgttccagaacgggagcgcagagctttggcccccaggcagcatgtcggccttcactagcgggagtcccccacaccaggggccgtggggcagccgcttccctgagctggagggggtgttccctgtaggattcggggacagcgaggtgtcacctctcaccatagaggaccccaagcatgtctgtgatccaccatctgggcctgacacgactccagctgcctcagatctacccacagagcagccccccagcccccagccaggcccgcctgccgcctcccacacacctgagaaacaggcttccagctttgacttcaatgggccctacctggggccgccccacagccgctccctacctgacatcctgggccagccggagcccccacaggagggtgggagccagaagtccccacctccagggtccctggagtacctgtgtctgcctgctggggggcaggtgcaactggtccctctggcccaggcgatgggaccaggacaggccgtggaagtggagagaaggccgagccagggggctgcagggagtccctccctggagtccgggggaggccctgcccctcctgctcttgggccaagggtgggaggacaggaccaaaaggacagccctgtggctatacccatgagctctggggacactgaggaccctggagtggcctctggttatgtctcctctgcagacctggtattcaccccaaactcaggggcctcgtctgtctccctagttccctctctgggcctcccctcagaccagacccccagcttatgtcctgggctggccagtggaccccctggagccccaggccctgtgaagtcagggtttgagggctatgtggagctccctccaattgagggccggtcccccaggtcaccaaggaacaatcctgtcccccctgaggccaaaagccctgtcctgaacccaggggaacgcccggcagatgtgtccccaacatccccacagcccgagggcctccttgtcctgcagcaagtgggcgactattgcttcctccccggcctggggcccggccctctctcgctccggagtaaaccttcttccccgggacccggtcctgagatcaagaacctagaccaggcttttcaagtcaagaagcccccaggccaggctgtgccccaggtgcccgtcattcagctcttcaaagccctgaagcagcaggactacctgtctctgcccccttgggaggtcaacaagcctggggaggtgtgttgagacccccaggcctagacaggcaaggggatggagagggcttgccttccctcccgcctgaccttcctcagtcatttctgcaaagccaaggggcagcctcctgtcaaggtagctagaggcctgggaaaggagatagccttgctccggcccccttgaccttcagcaaatcacttctctccctgcgctcacacagac

SEQ ID NO: 6480 - DNA, 4087 bp, Homo sapiens
  source 1..4087: mol_type = unassigned DNA
gcctagaggctccagaagaagactggtctctcccaccacacagaggcctggaggaggcagaggccaggagggagaggtcccaagagcctgtgaaatgggtctggcctggctcccagctgggcaggaacacaggacttcaggacactaaggaccctgtcatgcccatggccagcacccaccagtgctggtgcctgcctgtccagagctgaccagggagatggtgctggcccaggggctgctctccatggccctgctggccctgtgctgggagcgcagcctggcaggggcagaagaaaccatcccgctgcagaccctgcgctgctacaacgactacaccagccacatcacctgcaggtgggcagacacccaggatgcccagcggctcgtcaacgtgaccctcattcgccgggtgaatgaggacctcctggagccagtgtcctgtgacctcagtgatgacatgccctggtcagcctgcccccatccccgctgcgtgcccaggagatgtgtcattccctgccagagttttgtcgtcactgacgttgactacttctcattccaaccagacaggcctctgggcacccggctcaccgtcactctgacccagcatgtccagcctcctgagcccagggacctgcagatcagcaccgaccaggaccacttcctgctgacctggagtgtggcccttgggagtccccagagccactggttgtccccaggggatctggagtttgaggtggtctacaagcggcttcaggactcttgggaggacgcagccatcctcctctccaacacctcccaggccaccctggggccagagcacctcatgcccagcagcacctacgtggcccgagtacggacccgcctggccccaggttctcggctctcaggacgtcccagcaagtggagcccagaggtttgctgggactcccagccaggggatgaggcccagccccagaacctggagtgcttctttgacggggccgccgtgctcagctgctcctgggaggtgaggaaggaggtggccagctcggtctcctttggcctattctacaagcccagcccagatgcaggggaggaagagtgctccccagtgctgagggaggggctcggcagcctccacaccaggcaccactgccagattcccgtgcccgaccccgcgacccacggccaatacatcgtctctgttcagccaaggagggcagagaaacacataaagagctcagtgaacatccagatggcccctccatccctcaacgtgaccaaggatggagacagctacagcctgcgctgggaaacaatgaaaatgcgatacgaacacatagaccacacatttgagatccagtacaggaaagacacggccacgtggaaggacagcaagaccgagaccctccagaacgcccacagcatggccctgccagccctggagccctccaccaggtactgggccagggtgagggtcaggacctcccgcaccggctacaacgggatctggagcgagtggagtgaggcgcgctcctgggacaccgagtcggtgctgcctatgtgggtgctggccctcatcgtgatcttcctcaccatcgctgtgctcctggccctccgcttctgtggcatctacgggtacaggctgcgcagaaagtgggaggagaagatccccaaccccagcaagagccacctgttccagaacgggagcgcagagctttggcccccaggcagcatgtcggccttcactagcgggagtcccccacaccaggggccgtggggcagccgcttccctgagctggagggggtgttccctgtaggattcggggacagcgaggtgtcacctctcaccatagaggaccccaagcatgtctgtgatccaccatctgggcctgacacgactccagctgcctcagatctacccacagagcagccccccagcccccagccaggcccgcctgccgcctcccacacacctgagaaacaggcttccagctttgacttcaatgggccctacctggggccgccccacagccgctccctacctgacatcctgggccagccggagcccccacaggagggtgggagccagaagtccccacctccagggtccctggagtacctgtgtctgcctgctggggggcaggtgcaactggtccctctggcccaggcgatgggaccaggacaggccgtggaagtggagagaaggccgagccagggggctgcagggagtccctccctggagtccgggggaggccctgcccctcctgctcttgggccaagggtgggaggacaggaccaaaaggacagccctgtggctatacccatgagctctggggacactgaggaccctggagtggcctctggttatgtctcctctgcagacctggtattcaccccaaactcaggggcctcgtctgtctccctagttccctctctgggcctcccctcagaccagacccccagcttatgtcctgggctggccagtggaccccctggagccccaggccctgtgaagtcagggtttgagggctatgtggagctccctccaattgagggccggtcccccaggtcaccaaggaacaatcctgtcccccctgaggccaaaagccctgtcctgaacccaggggaacgcccggcagatgtgtccccaacatccccacagcccgagggcctccttgtcctgcagcaagtgggcgactattgcttcctccccggcctggggcccggccctctctcgctccggagtaaaccttcttccccgggacccggtcctgagatcaagaacctagaccaggcttttcaagtcaagaagcccccaggccaggctgtgccccaggtgcccgtcattcagctcttcaaagccctagttgtctcagtgatgtctgtgggacctccagtcccttgagaccccacgtcatgtagagaagttaacggcccaagtggtgggcaggctggcgggacctggggaacatcaggagaggagtccagagcccacgtctactgcggaaaagtcaggggaaactgccaaacaaaggaaaatgccccaaaggcatatatgctttagggcctttggtccaaatggcccgggtggccactcttccagatagaccaggcaactctccctcccaccggccacagatgaggggctgctgatctatgcctgggcctgcaccagggattatggttcttttaaatctttgcctttcagatacaggaaaaataatggcattaaattgctttaatttgcattattttagttatccagtttgcacatatttttataggtatcttaggcatcgattggtattttttaactgggccaagcccattaaggtctttcttctgttgggtgctatcattttctgattaagtctttttgactattgacatacagtctttcacagatggtggagtgtttttcccccaaatctgttgtttgtcttataatgttgtatatgaggttttatggtgtatgaatatgaatgcttctgtaatgtcaaacagatccctagtaaactccttcttcacttttactgtcagatttacaaaggtcctcccattgcaaagcagtgtttgtcctaatttatatattgtttttctagttcattttgtgtttccaacttttcatgtaaaattttaattatttttgaatgtgtggatgtgagactgaggtgccttttggtactgaaattctttttccatgtacctgaagtgttacttttgtgatataggaaatccttgtatatatactttattggtccctaggcttcctattttgttaccttgctttctctatggcatccaccattttgattgttctacttttatgatatgttttcataagtggttaagcaagtattctcgttacttttgctcttaaatccctattcattacagcaatgttggtggtcaaagaaaatgataaacaacttgaatgttcaatggtcctgaaatacataacaacattttagtacattgtaaagtagaatcctctgttcataatgaacaagatgaaccaatgtggattagaaagaagtccgagatattaattccaaaatatccagacattgttaaagggaaaaaattgcaataaaatatttgtaac

SEQ ID NO: 6481 - DNA, 2352 bp, Homo sapiens
  source 1..2352: mol_type = unassigned DNA
atggcaaggctgggaaactgcagcctgacttgggctgccctgatcatcctgctgctccccggaagtctggaggagtgcgggcacatcagtgtctcagcccccatcgtccacctgggggatcccatcacagcctcctgcatcatcaagcagaactgcagccatctggacccggagccacagattctgtggagactgggagcagagcttcagcccgggggcaggcagcagcgtctgtctgatgggacccaggaatctatcatcaccctgccccacctcaaccacactcaggcctttctctcctgctgcctgaactggggcaacagcctgcagatcctggaccaggttgagctgcgcgcaggctaccctccagccataccccacaacctctcctgcctcatgaacctcacaaccagcagcctcatctgccagtgggagccaggacctgagacccacctacccaccagcttcactctgaagagtttcaagagccggggcaactgtcagacccaaggggactccatcctggactgcgtgcccaaggacgggcagagccactgctgcatcccacgcaaacacctgctgttgtaccagaatatgggcatctgggtgcaggcagagaatgcgctggggaccagcatgtccccacaactgtgtcttgatcccatggatgttgtgaaactggagccccccatgctgcggaccatggaccccagccctgaagcggcccctccccaggcaggctgcctacagctgtgctgggagccatggcagccaggcctgcacataaatcagaagtgtgagctgcgccacaagccgcagcgtggagaagccagctgggcactggtgggccccctccccttggaggcccttcagtatgagctctgcgggctcctcccagccacggcctacaccctgcagatacgctgcatccgctggcccctgcctggccactggagcgactggagccccagcctggagctgagaactaccgaacgggcccccactgtcagactggacacatggtggcggcagaggcagctggaccccaggacagtgcagctgttctggaagccagtgcccctggaggaagacagcggacggatccaaggttatgtggtttcttggagaccctcaggccaggctggggccatcctgcccctctgcaacaccacagagctcagctgcaccttccacctgccttcagaagcccaggaggtggcccttgtggcctataactcagccgggacctctcgtcccactccggtggtcttctcagaaagcagaggcccagctctgaccagactccatgccatggcccgagaccctcacagcctctgggtaggctgggagccccccaatccatggcctcagggctatgtgattgagtggggcctgggcccccccagcgcgagcaatagcaacaagacctggaggatggaacagaatgggagagccacggggtttctgctgaaggagaacatcaggccctttcagctctatgagatcatcgtgactcccttgtaccaggacaccatgggaccctcccagcatgtctatgcctactctcaagaaatggctccctcccatgccccagagctgcatctaaagcacattggcaagacctgggcacagctggagtgggtgcctgagccccctgagctggggaagagcccccttacccactacaccatcttctggaccaacgctcagaaccagtccttctccgccatcctgaatgcctcctcccgtggctttgtcctccatggcctggagcccgccagtctgtatcacatccacctcatggctgccagccaggctggggccaccaacagtacagtcctcaccctgatgaccttgaccccagaggggtcggagctacacatcatcctgggcctgttcggcctcctgctgttgctcacctgcctctgtggaactgcctggctctgttgcagccccaacaggaagaatcccctctggccaagtgtcccagacccagctcacagcagcctgggctcctgggtgcccacaatcatggaggaggatgccttccagctgcccggccttggcacgccacccatcaccaagctcacagtgctggaggaggatgaaaagaagccggtgccctgggagtcccataacagctcagagacctgtggcctccccactctggtccagacctatgtgctccagggggacccaagagcagtttccacccagccccaatcccagtctggcaccagcgatcaggctgggcctcccaggcgatctgcatactttaaggaccagatcatgctccatccagccccacccaatggccttttgtgcttgtttcctataacttcagtattgtaa

SEQ ID NO: 6482 - DNA, 2656 bp, Homo sapiens
  source 1..2656: mol_type = unassigned DNA
atggcaaggctgggaaactgcagcctgacttgggctgccctgatcatcctgctgctccccggaagtctggaggagtgcgggcacatcagtgtctcagcccccatcgtccacctgggggatcccatcacagcctcctgcatcatcaagcagaactgcagccatctggacccggagccacagattctgtggagactgggagcagagcttcagcccgggggcaggcagcagcgtctgtctgatgggacccaggaatctatcatcaccctgccccacctcaaccacactcaggcctttctctcctgctgcctgaactggggcaacagcctgcagatcctggaccaggttgagctgcgcgcaggctaccctccagccataccccacaacctctcctgcctcatgaacctcacaaccagcagcctcatctgccagtgggagccaggacctgagacccacctacccaccagcttcactctgaagagtttcaagagccggggcaactgtcagacccaaggggactccatcctggactgcgtgcccaaggacgggcagagccactgctgcatcccacgcaaacacctgctgttgtaccagaatatgggcatctgggtgcaggcagagaatgcgctggggaccagcatgtccccacaactgtgtcttgatcccatggatgttgtgaaactggagccccccatgctgcggaccatggaccccagccctgaagcggcccctccccaggcaggctgcctacagctgtgctgggagccatggcagccaggcctgcacataaatcagaagtgtgagctgcgccacaagccgcagcgtggagaagccagctgggcactggtgggccccctccccttggaggcccttcagtatgagctctgcgggctcctcccagccacggcctacaccctgcagatacgctgcatccgctggcccctgcctggccactggagcgactggagccccagcctggagctgagaactaccgaacgggcccccactgtcagactggacacatggtggcggcagaggcagctggaccccaggacagtgcagctgttctggaagccagtgcccctggaggaagacagcggacggatccaaggttatgtggtttcttggagaccctcaggccaggctggggccatcctgcccctctgcaacaccacagagctcagctgcaccttccacctgccttcagaagcccaggaggtggcccttgtggcctataactcagccgggacctctcgtcccactccggtggtcttctcagaaagcagaggcccagctctgaccagactccatgccatggcccgagaccctcacagcctctgggtaggctgggagccccccaatccatggcctcagggctatgtgattgagtggggcctgggcccccccagcgcgagcaatagcaacaagacctggaggatggaacagaatgggagagccacggggtttctgctgaaggagaacatcaggccctttcagctctatgagatcatcgtgactcccttgtaccaggacaccatgggaccctcccagcatgtctatgcctactctcaagaaatggctccctcccatgccccagagctgcatctaaagcacattggcaagacctgggcacagctggagtgggtgcctgagccccctgagctggggaagagcccccttacccactacaccatcttctggaccaacgctcagaaccagtccttctccgccatcctgaatgcctcctcccgtggctttgtcctccatggcctggagcccgccagtctgtatcacatccacctcatggctgccagccaggctggggccaccaacagtacagtcctcaccctgatgaccttgaccccagcaggaagaatcccctctggccaagtgtcccagacccagctcacagcagcctgggctcctgggtgcccacaatcatggaggaggatgccttccagctgcccggccttggcacgccacccatcaccaagctcacagtgctggaggaggatgaaaagaagccggtgccctgggagtcccataacagctcagagacctgtggcctccccactctggtccagacctatgtgctccagggggacccaagagcagtttccacccagccccaatcccagtctggcaccagcgatcaggtcctttatgggcagctgctgggcagccccacaagcccagggccagggcactatctccgctgtgactccactcagcccctcttggcgggcctcacccccagccccaagtcctatgagaacctctggttccaggccagccccttggggaccctggtaaccccagccccaagccaggaggacgactgtgtctttgggccactgctcaacttccccctcctgcaggggatccgggtccatgggatggaggcgctggggagcttctagggcttcctggggttcccttcttgggcctgcctcttaaaggcctgagctagctggagaagaggggagggtccataagcccatgactaaaaactaccccagcccaggctctcaccatctccagtcaccagcatctccctctcctcccaatctccataggctgggcctcccaggcgatctgcatactttaaggaccagatcatgctccatccagccccacccaatggccttttgtgcttgtt

SEQ ID NO: 6483 - DNA, 2886 bp, Homo sapiens
  source 1..2886: mol_type = unassigned DNA
ggctcggaaaggtgaagtaacttgtccaagatcacaaagctggtgaacatcaagttggtgctatggcaaggctgggaaactgcagcctgacttgggctgccctgatcatcctgctgctccccggaagtctggaggagtgcgggcacatcagtgtctcagcccccatcgtccacctgggggatcccatcacagcctcctgcatcatcaagcagaactgcagccatctggacccggagccacagattctgtggagactgggagcagagcttcagcccgggggcaggcagcagcgtctgtctgatgggacccaggaatctatcatcaccctgccccacctcaaccacactcaggcctttctctcctgctgcctgaactggggcaacagcctgcagatcctggaccaggttgagctgcgcgcaggctaccctccagccataccccacaacctctcctgcctcatgaacctcacaaccagcagcctcatctgccagtgggagccaggacctgagacccacctacccaccagcttcactctgaagagtttcaagagccggggcaactgtcagacccaaggggactccatcctggactgcgtgcccaaggacgggcagagccactgctgcatcccacgcaaacacctgctgttgtaccagaatatgggcatctgggtgcaggcagagaatgcgctggggaccagcatgtccccacaactgtgtcttgatcccatggatgttgtgaaactggagccccccatgctgcggaccatggaccccagccctgaagcggcccctccccaggcaggctgcctacagctgtgctgggagccatggcagccaggcctgcacataaatcagaagtgtgagctgcgccacaagccgcagcgtggagaagccagctgggcactggtgggccccctccccttggaggcccttcagtatgagctctgcgggctcctcccagccacggcctacaccctgcagatacgctgcatccgctggcccctgcctggccactggagcgactggagccccagcctggagctgagaactaccgaacgggcccccactgtcagactggacacatggtggcggcagaggcagctggaccccaggacagtgcagctgttctggaagccagtgcccctggaggaagacagcggacggatccaaggttatgtggtttcttggagaccctcaggccaggctggggccatcctgcccctctgcaacaccacagagctcagctgcaccttccacctgccttcagaagcccaggaggtggcccttgtggcctataactcagccgggacctctcgtcccactccggtggtcttctcagaaagcagaggcccagctctgaccagactccatgccatggcccgagaccctcacagcctctgggtaggctgggagccccccaatccatggcctcagggctatgtgattgagtggggcctgggcccccccagcgcgagcaatagcaacaagacctggaggatggaacagaatgggagagccacggggtttctgctgaaggagaacatcaggccctttcagctctatgagatcatcgtgactcccttgtaccaggacaccatgggaccctcccagcatgtctatgcctactctcaagaaatggctccctcccatgccccagagctgcatctaaagcacattggcaagacctgggcacagctggagtgggtgcctgagccccctgagctggggaagagcccccttacccactacaccatcttctggaccaacgctcagaaccagtccttctccgccatcctgaatgcctcctcccgtggctttgtcctccatggcctggagcccgccagtctgtatcacatccacctcatggctgccagccaggctggggccaccaacagtacagtcctcaccctgatgaccttgaccccagaggggtcggagctacacatcatcctgggcctgttcggcctcctgctgttgctcacctgcctctgtggaactgcctggctctgttgcagccccaacaggaagaatcccctctggccaagtgtcccagacccagctcacagcagcctgggctcctgggtgcccacaatcatggaggaggatgccttccagctgcccggccttggcacgccacccatcaccaagctcacagtgctggaggaggatgaaaagaagccggtgccctgggagtcccataacagctcagagacctgtggcctccccactctggtccagacctatgtgctccagggggacccaagagcagtttccacccagccccaatcccagtctggcaccagcgatcaggtcctttatgggcagctgctgggcagccccacaagcccagggccagggcactatctccgctgtgactccactcagcccctcttggcgggcctcacccccagccccaagtcctatgagaacctctggttccaggccagccccttggggaccctggtaaccccagccccaagccaggaggacgactgtgtctttgggccactgctcaacttccccctcctgcaggggatccgggtccatgggatggaggcgctggggagcttctagggcttcctggggttcccttcttgggcctgcctcttaaaggcctgagctagctggagaagaggggagggtccataagcccatgactaaaaactaccccagcccaggctctcaccatctccagtcaccagcatctccctctcctcccaatctccataggctgggcctcccaggcgatctgcatactttaaggaccagatcatgctccatccagccccacccaatggccttttgtgcttgtttcctataacttcagtattgtaaactagtttttggtttgcagtttttgttgttgtttatagacactcttgggtgt

SEQ ID NO: 6484 - DNA, 3454 bp, Homo sapiens
  source 1..3454: mol_type = unassigned DNA
gaaaagaggcttagggccgggtgagccttccagccagggcctgcctccaagtgatgctcccccagggcagggggcataaggatggcacccagccaggtgggagcctgggccctgcccagcctcaaagctttgagctcaggaaatccggaggcaggggagggggacatcgttgccacattccccagccctttaagacccccaaggcaggaaggctgcccgggcctcaccagcttccctcacaggctccttcctgggaggaaggggctgcctgtgccctcgaaggcgcaagggagggcaggagggaggctcggaaggtgttgcaatccccagcccccgggcctgtcagaggctgagccattaacgacagagctcggggagagaagctggactgcagctggtttcaggaacttctcttgacgagaagagagaccaaggaggccaagcaggggctgggccagaggtgccaacatggggaaactgaggctcggctcggaaaggtgaagtaacttgtccaagatcacaaagctggtgaacatcaagttggtgctatggcaaggctgggaaactgcagcctgacttgggctgccctgatcatcctgctgctccccggaagtctggaggagtgcgggcacatcagtgtctcagcccccatcgtccacctgggggatcccatcacagcctcctgcatcatcaagcagaactgcagccatctggacccggagccacagattctgtggagactgggagcagagcttcagcccgggggcaggcagcagcgtctgtctgatgggacccaggaatctatcatcaccctgccccacctcaaccacactcaggcctttctctcctgctgcctgaactggggcaacagcctgcagatcctggaccaggttgagctgcgcgcaggctaccctccagccataccccacaacctctcctgcctcatgaacctcacaaccagcagcctcatctgccagtgggagccaggacctgagacccacctacccaccagcttcactctgaagagtttcaagagccggggcaactgtcagacccaaggggactccatcctggactgcgtgcccaaggacgggcagagccactgctgcatcccacgcaaacacctgctgttgtaccagaatatgggcatctgggtgcaggcagagaatgcgctggggaccagcatgtccccacaactgtgtcttgatcccatggatgttgtgaaactggagccccccatgctgcggaccatggaccccagccctgaagcggcccctccccaggcaggctgcctacagctgtgctgggagccatggcagccaggcctgcacataaatcagaagtgtgagctgcgccacaagccgcagcgtggagaagccagctgggcactggtgggccccctccccttggaggcccttcagtatgagctctgcgggctcctcccagccacggcctacaccctgcagatacgctgcatccgctggcccctgcctggccactggagcgactggagccccagcctggagctgagaactaccgaacgggcccccactgtcagactggacacatggtggcggcagaggcagctggaccccaggacagtgcagctgttctggaagccagtgcccctggaggaagacagcggacggatccaaggttatgtggtttcttggagaccctcaggccaggctggggccatcctgcccctctgcaacaccacagagctcagctgcaccttccacctgccttcagaagcccaggaggtggcccttgtggcctataactcagccgggacctctcgtcccactccggtggtcttctcagaaagcagaggcccagctctgaccagactccatgccatggcccgagaccctcacagcctctgggtaggctgggagccccccaatccatggcctcagggctatgtgattgagtggggcctgggcccccccagcgcgagcaatagcaacaagacctggaggatggaacagaatgggagagccacggggtttctgctgaaggagaacatcaggccctttcagctctatgagatcatcgtgactcccttgtaccaggacaccatgggaccctcccagcatgtctatgcctactctcaagaaatggctccctcccatgccccagagctgcatctaaagcacattggcaagacctgggcacagctggagtgggtgcctgagccccctgagctggggaagagcccccttacccactacaccatcttctggaccaacgctcagaaccagtccttctccgccatcctgaatgcctcctcccgtggctttgtcctccatggcctggagcccgccagtctgtatcacatccacctcatggctgccagccaggctggggccaccaacagtacagtcctcaccctgatgaccttgaccccagaggggtcggagctacacatcatcctgggcctgttcggcctcctgctgttgctcacctgcctctgtggaactgcctggctctgttgcagccccaacaggaagaatcccctctggccaagtgtcccagacccagctcacagcagcctgggctcctgggtgcccacaatcatggaggagctgcccggacccagacagggacagtggctggggcagacatctgaaatgagccgtgctctcaccccacatccttgtgtgcaggatgccttccagctgcccggccttggcacgccacccatcaccaagctcacagtgctggaggaggatgaaaagaagccggtgccctgggagtcccataacagctcagagacctgtggcctccccactctggtccagacctatgtgctccagggggacccaagagcagtttccacccagccccaatcccagtctggcaccagcgatcaggtcctttatgggcagctgctgggcagccccacaagcccagggccagggcactatctccgctgtgactccactcagcccctcttggcgggcctcacccccagccccaagtcctatgagaacctctggttccaggccagccccttggggaccctggtaaccccagccccaagccaggaggacgactgtgtctttgggccactgctcaacttccccctcctgcaggggatccgggtccatgggatggaggcgctggggagcttctagggcttcctggggttcccttcttgggcctgcctcttaaaggcctgagctagctggagaagaggggagggtccataagcccatgactaaaaactaccccagcccaggctctcaccatctccagtcaccagcatctccctctcctcccaatctccataggctgggcctcccaggcgatctgcatactttaaggaccagatcatgctccatccagccccacccaatggccttttgtgcttgtttcctataacttcagtattgtaaactagtttttggtttgcagtttttgttgttgtttatagacactcttgggtgta

SEQ ID NO: 6485 - DNA, 2953 bp, Homo sapiens
  source 1..2953: mol_type = unassigned DNA
gaaaagaggcttagggccgggtgagccttccagccagggcctgcctccaagtgatgctcccccagggcagggggcataaggatggcacccagccaggtgggagcctgggccctgcccagcctcaaagctttgagctcaggaaatccggaggcaggggagggggacatcgttgccacattccccagccctttaagacccccaaggcaggaaggctgcccgggcctcaccagcttccctcacaggctccttcctgggaggaaggggctgcctgtgccctcgaaggcgcaagggagggcaggagggaggctcggaaggtgttgcaatccccagcccccgggcctgtcagaggctgagccattaacgacagagctcggggagagaagctggactgcagctggtttcaggaacttctcttgacgagaagagagaccaaggaggccaagcaggggctgggccagaggtgccaacatggggaaactgaggctcggctcggaaaggtgaagtaacttgtccaagatcacaaagctggtgaacatcaagttggtgctatggcaaggctgggaaactgcagcctgacttgggctgccctgatcatcctgctgctccccggaagtctggaggagtgcgggcacatcagtgtctcagcccccatcgtccacctgggggatcccatcacagcctcctgcatcatcaagcagaactgcagccatctggacccggagccacagattctgtggagactgggagcagagcttcagcccgggggcaggcagcagcgtctgtctgatgggacccaggaatctatcatcaccctgccccacctcaaccacactcaggcctttctctcctgctgcctgaactggggcaacagcctgcagatcctggaccaggttgagctgcgcgcaggctaccctccagccataccccacaacctctcctgcctcatgaacctcacaaccagcagcctcatctgccagtgggagccaggacctgagacccacctacccaccagcttcactctgaagagtttcaagagccggggcaactgtcagacccaaggggactccatcctggactgcgtgcccaaggacgggcagagccactgctgcatcccacgcaaacacctgctgttgtaccagaatatgggcatctgggtgcaggcagagaatgcgctggggaccagcatgtccccacaactgtgtcttgatcccatggatgttgtgaaactggagccccccatgctgcggaccatggaccccagccctgaagcggcccctccccaggcaggctgcctacagctgtgctgggagccatggcagccaggcctgcacataaatcagaagtgtgagctgcgccacaagccgcagcgtggagaagccagctgggcactggtgggccccctccccttggaggcccttcagtatgagctctgcgggctcctcccagccacggcctacaccctgcagatacgctgcatccgctggcccctgcctggccactggagcgactggagccccagcctggagctgagaactaccgaacgggcccccactgtcagactggacacatggtggcggcagaggcagctggaccccaggacagtgcagctgttctggaagccagtgcccctggaggaagacagcggacggatccaaggttatgtggtttcttggagaccctcaggccaggctggggccatcctgcccctctgcaacaccacagagctcagctgcaccttccacctgccttcagaagcccaggaggtggcccttgtggcctataactcagccgggacctctcgtcccactccggtggtcttctcagaaagcagaggcccagctctgaccagactccatgccatggcccgagaccctcacagcctctgggtaggctgggagccccccaatccatggcctcagggctatgtgattgagtggggcctgggcccccccagcgcgagcaatagcaacaagacctggaggatggaacagaatgggagagccacggggtttctgctgaaggagaacatcaggccctttcagctctatgagatcatcgtgactcccttgtaccaggacaccatgggaccctcccagcatgtctatgcctactctcaagaaatggctccctcccatgccccagagctgcatctaaagcacattggcaagacctgggcacagctggagtgggtgcctgagccccctgagctggggaagagcccccttacccactacaccatcttctggaccaacgctcagaaccagtccttctccgccatcctgaatgcctcctcccgtggctttgtcctccatggcctggagcccgccagtctgtatcacatccacctcatggctgccagccaggctggggccaccaacagtacagtcctcaccctgatgaccttgaccccagaggggtcggagctacacatcatcctgggcctgttcggcctcctgctgttgctcacctgcctctgtggaactgcctggctctgttgcagccccaacaggaagaatcccctctggccaagtgtcccagacccagctcacagcagcctgggctcctgggtgcccacaatcatggaggaggatgccttccagctgcccggccttggcacgccacccatcaccaagctcacagtgctggaggaggatgaaaagaagccggtgccctgggagtcccataacagctcagagacctgtggcctccccactctggtccagacctatgtgctccagggggacccaagagcagtttccacccagccccaatcccagtctggcaccagcgatcaggctgggcctcccaggcgatctgcatactttaaggaccagatcatgctccatccagccccacccaatggccttttgtgcttgtttcctataacttcagtattgtaaactagtttttggtttgcagtttttgttgttgtttatagacactcttgggtgta

SEQ ID NO: 6486 - DNA, 3373 bp, Homo sapiens
  source 1..3373: mol_type = unassigned DNA
gaaaagaggcttagggccgggtgagccttccagccagggcctgcctccaagtgatgctcccccagggcagggggcataaggatggcacccagccaggtgggagcctgggccctgcccagcctcaaagctttgagctcaggaaatccggaggcaggggagggggacatcgttgccacattccccagccctttaagacccccaaggcaggaaggctgcccgggcctcaccagcttccctcacaggctccttcctgggaggaaggggctgcctgtgccctcgaaggcgcaagggagggcaggagggaggctcggaaggtgttgcaatccccagcccccgggcctgtcagaggctgagccattaacgacagagctcggggagagaagctggactgcagctggtttcaggaacttctcttgacgagaagagagaccaaggaggccaagcaggggctgggccagaggtgccaacatggggaaactgaggctcggctcggaaaggtgaagtaacttgtccaagatcacaaagctggtgaacatcaagttggtgctatggcaaggctgggaaactgcagcctgacttgggctgccctgatcatcctgctgctccccggaagtctggaggagtgcgggcacatcagtgtctcagcccccatcgtccacctgggggatcccatcacagcctcctgcatcatcaagcagaactgcagccatctggacccggagccacagattctgtggagactgggagcagagcttcagcccgggggcaggcagcagcgtctgtctgatgggacccaggaatctatcatcaccctgccccacctcaaccacactcaggcctttctctcctgctgcctgaactggggcaacagcctgcagatcctggaccaggttgagctgcgcgcaggctaccctccagccataccccacaacctctcctgcctcatgaacctcacaaccagcagcctcatctgccagtgggagccaggacctgagacccacctacccaccagcttcactctgaagagtttcaagagccggggcaactgtcagacccaaggggactccatcctggactgcgtgcccaaggacgggcagagccactgctgcatcccacgcaaacacctgctgttgtaccagaatatgggcatctgggtgcaggcagagaatgcgctggggaccagcatgtccccacaactgtgtcttgatcccatggatgttgtgaaactggagccccccatgctgcggaccatggaccccagccctgaagcggcccctccccaggcaggctgcctacagctgtgctgggagccatggcagccaggcctgcacataaatcagaagtgtgagctgcgccacaagccgcagcgtggagaagccagctgggcactggtgggccccctccccttggaggcccttcagtatgagctctgcgggctcctcccagccacggcctacaccctgcagatacgctgcatccgctggcccctgcctggccactggagcgactggagccccagcctggagctgagaactaccgaacgggcccccactgtcagactggacacatggtggcggcagaggcagctggaccccaggacagtgcagctgttctggaagccagtgcccctggaggaagacagcggacggatccaaggttatgtggtttcttggagaccctcaggccaggctggggccatcctgcccctctgcaacaccacagagctcagctgcaccttccacctgccttcagaagcccaggaggtggcccttgtggcctataactcagccgggacctctcgtcccactccggtggtcttctcagaaagcagaggcccagctctgaccagactccatgccatggcccgagaccctcacagcctctgggtaggctgggagccccccaatccatggcctcagggctatgtgattgagtggggcctgggcccccccagcgcgagcaatagcaacaagacctggaggatggaacagaatgggagagccacggggtttctgctgaaggagaacatcaggccctttcagctctatgagatcatcgtgactcccttgtaccaggacaccatgggaccctcccagcatgtctatgcctactctcaagaaatggctccctcccatgccccagagctgcatctaaagcacattggcaagacctgggcacagctggagtgggtgcctgagccccctgagctggggaagagcccccttacccactacaccatcttctggaccaacgctcagaaccagtccttctccgccatcctgaatgcctcctcccgtggctttgtcctccatggcctggagcccgccagtctgtatcacatccacctcatggctgccagccaggctggggccaccaacagtacagtcctcaccctgatgaccttgaccccagaggggtcggagctacacatcatcctgggcctgttcggcctcctgctgttgctcacctgcctctgtggaactgcctggctctgttgcagccccaacaggaagaatcccctctggccaagtgtcccagacccagctcacagcagcctgggctcctgggtgcccacaatcatggaggaggatgccttccagctgcccggccttggcacgccacccatcaccaagctcacagtgctggaggaggatgaaaagaagccggtgccctgggagtcccataacagctcagagacctgtggcctccccactctggtccagacctatgtgctccagggggacccaagagcagtttccacccagccccaatcccagtctggcaccagcgatcaggtcctttatgggcagctgctgggcagccccacaagcccagggccagggcactatctccgctgtgactccactcagcccctcttggcgggcctcacccccagccccaagtcctatgagaacctctggttccaggccagccccttggggaccctggtaaccccagccccaagccaggaggacgactgtgtctttgggccactgctcaacttccccctcctgcaggggatccgggtccatgggatggaggcgctggggagcttctagggcttcctggggttcccttcttgggcctgcctcttaaaggcctgagctagctggagaagaggggagggtccataagcccatgactaaaaactaccccagcccaggctctcaccatctccagtcaccagcatctccctctcctcccaatctccataggctgggcctcccaggcgatctgcatactttaaggaccagatcatgctccatccagccccacccaatggccttttgtgcttgtttcctataacttcagtattgtaaactagtttttggtttgcagtttttgttgttgtttatagacactcttgggtgta

SEQ ID NO: 6487 - DNA, 2750 bp, Homo sapiens
  source 1..2750: mol_type = unassigned DNA
atggcaaggctgggaaactgcagcctgacttgggctgccctgatcatcctgctgctccccggaagtctggaggagtgcgggcacatcagtgtctcagcccccatcgtccacctgggggatcccatcacagcctcctgcatcatcaagcagaactgcagccatctggacccggagccacagattctgtggagactgggagcagagcttcagcccgggggcaggcagcagcgtctgtctgatgggacccaggaatctatcatcaccctgccccacctcaaccacactcaggcctttctctcctgctgcctgaactggggcaacagcctgcagatcctggaccaggttgagctgcgcgcaggctaccctccagccataccccacaacctctcctgcctcatgaacctcacaaccagcagcctcatctgccagtgggagccaggacctgagacccacctacccaccagcttcactctgaagagtttcaagagccggggcaactgtcagacccaaggggactccatcctggactgcgtgcccaaggacgggcagagccactgctgcatcccacgcaaacacctgctgttgtaccagaatatgggcatctgggtgcaggcagagaatgcgctggggaccagcatgtccccacaactgtgtcttgatcccatggatgttgtgaaactggagccccccatgctgcggaccatggaccccagccctgaagcggcccctccccaggcaggctgcctacagctgtgctgggagccatggcagccaggcctgcacataaatcagaagtgtgagctgcgccacaagccgcagcgtggagaagccagctgggcactggtgggccccctccccttggaggcccttcagtatgagctctgcgggctcctcccagccacggcctacaccctgcagatacgctgcatccgctggcccctgcctggccactggagcgactggagccccagcctggagctgagaactaccgaacgggcccccactgtcagactggacacatggtggcggcagaggcagctggaccccaggacagtgcagctgttctggaagccagtgcccctggaggaagacagcggacggatccaaggttatgtggtttcttggagaccctcaggccaggctggggccatcctgcccctctgcaacaccacagagctcagctgcaccttccacctgccttcagaagcccaggaggtggcccttgtggcctataactcagccgggacctctcgtcccactccggtggtcttctcagaaagcagaggcccagctctgaccagactccatgccatggcccgagaccctcacagcctctgggtaggctgggagccccccaatccatggcctcagggctatgtgattgagtggggcctgggcccccccagcgcgagcaatagcaacaagacctggaggatggaacagaatgggagagccacggggtttctgctgaaggagaacatcaggccctttcagctctatgagatcatcgtgactcccttgtaccaggacaccatgggaccctcccagcatgtctatgcctactctcaagaaatggctccctcccatgccccagagctgcatctaaagcacattggcaagacctgggcacagctggagtgggtgcctgagccccctgagctggggaagagcccccttacccactacaccatcttctggaccaacgctcagaaccagtccttctccgccatcctgaatgcctcctcccgtggctttgtcctccatggcctggagcccgccagtctgtatcacatccacctcatggctgccagccaggctggggccaccaacagtacagtcctcaccctgatgaccttgaccccagaggggtcggagctacacatcatcctgggcctgttcggcctcctgctgttgctcacctgcctctgtggaactgcctggctctgttgcagccccaacaggaagaatcccctctggccaagtgtcccagacccagctcacagcagcctgggctcctgggtgcccacaatcatggaggaggatgccttccagctgcccggccttggcacgccacccatcaccaagctcacagtgctggaggaggatgaaaagaagccggtgccctgggagtcccataacagctcagagacctgtggcctccccactctggtccagacctatgtgctccagggggacccaagagcagtttccacccagccccaatcccagtctggcaccagcgatcaggtcctttatgggcagctgctgggcagccccacaagcccagggccagggcactatctccgctgtgactccactcagcccctcttggcgggcctcacccccagccccaagtcctatgagaacctctggttccaggccagccccttggggaccctggtaaccccagccccaagccaggaggacgactgtgtctttgggccactgctcaacttccccctcctgcaggggatccgggtccatgggatggaggcgctggggagcttctagggcttcctggggttcccttcttgggcctgcctcttaaaggcctgagctagctggagaagaggggagggtccataagcccatgactaaaaactaccccagcccaggctctcaccatctccagtcaccagcatctccctctcctcccaatctccataggctgggcctcccaggcgatctgcatactttaaggaccagatcatgctccatccagccccacccaatggccttttgtgcttgtt

SEQ ID NO: 6488 - DNA, 2592 bp, Homo sapiens
  source 1..2592: mol_type = unassigned DNA
atggcaaggctgggaaactgcagcctgacttgggctgccctgatcatcctgctgctccccggaagtctggaggagtgcgggcacatcagtgtctcagcccccatcgtccacctgggggatcccatcacagcctcctgcatcatcaagcagaactgcagccatctggacccggagccacagattctgtggagactgggagcagagcttcagcccgggggcaggcagcagcgtctgtctgatgggacccaggaatctatcatcaccctgccccacctcaaccacactcaggcctttctctcctgctgcctgaactggggcaacagcctgcagatcctggaccaggttgagctgcgcgcaggctaccctccagccataccccacaacctctcctgcctcatgaacctcacaaccagcagcctcatctgccagtgggagccaggacctgagacccacctacccaccagcttcactctgaagagtttcaagagccggggcaactgtcagacccaaggggactccatcctggactgcgtgcccaaggacgggcagagccactgctgcatcccacgcaaacacctgctgttgtaccagaatatgggcatctgggtgcaggcagagaatgcgctggggaccagcatgtccccacaactgtgtcttgatcccatggatgttgtgaaactggagccccccatgctgcggaccatggaccccagccctgaagcggcccctccccaggcaggctgcctacagctgtgctgggagccatggcagccaggcctgcacataaatcagaagtgtgagctgcgccacaagccgcagcgtggagaagccagctgggcactggtgggccccctccccttggaggcccttcagtatgagctctgcgggctcctcccagccacggcctacaccctgcagatacgctgcatccgctggcccctgcctggccactggagcgactggagccccagcctggagctgagaactaccgaacgggcccccactgtcagactggacacatggtggcggcagaggcagctggaccccaggacagtgcagctgttctggaagccagtgcccctggaggaagacagcggacggatccaaggttatgtggtttcttggagaccctcaggccaggctggggccatcctgcccctctgcaacaccacagagctcagctgcaccttccacctgccttcagaagcccaggaggtggcccttgtggcctataactcagccgggacctctcgtcccactccggtggtcttctcagaaagcagaggcccagctctgaccagactccatgccatggcccgagaccctcacagcctctgggtaggctgggagccccccaatccatggcctcagggctatgtgattgagtggggcctgggcccccccagcgcgagcaatagcaacaagacctggaggatggaacagaatgggagagccacggggtttctgctgaaggagaacatcaggccctttcagctctatgagatcatcgtgactcccttgtaccaggacaccatgggaccctcccagcatgtctatgcctactctcaagaaatggctccctcccatgccccagagctgcatctaaagcacattggcaagacctgggcacagctggagtgggtgcctgagccccctgagctggggaagagcccccttacccactacaccatcttctggaccaacgctcagaaccagtccttctccgccatcctgaatgcctcctcccgtggctttgtcctccatggcctggagcccgccagtctgtatcacatccacctcatggctgccagccaggctggggccaccaacagtacagtcctcaccctgatgaccttgaccccagaggggtcggagctacacatcatcctgggcctgttcggcctcctgctgttgctcacctgcctctgtggaactgcctggctctgttgcagccccaacaggaagaatcccctctggccaagtgtcccagacccagctcacagcagcctgggctcctgggtgcccacaatcatggaggagctgcccggacccagacagggacagtggctggggcagacatctgaaatgagccgtgctctcaccccacatccttgtgtgcaggatgccttccagctgcccggccttggcacgccacccatcaccaagctcacagtgctggaggaggatgaaaagaagccggtgccctgggagtcccataacagctcagagacctgtggcctccccactctggtccagacctatgtgctccagggggacccaagagcagtttccacccagccccaatcccagtctggcaccagcgatcaggtcctttatgggcagctgctgggcagccccacaagcccagggccagggcactatctccgctgtgactccactcagcccctcttggcgggcctcacccccagccccaagtcctatgagaacctctggttccaggccagccccttggggaccctggtaaccccagccccaagccaggaggacgactgtgtctttgggccactgctcaacttccccctcctgcaggggatccgggtccatgggatggaggcgctggggagcttctag

SEQ ID NO: 6489 - DNA, 1440 bp, Homo sapiens
  source 1..1440: mol_type = unassigned DNA
ggacctctcgtcccactccggtggtcttctcagaaagcagaggcccagctctgaccagactccatgccatggcccgagaccctcacagcctctgggtaggctgggagccccccaatccatggcctcagggctatgtgattgagtggggcctgggcccccccagcgcgagcaatagcaacaagacctggaggatggaacagaatgggagagccacggggtttctgctgaaggctccctcccatgccccagagctgcatctaaagcacattggcaagacctgggcacagctggagtgggtgcctgagccccctgagctggggaagagcccccttacccactacaccatcttctggaccaacgctcagaaccagtccttctccgccatcctgaatgcctcctcccgtggctttgtcctccatggcctggagcccgccagtctgtatcacatccacctcatggctgccagccaggctggggccaccaacagtacagtcctcaccctgatgaccttgaccccagaggggtcggagctacacatcatcctgggcctgttcggcctcctgctgttgctcacctgcctctgtggaactgcctggctctgttgcagccccaacaggaagaatcccctctggccaagtgtcccagacccagctcacagcagcctgggctcctgggtgcccacaatcatggaggaggatgccttccagctgcccggccttggcacgccacccatcaccaagctcacagtgctggaggaggatgaaaagaagccggtgccctgggagtcccataacagctcagagacctgtggcctccccactctggtccagacctatgtgctccagggggacccaagagcagtttccacccagccccaatcccagtctggcaccagcgatcaggtcctttatgggcagctgctgggcagccccacaagcccagggccagggcactatctccgctgtgactccactcagcccctcttggcgggcctcacccccagccccaagtcctatgagaacctctggttccaggccagccccttggggaccctggtaaccccagccccaagccaggaggacgactgtgtctttgggccactgctcaacttccccctcctgcaggggatccgggtccatgggatggaggcgctggggagcttctagggcttcctggggttcccttcttgggcctgcctcttaaaggcctgagctagctggagaagaggggagggtccataagcccatgactaaaaactaccccagcccaggctctcaccatctccagtcaccagcatctccctctcctcccaatctccataggctgggcctcccaggcgatctgcatactttaaggaccagatcatgctccatccagccccacccaatggccttttgtgcttgtttcctataacttcagtattgtaaactagtttttggt

SEQ ID NO: 6490 - DNA, 512 bp, Homo sapiens
  source 1..512: mol_type = unassigned DNA
gagagtagaaacagcaagggagcgaggggtgtgaagtggggaagagagtgtgaggggagagggctgagcgtgatgagggagaaacagaaagagggaatgtgaaggcagccagcccaggagacatcgagctgtgctgggccacaggagtgagcacctgcagagcccagcagagatggccgcagtgacaggagggccagggggcccaggagttaggaggagaggatccagaaagggggctttggaactgcgcagtgtggcacagacaaaagcaagatggggaaactgaggctcggctcggaaaggtgaagtaacttgtccaagatcacaaagctgggataaattgaccctccagtggacagctctgagaagtgttctacatggctctttggaaggttccagcaggatagagccccagttgtccatagaggtgaacatcaagttggtgctatggcaaggctgggaaactgcagcctgacttgggctgccctgatcatcctgctgctccccggaag

SEQ ID NO: 6491 - DNA, 1373 bp, Homo sapiens
  source 1..1373: mol_type = unassigned DNA
ggcccgcttttggctgcatcagccggggattgccggcgccaggtgctgggggcgactcggacagcgggagcgtggggtggagtaggatggagtctccctcccgagctgggggtgtgggcctaggaaaggctgcttcgccgctgtgttcggagagctctggatactgcggggcttttccgcggaggagcgcccgccggcatctgcatctgggaccgacctcctgggctggctgatcaaagaggaagcagcagcaatgtctgctgtgggggctgcaactccatacctgcatcatcctggtgatagtcacagtggccgagtgagtttcttgggggcccagcttcctccagaggtggcagcaatggcccggctactaggggacctagacaggagcacgttcagaaagttgctgaagtttgtggtcagcagcctgcagggggaggactgccgagaggctgtgcagcgtcttggggtcagcgccaacctgccggaggagcagctgggtgccctgctggcaggcatgcacacactgctccagcaggccctccgtctgccccccaccagcctgaagcctgacaccttcagggaccagctccaggagctctgcatcccccaagacctggtcggggacttggccagcgtggtatttgggagccagcggcccctccttgattctgtggcccagcagcagggggcctggctgccgcatgttgctgactttcggtggcgggtggatgtagcaatctccaccagtgccctggctcgctccctgcagccgagcgtcctgatgcagctgaagctttcagatgggtcagcataccgctttgaggtccccacagccaagttccaggagctgcggtacagcgtggccctggtcctaaaggagatggcagatctggagaagaggtgtgagcgcagactgcaggactgacccctcacttgaccagtcccattcagatccggcttggacaggcacctgagatggtgccaaagtgcagctgactcttcccacgacagccctgcccttcccatgaggcaggctcttcagtgagtgtttgaacgtaattatgtagttttctgtttaattgaaaaagagagctatgcctttttttctttttggaagtaaagcagctaaaaacatgtttctataggtgagtgttggacctcacaccctccccttccctgtacatttgtctttggtgctggacgtggccatgtgaggccaggttgaggccctttgtagacaacatacagttgctcagcctggccccatgtagccaggtgcttttgtagatcttgtgttttaggttgggcattttcactcttctgccttaaatccctgaccccatggagctgacattctagtgcggctgagg

SEQ ID NO: 6492 - DNA, 1297 bp, Homo sapiens
  source 1..1297: mol_type = unassigned DNA
cggaagtggctctcagggcgcttccggggaccaggcccgcttttggctgcatcagccggggattgccggcgccaggcatctgcatctgggaccgacctcctgggctggctgatcaaagaggaagcagcagcaatgtctgctgtgggggctgcaactccatacctgcatcatcctggtgatagtcacagtggccgagtgagtttcttgggggcccagcttcctccagaggtggcagcaatggcccggctactaggggacctagacaggagcacgttcagaaagttgctgaagtttgtggtcagcagcctgcagggggaggactgccgagaggctgtgcagcgtcttggggtcagcgccaacctgccggaggagcagctgggtgccctgctggcaggcatgcacacactgctccagcaggccctccgtctgccccccaccagcctgaagcctgacaccttcagggaccagctccaggagctctgcatcccccaagacctggtcggggacttggccagcgtggtatttgggagccagcggcccctccttgattctgtggcccagcagcagggggcctggctgccgcatgttgctgactttcggtggcgggtggatgtagcaatctccaccagtgccctggctcgctccctgcagccgagcgtcctgatgcagctgaagctttcagatgggtcagcataccgctttgaggtccccacagccaagttccaggagctgcggtacagcgtggccctggtcctaaaggagatggcagatctggagaagaggtgtgagcgcagactgcaggactgacccctcacttgaccagtcccattcagatccggcttggacaggcacctgagatggtgccaaagtgcagctgactcttcccacgacagccctgcccttcccatgaggcaggctcttcagtgagtgtttgaacgtaattatgtagttttctgtttaattgaaaaagagagctatgcctttttttctttttggaagtaaagcagctaaaaacatgtttctataggtgagtgttggacctcacaccctccccttccctgtacatttgtctttggtgctggacgtggccatgtgaggccaggttgaggccctttgtagacaacatacagttgctcagcctggccccatgtagccaggtgcttttgtagatcttgtgttttaggttgggcattttcactcttctgccttaaatccctgaccccatggagctgacattctagtgcggctgaggggaggggaaacattgtaaaataaatcataaaaattaactggaata

SEQ ID NO: 6493 - DNA, 1573 bp, Homo sapiens
  source 1..1573: mol_type = unassigned DNA
agttttattgggctataattcacataccatataattcacccattttgtacaattcaatgattttggcatattattttttaactatggtaaagtacatgttaaataaaatggctcggccattgtttcggaccgagctcctgcgctagggcccaacagagcagcccaaagcggaaccgagtcacgcgcgccggacgccacccgacaggaggggaaacggggcagctctcaaaaccctggaggcgcagaccgtccacacgggacagggacgcccgctcggctccgctccgcgctgatcctcaaggtctcgcggtttccccgccgcccacccggacgccgacgaaagccagcgagctcctcagcctcaggcatctgcatctgggaccgacctcctgggctggctgatcaaagaggaagcagcagcaatgtctgctgtgggggctgcaactccatacctgcatcatcctggtgatagtcacagtggccgagtgagtttcttgggggcccagcttcctccagaggtggcagcaatggcccggctactaggggacctagacaggagcacgttcagaaagttgctgaagtttgtggtcagcagcctgcagggggaggactgccgagaggctgtgcagcgtcttggggtcagcgccaacctgccggaggagcagctgggtgccctgctggcaggcatgcacacactgctccagcaggccctccgtctgccccccaccagcctgaagcctgacaccttcagggaccagctccaggagctctgcatcccccaagacctggtcggggacttggccagcgtggtatttgggagccagcggcccctccttgattctgtggcccagcagcagggggcctggctgccgcatgttgctgactttcggtggcgggtggatgtagcaatctccaccagtgccctggctcgctccctgcagccgagcgtcctgatgcagctgaagctttcagatgggtcagcataccgctttgaggtccccacagccaagttccaggagctgcggtacagcgtggccctggtcctaaaggagatggcagatctggagaagaggtgtgagcgcagactgcaggactgacccctcacttgaccagtcccattcagatccggcttggacaggcacctgagatggtgccaaagtgcagctgactcttcccacgacagccctgcccttcccatgaggcaggctcttcagtgagtgtttgaacgtaattatgtagttttctgtttaattgaaaaagagagctatgcctttttttctttttggaagtaaagcagctaaaaacatgtttctataggtgagtgttggacctcacaccctccccttccctgtacatttgtctttggtgctggacgtggccatgtgaggccaggttgaggccctttgtagacaacatacagttgctcagcctggccccatgtagccaggtgcttttgtagatcttgtgttttaggttgggcattttcactcttctgccttaaatccctgaccccatggagctgacattctagtgcggctgaggggaggggaaacattgtaaaataaatcataaa

SEQ ID NO: 6494 - DNA, 486 bp, Homo sapiens
  source 1..486: mol_type = unassigned DNA
ctctcgagtccgggccgcaagtcccagacgctgcccatggaggcgtccagcgagccgccgctggatgctaagtccgatgtcaccaaccagcttgtagattttcagtggaaactgggtatggctgtgagctcagacacttgcagatctcttaagtatccttacgttgcagtgatgctaaaagtggcagatcattcaggccaagtaaagaccaagtgctttgaaatgacgattccacagtttcagcctcagctcctggcaacctccagtctcctttctgcttctaatttctacagacagttcaaggaaattgctgcagttattgaaacggtgtgaagacggattctttggttgataaattgctatcattctaaagtcatggacttcactttcggcaacaaaactaaataaggatggaacatttattgaatgaaaaatgcacttttgtttttccatttttttaaataataaaaatcagacaaacaggaa

SEQ ID NO: 6495 - DNA, 1793 bp, Homo sapiens
  source 1..1793: mol_type = unassigned DNA
tgatcaccaaattcaaggcggcccttgattagattctagttgtggatgggcttcccctgctacgtccgccccatgcgccaggccgctaggggcaggacgtggaagcggaagcgctggtctgggggcgttctctcgagtccgggccgcaagtcccagacgctgcccatggaggcgtccagcgagccgccgctggatgctaagtccgatgtcaccaaccagcttgtagattttcagtggaaactgggtatggctgtgagctcagacacttgcagatctcttaagtatccttacgttgcagtgatgctaaaagtggcagatcattcaggccaagtaaagaccaagtgctttgaaatgacgattccacagtttcagaatttctacagacagttcaaggaaattgctgcagttattgaaacggtgtgaagacggattctttggttgataaattgctatcattctaaagtcatggacttcactttcggcaacaaaactaaataaggatggaacatttattgaatgaaaaatgcacttttgtttttccatttttttaaataataaaaatcagacaaacaggaactgggtagtggtgatgaatgcaaaactttgtgaatgtgctttataaaagtgataattagacactttagaggatatacttggtgataatgtgaatgatgtaatcagactaacagttgaatcattgctgttggaggcagcacaaatttatgtgttacaacagtagtttaaaaacttgtactggatggaacccattttataaacagtcttatttggagtcatgtatataaaaatatatataaattagaaaagtagtatttgattaggataactttacaaattcaatagtatagccatcacttattataatggcaatcagaagagtgaggcttcttttttcaaacttttgtaatcagattaagattgaccattgctcctttacacagtattagtctagcattcaattatttctgttattaatggttgtagaaagttcaaatacatacgcagagttggaaagacgagttttagtctgagttctgtacgacggagttaacccgttagcacaagttattgcattagatgatctctgttgaatttaaatacataaacctgttgttaaacgcttttatactataaagccaccacattgtatggcatttgtttagaagtaagcaaatagaccaccggaatagaatagatggcctagaaatagatcaagacattctggtccgccatattagaaatttaaaccctcttcacaccctgtctgcatttctgcaggtctgtgtgagtccactttcttttttgttccctgctaggtagcacacagctgtgaggagcccaggactgctgcctgccgcagcccacctgtgcgctcagattcctaccagcttgatgagttagctgatgggccatttgtgcataccaactacccacagacatttctattacccaccctctggatgccagtgcattaatgattctagaattaggagaaaccaaagatcccttctctctccctcccacaaccagtgtcgtcgtgttcctagaaataagagtagaaacccctctatctgggttaaaacagcaaacctgccttctgtaactgtgcatgaggttcctctgtctcccacttacttcggattaacaccttcctctttccccttccctgtttgcagggtagcatttctaggtttaaggcaatatgcaaaaagacccaaagttaggccctggctcaaacactgtgggtagcagatttgaaataaatttaaattgca

SEQ ID NO: 6496 - DNA, 1683 bp, Homo sapiens
  source 1..1683: mol_type = unassigned DNA
ggtctgggggcgttctctcgagtccgggccgcaagtcccagacgctgcccatggaggcgtccagcgagccgccgctggatgctaagtccgatgtcaccaaccagcttgtagattttcagtggaaactgggtatggctgtgagctcagacacttgcagatctcttaagtatccttacgttgcagtgatgctaaaagtggcagatcattcaggccaagtaaagaccaagtgctttgaaatgacgattccacagtttcagaatttctacagacagttcaaggaaattgctgcagttattgaaacggtgtgaagacggattctttggttgataaattgctatcattctaaagtcatggacttcactttcggcaacaaaactaaataaggatggaacatttattgaatgaaaaatgcacttttgtttttccatttttttaaataataaaaatcagacaaacaggaactgggtagtggtgatgaatgcaaaactttgtgaatgtgctttataaaagtgataattagacactttagaggatatacttggtgataatgtgaatgatgtaatcagactaacagttgaatcattgctgttggaggcagcacaaatttatgtgttacaacagtagtttaaaaacttgtactggatggaacccattttataaacagtcttatttggagtcatgtatataaaaatatatataaattagaaaagtagtatttgattaggataactttacaaattcaatagtatagccatcacttattataatggcaatcagaagagtgaggcttcttttttcaaacttttgtaatcagattaagattgaccattgctcctttacacagtattagtctagcattcaattatttctgttattaatggttgtagaaagttcaaatacatacgcagagttggaaagacgagttttagtctgagttctgtacgacggagttaacccgttagcacaagttattgcattagatgatctctgttgaatttaaatacataaacctgttgttaaacgcttttatactataaagccaccacattgtatggcatttgtttagaagtaagcaaatagaccaccggaatagaatagatggcctagaaatagatcaagacattctggtccgccatattagaaatttaaaccctcttcacaccctgtctgcatttctgcaggtctgtgtgagtccactttcttttttgttccctgctaggtagcacacagctgtgaggagcccaggactgctgcctgccgcagcccacctgtgcgctcagattcctaccagcttgatgagttagctgatgggccatttgtgcataccaactacccacagacatttctattacccaccctctggatgccagtgcattaatgattctagaattaggagaaaccaaagatcccttctctctccctcccacaaccagtgtcgtcgtgttcctagaaataagagtagaaacccctctatctgggttaaaacagcaaacctgccttctgtaactgtgcatgaggttcctctgtctcccacttacttcggattaacaccttcctctttccccttccctgtttgcagggtagcatttctaggtttaaggcaatatgcaaaaagacccaaagttaggccctggctcaaacactgtgggtagcagatttgaaataaatttaaattgcatgttt

SEQ ID NO: 6497 - DNA, 7470 bp, Homo sapiens
  source 1..7470: mol_type = unassigned DNA
atgggggcctcttctccaagaagcccggagcctgtcgggccgccggcgcccggtctccccttctgctgcggaggatccctgctggcggttgtggtgctgcttgcgctgccggtggcctggggtcaatgcaatgccccagaatggcttccatttgccaggcctaccaacctaactgatgaatttgagtttcccattgggacatatctgaactatgaatgccgccctggttattccggaagaccgttttctatcatctgcctaaaaaactcagtctggactggtgctaaggacaggtgcagacgtaaatcatgtcgtaatcctccagatcctgtgaatggcatggtgcatgtgatcaaaggcatccagttcggatcccaaattaaatattcttgtactaaaggataccgactcattggttcctcgtctgccacatgcatcatctcaggtgatactgtcatttgggataatgaaacacctatttgtgacagaattccttgtgggctaccccccaccatcaccaatggagatttcattagcaccaacagagagaattttcactatggatcagtggtgacctaccgctgcaatcctggaagcggagggagaaaggtgtttgagcttgtgggtgagccctccatatactgcaccagcaatgacgatcaagtgggcatctggagcggccccgcccctcagtgcattatacctaacaaatgcacgcctccaaatgtggaaaatggaatattggtatctgacaacagaagcttattttccttaaatgaagttgtggagtttaggtgtcagcctggctttgtcatgaaaggaccccgccgtgtgaagtgccaggccctgaacaaatgggagccggagctaccaagctgctccagggtatgtcagccacctccagatgtcctgcatgctgagcgtacccaaagggacaaggacaacttttcacctgggcaggaagtgttctacagctgtgagcccggctacgacctcagaggggctgcgtctatgcgctgcacaccccagggagactggagccctgcagcccccacatgtgaagtgaaatcctgtgatgacttcatgggccaacttcttaatggccgtgtgctatttccagtaaatctccagcttggagcaaaagtggattttgtttgtgatgaaggatttcaattaaaaggcagctctgctagttactgtgtcttggctggaatggaaagcctttggaatagcagtgttccagtgtgtgaacaaatcttttgtccaagtcctccagttattcctaatgggagacacacaggaaaacctctggaagtctttccctttgggaaaacagtaaattacacatgcgacccccacccagacagagggacgagcttcgacctcattggagagagcaccatccgctgcacaagtgaccctcaagggaatggggtttggagcagccctgcccctcgctgtggaattctgggtcactgtcaagccccagatcattttctgtttgccaagttgaaaacccaaaccaatgcatctgactttcccattgggacatctttaaagtacgaatgccgtcctgagtactacgggaggccattctctatcacatgtctagataacctggtctggtcaagtcccaaagatgtctgtaaacgtaaatcatgtaaaactcctccagatccagtgaatggcatggtgcatgtgatcacagacatccaggttggatccagaatcaactattcttgtactacagggcaccgactcattggtcactcatctgctgaatgtatcctctcgggcaatgctgcccattggagcacgaagccgccaatttgtcaacgaattccttgtgggctaccccccaccatcgccaatggagatttcattagcaccaacagagagaattttcactatggatcagtggtgacctaccgctgcaatcctggaagcggagggagaaaggtgtttgagcttgtgggtgagccctccatatactgcaccagcaatgacgatcaagtgggcatctggagcggcccggcccctcagtgcattatacctaacaaatgcacgcctccaaatgtggaaaatggaatattggtatctgacaacagaagcttattttccttaaatgaagttgtggagtttaggtgtcagcctggctttgtcatgaaaggaccccgccgtgtgaagtgccaggccctgaacaaatgggagccggagctaccaagctgctccagggtatgtcagccacctccagatgtcctgcatgctgagcgtacccaaagggacaaggacaacttttcacccgggcaggaagtgttctacagctgtgagcccggctacgacctcagaggggctgcgtctatgcgctgcacaccccagggagactggagccctgcagcccccacatgtgaagtgaaatcctgtgatgacttcatgggccaacttcttaatggccgtgtgctatttccagtaaatctccagcttggagcaaaagtggattttgtttgtgatgaaggatttcaattaaaaggcagctctgctagttactgtgtcttggctggaatggaaagcctttggaatagcagtgttccagtgtgtgaacaaatcttttgtccaagtcctccagttattcctaatgggagacacacaggaaaacctctggaagtctttccctttgggaaaacagtaaattacacatgcgacccccacccagacagagggacgagcttcgacctcattggagagagcaccatccgctgcacaagtgaccctcaagggaatggggtttggagcagccctgcccctcgctgtggaattctgggtcactgtcaagccccagatcattttctgtttgccaagttgaaaacccaaaccaatgcatctgactttcccattgggacatctttaaagtacgaatgccgtcctgagtactacgggaggccattctctatcacatgtctagataacctggtctggtcaagtcccaaagatgtctgtaaacgtaaatcatgtaaaactcctccagatccagtgaatggcatggtgcatgtgatcacagacatccaggttggatccagaatcaactattcttgtactacagggcaccgactcattggtcactcatctgctgaatgtatcctctcgggcaatgctgcccattggagcacgaagccgccaatttgtcaacgaattccttgtgggctaccccccaccatcgccaatggagatttcattagcaccaacagagagaattttcactatggatcagtggtgacctaccgctgcaatcctggaagcggagggagaaaggtgtttgagcttgtgggtgagccctccatatactgcaccagcaatgacgatcaagtgggcatctggagcggcccggcccctcagtgcattatacctaacaaatgcacgcctccaaatgtggaaaatggaatattggtatctgacaacagaagcttattttccttaaatgaagttgtggagtttaggtgtcagcctggctttgtcatgaaaggaccccgccgtgtgaagtgccaggccctgaacaaatgggagccggagctaccaagctgctccagggtatgtcagccacctccagatgtcctgcatgctgagcgtacccaaagggacaaggacaacttttcacccgggcaggaagtgttctacagctgtgagcccggctatgacctcagaggggctgcgtctatgcgctgcacaccccagggagactggagccctgcagcccccacatgtgaagtgaaatcctgtgatgacttcatgggccaacttcttaatggccgtgtgctatttccagtaaatctccagcttggagcaaaagtggattttgtttgtgatgaaggatttcaattaaaaggcagctctgctagttattgtgtcttggctggaatggaaagcctttggaatagcagtgttccagtgtgtgaacaaatcttttgtccaagtcctccagttattcctaatgggagacacacaggaaaacctctggaagtctttccctttggaaaagcagtaaattacacatgcgacccccacccagacagagggacgagcttcgacctcattggagagagcaccatccgctgcacaagtgaccctcaagggaatggggtttggagcagccctgcccctcgctgtggaattctgggtcactgtcaagccccagatcattttctgtttgccaagttgaaaacccaaaccaatgcatctgactttcccattgggacatctttaaagtacgaatgccgtcctgagtactacgggaggccattctctatcacatgtctagataacctggtctggtcaagtcccaaagatgtctgtaaacgtaaatcatgtaaaactcctccagatccagtgaatggcatggtgcatgtgatcacagacatccaggttggatccagaatcaactattcttgtactacagggcaccgactcattggtcactcatctgctgaatgtatcctctcaggcaatactgcccattggagcacgaagccgccaatttgtcaacgaattccttgtgggctacccccaaccatcgccaatggagatttcattagcaccaacagagagaattttcactatggatcagtggtgacctaccgctgcaatcttggaagcagagggagaaaggtgtttgagcttgtgggtgagccctccatatactgcaccagcaatgacgatcaagtgggcatctggagcggccccgcccctcagtgcattatacctaacaaatgcacgcctccaaatgtggaaaatggaatattggtatctgacaacagaagcttattttccttaaatgaagttgtggagtttaggtgtcagcctggctttgtcatgaaaggaccccgccgtgtgaagtgccaggccctgaacaaatgggagccagagttaccaagctgctccagggtgtgtcagccgcctccagaaatcctgcatggtgagcataccccaagccatcaggacaacttttcacctgggcaggaagtgttctacagctgtgagcctggctatgacctcagaggggctgcgtctctgcactgcacaccccagggagactggagccctgaagccccgagatgtgcagtgaaatcctgtgatgacttcttgggtcaactccctcatggccgtgtgctatttccacttaatctccagcttggggcaaaggtgtcctttgtctgtgatgaagggtttcgcttaaagggcagttccgttagtcattgtgtcttggttggaatgagaagcctttggaataacagtgttcctgtgtgtgaacatatcttttgtccaaatcctccagctatccttaatgggagacacacaggaactccctctggagatattccctatggaaaagaaatatcttacacatgtgacccccacccagacagagggatgaccttcaacctcattggggagagcaccatccgctgcacaagtgaccctcatgggaatggggtttggagcagccctgcccctcgctgtgaactttctgttcgtgctggtcactgtaaaaccccagagcagtttccatttgccagtcctacgatcccaattaatgactttgagtttccagtcgggacatctttgaattatgaatgccgtcctgggtattttgggaaaatgttctctatctcctgcctagaaaacttggtctggtcaagtgttgaagacaactgtagacgaaaatcatgtggacctccaccagaacccttcaatggaatggtgcatataaacacagatacacagtttggatcaacagttaattattcttgtaatgaagggtttcgactcattggttccccatctactacttgtctcgtctcaggcaataatgtcacatgggataagaaggcacctatttgtgagatcatatcttgtgagccacctccaaccatatccaatggagacttctacagcaacaatagaacatcttttcacaatggaacggtggtaacttaccagtgccacactggaccagatggagaacagctgtttgagcttgtgggagaacggtcaatatattgcaccagcaaagatgatcaagttggtgtttggagcagccctccccctcggtgtatttctactaataaatgcacagctccagaagttgaaaatgcaattagagtaccaggaaacaggagtttctttaccctcactgagatcatcagatttagatgtcagcccgggtttgtcatggtagggtcccacactgtgcagtgccagaccaatggcagatgggggcccaagctgccacactgctccagggtgtgtcagccgcctccagaaatcctgcatggtgagcataccctaagccatcaggacaacttttcacctgggcaggaagtgttctacagctgtgagcccagctatgacctcagaggggctgcgtctctgcactgcacgccccagggagactggagccctgaagcccctagatgtacagtgaaatcctgtgatgacttcctgggccaactccctcatggccgtgtgctacttccacttaatctccagcttggggcaaaggtgtcctttgtttgcgatgaagggttccgattaaaaggcaggtctgctagtcattgtgtcttggctggaatgaaagccctttggaatagcagtgttccagtgtgtgaacaaatcttttgtccaaatcctccagctatccttaatgggagacacacaggaactccctttggagatattccctatggaaaagaaatatcttacgcatgcgacacccacccagacagagggatgaccttcaacctcattggggagagctccatccgctgcacaagtgaccctcaagggaatggggtttggagcagccctgcccctcgctgtgaactttctgttcctgctgcctgcccacatccacccaagatccaaaacgggcattacattggaggacacgtatctctatatcttcctgggatgacaatcagctacatttgtgaccccggctacctgttagtgggaaagggcttcattttctgtacagaccagggaatctggagccaattggatcattattgcaaagaagtaaattgtagcttcccactgtttatgaatggaatctcgaaggagttagaaatgaaaaaagtatatcactatggagattatgtgactttgaagtgtgaagatgggtatactctggaaggcagtccctggagccagtgccaggcggatgacagatgggaccctcctctggccaaatgtacctctcgtacacatgatgctctcatagttggcactttatctggtacgatcttctttattttactcatcattttcctctcttggataattctaaagcacagaaaaggcaataatgcacatgaaaaccctaaagaagtggctatccatttacattctcaaggaggcagcagcgttcatccccgaactctgcaaacaaatgaagaaaatagcagggtccttccttga

SEQ ID NO: 6498 - DNA, 7469 bp, Homo sapiens
  source 1..7469: mol_type = unassigned DNA
acactctgggcgcggagcacaatgattggtcactcctattttcgctgagcttttcctcttatttcagttttcttcgagatcaaatctggtttgtagatgtgcttggggagaatgggggcctcttctccaagaagcccggagcctgtcgggccgccggcgcccggtctccccttctgctgcggaggatccctgctggcggttgtggtgctgcttgcgctgccggtggcctggggtcaatgcaatgccccagaatggcttccatttgccaggcctaccaacctaactgatgaatttgagtttcccattgggacatatctgaactatgaatgccgccctggttattccggaagaccgttttctatcatctgcctaaaaaactcagtctggactggtgctaaggacaggtgcagacgtaaatcatgtcgtaatcctccagatcctgtgaatggcatggtgcatgtgatcaaaggcatccagttcggatcccaaattaaatattcttgtactaaaggataccgactcattggttcctcgtctgccacatgcatcatctcaggtgatactgtcatttgggataatgaaacacctatttgtgacagaattccttgtgggctaccccccaccatcgccaatggagatttcattagcaccaacagagagaattttcactatggatcagtggtgacctaccgctgcaatcctggaagcggagggagaaaggtgtttgagcttgtgggtgagccctccatatactgcaccagcaatgacgatcaagtgggcatctggagcggcccggcccctcagtgcattatacctaacaaatgcacgcctccaaatgtggaaaatggaatattggtatctgacaacagaagcttattttccttaaatgaagttgtggagtttaggtgtcagcctggctttgtcatgaaaggaccccgccgtgtgaagtgccaggccctgaacaaatgggagccggagctaccaagctgctccagggtatgtcagccacctccagatgtcctgcatgctgagcgtacccaaagggacaaggacaacttttcacccgggcaggaagtgttctacagctgtgagcccggctacgacctcagaggggctgcgtctatgcgctgcacaccccagggagactggagccctgcagcccccacatgtgaagtgaaatcctgtgatgacttcatgggccaacttcttaatggccgtgtgctatttccagtaaatctccagcttggagcaaaagtggattttgtttgtgatgaaggatttcaattaaaaggcagctctgctagttactgtgtcttggctggaatggaaagcctttggaatagcagtgttccagtgtgtgaacaaatcttttgtccaagtcctccagttattcctaatgggagacacacaggaaaacctctggaagtctttccctttgggaaaacagtaaattacacatgcgacccccacccagacagagggacgagcttcgacctcattggagagagcaccatccgctgcacaagtgaccctcaagggaatggggtttggagcagccctgcccctcgctgtggaattctgggtcactgtcaagccccagatcattttctgtttgccaagttgaaaacccaaaccaatgcatctgactttcccattgggacatctttaaagtacgaatgccgtcctgagtactacgggaggccattctctatcacatgtctagataacctggtctggtcaagtcccaaagatgtctgtaaacgtaaatcatgtaaaactcctccagatccagtgaatggcatggtgcatgtgatcacagacatccaggttggatccagaatcaactattcttgtactacagggcaccgactcattggtcactcatctgctgaatgtatcctctcgggcaatgctgcccattggagcacgaagccgccaatttgtcaacgaattccttgtgggctaccccccaccatcgccaatggagatttcattagcaccaacagagagaattttcactatggatcagtggtgacctaccgctgcaatcctggaagcggagggagaaaggtgtttgagcttgtgggtgagccctccatatactgcaccagcaatgacgatcaagtgggcatctggagcggcccggcccctcagtgcattatacctaacaaatgcacgcctccaaatgtggaaaatggaatattggtatctgacaacagaagcttattttccttaaatgaagttgtggagtttaggtgtcagcctggctttgtcatgaaaggaccccgccgtgtgaagtgccaggccctgaacaaatgggagccggagctaccaagctgctccagggtatgtcagccacctccagatgtcctgcatgctgagcgtacccaaagggacaaggacaacttttcacccgggcaggaagtgttctacagctgtgagcccggctatgacctcagaggggctgcgtctatgcgctgcacaccccagggagactggagccctgcagcccccacatgtgaagtgaaatcctgtgatgacttcatgggccaacttcttaatggccgtgtgctatttccagtaaatctccagcttggagcaaaagtggattttgtttgtgatgaaggatttcaattaaaaggcagctctgctagttattgtgtcttggctggaatggaaagcctttggaatagcagtgttccagtgtgtgaacaaatcttttgtccaagtcctccagttattcctaatgggagacacacaggaaaacctctggaagtctttccctttggaaaagcagtaaattacacatgcgacccccacccagacagagggacgagcttcgacctcattggagagagcaccatccgctgcacaagtgaccctcaagggaatggggtttggagcagccctgcccctcgctgtggaattctgggtcactgtcaagccccagatcattttctgtttgccaagttgaaaacccaaaccaatgcatctgactttcccattgggacatctttaaagtacgaatgccgtcctgagtactacgggaggccattctctatcacatgtctagataacctggtctggtcaagtcccaaagatgtctgtaaacgtaaatcatgtaaaactcctccagatccagtgaatggcatggtgcatgtgatcacagacatccaggttggatccagaatcaactattcttgtactacagggcaccgactcattggtcactcatctgctgaatgtatcctctcaggcaatactgcccattggagcacgaagccgccaatttgtcaacgaattccttgtgggctacccccaaccatcgccaatggagatttcattagcaccaacagagagaattttcactatggatcagtggtgacctaccgctgcaatcttggaagcagagggagaaaggtgtttgagcttgtgggtgagccctccatatactgcaccagcaatgacgatcaagtgggcatctggagcggccccgcccctcagtgcattatacctaacaaatgcacgcctccaaatgtggaaaatggaatattggtatctgacaacagaagcttattttccttaaatgaagttgtggagtttaggtgtcagcctggctttgtcatgaaaggaccccgccgtgtgaagtgccaggccctgaacaaatgggagccagagttaccaagctgctccagggtgtgtcagccgcctccagaaatcctgcatggtgagcataccccaagccatcaggacaacttttcacctgggcaggaagtgttctacagctgtgagcctggctatgacctcagaggggctgcgtctctgcactgcacaccccagggagactggagccctgaagccccgagatgtgcagtgaaatcctgtgatgacttcttgggtcaactccctcatggccgtgtgctatttccacttaatctccagcttggggcaaaggtgtcctttgtctgtgatgaagggtttcgcttaaagggcagttccgttagtcattgtgtcttggttggaatgagaagcctttggaataacagtgttcctgtgtgtgaacatatcttttgtccaaatcctccagctatccttaatgggagacacacaggaactccctctggagatattccctatggaaaagaaatatcttacacatgtgacccccacccagacagagggatgaccttcaacctcattggggagagcaccatccgctgcacaagtgaccctcatgggaatggggtttggagcagccctgcccctcgctgtgaactttctgttcgtgctggtcactgtaaaaccccagagcagtttccatttgccagtcctacgatcccaattaatgactttgagtttccagtcgggacatctttgaattatgaatgccgtcctgggtattttgggaaaatgttctctatctcctgcctagaaaacttggtctggtcaagtgttgaagacaactgtagacgaaaatcatgtggacctccaccagaacccttcaatggaatggtgcatataaacacagatacacagtttggatcaacagttaattattcttgtaatgaagggtttcgactcattggttccccatctactacttgtctcgtctcaggcaataatgtcacatgggataagaaggcacctatttgtgagatcatatcttgtgagccacctccaaccatatccaatggagacttctacagcaacaatagaacatcttttcacaatggaacggtggtaacttaccagtgccacactggaccagatggagaacagctgtttgagcttgtgggagaacggtcaatatattgcaccagcaaagatgatcaagttggtgtttggagcagccctccccctcggtgtatttctactaataaatgcacagctccagaagttgaaaatgcaattagagtaccaggaaacaggagtttctttaccctcactgagatcatcagatttagatgtcagcccgggtttgtcatggtagggtcccacactgtgcagtgccagaccaatggcagatgggggcccaagctgccacactgctccagggtgtgtcagccgcctccagaaatcctgcatggtgagcataccctaagccatcaggacaacttttcacctgggcaggaagtgttctacagctgtgagcccagctatgacctcagaggggctgcgtctctgcactgcacgccccagggagactggagccctgaagcccctagatgtacagtgaaatcctgtgatgacttcctgggccaactccctcatggccgtgtgctacttccacttaatctccagcttggggcaaaggtgtcctttgtttgcgatgaagggttccgattaaaaggcaggtctgctagtcattgtgtcttggctggaatgaaagccctttggaatagcagtgttccagtgtgtgaacaaatcttttgtccaaatcctccagctatccttaatgggagacacacaggaactccctttggagatattccctatggaaaagaaatatcttacgcatgcgacacccacccagacagagggatgaccttcaacctcattggggagagctccatccgctgcacaagtgaccctcaagggaatggggtttggagcagccctgcccctcgctgtgaactttctgttcctgctgcctgcccacatccacccaagatccaaaacgggcattacattggaggacacgtatctctatatcttcctgggatgacaatcagctacatttgtgaccccggctacctgttagtgggaaagggcttcattttctgtacagaccagggaatctggagccaattggatcattattgcaaagaagtaaattgtagcttcccactgtttatgaatggaatctcgaaggagttagaaatgaaaaaagtatatcactatggagattatgtgactttgaagtgtgaagatgggtatactctggaaggcagtccctggagccagtgccaggcggatgacagatgggaccctcctctggccaaatgtacctctcgtacacatgatgctctcatagttggcactttatctggtacgatcttctttattttactcatcattttcctctcttggataattctaaagcacagaaaaggcaataatgcacatgaaaaccctaaagaagtggctatccatttacattctcaaggaggcagcagcgttcatccccgaactctgcaaacaaatgaagaaaatagcagggtccttccttgacaaagtactatacagctgaagaacatctcgaatacaattttggtgggaaaggagccaattgatttcaacagaatcagatctgagcttcataaagtctttgaagtgacttcacagagacgcagacatgtgcacttgaagatgctgccccttccctggtacctagcaaagctcctgcctctttgtgtgcgtcactgtgaaacccccacccttctgcctcgtgctaaacgcacacagtatctagtcaggggaaaagactgcatttaggagatagaaaatagtttggattacttaaaggaataaggtgttgcctggaatttctggtttgtaaggtggtcactgttcttttttaaaatatttgtaatatggaatgggctcagtaagaagagcttggaaaatgcagaaagttatgaaaaataagtcacttataattatgctacctactgataaccactcctaatattttgattcattttctgcctatcttctttcacatatgtgtttttttacatacgtacttttcccccttagtttgtttccttttattttatagagcagaaccctagtcttttaaacagtttagagtgaaatatatgctatatcagtttttactttctctagggagaaaaattaatttactagaaaggcatgaaatgatcatgggaagagtggttaagactactgaagagaaatatttggaaaataagatttcgatatcttctttttttttgagatggagtctggctctgtctcccaggctggagtgcagtggcgtaatctcggctcactgcaagctccgcctcccgggttgacaccattttcctgcctcagcctcctgagtagttgggattaccagtagatgggactacaggcacctgccaacacgcccggctaatttttttgtatttttagtagagacggggtttcaccatgttagccaggatggtctggatctcctgacctcgtgatccacctgcctcggcctcccaaagtgctgcgattacaggcatgagccaccgcgcctggccgctttcgatattttctaaactttaattcaaaagcactttgtgctgtgttctatataaaaaacataataaaaattgaaatgaaagaataattgttattataaaagtactagcttacttttgtatggattcagaatatactaaattaactttttaaaacacaacttttaaaaaatgtatcaaaataataaacgtgttctgatatttttaaaataa

SEQ ID NO: 6499 - DNA, 7469 bp, Homo sapiens
  source 1..7469: mol_type = unassigned DNA
acactctgggcgcggagcacaatgattggtcactcctattttcgctgagcttttcctcttatttcagttttcttcgagatcaaatctggtttgtagatgtgcttggggagaatgggggcctcttctccaagaagcccggagcctgtcgggccgccggcgcccggtctccccttctgctgcggaggatccctgctggcggttgtggtgctgcttgcgctgccggtggcctggggtcaatgcaatgccccagaatggcttccatttgccaggcctaccaacctaactgatgaatttgagtttcccattgggacatatctgaactatgaatgccgccctggttattccggaagaccgttttctatcatctgcctaaaaaactcagtctggactggtgctaaggacaggtgcagacgtaaatcatgtcgtaatcctccagatcctgtgaatggcatggtgcatgtgatcaaaggcatccagttcggatcccaaattaaatattcttgtactaaaggataccgactcattggttcctcgtctgccacatgcatcatctcaggtgatactgtcatttgggataatgaaacacctatttgtgacagaattccttgtgggctaccccccaccatcaccaatggagatttcattagcaccaacagagagaattttcactatggatcagtggtgacctaccgctgcaatcctggaagcggagggagaaaggtgtttgagcttgtgggtgagccctccatatactgcaccagcaatgacgatcaagtgggcatctggagcggccccgcccctcagtgcattatacctaacaaatgcacgcctccaaatgtggaaaatggaatattggtatctgacaacagaagcttattttccttaaatgaagttgtggagtttaggtgtcagcctggctttgtcatgaaaggaccccgccgtgtgaagtgccaggccctgaacaaatgggagccggagctaccaagctgctccagggtatgtcagccacctccagatgtcctgcatgctgagcgtacccaaagggacaaggacaacttttcacctgggcaggaagtgttctacagctgtgagcccggctacgacctcagaggggctgcgtctatgcgctgcacaccccagggagactggagccctgcagcccccacatgtgaagtgaaatcctgtgatgacttcatgggccaacttcttaatggccgtgtgctatttccagtaaatctccagcttggagcaaaagtggattttgtttgtgatgaaggatttcaattaaaaggcagctctgctagttactgtgtcttggctggaatggaaagcctttggaatagcagtgttccagtgtgtgaacaaatcttttgtccaagtcctccagttattcctaatgggagacacacaggaaaacctctggaagtctttccctttgggaaaacagtaaattacacatgcgacccccacccagacagagggacgagcttcgacctcattggagagagcaccatccgctgcacaagtgaccctcaagggaatggggtttggagcagccctgcccctcgctgtggaattctgggtcactgtcaagccccagatcattttctgtttgccaagttgaaaacccaaaccaatgcatctgactttcccattgggacatctttaaagtacgaatgccgtcctgagtactacgggaggccattctctatcacatgtctagataacctggtctggtcaagtcccaaagatgtctgtaaacgtaaatcatgtaaaactcctccagatccagtgaatggcatggtgcatgtgatcacagacatccaggttggatccagaatcaactattcttgtactacagggcaccgactcattggtcactcatctgctgaatgtatcctctcgggcaatgctgcccattggagcacgaagccgccaatttgtcaacgaattccttgtgggctaccccccaccatcgccaatggagatttcattagcaccaacagagagaattttcactatggatcagtggtgacctaccgctgcaatcctggaagcggagggagaaaggtgtttgagcttgtgggtgagccctccatatactgcaccagcaatgacgatcaagtgggcatctggagcggcccggcccctcagtgcattatacctaacaaatgcacgcctccaaatgtggaaaatggaatattggtatctgacaacagaagcttattttccttaaatgaagttgtggagtttaggtgtcagcctggctttgtcatgaaaggaccccgccgtgtgaagtgccaggccctgaacaaatgggagccggagctaccaagctgctccagggtatgtcagccacctccagatgtcctgcatgctgagcgtacccaaagggacaaggacaacttttcacccgggcaggaagtgttctacagctgtgagcccggctacgacctcagaggggctgcgtctatgcgctgcacaccccagggagactggagccctgcagcccccacatgtgaagtgaaatcctgtgatgacttcatgggccaacttcttaatggccgtgtgctatttccagtaaatctccagcttggagcaaaagtggattttgtttgtgatgaaggatttcaattaaaaggcagctctgctagttactgtgtcttggctggaatggaaagcctttggaatagcagtgttccagtgtgtgaacaaatcttttgtccaagtcctccagttattcctaatgggagacacacaggaaaacctctggaagtctttccctttgggaaaacagtaaattacacatgcgacccccacccagacagagggacgagcttcgacctcattggagagagcaccatccgctgcacaagtgaccctcaagggaatggggtttggagcagccctgcccctcgctgtggaattctgggtcactgtcaagccccagatcattttctgtttgccaagttgaaaacccaaaccaatgcatctgactttcccattgggacatctttaaagtacgaatgccgtcctgagtactacgggaggccattctctatcacatgtctagataacctggtctggtcaagtcccaaagatgtctgtaaacgtaaatcatgtaaaactcctccagatccagtgaatggcatggtgcatgtgatcacagacatccaggttggatccagaatcaactattcttgtactacagggcaccgactcattggtcactcatctgctgaatgtatcctctcaggcaatactgcccattggagcacgaagccgccaatttgtcaacgaattccttgtgggctacccccaaccatcgccaatggagatttcattagcaccaacagagagaattttcactatggatcagtggtgacctaccgctgcaatcttggaagcagagggagaaaggtgtttgagcttgtgggtgagccctccatatactgcaccagcaatgacgatcaagtgggcatctggagcggccccgcccctcagtgcattatacctaacaaatgcacgcctccaaatgtggaaaatggaatattggtatctgacaacagaagcttattttccttaaatgaagttgtggagtttaggtgtcagcctggctttgtcatgaaaggaccccgccgtgtgaagtgccaggccctgaacaaatgggagccagagttaccaagctgctccagggtgtgtcagccgcctccagaaatcctgcatggtgagcataccccaagccatcaggacaacttttcacctgggcaggaagtgttctacagctgtgagcctggctatgacctcagaggggctgcgtctctgcactgcacaccccagggagactggagccctgaagccccgagatgtgcagtgaaatcctgtgatgacttcttgggtcaactccctcatggccgtgtgctatttccacttaatctccagcttggggcaaaggtgtcctttgtctgtgatgaagggtttcgcttaaagggcagttccgttagtcattgtgtcttggttggaatgagaagcctttggaataacagtgttcctgtgtgtgaacatatcttttgtccaaatcctccagctatccttaatgggagacacacaggaactccctctggagatattccctatggaaaagaaatatcttacacatgtgacccccacccagacagagggatgaccttcaacctcattggggagagcaccatccgctgcacaagtgaccctcatgggaatggggtttggagcagccctgcccctcgctgtgaactttctgttcgtgctggtcactgtaaaaccccagagcagtttccatttgccagtcctacgatcccaattaatgactttgagtttccagtcgggacatctttgaattatgaatgccgtcctgggtattttgggaaaatgttctctatctcctgcctagaaaacttggtctggtcaagtgttgaagacaactgtagacgaaaatcatgtggacctccaccagaacccttcaatggaatggtgcatataaacacagatacacagtttggatcaacagttaattattcttgtaatgaagggtttcgactcattggttccccatctactacttgtctcgtctcaggcaataatgtcacatgggataagaaggcacctatttgtgagatcatatcttgtgagccacctccaaccatatccaatggagacttctacagcaacaatagaacatcttttcacaatggaacggtggtaacttaccagtgccacactggaccagatggagaacagctgtttgagcttgtgggagaacggtcaatatattgcaccagcaaagatgatcaagttggtgtttggagcagccctccccctcggtgtatttctactaataaatgcacagctccagaagttgaaaatgcaattagagtaccaggaaacaggagtttctttaccctcactgagatcatcagatttagatgtcagcccgggtttgtcatggtagggtcccacactgtgcagtgccagaccaatggcagatgggggcccaagctgccacactgctccagggtgtgtcagccgcctccagaaatcctgcatggtgagcataccctaagccatcaggacaacttttcacctgggcaggaagtgttctacagctgtgagcccagctatgacctcagaggggctgcgtctctgcactgcacgccccagggagactggagccctgaagcccctagatgtacagtgaaatcctgtgatgacttcctgggccaactccctcatggccgtgtgctacttccacttaatctccagcttggggcaaaggtgtcctttgtttgcgatgaagggttccgattaaaaggcaggtctgctagtcattgtgtcttggctggaatgaaagccctttggaatagcagtgttccagtgtgtgaacaaatcttttgtccaaatcctccagctatccttaatgggagacacacaggaactccctttggagatattccctatggaaaagaaatatcttacgcatgcgacacccacccagacagagggatgaccttcaacctcattggggagagctccatccgctgcacaagtgaccctcaagggaatggggtttggagcagccctgcccctcgctgtgaactttctgttcctgctgcctgcccacatccacccaagatccaaaacgggcattacattggaggacacgtatctctatatcttcctgggatgacaatcagctacatttgtgaccccggctacctgttagtgggaaagggcttcattttctgtacagaccagggaatctggagccaattggatcattattgcaaagaagtaaattgtagcttcccactgtttatgaatggaatctcgaaggagttagaaatgaaaaaagtatatcactatggagattatgtgactttgaagtgtgaagatgggtatactctggaaggcagtccctggagccagtgccaggcggatgacagatgggaccctcctctggccaaatgtacctctcgtacacatgatgctctcatagttggcactttatctggtacgatcttctttattttactcatcattttcctctcttggataattctaaagcacagaaaaggcaataatgcacatgaaaaccctaaagaagtggctatccatttacattctcaaggaggcagcagcgttcatccccgaactctgcaaacaaatgaagaaaatagcagggtccttccttgacaaagtactatacagctgaagaacatctcgaatacaattttggtgggaaaggagccaattgatttcaacagaatcagatctgagcttcataaagtctttgaagtgacttcacagagacgcagacatgtgcacttgaagatgctgccccttccctggtacctagcaaagctcctgcctctttgtgtgcgtcactgtgaaacccccacccttctgcctcgtgctaaacgcacacagtatctagtcaggggaaaagactgcatttaggagatagaaaatagtttggattacttaaaggaataaggtgttgcctggaatttctggtttgtaaggtggtcactgttcttttttaaaatatttgtaatatggaatgggctcagtaagaagagcttggaaaatgcagaaagttatgaaaaataagtcacttataattatgctacctactgataaccactcctaatattttgattcattttctgcctatcttctttcacatatgtgtttttttacatacgtacttttcccccttagtttgtttccttttattttatagagcagaaccctagtcttttaaacagtttagagtgaaatatatgctatatcagtttttactttctctagggagaaaaattaatttactagaaaggcatgaaatgatcatgggaagagtggttaagactactgaagagaaatatttggaaaataagatttcgatatcttctttttttttgagatggagtctggctctgtctcccaggctggagtgcagtggcgtaatctcggctcactgcaagctccgcctcccgggttgacaccattttcctgcctcagcctcctgagtagttgggattaccagtagatgggactacaggcacctgccaacacgcccggctaatttttttgtatttttagtagagacggggtttcaccatgttagccaggatggtctggatctcctgacctcgtgatccacctgcctcggcctcccaaagtgctgcgattacaggcatgagccaccgcgcctggccgctttcgatattttctaaactttaattcaaaagcactttgtgctgtgttctatataaaaaacataataaaaattgaaatgaaagaataattgttattataaaagtactagcttacttttgtatggattcagaatatactaaattaactttttaaaacacaacttttaaaaaatgtatcaaaataataaacgtgttctgatatttttaaaataa

SEQ ID NO: 6500 - DNA, 7469 bp, Homo sapiens
  source 1..7469: mol_type = unassigned DNA
acactctgggcgcggagcacaatgattggtcactcctattttcgctgagcttttcctcttatttcagttttcttcgagatcaaatctggtttgtagatgtgcttggggagaatgggggcctcttctccaagaagcccggagcctgtcgggccgccggcgcccggtctccccttctgctgcggaggatccctgctggcggttgtggtgctgcttgcgctgccggtggcctggggtcaatgcaatgccccagaatggcttccatttgccaggcctaccaacctaactgatgaatttgagtttcccattgggacatatctgaactatgaatgccgccctggttattccggaagaccgttttctatcatctgcctaaaaaactcagtctggactggtgctaaggacaggtgcagacgtaaatcatgtcgtaatcctccagatcctgtgaatggcatggtgcatgtgatcaaaggcatccagttcggatcccaaattaaatattcttgtactaaaggataccgactcattggttcctcgtctgccacatgcatcatctcaggtgatactgtcatttgggataatgaaacacctatttgtgacagaattccttgtgggctaccccccaccatcaccaatggagatttcattagcaccaacagagagaattttcactatggatcagtggtgacctaccgctgcaatcctggaagcggagggagaaaggtgtttgagcttgtgggtgagccctccatatactgcaccagcaatgacgatcaagtgggcatctggagcggccccgcccctcagtgcattatacctaacaaatgcacgcctccaaatgtggaaaatggaatattggtatctgacaacagaagcttattttccttaaatgaagttgtggagtttaggtgtcagcctggctttgtcatgaaaggaccccgccgtgtgaagtgccaggccctgaacaaatgggagccggagctaccaagctgctccagggtatgtcagccacctccagatgtcctgcatgctgagcgtacccaaagggacaaggacaacttttcacctgggcaggaagtgttctacagctgtgagcccggctacgacctcagaggggctgcgtctatgcgctgcacaccccagggagactggagccctgcagcccccacatgtgaagtgaaatcctgtgatgacttcatgggccaacttcttaatggccgtgtgctatttccagtaaatctccagcttggagcaaaagtggattttgtttgtgatgaaggatttcaattaaaaggcagctctgctagttactgtgtcttggctggaatggaaagcctttggaatagcagtgttccagtgtgtgaacaaatcttttgtccaagtcctccagttattcctaatgggagacacacaggaaaacctctggaagtctttccctttgggaaaacagtaaattacacatgcgacccccacccagacagagggacgagcttcgacctcattggagagagcaccatccgctgcacaagtgaccctcaagggaatggggtttggagcagccctgcccctcgctgtggaattctgggtcactgtcaagccccagatcattttctgtttgccaagttgaaaacccaaaccaatgcatctgactttcccattgggacatctttaaagtacgaatgccgtcctgagtactacgggaggccattctctatcacatgtctagataacctggtctggtcaagtcccaaagatgtctgtaaacgtaaatcatgtaaaactcctccagatccagtgaatggcatggtgcatgtgatcacagacatccaggttggatccagaatcaactattcttgtactacagggcaccgactcattggtcactcatctgctgaatgtatcctctcgggcaatgctgcccattggagcacgaagccgccaatttgtcaacgaattccttgtgggctaccccccaccatcgccaatggagatttcattagcaccaacagagagaattttcactatggatcagtggtgacctaccgctgcaatcctggaagcggagggagaaaggtgtttgagcttgtgggtgagccctccatatactgcaccagcaatgacgatcaagtgggcatctggagcggcccggcccctcagtgcattatacctaacaaatgcacgcctccaaatgtggaaaatggaatattggtatctgacaacagaagcttattttccttaaatgaagttgtggagtttaggtgtcagcctggctttgtcatgaaaggaccccgccgtgtgaagtgccaggccctgaacaaatgggagccggagctaccaagctgctccagggtatgtcagccacctccagatgtcctgcatgctgagcgtacccaaagggacaaggacaacttttcacccgggcaggaagtgttctacagctgtgagcccggctatgacctcagaggggctgcgtctatgcgctgcacaccccagggagactggagccctgcagcccccacatgtgaagtgaaatcctgtgatgacttcatgggccaacttcttaatggccgtgtgctatttccagtaaatctccagcttggagcaaaagtggattttgtttgtgatgaaggatttcaattaaaaggcagctctgctagttattgtgtcttggctggaatggaaagcctttggaatagcagtgttccagtgtgtgaacaaatcttttgtccaagtcctccagttattcctaatgggagacacacaggaaaacctctggaagtctttccctttggaaaagcagtaaattacacatgcgacccccacccagacagagggacgagcttcgacctcattggagagagcaccatccgctgcacaagtgaccctcaagggaatggggtttggagcagccctgcccctcgctgtggaattctgggtcactgtcaagccccagatcattttctgtttgccaagttgaaaacccaaaccaatgcatctgactttcccattgggacatctttaaagtacgaatgccgtcctgagtactacgggaggccattctctatcacatgtctagataacctggtctggtcaagtcccaaagatgtctgtaaacgtaaatcatgtaaaactcctccagatccagtgaatggcatggtgcatgtgatcacagacatccaggttggatccagaatcaactattcttgtactacagggcaccgactcattggtcactcatctgctgaatgtatcctctcaggcaatactgcccattggagcacgaagccgccaatttgtcaacgaattccttgtgggctacccccaaccatcgccaatggagatttcattagcaccaacagagagaattttcactatggatcagtggtgacctaccgctgcaatcttggaagcagagggagaaaggtgtttgagcttgtgggtgagccctccatatactgcaccagcaatgacgatcaagtgggcatctggagcggccccgcccctcagtgcattatacctaacaaatgcacgcctccaaatgtggaaaatggaatattggtatctgacaacagaagcttattttccttaaatgaagttgtggagtttaggtgtcagcctggctttgtcatgaaaggaccccgccgtgtgaagtgccaggccctgaacaaatgggagccagagttaccaagctgctccagggtgtgtcagccgcctccagaaatcctgcatggtgagcataccccaagccatcaggacaacttttcacctgggcaggaagtgttctacagctgtgagcctggctatgacctcagaggggctgcgtctctgcactgcacaccccagggagactggagccctgaagccccgagatgtgcagtgaaatcctgtgatgacttcttgggtcaactccctcatggccgtgtgctatttccacttaatctccagcttggggcaaaggtgtcctttgtctgtgatgaagggtttcgcttaaagggcagttccgttagtcattgtgtcttggttggaatgagaagcctttggaataacagtgttcctgtgtgtgaacatatcttttgtccaaatcctccagctatccttaatgggagacacacaggaactccctctggagatattccctatggaaaagaaatatcttacacatgtgacccccacccagacagagggatgaccttcaacctcattggggagagcaccatccgctgcacaagtgaccctcatgggaatggggtttggagcagccctgcccctcgctgtgaactttctgttcgtgctggtcactgtaaaaccccagagcagtttccatttgccagtcctacgatcccaattaatgactttgagtttccagtcgggacatctttgaattatgaatgccgtcctgggtattttgggaaaatgttctctatctcctgcctagaaaacttggtctggtcaagtgttgaagacaactgtagacgaaaatcatgtggacctccaccagaacccttcaatggaatggtgcatataaacacagatacacagtttggatcaacagttaattattcttgtaatgaagggtttcgactcattggttccccatctactacttgtctcgtctcaggcaataatgtcacatgggataagaaggcacctatttgtgagatcatatcttgtgagccacctccaaccatatccaatggagacttctacagcaacaatagaacatcttttcacaatggaacggtggtaacttaccagtgccacactggaccagatggagaacagctgtttgagcttgtgggagaacggtcaatatattgcaccagcaaagatgatcaagttggtgtttggagcagccctccccctcggtgtatttctactaataaatgcacagctccagaagttgaaaatgcaattagagtaccaggaaacaggagtttctttaccctcactgagatcatcagatttagatgtcagcccgggtttgtcatggtagggtcccacactgtgcagtgccagaccaatggcagatgggggcccaagctgccacactgctccagggtgtgtcagccgcctccagaaatcctgcatggtgagcataccctaagccatcaggacaacttttcacctgggcaggaagtgttctacagctgtgagcccagctatgacctcagaggggctgcgtctctgcactgcacgccccagggagactggagccctgaagcccctagatgtacagtgaaatcctgtgatgacttcctgggccaactccctcatggccgtgtgctacttccacttaatctccagcttggggcaaaggtgtcctttgtttgcgatgaagggttccgattaaaaggcaggtctgctagtcattgtgtcttggctggaatgaaagccctttggaatagcagtgttccagtgtgtgaacaaatcttttgtccaaatcctccagctatccttaatgggagacacacaggaactccctttggagatattccctatggaaaagaaatatcttacgcatgcgacacccacccagacagagggatgaccttcaacctcattggggagagctccatccgctgcacaagtgaccctcaagggaatggggtttggagcagccctgcccctcgctgtgaactttctgttcctgctgcctgcccacatccacccaagatccaaaacgggcattacattggaggacacgtatctctatatcttcctgggatgacaatcagctacatttgtgaccccggctacctgttagtgggaaagggcttcattttctgtacagaccagggaatctggagccaattggatcattattgcaaagaagtaaattgtagcttcccactgtttatgaatggaatctcgaaggagttagaaatgaaaaaagtatatcactatggagattatgtgactttgaagtgtgaagatgggtatactctggaaggcagtccctggagccagtgccaggcggatgacagatgggaccctcctctggccaaatgtacctctcgtacacatgatgctctcatagttggcactttatctggtacgatcttctttattttactcatcattttcctctcttggataattctaaagcacagaaaaggcaataatgcacatgaaaaccctaaagaagtggctatccatttacattctcaaggaggcagcagcgttcatccccgaactctgcaaacaaatgaagaaaatagcagggtccttccttgacaaagtactatacagctgaagaacatctcgaatacaattttggtgggaaaggagccaattgatttcaacagaatcagatctgagcttcataaagtctttgaagtgacttcacagagacgcagacatgtgcacttgaagatgctgccccttccctggtacctagcaaagctcctgcctctttgtgtgcgtcactgtgaaacccccacccttctgcctcgtgctaaacgcacacagtatctagtcaggggaaaagactgcatttaggagatagaaaatagtttggattacttaaaggaataaggtgttgcctggaatttctggtttgtaaggtggtcactgttcttttttaaaatatttgtaatatggaatgggctcagtaagaagagcttggaaaatgcagaaagttatgaaaaataagtcacttataattatgctacctactgataaccactcctaatattttgattcattttctgcctatcttctttcacatatgtgtttttttacatacgtacttttcccccttagtttgtttccttttattttatagagcagaaccctagtcttttaaacagtttagagtgaaatatatgctatatcagtttttactttctctagggagaaaaattaatttactagaaaggcatgaaatgatcatgggaagagtggttaagactactgaagagaaatatttggaaaataagatttcgatatcttctttttttttgagatggagtctggctctgtctcccaggctggagtgcagtggcgtaatctcggctcactgcaagctccgcctcccgggttgacaccattttcctgcctcagcctcctgagtagttgggattaccagtagatgggactacaggcacctgccaacacgcccggctaatttttttgtatttttagtagagacggggtttcaccatgttagccaggatggtctggatctcctgacctcgtgatccacctgcctcggcctcccaaagtgctgcgattacaggcatgagccaccgcgcctggccgctttcgatattttctaaactttaattcaaaagcactttgtgctgtgttctatataaaaaacataataaaaattgaaatgaaagaataattgttattataaaagtactagcttacttttgtatggattcagaatatactaaattaactttttaaaacacaacttttaaaaaatgtatcaaaataataaacgtgttctgatatttttaaaataa

SEQ ID NO: 6501 - DNA, 6959 bp, Homo sapiens
  source 1..6959: mol_type = unassigned DNA
cttcgagatcaaatctggtttgtagatgtgcttggggagaatgggggcctcttctccaagaagcccggagcctgtcgggccgccggcgcccggtctccccttctgctgcggaggatccctgctggcggttgtggtgctgcttgcgctgccggtggcctggggtcaatgcaatgccccagaatggcttccatttgccaggcctaccaacctaactgatgaatttgagtttcccattgggacatatctgaactatgaatgccgccctggttattccggaagaccgttttctatcatctgcctaaaaaactcagtctggactggtgctaaggacaggtgcagacgtaaatcatgtcgtaatcctccagatcctgtgaatggcatggtgcatgtgatcaaaggcatccagttcggatcccaaattaaatattcttgtactaaaggataccgactcattggttcctcgtctgccacatgcatcatctcaggtgatactgtcatttgggataatgaaacacctatttgtgacagaattccttgtgggctaccccccaccatcaccaatggagatttcattagcaccaacagagagaattttcactatggatcagtggtgacctaccgctgcaatcctggaagcggagggagaaaggtgtttgagcttgtgggtgagccctccatatactgcaccagcaatgacgatcaagtgggcatctggagcggccccgcccctcagtgcattatacctaacaaatgcacgcctccaaatgtggaaaatggaatattggtatctgacaacagaagcttattttccttaaatgaagttgtggagtttaggtgtcagcctggctttgtcatgaaaggaccccgccgtgtgaagtgccaggccctgaacaaatgggagccggagctaccaagctgctccagggtatgtcagccacctccagatgtcctgcatgctgagcgtacccaaagggacaaggacaacttttcacctgggcaggaagtgttctacagctgtgagcccggctacgacctcagaggggctgcgtctatgcgctgcacaccccagggagactggagccctgcagcccccacatgtgaagtgaaatcctgtgatgacttcatgggccaacttcttaatggccgtgtgctatttccagtaaatctccagcttggagcaaaagtggattttgtttgtgatgaaggatttcaattaaaaggcagctctgctagttactgtgtcttggctggaatggaaagcctttggaatagcagtgttccagtgtgtgaacaaatcttttgtccaagtcctccagttattcctaatgggagacacacaggaaaacctctggaagtctttccctttgggaaaacagtaaattacacatgcgacccccacccagacagagggacgagcttcgacctcattggagagagcaccatccgctgcacaagtgaccctcaagggaatggggtttggagcagccctgcccctcgctgtggaattctgggtcactgtcaagccccagatcattttctgtttgccaagttgaaaacccaaaccaatgcatctgactttcccattgggacatctttaaagtacgaatgccgtcctgagtactacgggaggccattctctatcacatgtctagataacctggtctggtcaagtcccaaagatgtctgtaaacgtaaatcatgtaaaactcctccagatccagtgaatggcatggtgcatgtgatcacagacatccaggttggatccagaatcaactattcttgtactacagggcaccgactcattggtcactcatctgctgaatgtatcctctcgggcaatgctgcccattggagcacgaagccgccaatttgtcaacgaattccttgtgggctaccccccaccatcgccaatggagatttcattagcaccaacagagagaattttcactatggatcagtggtgacctaccgctgcaatcctggaagcggagggagaaaggtgtttgagcttgtgggtgagccctccatatactgcaccagcaatgacgatcaagtgggcatctggagcggcccggcccctcagtgcattatacctaacaaatgcacgcctccaaatgtggaaaatggaatattggtatctgacaacagaagcttattttccttaaatgaagttgtggagtttaggtgtcagcctggctttgtcatgaaaggaccccgccgtgtgaagtgccaggccctgaacaaatgggagccggagctaccaagctgctccagggtatgtcagccacctccagatgtcctgcatgctgagcgtacccaaagggacaaggacaacttttcacccgggcaggaagtgttctacagctgtgagcccggctatgacctcagaggggctgcgtctatgcgctgcacaccccagggagactggagccctgcagcccccacatgtgaagtgaaatcctgtgatgacttcatgggccaacttcttaatggccgtgtgctatttccagtaaatctccagcttggagcaaaagtggattttgtttgtgatgaaggatttcaattaaaaggcagctctgctagttattgtgtcttggctggaatggaaagcctttggaatagcagtgttccagtgtgtgaacaaatcttttgtccaagtcctccagttattcctaatgggagacacacaggaaaacctctggaagtctttccctttggaaaagcagtaaattacacatgcgacccccacccagacagagggacgagcttcgacctcattggagagagcaccatccgctgcacaagtgaccctcaagggaatggggtttggagcagccctgcccctcgctgtggaattctgggtcactgtcaagccccagatcattttctgtttgccaagttgaaaacccaaaccaatgcatctgactttcccattgggacatctttaaagtacgaatgccgtcctgagtactacgggaggccattctctatcacatgtctagataacctggtctggtcaagtcccaaagatgtctgtaaacgtaaatcatgtaaaactcctccagatccagtgaatggcatggtgcatgtgatcacagacatccaggttggatccagaatcaactattcttgtactacagggcaccgactcattggtcactcatctgctgaatgtatcctctcaggcaatactgcccattggagcacgaagccgccaatttgtcaacgaattccttgtgggctacccccaaccatcgccaatggagatttcattagcaccaacagagagaattttcactatggatcagtggtgacctaccgctgcaatcttggaagcagagggagaaaggtgtttgagcttgtgggtgagccctccatatactgcaccagcaatgacgatcaagtgggcatctggagcggccccgcccctcagtgcattatacctaacaaatgcacgcctccaaatgtggaaaatggaatattggtatctgacaacagaagcttattttccttaaatgaagttgtggagtttaggtgtcagcctggctttgtcatgaaaggaccccgccgtgtgaagtgccaggccctgaacaaatgggagccagagttaccaagctgctccagggtgtgtcagccgcctccagaaatcctgcatggtgagcataccccaagccatcaggacaacttttcacctgggcaggaagtgttctacagctgtgagcctggctatgacctcagaggggctgcgtctctgcactgcacaccccagggagactggagccctgaagccccgagatgtgcagtgaaatcctgtgatgacttcttgggtcaactccctcatggccgtgtgctatttccacttaatctccagcttggggcaaaggtgtcctttgtctgtgatgaagggtttcgcttaaagggcagttccgttagtcattgtgtcttggttggaatgagaagcctttggaataacagtgttcctgtgtgtgaacatatcttttgtccaaatcctccagctatccttaatgggagacacacaggaactccctctggagatattccctatggaaaagaaatatcttacacatgtgacccccacccagacagagggatgaccttcaacctcattggggagagcaccatccgctgcacaagtgaccctcatgggaatggggtttggagcagccctgcccctcgctgtgaactttctgttcgtgctggtcactgtaaaaccccagagcagtttccatttgccagtcctacgatcccaattaatgactttgagtttccagtcgggacatctttgaattatgaatgccgtcctgggtattttgggaaaatgttctctatctcctgcctagaaaacttggtctggtcaagtgttgaagacaactgtagacgaaaatcatgtggacctccaccagaacccttcaatggaatggtgcatataaacacagatacacagtttggatcaacagttaattattcttgtaatgaagggtttcgactcattggttccccatctactacttgtctcgtctcaggcaataatgtcacatgggataagaaggcacctatttgtgagatcatatcttgtgagccacctccaaccatatccaatggagacttctacagcaacaatagaacatcttttcacaatggaacggtggtaacttaccagtgccacactggaccagatggagaacagctgtttgagcttgtgggagaacggtcaatatattgcaccagcaaagatgatcaagttggtgtttggagcagccctccccctcggtgtatttctactaataaatgcacagctccagaagttgaaaatgcaattagagtaccaggaaacaggagtttctttaccctcactgagatcatcagatttagatgtcagcccgggtttgtcatggtagggtcccacactgtgcagtgccagaccaatggcagatgggggcccaagctgccacactgctccagggtgtgtcagccgcctccagaaatcctgcatggtgagcataccctaagccatcaggacaacttttcacctgggcaggaagtgttctacagctgtgagcccagctatgacctcagaggggctgcgtctctgcactgcacgccccagggagactggagccctgaagcccctagatgtacagtgaaatcctgtgatgacttcctgggccaactccctcatggccgtgtgctacttccacttaatctccagcttggggcaaaggtgtcctttgtttgcgatgaagggttccgattaaaaggcaggtctgctagtcattgtgtcttggctggaatgaaagccctttggaatagcagtgttccagtgtgtgaacaaatcttttgtccaaatcctccagctatccttaatgggagacacacaggaactccctttggagatattccctatggaaaagaaatatcttacgcatgcgacacccacccagacagagggatgaccttcaacctcattggggagagctccatccgctgcacaagtgaccctcaagggaatggggtttggagcagccctgcccctcgctgtgaactttctgttcctgctgcctgcccacatccacccaagatccaaaacgggcattacattggaggacacgtatctctatatcttcctgggatgacaatcagctacatttgtgaccccggctacctgttagtgggaaagggcttcattttctgtacagaccagggaatctggagccaattggatcattattgcaaagaagtaaattgtagcttcccactgtttatgaatggaatctcgaaggagttagaaatgaaaaaagtatatcactatggagattatgtgactttgaagtgtgaagatgggtatactctggaaggcagtccctggagccagtgccaggcggatgacagatgggaccctcctctggccaaatgtacctctcgtacacatgatgctctcatagttggcactttatctggtacgatcttctttattttactcatcattttcctctcttggataattctaaagcacagaaaaggcaataatgcacatgaaaaccctaaagaagtggctatccatttacattctcaaggaggcagcagcgttcatccccgaactctgcaaacaaatgaagaaaatagcagggtccttccttgacaaagtactatacagctgaagaacatctcgaatacaattttggtgggaaaggagccaattgatttcaacagaatcagatctgagcttcataaagtctttgaagtgacttcacagagacgcagacatgtgcacttgaagatgctgccccttccctggtacctagcaaagctcctgcctctttgtgtgcgtcactgtgaaacccccacccttctgcctcgtgctaaacgcacacagtatctagtcaggggaaaagactgcatttaggagatagaaaatagtttggattacttaaaggaataaggtgttgcctggaatttctggtttgtaaggtggtcactgttcttttttaaaatatttgtaatatggaatgggctcagtaagaagagcttggaaaatgcagaaagttatgaaaaataagtcacttataattatgctacctactgataaccactcctaatattttgattcattttctgcctatcttctttcacatatgtgtttttttacatacgtacttttcccccttagtttgtttccttttattttatagagcagaaccctagtcttttaaacagtttagagtgaaatatatgctatatcagtttttactttctctagggagaaaaattaatttactagaaaggcatgaaatgatcatgggaagagtggttaagactactgaagagaaatatttggaaaataagatttcgatatcttctttttttttgagatggagtctggctctgtctcccaggctggagtgcagtggcgtaatctcggctcactgcaagctccgcct

SEQ ID NO: 6502 - DNA, 2152 bp, Homo sapiens
  source 1..2152: mol_type = unassigned DNA
ggtcactgtcaagccccagatcattttctgtttgccaagttgaaaacccaaaccaatgcatctgactttcccattgggacatctttaaagtacgaatgccgtcctgagtactacgggaggccattctctatcacatgtctagataacctggtctggtcaagtcccaaagatgtctgtaaacgtaaatcatgtaaaactcctccagatccagtgaatggcatggtgcatgtgatcacagacatccaggttggatccagaatcaactattcttgtactacagggcaccgactcattggtcactcatctgctgaatgtatcctctcgggcaatgctgcccattggagcacgaagccgccaatttgtcaacgaattccttgtgggctaccccccaccatcgccaatggagatttcattagcaccaacagagagaattttcactatggatcagtggtgacctaccgctgcaatcctggaagcggagggagaaaggtgtttgagcttgtgggtgagccctccatatactgcaccagcaatgacgatcaagtgggcatctggagcggcccggcccctcagtgcattatacctaacaaatgcacgcctccaaatgtggaaaatggaatattggtatctgacaacagaagcttattttccttaaatgaagttgtggagtttaggtgtcagcctggctttgtcatgaaaggaccccgccgtgtgaagtgccaggccctgaacaaatgggagccggagctaccaagctgctccagggtatgtcagccacctccagatgtcctgcatgctgagcgtacccaaagggacaaggacaacttttcacccgggcaggaagtgttctacagctgtgagcccggctacgacctcagaggggctgcgtctatgcgctgcacaccccagggagactggagccctgcagcccccacatgtgaagtgaaatcctgtgatgacttcatgggccaacttcttaatggccgtgtgctatttccagtaaatctccagcttggagcaaaagtggattttgtttgtgatgaaggatttcaattaaaaggcagctctgctagttactgtgtcttggctggaatggaaagcctttggaatagcagtgttccagtgtgtgaacaaatcttttgtccaagtcctccagttattcctaatgggagacacacaggaaaacctctggaagtctttccctttgggaaaacagtaaattacacatgcgacccccacccagacagagggacgagcttcgacctcattggagagagcaccatccgctgcacaagtgaccctcaagggaatggggtttggagcagccctgcccctcgctgtggaattctgggtcactgtcaagccccagatcattttctgtttgccaagttgaaaacccaaaccaatgcatctgactttcccattgggacatctttaaagtacgaatgccgtcctgagtactacgggaggccattctctatcacatgtctagataacctggtctggtcaagtcccaaagatgtctgtaaacgtaaatcatgtaaaactcctccagatccagtgaatggcatggtgcatgtgatcacagacatccaggttggatccagaatcaactattcttgtactacagggcaccgactcattggtcactcatctgctgaatgtatcctctcgggcaatgctgcccattggagcacgaagccgccaatttgtcaacgatcatgccatcttccctgtgagttgtttggaagatgagctttctacattttggggagcaaagacgaatgagcaattgcaagctaacaaggaatataaaatgtgtataatcctgggtttagtgatggtgtgaggaaatcagcaatttcaaacccagttggtgggaggataagtgggaacaaactttgtagaaggccaataaactggctgggcactgccctacggtagagtaggacacagtattcagttcttccaagatcagacgagattgggcgcatttagggtggtatggttgtagatcagtatccagttctttttattatttctgaatctgtaagtatcatgtttattatatgtaatattgtatatttgtactttgtctttgttagttcttccagagcttttgttcttattatttaataaagatgttatactg

SEQ ID NO: 6503 - DNA, 1453 bp, Homo sapiens
  source 1..1453: mol_type = unassigned DNA
aaactgtgagtttggggattgttgtgtccactaaccggactcagaagggacttccctgctcggctggctttcggtttctctgctcacctccggataaatcacggggtctcccgcgccgctcatggcgcctcccgtccgtctcgagcgtccctttccttcccggcgctttcctgggttgcttctggcggccctggtgttgctgctgtcctccttctccgatcaatgcaatgtcccggaatggcttccatttgccaggcctaccaacctaactgatgactttgagtttcccattgggacatatctgaactatgaatgccgccctggttattccggaagaccgttttctatcatctgcctaaaaaactcagtctggacaagtgctaaggacaagtgcaaacgtaaatcatgtcgtaatcctccagatcctgtgaatggcatggcacatgtgatcaaagacatccagttcagatcccaaattaaatattcttgtcctaaaggataccgactcattggttcctcgtctgccacatgcatcatctcaggcaacactgtcatttgggataataaaacacctgtttgtgacagaattatttgtgggctaccccccaccatcgccaatggagatttcactagcatcagcagagagtattttcactatggatcagtggtgacctaccactgcaatcttggaagcagagggaaaaaggtgtttgagcttgtgggtgagccctccatatactgcaccagcaaagatgatcaagtgggcatctggagtggcccagcccctcagtgcattatacctaacaaatgcacgcctccaaatgtggaaaatggaatattggtatctgacaacagaagcttattttccttaaatgaagttgtggagtttaggtgtcagcctggctttggcatgaaagggccctcccatgtgaagtgccaggccctgaacaaatgggagccagagttaccaagctgctccagggtatgtcagccacctccagatgtcctgcatgctgagcgtacccaaagggacaaggacaacttttcacccgggcaggaagtgttctacagctgtgagcccggctacgacctcagaggatctacgtatttgcactgcacaccccagggagactggagccctgcagcccccagatgtgaagtgaaatcctgtgatgacttcctgggccaacttcctaatggccatgtgctatttccacttaatctccagcttggagcaaaagtggattttgtttgtgatgaaggatttcaattaaaaggcagctctgctagttactgtgttttggctggaatggaaagcctttggaatagcagtgttccagtgtgtgaacgtaaatcatgtgaaactcctccagttccagtgaatggcatggtgcatgtgatcacagacatccatgttggatccagaatcaactattcttgtactacagggttt

SEQ ID NO: 6504 - DNA, 1788 bp, Homo sapiens
  source 1..1788: mol_type = unassigned DNA
ggctggctttcggtttctctgctcacctccggataaatcacggggtctcccgcgccgctcatggcgcctcccgtccgtctcgagcgtccctttccttcccggcgctttcctgggttgcttctggcggccctggtgttgctgctgtcctccttctccgatcaatgcaatgtcccggaatggcttccatttgccaggcctaccaacctaactgatgactttgagtttcccattgggacatatctgaactatgaatgccgccctggttattccggaagaccgttttctatcatctgcctaaaaaactcagtctggacaagtgctaaggacaagtgcaaacgtaaatcatgtcgtaatcctccagatcctgtgaatggcatggcacatgtgatcaaagacatccagttcagatcccaaattaaatattcttgtcctaaaggataccgactcattggttcctcgtctgccacatgcatcatctcaggcaacactgtcatttgggataataaaacacctgtttgtgacagaattatttgtgggctaccccccaccatcgccaatggagatttcactagcatcagcagagagtattttcactatggatcagtggtgacctaccactgcaatcttggaagcagagggaaaaaggtgtttgagcttgtgggtgagccctccatatactgcaccagcaaagatgatcaagtgggcatctggagtggcccagcccctcagtgcattatacctaacaaatgcacgcctccaaatgtggaaaatggaatattggtatctgacaacagaagcttattttccttaaatgaagttgtggagtttaggtgtcagcctggctttggcatgaaagggccctcccatgtgaagtgccaggccctgaacaaatgggagccagagttaccaagctgctccagggtatgtcagccacctccagatgtcctgcatgctgagcgtacccaaagggacaaggacaacttttcacccgggcaggaagtgttctacagctgtgagcccggctacgacctcagaggatctacgtatttgcactgcacaccccagggagactggagccctgcagcccccagatgtgaagtgaaatcctgtgatgacttcctgggccaacttcctaatggccatgtgctatttccacttaatctccagcttggagcaaaagtggattttgtttgtgatgaaggatttcaattaaaaggcagctctgctagttactgtgttttggctggaatggaaagcctttggaatagcagtgttccagtgtgtgaacgtaaatcatgtgaaactcctccagttccagtgaatggcatggtgcatgtgatcacagacatccatgttggatccagaatcaactattcttgtactacagggcaccgactcattggtcactcatctgctgaatgtatcctctcgggcaatactgcccattggagcatgaagccaccaatttgtcaacaaatcttttgtccaaatcctccagctatccttaatgggagacacacaggaactccccttggagatattccctatggaaaagaagtatcttacacatgtgacccccacccagacagagggatgaccttcaacctcattggggagagcaccatccgccgcacaagtgaacctcatgggaatggggtttggagcagccctgcccctcgctgtgaacttcctgttggtgctggttcacatgatgctcttatagttggtaagttttatgaagtgtttgctgaggaattctgtcatctttaacagtaagtacctacttat

SEQ ID NO: 6505 - DNA, 4240 bp, Homo sapiens
  source 1..4240: mol_type = unassigned DNA
caccggcgccgcgtcagcccccaggccgcctgcaggtgtgcgctcagaactagcacgtgtgccggacactatttaagggcccgcctctcctggctcacagctgcttgctgctccagccttgccctcccagagctgccggacgctcgcgggtctcggaacgcatcccgccgcgggggcttcggccgtggcatgggcgccgcgggcctgctcggggttttcttggctctcgtcgcaccgggggtcctcgggatttcttgtggctctcctccgcctatcctaaatggccggattagttattattctacccccattgctgttggtaccgtgataaggtacagttgttcaggtaccttccgcctcattggagaaaaaagtctattatgcataactaaagacaaagtggatggaacctgggataaacctgctcctaaatgtgaatatttcaataaatattcttcttgccctgagcccatagtaccaggaggatacaaaattagaggctctacaccctacagacatggtgattctgtgacatttgcctgtaaaaccaacttctccatgaacggaaacaagtctgtttggtgtcaagcaaataatatgtgggggccgacacgactaccaacctgtgtaagtgttttccctctcgagtgtccagcacttcctatgatccacaatggacatcacacaagtgagaatgttggctccattgctccaggattgtctgtgacttacagctgtgaatctggttacttgcttgttggagaaaagatcattaactgtttgtcttcgggaaaatggagtgctgtcccccccacatgtgaagaggcacgctgtaaatctctaggacgatttcccaatgggaaggtaaaggagcctccaattctccgggttggtgtaactgcaaactttttctgtgatgaagggtatcgactgcaaggcccaccttctagtcggtgtgtaattgctggacagggagttgcttggaccaaaatgccagtatgtgaagaaattttttgcccatcacctccccctattctcaatggaagacatataggcaactcactagcaaatgtctcatatggaagcatagtcacttacacttgtgacccggacccagaggaaggagtgaacttcatccttattggagagagcactctccgttgtacagttgatagtcagaagactgggacctggagtggccctgccccacgctgtgaactttctacttctgcggttcagtgtccacatccccagatcctaagaggccgaatggtatctgggcagaaagatcgatatacctataacgacactgtgatatttgcttgcatgtttggcttcaccttgaagggcagcaagcaaatccgatgcaatgcccaaggcacatgggagccatctgcaccagtctgtgaaaaggaatgccaggcccctcctaacatcctcaatgggcaaaaggaagatagacacatggtccgctttgaccctggaacatctataaaatatagctgtaaccctggctatgtgctggtgggagaagaatccatacagtgtacctctgagggggtgtggacaccccctgtaccccaatgcaaagtggcagcgtgtgaagctacaggaaggcaactcttgacaaaaccccagcaccaatttgttagaccagatgtcaactcttcttgtggtgaagggtacaagttaagtgggagtgtttatcaggagtgtcaaggcacaattccttggtttatggagattcgtctttgtaaagaaatcacctgcccaccaccccctgttatctacaatggggcacacaccgggagttccttagaagattttccatatggaaccacggtcacttacacatgtaaccctgggccagaaagaggagtggaattcagcctcattggagagagcaccatccgttgtacaagcaatgatcaagaaagaggcacctggagtggccctgctcccctgtgtaaactttccctccttgctgtccagtgctcacatgtccatattgcaaatggatacaagatatctggcaaggaagccccatatttctacaatgacactgtgacattcaagtgttatagtggatttactttgaagggcagtagtcagattcgttgcaaagctgataacacctgggatcctgaaataccagtttgtgaaaaaggctgccagtcacctcctgggctccaccatggtcgtcatacaggtggaaatacggtcttctttgtctctgggatgactgtagactacacttgtgaccctggctatttgcttgtgggaaacaaatccattcactgtatgccttcaggaaattggagtccttctgccccacggtgtgaagaaacatgccagcatgtgagacagagtcttcaagaacttccagctggttcacgtgtggagctagttaatacgtcctgccaagatgggtaccagttgactggacatgcttatcagatgtgtcaagatgctgaaaatggaatttggttcaaaaagattccactttgtaaagttattcactgtcaccctccaccagtgattgtcaatgggaagcacacaggcatgatggcagaaaactttctatatggaaatgaagtctcttatgaatgtgaccaaggattctatctcctgggagagaaaaaattgcagtgcagaagtgattctaaaggacatggatcttggagcgggccttccccacagtgcttacgatctcctcctgtgactcgctgccctaatccagaagtcaaacatgggtacaagctcaataaaacacattctgcatattcccacaatgacatagtgtatgttgactgcaatcctggcttcatcatgaatggtagtcgcgtgattaggtgtcatactgataacacatgggtgccaggtgtgccaacttgtatcaaaaaagccttcatagggtgtccacctccgcctaagacccctaacgggaaccatactggtggaaacatagctcgattttctcctggaatgtcaatcctgtacagctgtgaccaaggctacctgctggtgggagaggcactccttctttgcacacatgagggaacctggagccaacctgcccctcattgtaaagaggtaaactgtagctcaccagcagatatggatggaatccagaaagggctggaaccaaggaaaatgtatcagtatggagctgttgtaactctggagtgtgaagatgggtatatgctggaaggcagtccccagagccagtgccaatcggatcaccaatggaaccctcccctggcggtttgcagatcccgttcacttgctcctgtcctttgtggtattgctgcaggtttgatacttcttaccttcttgattgtcattaccttatacgtgatatcaaaacacagagcacgcaattattatacagatacaagccagaaagaagcttttcatttagaagcacgagaagtatattctgttgatccatacaacccagccagctgatcagaagacaaactggtgtgtgcctcattgcttggaattcagcggaatattgattagaaagaaactgctctaatatcagcaagtctctttatatggcctcaagatcaatgaaatgatgtcataagcgatcacttcctatatgcacttattctcaagaagaacatctttatggtaaagatgggagcccagtttcactgccatatactcttcaaggactttctgaagcctcacttatgagatgcctgaagccaggccatggctataaacaattacatggctctaaaaagttttgccctttttaaggaaggcactaaaaagagctgtcctggtatctagacccatcttctttttgaaatcagcatactcaatgttactatctgcttttggttataatgtgtttttaattatctaaagtatgaagcattttctggggttatgatggctttacctttattaggaagtatggttttattttgatagtagcttcctcctctggtggtgttaatcatttcatttttacccttacttggtttgagtttctctcacattactgtatatactttgcctttccataatcactcagtgattgcaatttgcacaagtttttttaaattatgggaatcaagatttaatcctagagatttggtgtacaattcaggctttggatgtttctttagcagttttgtgataagttctagttgcttgtaaaatttcacttaataatgtgtacattagtcattcaataaattgtaattgtaaagaaaacatacaa

SEQ ID NO: 6506 - DNA, 4063 bp, Homo sapiens
  source 1..4063: mol_type = unassigned DNA
caccggcgccgcgtcagcccccaggccgcctgcaggtgtgcgctcagaactagcacgtgtgccggacactatttaagggcccgcctctcctggctcacagctgcttgctgctccagccttgccctcccagagctgccggacgctcgcgggtctcggaacgcatcccgccgcgggggcttcggccgtggcatgggcgccgcgggcctgctcggggttttcttggctctcgtcgcaccgggggtcctcgggatttcttgtggctctcctccgcctatcctaaatggccggattagttattattctacccccattgctgttggtaccgtgataaggtacagttgttcaggtaccttccgcctcattggagaaaaaagtctattatgcataactaaagacaaagtggatggaacctgggataaacctgctcctaaatgtgaatatttcaataaatattcttcttgccctgagcccatagtaccaggaggatacaaaattagaggctctacaccctacagacatggtgattctgtgacatttgcctgtaaaaccaacttctccatgaacggaaacaagtctgtttggtgtcaagcaaataatatgtgggggccgacacgactaccaacctgtgtaagtgttttccctctcgagtgtccagcacttcctatgatccacaatggacatcacacaagtgagaatgttggctccattgctccaggattgtctgtgacttacagctgtgaatctggttacttgcttgttggagaaaagatcattaactgtttgtcttcgggaaaatggagtgctgtcccccccacatgtgaagaggcacgctgtaaatctctaggacgatttcccaatgggaaggtaaaggagcctccaattctccgggttggtgtaactgcaaactttttctgtgatgaagggtatcgactgcaaggcccaccttctagtcggtgtgtaattgctggacagggagttgcttggaccaaaatgccagtatgtgaagaaattttttgcccatcacctccccctattctcaatggaagacatataggcaactcactagcaaatgtctcatatggaagcatagtcacttacacttgtgacccggacccagaggaaggagtgaacttcatccttattggagagagcactctccgttgtacagttgatagtcagaagactgggacctggagtggccctgccccacgctgtgaactttctacttctgcggttcagtgtccacatccccagatcctaagaggccgaatggtatctgggcagaaagatcgatatacctataacgacactgtgatatttgcttgcatgtttggcttcaccttgaagggcagcaagcaaatccgatgcaatgcccaaggcacatgggagccatctgcaccagtctgtgaaaaggaatgccaggcccctcctaacatcctcaatgggcaaaaggaagatagacacatggtccgctttgaccctggaacatctataaaatatagctgtaaccctggctatgtgctggtgggagaagaatccatacagtgtacctctgagggggtgtggacaccccctgtaccccaatgcaaagtggcagcgtgtgaagctacaggaaggcaactcttgacaaaaccccagcaccaatttgttagaccagatgtcaactcttcttgtggtgaagggtacaagttaagtgggagtgtttatcaggagtgtcaaggcacaattccttggtttatggagattcgtctttgtaaagaaatcacctgcccaccaccccctgttatctacaatggggcacacaccgggagttccttagaagattttccatatggaaccacggtcacttacacatgtaaccctgggccagaaagaggagtggaattcagcctcattggagagagcaccatccgttgtacaagcaatgatcaagaaagaggcacctggagtggccctgctcccctgtgtaaactttccctccttgctgtccagtgctcacatgtccatattgcaaatggatacaagatatctggcaaggaagccccatatttctacaatgacactgtgacattcaagtgttatagtggatttactttgaagggcagtagtcagattcgttgcaaagctgataacacctgggatcctgaaataccagtttgtgaaaaagaaacatgccagcatgtgagacagagtcttcaagaacttccagctggttcacgtgtggagctagttaatacgtcctgccaagatgggtaccagttgactggacatgcttatcagatgtgtcaagatgctgaaaatggaatttggttcaaaaagattccactttgtaaagttattcactgtcaccctccaccagtgattgtcaatgggaagcacacaggcatgatggcagaaaactttctatatggaaatgaagtctcttatgaatgtgaccaaggattctatctcctgggagagaaaaaattgcagtgcagaagtgattctaaaggacatggatcttggagcgggccttccccacagtgcttacgatctcctcctgtgactcgctgccctaatccagaagtcaaacatgggtacaagctcaataaaacacattctgcatattcccacaatgacatagtgtatgttgactgcaatcctggcttcatcatgaatggtagtcgcgtgattaggtgtcatactgataacacatgggtgccaggtgtgccaacttgtatcaaaaaagccttcatagggtgtccacctccgcctaagacccctaacgggaaccatactggtggaaacatagctcgattttctcctggaatgtcaatcctgtacagctgtgaccaaggctacctgctggtgggagaggcactccttctttgcacacatgagggaacctggagccaacctgcccctcattgtaaagaggtaaactgtagctcaccagcagatatggatggaatccagaaagggctggaaccaaggaaaatgtatcagtatggagctgttgtaactctggagtgtgaagatgggtatatgctggaaggcagtccccagagccagtgccaatcggatcaccaatggaaccctcccctggcggtttgcagatcccgttcacttgctcctgtcctttgtggtattgctgcaggtttgatacttcttaccttcttgattgtcattaccttatacgtgatatcaaaacacagagcacgcaattattatacagatacaagccagaaagaagcttttcatttagaagcacgagaagtatattctgttgatccatacaacccagccagctgatcagaagacaaactggtgtgtgcctcattgcttggaattcagcggaatattgattagaaagaaactgctctaatatcagcaagtctctttatatggcctcaagatcaatgaaatgatgtcataagcgatcacttcctatatgcacttattctcaagaagaacatctttatggtaaagatgggagcccagtttcactgccatatactcttcaaggactttctgaagcctcacttatgagatgcctgaagccaggccatggctataaacaattacatggctctaaaaagttttgccctttttaaggaaggcactaaaaagagctgtcctggtatctagacccatcttctttttgaaatcagcatactcaatgttactatctgcttttggttataatgtgtttttaattatctaaagtatgaagcattttctggggttatgatggctttacctttattaggaagtatggttttattttgatagtagcttcctcctctggtggtgttaatcatttcatttttacccttacttggtttgagtttctctcacattactgtatatactttgcctttccataatcactcagtgattgcaatttgcacaagtttttttaaattatgggaatcaagatttaatcctagagatttggtgtacaattcaggctttggatgtttctttagcagttttgtgataagttctagttgcttgtaaaatttcacttaataatgtgtacattagtcattcaataaattgtaattgtaaagaaaacatacaa

SEQ ID NO: 6507 - DNA, 3877 bp, Homo sapiens
  source 1..3877: mol_type = unassigned DNA
caccggcgccgcgtcagcccccaggccgcctgcaggtgtgcgctcagaactagcacgtgtgccggacactatttaagggcccgcctctcctggctcacagctgcttgctgctccagccttgccctcccagagctgccggacgctcgcgggtctcggaacgcatcccgccgcgggggcttcggccgtggcatgggcgccgcgggcctgctcggggttttcttggctctcgtcgcaccgggggtcctcgggatttcttgtggctctcctccgcctatcctaaatggccggattagttattattctacccccattgctgttggtaccgtgataaggtacagttgttcaggtaccttccgcctcattggagaaaaaagtctattatgcataactaaagacaaagtggatggaacctgggataaacctgctcctaaatgtgaatatttcaataaatattcttcttgccctgagcccatagtaccaggaggatacaaaattagaggctctacaccctacagacatggtgattctgtgacatttgcctgtaaaaccaacttctccatgaacggaaacaagtctgtttggtgtcaagcaaataatatgtgggggccgacacgactaccaacctgtgtaagtgttttccctctcgagtgtccagcacttcctatgatccacaatggacatcacacaagtgagaatgttggctccattgctccaggattgtctgtgacttacagctgtgaatctggttacttgcttgttggagaaaagatcattaactgtttgtcttcgggaaaatggagtgctgtcccccccacatgtgaagaggcacgctgtaaatctctaggacgatttcccaatgggaaggtaaaggagcctccaattctccgggttggtgtaactgcaaactttttctgtgatgaagggtatcgactgcaaggcccaccttctagtcggtgtgtaattgctggacagggagttgcttggaccaaaatgccagtatgtgaagaaattttttgcccatcacctccccctattctcaatggaagacatataggcaactcactagcaaatgtctcatatggaagcatagtcacttacacttgtgacccggacccagaggaaggagtgaacttcatccttattggagagagcactctccgttgtacagttgatagtcagaagactgggacctggagtggccctgccccacgctgtgaactttctacttctgcggttcagtgtccacatccccagatcctaagaggccgaatggtatctgggcagaaagatcgatatacctataacgacactgtgatatttgcttgcatgtttggcttcaccttgaagggcagcaagcaaatccgatgcaatgcccaaggcacatgggagccatctgcaccagtctgtgaaaaggaatgccaggcccctcctaacatcctcaatgggcaaaaggaagatagacacatggtccgctttgaccctggaacatctataaaatatagctgtaaccctggctatgtgctggtgggagaagaatccatacagtgtacctctgagggggtgtggacaccccctgtaccccaatgcaaagtggcagcgtgtgaagctacaggaaggcaactcttgacaaaaccccagcaccaatttgttagaccagatgtcaactcttcttgtggtgaagggtacaagttaagtgggagtgtttatcaggagtgtcaaggcacaattccttggtttatggagattcgtctttgtaaagaaatcacctgcccaccaccccctgttatctacaatggggcacacaccgggagttccttagaagattttccatatggaaccacggtcacttacacatgtaaccctgggccagaaagaggagtggaattcagcctcattggagagagcaccatccgttgtacaagcaatgatcaagaaagaggcacctggagtggccctgctcccctgtgtaaactttccctccttgctgtccagtgctcacatgtccatattgcaaatggatacaagatatctggcaaggaagccccatatttctacaatgacactgtgacattcaagtgttatagtggatttactttgaagggcagtagtcagattcgttgcaaagctgataacacctgggatcctgaaataccagtttgtgaaaaagaaacatgccagcatgtgagacagagtcttcaagaacttccagctggttcacgtgtggagctagttaatacgtcctgccaagatgggtaccagttgactggacatgcttatcagatgtgtcaagatgctgaaaatggaatttggttcaaaaagattccactttgtaaagttattcactgtcaccctccaccagtgattgtcaatgggaagcacacaggcatgatggcagaaaactttctatatggaaatgaagtctcttatgaatgtgaccaaggattctatctcctgggagagaaaaaattgcagtgcagaagtgattctaaaggacatggatcttggagcgggccttccccacagtgcttacgatctcctcctgtgactcgctgccctaatccagaagtcaaacatgggtacaagctcaataaaacacattctgcatattcccacaatgacatagtgtatgttgactgcaatcctggcttcatcatgaatggtagtcgcgtgattaggtgtcatactgataacacatgggtgccaggtgtgccaacttgtatcaaaaaagaggtaaactgtagctcaccagcagatatggatggaatccagaaagggctggaaccaaggaaaatgtatcagtatggagctgttgtaactctggagtgtgaagatgggtatatgctggaaggcagtccccagagccagtgccaatcggatcaccaatggaaccctcccctggcggtttgcagatcccgttcacttgctcctgtcctttgtggtattgctgcaggtttgatacttcttaccttcttgattgtcattaccttatacgtgatatcaaaacacagagcacgcaattattatacagatacaagccagaaagaagcttttcatttagaagcacgagaagtatattctgttgatccatacaacccagccagctgatcagaagacaaactggtgtgtgcctcattgcttggaattcagcggaatattgattagaaagaaactgctctaatatcagcaagtctctttatatggcctcaagatcaatgaaatgatgtcataagcgatcacttcctatatgcacttattctcaagaagaacatctttatggtaaagatgggagcccagtttcactgccatatactcttcaaggactttctgaagcctcacttatgagatgcctgaagccaggccatggctataaacaattacatggctctaaaaagttttgccctttttaaggaaggcactaaaaagagctgtcctggtatctagacccatcttctttttgaaatcagcatactcaatgttactatctgcttttggttataatgtgtttttaattatctaaagtatgaagcattttctggggttatgatggctttacctttattaggaagtatggttttattttgatagtagcttcctcctctggtggtgttaatcatttcatttttacccttacttggtttgagtttctctcacattactgtatatactttgcctttccataatcactcagtgattgcaatttgcacaagtttttttaaattatgggaatcaagatttaatcctagagatttggtgtacaattcaggctttggatgtttctttagcagttttgtgataagttctagttgcttgtaaaatttcacttaataatgtgtacattagtcattcaataaattgtaattgtaaagaaaacatacaa

SEQ ID NO: 6508 - DNA, 3841 bp, Homo sapiens
  source 1..3841: mol_type = unassigned DNA
ccggacgctcgcgggtctcggaacgcatcccgccgcgggggcttcggccgtggcatgggcgccgcgggcctgctcggggttttcttggctctcgtcgcaccgggggtcctcgggatttcttgtggctctcctccgcctatcctaaatggccggattagttattattctacccccattgctgttggtaccgtgataaggtacagttgttcaggtaccttccgcctcattggagaaaaaagtctattatgcataactaaagacaaagtggatggaacctgggataaacctgctcctaaatgtgaatatttcaataaatattcttcttgccctgagcccatagtaccaggaggatacaaaattagaggctctacaccctacagacatggtgattctgtgacatttgcctgtaaaaccaacttctccatgaacggaaacaagtctgtttggtgtcaagcaaataatatgtgggggccgacacgactaccaacctgtgtaagtgttttccctctcgagtgtccagcacttcctatgatccacaatggacatcacacaagtgagaatgttggctccattgctccaggattgtctgtgacttacagctgtgaatctggttacttgcttgttggagaaaagatcattaactgtttgtcttcgggaaaatggagtgctgtcccccccacatgtgaagaggcacgctgtaaatctctaggacgatttcccaatgggaaggtaaaggagcctccaattctccgggttggtgtaactgcaaactttttctgtgatgaagggtatcgactgcaaggcccaccttctagtcggtgtgtaattgctggacagggagttgcttggaccaaaatgccagtatgtgaagaaattttttgcccatcacctccccctattctcaatggaagacatataggcaactcactagcaaatgtctcatatggaagcatagtcacttacacttgtgacccggacccagaggaaggagtgaacttcatccttattggagagagcactctccgttgtacagttgatagtcagaagactgggacctggagtggccctgccccacgctgtgaactttctacttctgcggttcagtgtccacatccccagatcctaagaggccgaatggtatctgggcagaaagatcgatatacctataacgacactgtgatatttgcttgcatgtttggcttcaccttgaagggcagcaagcaaatccgatgcaatgcccaaggcacatgggagccatctgcaccagtctgtgaaaaggaatgccaggcccctcctaacatcctcaatgggcaaaaggaagatagacacatggtccgctttgaccctggaacatctataaaatatagctgtaaccctggctatgtgctggtgggagaagaatccatacagtgtacctctgagggggtgtggacaccccctgtaccccaatgcaaagtggcagcgtgtgaagctacaggaaggcaactcttgacaaaaccccagcaccaatttgttagaccagatgtcaactcttcttgtggtgaaggaaatcacctgcccaccaccccctgttatctacaatggggcacacaccgggagttccttagaagattttccatatggaaccacggtcacttacacatgcctgggccagaaagaggagtggaattcagcctcattggagagagcaccatccgttgtacaagcaatgatcaagaaagaggcacctggagtggccctgctcccctgtgtaaactttccctccttgctgtccagtgctcacatgtccatattgcaaatggatacaagatatctggcaaggaagccccatatttctacaatgacactgtgacattcaagtgttatagtggatttactttgaagggcagtagtcagattcgttgcaaagctgataacacctgggatcctgaaataccagtttgtgaaaaagaaacatgccagcatgtgagacagagtcttcaagaacttccagctggttcacgtgtggagctagttaatacgtcctgccaagatgggtaccagttgactggacatgcttatcagatgtgtcaagatgctgaaaatggaatttggttcaaaaagattccactttgtaaagttattcactgtcaccctccaccagtgattgtcaatgggaagcacacaggcatgatggcagaaaactttctatatggaaatgaagtctcttatgaatgtgaccaaggattctatctcctgggagagaaaaaattgcagtgcagaagtgattctaaaggacatggatcttggagcgggccttccccacagtgcttacgatctcctcctgtgactcgctgccctaatccagaagtcaaacatgggtacaagctcaataaaacacattctgcatattcccacaatgacatagtgtatgttgactgcaatcctggcttcatcatgaatggtagtcgcgtgattaggtgtcatactgataacacatgggtgccaggtgtgccaacttgtatcaaaaaagccttcatagggtgtccacctccgcctaagacccctaacgggaaccatactggtggaaacatagctcgattttctcctggaatgtcaatcctgtacagctgtgaccaaggctacctgctggtgggagaggcactccttctttgcacacatgagggaacctggagccaacctgcccctcattgtaaagaggtaaactgtagctcaccagcagatatggatggaatccagaaagggctggaaccaaggaaaatgtatcagtatggagctgttgtaactctggagtgtgaagatgggtatatgctggaaggcagtccccagagccagtgccaatcggatcaccaatggaaccctcccctggcggtttgcagatcccgttcacttgctcctgtcctttgtggtattgctgcaggtttgatacttcttaccttcttgattgtcattaccttatacgtgatatcaaaacacagagcacgcaattattatacagatacaagccagaaagaagcttttcatttagaagcacgagaagtatattctgttgatccatacaacccagccagctgatcagaagacaaactggtgtgtgcctcattgcttggaattcagcggaatattgattagaaagaaactgctctaatatcagcaagtctctttatatggcctcaagatcaatgaaatgatgtcataagcgatcacttcctatatgcacttattctcaagaagaacatctttatggtaaagatgggagcccagtttcactgccatatactcttcaaggactttctgaagcctcacttatgagatgcctgaagccaggccatggctataaacaattacatggctctaaaaagttttgccctttttaaggaaggcactaaaaagagctgtcctggtatctagacccatcttctttttgaaatcagcatactcaatgttactatctgcttttggttataatgtgtttttaattatctaaagtatgaagcattttctggggttatgatggctttacctttattaggaagtatggttttattttgatagtagcttcctcctctggtggtgttaatcatttcatttttacccttacttggtttgagtttctctcacattactgtatatactttgcctttccataatcactcagtgattgcaatttgcacaagtttttttaaattatgggaatcaagatttaatcctagagatttggtgtacaattcaggctttggatgtttctttagcagttttgtgataagttctagttgcttgtaaaatttcacttaataatgtgtacattagtcattcaataaattgtaattgtaaagaaaac

SEQ ID NO: 6509 - DNA, 1163 bp, Homo sapiens
  source 1..1163: mol_type = unassigned DNA
ccggcggcgcctcaggtcgcggggcgcctaggcctgggttgtcctttgcatctgcacgtgttcgcagtcgtttccgcgatgctgcctctgctgcgctgcgtgccccgtgtgctgggctcctccgtcgccggcctccgcgctgccgcgcccgcctcgcctttccggcagctcctgcagccggcaccccggctgtgcacccggcccttcgggctgctcagcgtgcgcgcaggttccgagcggcggccgggcctcctgcggcctcgcggaccctgcgcctgtggctgtggctgcggctcgctgcacaccgacggagacaaagcttttgttgatttcctgagtgatgaaattaaggaggaaagaaaaattcagaagcataaaaccctccctaagatgtctggaggttgggagctggaactgaatgggacagaagcgaaattagtgcggaaagttgccggggaaaaaatcacggtcactttcaacattaacaacagcatcccaccaacatttgatggtgaggaggaaccctcgcaagggcagaaggttgaagaacaggagcctgaactgacatcaactcccaatttcgtggttgaagttataaagaatgatgatggcaagaaggcccttgtgttggactgtcattatccagaggatgaggttggacaagaagacgaggctgagagtgacatcttctctatcagggaagttagctttcagtccactggcgagtctgaatggaaggatactaattatacactcaacacagattccttggactgggccttatatgaccacctaatggatttccttgccgaccgaggggtggacaacacttttgcagatgagctggtggagctcagcacagccctggagcaccaggagtacattacttttcttgaagacctcaagagttttgtcaagagccagtagagcagacagatgctgaaagccatagtttcatggcaggctttggccagtgaacaaatcctactctgaagctagacatgtgctttgaaatgattatcatcctaatatcatgggggaaaaaataccaaatttaaattatatgttttgtgttctcatttattatcatttttttctgtacaaatctattatttctagatttttgtataacatgatagacataaaattggtttatctcctcc

SEQ ID NO: 6510 - DNA, 1044 bp, Homo sapiens
  source 1..1044: mol_type = unassigned DNA
gcccttcccgcctctggggaagggaacttccgcttcggaccgagggcagtaggctctcggctcctggtcccactgctgctcagcccagtggcctcacaggacaccagcttcccaggaggcgtctgacacagtatgatgatgaagatcccatggggcagcatcccagtactgatgttgctcctgctcctgggcctaatcgatatctcccaggcccagctcagctgcaccgggcccccagccatccctggcatcccgggtatccctgggacacctggccccgatggccaacctgggaccccagggataaaaggagagaaagggcttccagggctggctggagaccatggtgagttcggagagaagggagacccagggattcctgggaatccaggaaaagtcggccccaagggccccatgggccctaaaggtggcccaggggcccctggagccccaggccccaaaggtgaatcgggagactacaaggccacccagaaaatcgccttctctgccacaagaaccatcaacgtccccctgcgccgggaccagaccatccgcttcgaccacgtgatcaccaacatgaacaacaattatgagccccgcagtggcaagttcacctgcaaggtgcccggtctctactacttcacctaccacgccagctctcgagggaacctgtgcgtgaacctcatgcgtggccgggagcgtgcacagaaggtggtcaccttctgtgactatgcctacaacaccttccaggtcaccaccggtggcatggtcctcaagctggagcagggggagaacgtcttcctgcaggccaccgacaagaactcactactgggcatggagggtgccaacagcatcttttccgggttcctgctctttccagatatggaggcctgacctgtgggctgcttcacatccaccccggctccccctgccagcaacgctcactctacccccaacaccaccccttgcccaaccaatgcacacagtagggcttggtgaatgctgctgagtgaatgagtaaataaactcttcaaggccaaggga

SEQ ID NO: 6511 - DNA, 977 bp, Homo sapiens
  source 1..977: mol_type = unassigned DNA
gcccttcccgcctctggggaagggaacttccgcttcggaccgagggcagtaggctctcggctcctggtcccactgctgctcagcccagtggcctcacaggacaccagcttcccagccctgtcaggttgaaatcagcattgccaagaggctcagagaggttaaggcacttgcctgaggttatgcagccggtagcagatggggctttaaagtcaagtgggcctgactccatgttgcggaaagggactgctggaccgaaggagatggaaaggaggcgtctgacacagtatgatgatgaagatcccatggggcagcatcccagtactgatgttgctcctgctcctgggcctaatcgatatctcccaggcccagctcagctgcaccgggcccccagccatccctggcatcccgggtatccctgggacacctggccccgatggccaacctgggaccccagggataaaaggagagaaagggcttccagggctggctggagaccatggtgagttcggagagaagggagacccagggattcctgggaatccaggaaaagtcggccccaagggccccatgggccctaaaggtggcccaggggcccctggagccccaggccccaaaggtgaatcgggagactacaaggccacccagaaaatcgccttctctgccacaagaaccatcaacgtccccctgcgccgggaccagaccatccgcttcgaccacgtgatcaccaacatgaacaacaattatgagccccgcagtggcaagttcacctgcaaggtgcccggtctctactacttcacctaccacgccagctctcgagggaacctgtgcgtgaacctcatgcgtggccgggagcgtgcacagaaggtggtcaccttctgtgactatgcctacaacaccttccaggtcaccaccggtggcatggtcctcaagctggagcagggggagaacgtcttcctgcaggccaccgacaagaactc

SEQ ID NO: 6512 - DNA, 1254 bp, Homo sapiens
  source 1..1254: mol_type = unassigned DNA
gtggatgttcccccaggacagcgtgttctccccacagctgctgagttggcagaaccaaacttgccacccacccgtctcatttacagtaaatccagtgggttgcagaaataggacctgaaactgcctgagggcagcagggtggggggacagtgaggggacgggaaaggggccagcctgctggtccatgggaggggaccgtcaggggaaagcccttcccgcctctggggaagggaacttccgcttcggaccgagggcagtaggctctcggctcctggtcccactgctgctcagcccagtggcctcacaggacaccagcttcccaggaggcgtctgacacagtatgatgatgaagatcccatggggcagcatcccagtactgatgttgctcctgctcctgggcctaatcgatatctcccaggcccagctcagctgcaccgggcccccagccatccctggcatcccgggtatccctgggacacctggccccgatggccaacctgggaccccagggataaaaggagagaaagggcttccagggctggctggagaccatggtgagttcggagagaagggagacccagggattcctgggaatccaggaaaagtcggccccaagggccccatgggccctaaaggtggcccaggggcccctggagccccaggccccaaaggtgaatcgggagactacaaggccacccagaaaatcgccttctctgccacaagaaccatcaacgtccccctgcgccgggaccagaccatccgcttcgaccacgtgatcaccaacatgaacaacaattatgagccccgcagtggcaagttcacctgcaaggtgcccggtctctactacttcacctaccacgccagctctcgagggaacctgtgcgtgaacctcatgcgtggccgggagcgtgcacagaaggtggtcaccttctgtgactatgcctacaacaccttccaggtcaccaccggtggcatggtcctcaagctggagcagggggagaacgtcttcctgcaggccaccgacaagaactcactactgggcatggagggtgccaacagcatcttttccgggttcctgctctttccagatatggaggcctgacctgtgggctgcttcacatccaccccggctccccctgccagcaacgctcactctacccccaacaccaccccttgcccaaccaatgcacacagtagggcttggtgaatgctgctgagtgaatgagtaaataaactcttcaaggccaagggaca

SEQ ID NO: 6513 - DNA, 677 bp, Homo sapiens
  source 1..677: mol_type = unassigned DNA
agcaggtacaattatggtcccatcctatagcagagaaaattggggctcccttgactgacaacacatcaactggcaagtggcagaggcgggattggaatcaaaggctctgactgtaagccagcactcaggcagcgggcccgccacatgatgctcactgaggaacacccctgcccagtgtagaagaagatcacgaggaggcgtctgacacagtatgatgatgaagatcccatggggcagcatcccagtactgatgttgctcctgctcctgggcctaatcgatatctcccaggcccagctcagctgcaccgggcccccagccatccctggcatcccgggtatccctgggacacctggccccgatggccaacctgggaccccagggataaaaggagagaaagggcttccagggctggctggagaccatggtgagttcggagagaagggagacccagggattcctgggaatccaggaaaagtcggccccaagggccccatgggccctaaaggtggcccaggggcccctggagccccaggccccaaaggtgaatcgggagactacaaggccacccagaaaatcgccttctctgccacaagaaccatcaacgtccccctgcgccgggaccagaccatccgcttcgaccacgtgatcaccaacatgaacaacaattatgagcccc

SEQ ID NO: 6514 - DNA, 1089 bp, Homo sapiens
  source 1..1089: mol_type = unassigned DNA
tgggagaggggaagcagatctgaggacatctctgtgccaggccagaaaccgcccacctgcaggtgaggcccggacccctgcccaggtatgggcagatggccgtttcctccaccttccgccaccttcctgaaatgtggtgccaggggcagcttggtgtgtgaggggaaggagggttcccactcctgctgggccccggggcctgggctgaagaaaaggccccaccatccatccatgttccttctccgggatggacgtggggcccagctccctgccccaccttgggctgaagctgctgctgctcctgctgctgctgcccctcaggggccaagccaacacaggctgctacgggatcccagggatgcccggcctgcccggggcaccagggaaggatgggtacgacggactgccggggcccaagggggagccaggaatcccagccattcccgggatccgaggacccaaagggcagaagggagaacccggcttacccggccatcctgggaaaaatggccccatgggaccccctgggatgccaggggtgcccggccccatgggcatccctggagagccaggtgaggagggcagatacaagcagaaattccagtcagtgttcacggtcactcggcagacccaccagccccctgcacccaacagcctgatcagattcaacgcggtcctcaccaacccgcagggagattatgacacgagcactggcaagttcacctgcaaagtccccggcctctactactttgtctaccacgcgtcgcatacagccaacctgtgcgtgctgctgtaccgcagcggcgtcaaagtggtcaccttctgtggccacacgtccaaaaccaatcaggtcaactcgggcggtgtgctgctgaggttgcaggtgggcgaggaggtgtggctggctgtcaatgactactacgacatggtgggcatccagggctctgacagcgtcttctccggcttcctgctcttccccgactagggcgggcagatgcgctcgagccccacgggccttccacctccctcagcttcctgcatggacccaccttactggccagtctgcatccttgcctagaccattctccc

SEQ ID NO: 6515 - DNA, 1183 bp, Homo sapiens
  source 1..1183: mol_type = unassigned DNA
agacaccgtgtcctcttgcctgggagaggggaagcagatctgaggacatctctgtgccaggccagaaaccgcccacctgcaggtgaggcccggacccctgcccagttccttctccgggatggacgtggggcccagctccctgccccaccttgggctgaagctgctgctgctcctgctgctgctgcccctcaggggccaagccaacacaggctgctacgggatcccagggatgcccggcctgcccggggcaccagggaaggatgggtacgacggactgccggggcccaagggggagccaggaatcccagccattcccgggatccgaggacccaaagggcagaagggagaacccggcttacccggccatcctgggaaaaatggccccatgggaccccctgggatgccaggggtgcccggccccatgggcatccctggagagccaggtgaggagggcagatacaagcagaaattccagtcagtgttcacggtcactcggcagacccaccagccccctgcacccaacagcctgatcagattcaacgcggtcctcaccaacccgcagggagattatgacacgagcactggcaagttcacctgcaaagtccccggcctctactactttgtctaccacgcgtcgcatacagccaacctgtgcgtgctgctgtaccgcagcggcgtcaaagtggtcaccttctgtggccacacgtccaaaaccaatcaggtcaactcgggcggtgtgctgctgaggttgcaggtgggcgaggaggtgtggctggctgtcaatgactactacgacatggtgggcatccagggctctgacagcgtcttctccggcttcctgctcttccccgactagggcgggcagatgcgctcgagccccacgggccttccacctccctcagcttcctgcatggacccaccttactggccagtctgcatccttgcctagaccattctccccaccagatggacttctcctccagggagcccaccctgacccacccccactgcaccccctccccatgggttctctccttcctctgaacttctttaggagtcactgcttgtgtggttcctgggacacttaaccaatgccttctggtactgccattcttttttttttttttttcaagtattggaaggggtggggagatatataaataaatcatgaaatcaatacata

SEQ ID NO: 6516 - DNA, 1163 bp, Homo sapiens
  source 1..1163: mol_type = unassigned DNA
ctcagacaccgtgtcctcttgcctgggagaggggaagcagatctgaggacatctctgtgccaggccagaaaccgcccacctgcagttccttctccgggatggacgtggggcccagctccctgccccaccttgggctgaagctgctgctgctcctgctgctgctgcccctcaggggccaagccaacacaggctgctacgggatcccagggatgcccggcctgcccggggcaccagggaaggatgggtacgacggactgccggggcccaagggggagccaggaatcccagccattcccgggatccgaggacccaaagggcagaagggagaacccggcttacccggccatcctgggaaaaatggccccatgggaccccctgggatgccaggggtgcccggccccatgggcatccctggagagccaggtgaggagggcagatacaagcagaaattccagtcagtgttcacggtcactcggcagacccaccagccccctgcacccaacagcctgatcagattcaacgcggtcctcaccaacccgcagggagattatgacacgagcactggcaagttcacctgcaaagtccccggcctctactactttgtctaccacgcgtcgcatacagccaacctgtgcgtgctgctgtaccgcagcggcgtcaaagtggtcaccttctgtggccacacgtccaaaaccaatcaggtcaactcgggcggtgtgctgctgaggttgcaggtgggcgaggaggtgtggctggctgtcaatgactactacgacatggtgggcatccagggctctgacagcgtcttctccggcttcctgctcttccccgactagggcgggcagatgcgctcgagccccacgggccttccacctccctcagcttcctgcatggacccaccttactggccagtctgcatccttgcctagaccattctccccaccagatggacttctcctccagggagcccaccctgacccacccccactgcaccccctccccatgggttctctccttcctctgaacttctttaggagtcactgcttgtgtggttcctgggacacttaaccaatgccttctggtactgccattcttttttttttttttttcaagtattggaaggggtggggagatatataaataaatcatgaaatcaatacata

SEQ ID NO: 6517 - DNA, 1500 bp, Homo sapiens
  source 1..1500: mol_type = unassigned DNA
gcgaggcaggagccggcggctgggctccgcagcgcagccagcgcagcgcggcgccccgggcccggccccatgcccgcagccccgccggaccgtccttgagcgcgggcgcctagcccgcgccccctgcccgccggcaccattgccccgacggcgcggccgggcggcccggcgctccccaggctccgcgcgggccgaaagacgctgctagcggccgccgcgggtgtggtgatgctgctggtgctggtggtgctcatccccgtgctggtgagctcgggcggcccggaaggccactatgagatgctgggcacctgccgcatggtgtgcgacccctaccccgcgcggggccccggcgccggcgcgcggaccgacggcggcgacgccctgagcgagcagagcggcgcgcccccgccttccacgctggtgcagggcccccaggggaagccgggccgcaccggcaagcccggccctccggggcctcccggggacccaggtcctcccggccctgtggggccgccgggggagaagggtgagccaggcaagccgggccctccggggctgccgggcgcggggggcagcggcgccatcagcactgccacctacaccacggtgccgcgcgtggccttctacgccggcctcaagaacccccacgagggttacgaggtactcaagtttgacgacgtggtcaccaacctaggcaacaactacgacgcggccagcggcaagtttacgtgcaacattcccggcacctactttttcacctaccatgtcctcatgcgcggcggcgacggcaccagtatgtgggcagacctctgcaagaatggccaggtgcgggccagtgctattgcccaggacgcggaccagaactacgactacgccagcaacagcgtgatcctgcacctggacgccggcgacgaggtcttcatcaagctggatggaggcaaagcacacggcggcaacagcaacaaatacagcacgttctctggcttcatcatctactccgactgagctccccacgtctccctccacccacgtccctcacccgccggggtcccctccgggcggggcagacgatgactcgcccctcgcccacccgctcgctgcccggccctccccggctatgacgcccccggcccgtgctcaacaccgcctgggccacagctaggccctcccaccggctcgctgcagagccgggcccagcgcgccctgtccccgtgccagggaaccggggttgaccgcccccgcccagcccgcgctatatatttgtacaataggactgtttactgcccacctccgcctgccagcccaccccagcctggggagaggtcgcggcggcgggtttgcttcctgcgctctgagatgagctgccctccgctccctccggggtggcgcgcccgggggaggggggagttgggggctggatagcttcccagcaccctcagagcccccgcccggctgtgccccgtctgaccaaagttataataaaaacattttcaccccgca

SEQ ID NO: 6518 - DNA, 2043 bp, Homo sapiens
  source 1..2043: mol_type = unassigned DNA
gacatgagggctccgtctcccgagtgatggcagcgcgcgctgcttcgccgcctccgccgctcagccccggactccttacgtcagggtagcggggtcccccctccgcgcgggagccagcgaacagcgagagagcacagcagagcgcgccgcggagccggggcgccctcactgcgctaggagccccactaaacccagcggagcggagcctggcgggaggcagcgccgcggagccagcgccggacgccgcaagcagactccccggccagcgcaagcactccctggccggcgccggaccctcggggcgccggattcgtcttgtgtgccccacgtcatgcgcgcgggcgtccgcggctctcccgaccagccccagcgcggtgggcccaggctcagaggtcccggcgcctctcgctgaagtagttgggtagccggggctgggggtcgccacgtcgggggcgcggccaggacccgcggagccggtccccgagcgcggggagcggggccgcccgcgccgccccaccattacctccccgggcggcaaggaggagctggtggcggtcgcctcccggctgtggcagcggcggcggcgtgcctgcctggcggccgtcggcgtactcttggccatggcgctcgggctgctcatcgccgtgccgctgctgctgcaggcggcgccccgaggcgccgcgcactatgagatgatgggcacctgccgcatgatctgcgacccttacactgccgcgcccggcggggagcccccgggtgcaaaggcgcagccacccggacccagcaccgccgccctggaagtcatgcaggacctcagcgccaaccctcctcctcctttcatccagggacccaagggcgacccggggcgaccgggcaagccagggccgcgggggccccctggagagccgggcccgcctggacccaggggccctccgggagagaagggcgactcggggcggcccgggctgccagggctgcaactgacggcgggcacggccagcggcgtcggggtggtgggcggcggggccggggtaggtggcgattccgagggtgaagtgaccagtgcgctgagcgccaccttcagcggccccaagatcgccttctatgtgggtctcaagagcccccacgaaggctatgaggtgctgaagttcgatgacgtggtcaccaacctcggcaatcactatgaccccaccacgggcaagttcagctgccaggtacgcggcatctacttcttcacctaccacatcctcatgcgcggcggcgacggcaccagcatgtgggcggacctctgcaagaacgggcaggtccgggccagcgccattgcacaggacgccgaccagaactacgactacgccagtaacagcgtggtgctgcacttggattcaggggacgaagtgtatgtgaagctggatggcgggaaggctcacggaggcaataataacaagtacagcacgttctcgggctttcttctgtacccggattaggggcgcggggggtgcgaggcggggtggctgcaggccgcccggtctccgcccgggcgcggctccttggcaaaggccactctcgattcataacacttcctgacatctcctttggaaaagacaaatccctgcgtcctccctgccccgctcctggcctcagtgcgtctgcgacccaccacgctcagggctgtgctcctggtctccatccccatcccggcaagggaggaagggacgcccgagcccttgaggcggcggcacagactttgcaaacctgattagactggacaggcagggccgggagcctgccctcctcagacagcctcctcccagtgcctagaagcggagggctccgggccctggccagggaggtaggccagagggagcgcgggcttcctggggcgtccttctttgtgacccgaaatacttgtgcagatttccctgtccatcagccaaaaccccacccacagcagaattccagcaaacagaaaattcacctctccacaccgcattccctcctgactcagactcaccgcgatgcattaaattatgtttttagactatg

SEQ ID NO: 6519 - DNA, 2039 bp, Homo sapiens
  source 1..2039: mol_type = unassigned DNA
atcctccccacccacgcacccctgctgagaacatgtctgtgaggttcagggtgggcagagaggagaatgcccagtggtggctcttgtacctcctggtgccggccctgttctgcagggcaggaggctccattcccatccctcagaagttatttggggaggtgacttcccctctgttccccaagccttaccccaacaactttgaaacaaccactgtgatcacagtccccacgggatacagggtgaagctcgtcttccagcagtttgacctggagccttctgaaggctgcttctatgattatgtcaagatctctgctgataagaaaagcctggggaggttctgtgggcaactgggttctccactgggcaaccccccgggaaagaaggaatttatgtcccaagggaacaagatgctgctgaccttccacacagacttctccaacgaggagaatgggaccatcatgttctacaagggcttcctggcctactaccaagctgtggaccttgatgaatgtgcttcccggagcaaatcaggggaggaggatccccagccccagtgccagcacctgtgtcacaactacgttggaggctacttctgttcctgccgtccaggctatgagcttcaggaagacaggcattcctgccaggctgagtgcagcagcgagctgtacacggaggcatcaggctacatctccagcctggagtaccctcggtcctacccccctgacctgcgctgcaactacagcatccgggtggagcggggcctcaccctgcacctcaagttcctggagccttttgatattgatgaccaccagcaagtacactgcccctatgaccagctacagatctatgccaacgggaagaacattggcgagttctgtgggaagcaaaggccccccgacctcgacaccagcagcaatgctgtggatctgctgttcttcacagatgagtcgggggacagccggggctggaagctgcgctacaccaccgagatcatcaagtgcccccagcccaagaccctagacgagttcaccatcatccagaacctgcagcctcagtaccagttccgtgactacttcattgctacctgcaagcaaggctaccagctcatagagggaattcaggtggtggctggagtcgtagacgtttcagctggaagagtctcctggtccaccagctctcaaacttgctgcacacgggtgtacacctgcacagcacagggcatttggaagaatgaacagaagggagagaagattcctcggtgcttgccagtgtgtgggaagcccgtgaaccccgtggaacagaggcagcgcatcatcggagggcaaaaagccaagatgggcaacttcccctggcaggtgttcaccaacatccacgggcgcgggggcggggccctgctgggcgaccgctggatcctcacagctgcccacaccctgtatcccaaggaacacgaagcgcaaagcaacgcctctttggatgtgttcctgggccacacaaatgtggaagagctcatgaagctaggaaatcaccccatccgcagggtcagcgtccacccggactaccgtcaggatgagtcctacaattttgagggggacatcgccctgctggagctggaaaatagtgtcaccctgggtcccaacctcctccccatctgcctccctgacaacgataccttctacgacctgggcttgatgggctatgtcagtggcttcggggtcatggaggagaagattgctcatgacctcaggtttgtccgtctgcccgtagctaatccacaggcctgtgagaactggctccggggaaagaataggatggatgtgttctctcaaaacatgttctgtgctggacacccatctctaaagcaggacgcctgccagggggatagtgggggcgtttttgcagtaagggacccgaacactgatcgctgggtggccacgggcatcgtgtcctggggcatcgggtgcagcaggggctatggcttctacaccaaagtgctcaactacgtggactggatcaagaaagagatggaggaggaggactga

SEQ ID NO: 6520 - DNA, 2425 bp, Homo sapiens
  source 1..2425: mol_type = unassigned DNA
acaaacagggatttcaaaaccaaaactaaattaaagtggaaactcagatcttttgtttatgcaaatagttcattccctccaacattcctccgggaatggtcccccctccactccacagaaaaccctcccctccctgctgtgcatgacgcgggctccctctgcacacagtgcacgaagacgctgtcgggagagcccaggattcaacacgggccttgagaaatgtggctcttgtacctcctggtgccggccctgttctgcagggcaggaggctccattcccatccctcagaagttatttggggaggtgacttcccctctgttccccaagccttaccccaacaactttgaaacaaccactgtgatcacagtccccacgggatacagggtgaagctcgtcttccagcagtttgacctggagccttctgaaggctgcttctatgattatgtcaagatctctgctgataagaaaagcctggggaggttctgtgggcaactgggttctccactgggcaaccccccgggaaagaaggaatttatgtcccaagggaacaagatgctgctgaccttccacacagacttctccaacgaggagaatgggaccatcatgttctacaagggcttcctggcctactaccaagctgtggaccttgatgaatgtgcttcccggagcaaatcaggggaggaggatccccagccccagtgccagcacctgtgtcacaactacgttggaggctacttctgttcctgccgtccaggctatgagcttcaggaagacaggcattcctgccaggctgagtgcagcagcgagctgtacacggaggcatcaggctacatctccagcctggagtaccctcggtcctacccccctgacctgcgctgcaactacagcatccgggtggagcggggcctcaccctgcacctcaagttcctggagccttttgatattgatgaccaccagcaagtacactgcccctatgaccagctacagatctatgccaacgggaagaacattggcgagttctgtgggaagcaaaggccccccgacctcgacaccagcagcaatgctgtggatctgctgttcttcacagatgagtcgggggacagccggggctggaagctgcgctacaccaccgagatcatcaagtgcccccagcccaagaccctagacgagttcaccatcatccagaacctgcagcctcagtaccagttccgtgactacttcattgctacctgcaagcaaggctaccagctcatagaggggtgtacacctgcacagcacagggcatttggaagaatgaacagaagggagagaagattcctcggtgcttgccagtgtgtgggaagcccgtgaaccccgtggaacagaggcagcgcatcatcggagggcaaaaagccaagatgggcaacttcccctggcaggtgttcaccaacatccacgggcgcgggggcggggccctgctgggcgaccgctggatcctcacagctgcccacaccctgtatcccaaggaacacgaagcgcaaagcaacgcctctttggatgtgttcctgggccacacaaatgtggaagagctcatgaagctaggaaatcaccccatccgcagggtcagcgtccacccggactaccgtcaggatgagtcctacaattttgagggggacatcgccctgctggagctggaaaatagtgtcaccctgggtcccaacctcctccccatctgcctccctgacaacgataccttctacgacctgggcttgatgggctatgtcagtggcttcggggtcatggaggagaagattgctcatgacctcaggtttgtccgtctgcccgtagctaatccacaggcctgtgagaactggctccggggaaagaataggatggatgtgttctctcaaaacatgttctgtgctggacacccatctctaaagcaggacgcctgccagggggatagtgggggcgtttttgcagtaagggacccgaacactgatcgctgggtggccacgggcatcgtgtcctggggcatcgggtgcagcaggggctatggcttctacaccaaagtgctcaactacgtggactggatcaagaaagagatggaggaggaggactgagcccagaattcactaggttcgaatccagagagcagtgtggaaaaaaaaaaacaaaaaacaactgaccagttgttgataaccactaagagtctctattaaaattactgatgcagaaagaccgtgtgtgaaattctctttcctgtagtcccattgatgtactttacctgaaacaacccaaagggcccctttctttcttctgaggattgcagaggatatagttatcaatctctagttgtcactttcctcttccactttgataccattgggtcattgaatataactttttccaaataaagttttatgagaaatgccagtgtgcaaaa

SEQ ID NO: 6521 - DNA, 2112 bp, Homo sapiens
  source 1..2112: mol_type = unassigned DNA
ttccctccaacattcctccgggaatggtcccccctccactccacagaaaaccctcccctccctgctgtgcatgacgcgggctccctctgcacacagtgcacgaagacgctgtcgggagagcccaggattcaacacgggccttgagaaatgtggctcttgtacctcctggtgccggccctgttctgcagggcaggaggctccattcccatccctcagaagttatttggggaggtgacttcccctctgttccccaagccttaccccaacaactttgaaacaaccactgtgatcacagtccccacgggatacagggtgaagctcgtcttccagcagtttgacctggagccttctgaaggctgcttctatgattatgtcaagatctctgctgataagaaaagcctggggaggttctgtgggcaactgggttctccactgggcaaccccccgggaaagaaggaatttatgtcccaagggaacaagatgctgctgaccttccacacagacttctccaacgaggagaatgggaccatcatgttctacaagggcttcctggcctactaccaagctgtggaccttgatgaatgtgcttcccggagcaaatcaggggaggaggatccccagccccagtgccagcacctgtgtcacaactacgttggaggctacttctgttcctgccgtccaggctatgagcttcaggaagacaggcattcctgccaggctgagtgcagcagcgagctgtacacggaggcatcaggctacatctccagcctggagtaccctcggtcctacccccctgacctgcgctgcaactacagcatccgggtggagcggggcctcaccctgcacctcaagttcctggagccttttgatattgatgaccaccagcaagtacactgcccctatgaccagctacagatctatgccaacgggaagaacattggcgagttctgtgggaagcaaaggccccccgacctcgacaccagcagcaatgctgtggatctgctgttcttcacagatgagtcgggggacagccggggctggaagctgcgctacaccaccgagatcatcaagtgcccccagcccaagaccctagacgagttcaccatcatccagaacctgcagcctcagtaccagttccgtgactacttcattgctacctgcaagcaaggctaccagctcatagagggaattcaggtggtggctggagtcgtagacgtttcagctggaagagtctcctggtccaccagctctcaaacttgctgcacacgggtgtacacctgcacagcacagggcatttggaagaatgaacagaagggagagaagattcctcggtgcttgccagtgtgtgggaagcccgtgaaccccgtggaacagaggcagcgcatcatcggagggcaaaaagccaagatgggcaacttcccctggcaggtgttcaccaacatccacgggcgcgggggcggggccctgctgggcgaccgctggatcctcacagctgcccacaccctgtatcccaaggaacacgaagcgcaaagcaacgcctctttggatgtgttcctgggccacacaaatgtggaagagctcatgaagctaggaaatcaccccatccgcagggtcagcgtccacccggactaccgtcaggatgagtcctacaattttgagggggacatcgccctgctggagctggaaaatagtgtcaccctgggtcccaacctcctccccatctgcctccctgacaacgataccttctacgacctgggcttgatgggctatgtcagtggcttcggggtcatggaggagaagattgctcatgacctcaggtttgtccgtctgcccgtagctaatccacaggcctgtgagaactggctccggggaaagaataggatggatgtgttctctcaaaacatgttctgtgctggacacccatctctaaagcaggacgcctgccagggggatagtgggggcgtttttgcagtaagggacccgaacactgatcgctgggtggccacgggcatcgtgtcctggggcatcgggtgcagcaggggctatggcttctacaccaaagtgctcaactacgtggactggatcaagaaagagatggaggaggaggactga

SEQ ID NO: 6522 - DNA, 3394 bp, Homo sapiens
  source 1..3394: mol_type = unassigned DNA
atttccaggaacttcctcctcccccaccggccttcaccttttgttccctatcctgggccagttctctcgcaggtcccagatgtccagttccagatgcctggacccagagtgtgggggaaatatctctggagaagccctcactccaaaggctgtccaggcgcaatgtggtggctgcttctctggggagtcctccaggcttgcccaacccggggctccgtcctcttggcccaagagctaccccagcagctgacatcccccgggtacccagagccgtatggcaaaggccaagagagcagcacggacatcaaggctccagagggctttgctgtgaggctcgtcttccaggacttcgacctggagccgtcccaggactgtgcaggggactctgtcacaatctcattcgtcggttcggatccaagccagttctgtggtcagcaaggctcccctctgggcaggccccctggtcagagggagtttgtatcctcagggaggagtttgcggctgaccttccgcacacagccttcctcggagaacaagactgcccacctccacaagggcttcctggccctctaccaaaccgtggctgtgaactatagtcagcccatcagcgaggccagcaggggctctgaggccatcaacgcacctggagacaaccctgccaaggtccagaaccactgccaggagccctattatcaggccgcggcagcaggggcactcacctgtgcaaccccagggacctggaaagacagacaggatggggaggaggttcttcagtgtatgcctgtctgcggacggccagtcacccccattgcccagaatcagacgaccctcggttcttccagagccaagctgggcaacttcccctggcaagccttcaccagtatccacggccgtgggggcggggccctgctgggggacagatggatcctcactgctgcccacaccatctaccccaaggacagtgtttctctcaggaagaaccagagtgtgaatgtgttcttgggccacacagccatagatgagatgctgaaactggggaaccaccctgtccaccgtgtcgttgtgcaccccgactaccgtcagaatgagtcccataactttagcggggacatcgccctcctggagctgcagcacagcatccccctgggccccaacgtcctcccggtctgtctgcccgataatgagaccctctaccgcagcggcttgttgggctacgtcagtgggtttggcatggagatgggctggctaactactgagctgaagtactcgaggctgcctgtagctcccagggaggcctgcaacgcctggctccaaaagagacagagacccgaggtgttttctgacaatatgttctgtgttggggatgagacgcaaaggcacagtgtctgccagggggacagtggcagcgtctatgtggtatgggacaatcatgcccatcactgggtggccacgggcattgtgtcctggggcatagggtgtggcgaagggtatgacttctacaccaaggtgctcagctatgtggactggatcaagggagtgatgaatggcaagaattgaccctgggggcttgaacagggactgaccagcacagtggaggccccaggcaacagagggcctggagtgaggactgaacactggggtaggggttgggggtggggggttgggggaggcagggaaatcctattcacatcactgttgcaccaagccactgcaagagaaacccccacccggcaagcccgccccatcccagacaggaagcagagtcccacagaccgctcctcctcaccctctacctccctgtgctcatgcactaggccccgggaagcctgtacatctcaacaactttcgccttgaatgtccttagaaccgccttcccctacttcatctgttgacacagcttttatactcacctgtggaagagtcagctactcacccgctattagagtatggaggaaggggttttcattgcattgcatttctgaaacattcctaagaccctttagttgaccttcaaatattcaagctattctgcagctccaagatgcaattatagaaacagctccttttttattttatgtcctctatatgccaggtgcttcacctgttatttcacttaatcctcataccatatttgcaaaggatgtgttattatctatgtgtgacaaatgaggaaactgaggctcaggggataaagggacttgcccaagtcccacagctggtgtgtgactgcagagactgtgctcttcccagtgtgctgcaatacttctcaaccctcctctaacctgctgtgtcacccgctttccctcccagcccccacatccttaccattttccctccctgggaattcctgcttctgcgaaaatggtatcctctagctcacactttcctaatggccccatctcctgcagaagccaggtgagcccagcactggactgaagttcttgcagacaccccacctgtgcccctatcatcaggggaactgctccacctgagaggaccaactctttaatttttagtaaaacctggaggtgatgggccgggcgcagtggctcacgcctgtaatcccaacaccttaggagtccgaggtgggtggatcacgaggtcaggagatccagcccatcctggccaacatggtgaaaccccatctctactaaaaatacaaaaattagccgggcgtggtgacacgtgcctgtagtcccagctactcgggaggctgaggcaggagaatcacttgaacctgggaggcggaggttgcagtgagctaagatcacgccactgcactccagcctgcggacagaccaagacttcatcccccccaaaaaaaaaagattggaggtgatttacagtgaaagacacaaataaaatacaactgttcaatggaaatagaaaataaacaccataaaagagagaagagaggtaatttgttagcatcaagagtcaagttgctatatggtcaaaggttaaatttatctctaaaaaatggcaggattcaaagttgtacatacatgtgattacttctgttttttacacccacatacagtacaaaagattattaaaaatattcccaaaaggcaggtgcaatgatgcacacttatacccccagccactcaggaggctgatgcaagaggatcgcttgagcccaggagttgaagtccagcctaagcaacatagtgaaaccccatcgccaaaaatataataataattctctcaaaatactaaacagaggtggttttattgataagattttggctgtttggttttccactattctctattggctaaaatttgtttaatgagcatgaaatgtttttattttattttgcttatttttatgattgcaaaaaatgatatgagtttctccctgccaaggcaaaaaaatatatatatacctata

SEQ ID NO: 6523 - DNA, 1542 bp, Homo sapiens
  source 1..1542: mol_type = unassigned DNA
ctcctcccccaccggccttcaccttttgttccctatcctgggccagttctctcgcaggtcccagatgtccagttccagatgcctggacccagagtgtgggggaaatatctctggagaagccctcactccaaaggctgtccaggcgcaatgtggtggctgcttctctggggagtcctccaggcttgcccaacccggggctccgtcctcttggcccaagagctaccccagcagctgacatcccccgggtacccagagccgtatggcaaaggccaagagagcagcacggacatcaaggctccagagggctttgctgtgaggctcgtcttccaggacttcgacctggagccgtcccaggactgtgcaggggactctgtcacaatctcattcgtcggttcggatccaagccagttctgtggtcagcaaggctcccctctgggcaggccccctggtcagagggagtttgtatcctcagggaggagtttgcggctgaccttccgcacacagccttcctcggagaacaagactgcccacctccacaagggcttcctggccctctaccaaaccgtggctgtgaactatagtcagcccatcagcgaggccagcaggggctctgaggccatcaacgcacctggagacaaccctgccaaggtccagaaccactgccaggagccctattatcaggccgcggcagcaggggcactcacctgtgcaaccccagggacctggaaagacagacaggatggggaggaggttcttcagtgtatgcctgtctgcggacggccagtcacccccattgcccagaatcagacgaccctcggttcttccagagccaagctgggcaacttcccctggcaagccttcaccagtatccacggccgtgggggcggggccctgctgggggacagatggatcctcactgctgcccacaccatctaccccaaggacagtgtttctctcaggaagaaccagagtgtgaatgtgttcttgggccacacagccatagatgagatgctgaaactggggaaccaccctgtccaccgtgtcgttgtgcaccccgactaccgtcagaatgagtcccataactttagcggggacatcgccctcctggagctgcagcacagcatccccctgggccccaacgtcctcccggtctgtctgcccgataatgagaccctctaccgcagcggcttgttgggctacgtcagtgggtttggcatggagatgggctggctaactactgagctgaagtactcgaggctgcctgtagctcccagggaggcctgcaacgcctggctccaaaagagacagagacccgaggtgttttctgacaatatgttctgtgttggggatgaggcaggagaatcacttgaacctgggaggcggaggttgcagtgagctaagatcacgccactgcactccagcctgcggacagaccaagacttcatcccccccaaaaaaaaaagattggaggtgatttacagtgaaagacacaaataaaatacaactgttcaatggaaatagaaaataaacaccataaaagag

SEQ ID NO: 6524 - DNA, 2972 bp, Homo sapiens
  source 1..2972: mol_type = unassigned DNA
attaagcaatcggtgaaattccccattcctcctttccccgctggagccctggatagagggctctctggcctgggaggaggacgctgtccttgtttcaaaagcagagggagctccaagatcaaggctgagtttccctaagtcatggtctcccagccccctctgtttagatcagggaatttcagacatgcacactcgggtagggaatcttatgaacagaaccaggacagggaggctggccggaggttcctgcagagggagcgtcaaggccctgtgctgctgtccctgggggccagaggggttgcccagcatgcccactggcaggagagagggaactgacccacttgctcctaccagcttctgaaggtgacactgagccccaggtgacgccgcaccaccaaagaaggtgcttgtgtttgtcagacaaatacagccaggcctgccaccccttaggctccaaagtccggaggtgcagaaagccaggaccaagagacaggcagctcaccagggtggacaaatcgccagagatgtggtgcattgtcctgttttcacttttggcatgggtttatgctgagcctaccatgtatggggagatcctgtcccctaactatcctcaggcatatcccagtgaggtagagaaatcttgggacatagaagttcctgaagggtatgggattcacctctacttcacccatctggacattgagctgtcagagaactgtgcgtatgactcagtgcagataatctcaggagacactgaagaagggaggctctgtggacagaggagcagtaacaatccccactctccaattgtggaagagttccaagtcccatacaacaaactccaggtgatctttaagtcagacttttccaatgaagagcgttttacggggtttgctgcatactatgttgccacagacataaatgaatgcacagattttgtagatgtcccttgtagccacttctgcaacaatttcattggtggttacttctgctcctgccccccggaatatttcctccatgatgacatgaagaattgcggagttaattgcagtggggatgtattcactgcactgattggggagattgcaagtcccaattatcccaaaccatatccagagaactcaaggtgtgaataccagatccggttggagaaagggttccaagtggtggtgaccttgcggagagaagattttgatgtggaagcagctgactcagcgggaaactgccttgacagtttagtttttgttgcaggagatcggcaatttggtccttactgtggtcatggattccctgggcctctaaatattgaaaccaagagtaatgctcttgatatcatcttccaaactgatctaacagggcaaaaaaagggctggaaacttcgctatcatggagatccaatgccctgccctaaggaagacactcccaattctgtttgggagcctgcgaaggcaaaatatgtctttagagatgtggtgcagataacctgtctggatgggtttgaagttgtggagggacgtgttggtgcaacatctttctattcgacttgtcaaagcaatggaaagtggagtaattccaaactgaaatgtcaacctgtggactgtggcattcctgaatccattgagaatggtaaagttgaagacccagagagcactttgtttggttctgtcatccgctacacttgtgaggagccatattactacatggaaaatggaggaggtggggagtatcactgtgctggtaacgggagctgggtgaatgaggtgctgggcccggagctgccgaaatgtgttccagtctgtggagtccccagagaaccctttgaagaaaaacagaggataattggaggatccgatgcagatattaaaaacttcccctggcaagtcttctttgacaacccatgggctggtggagcgctcattaatgagtactgggtgctgacggctgctcatgttgtggagggaaacagggagccaacaatgtatgttgggtccacctcagtgcagacctcacggctggcaaaatccaagatgctcactcctgagcatgtgtttattcatccgggatggaagctgctggaagtcccagaaggacgaaccaattttgataatgacattgcactggtgcggctgaaagacccagtgaaaatgggacccaccgtctctcccatctgcctaccaggcacctcttccgactacaacctcatggatggggacctgggactgatctcaggctggggccgaacagagaagagagatcgtgctgttcgcctcaaggcggcaaggttacctgtagctcctttaagaaaatgcaaagaagtgaaagtggagaaacccacagcagatgcagaggcctatgttttcactcctaacatgatctgtgctggaggagagaagggcatggatagctgtaaaggggacagtggtggggcctttgctgtacaggatcccaatgacaagaccaaattctacgcagctggcctggtgtcctgggggccccagtgtgggacctatgggctctacacacgggtaaagaactatgttgactggataatgaagactatgcaggaaaatagcaccccccgtgaggactaatccagatacatcccaccagcctctccaagggtggtgaccaatgcattaccttctgttccttatgatattctcattatttcatcatgactgaaagaagacacgagcgaatgatttaaatagaacttgattgttgagacgccttgctagaggtagagtttgatcatagaattgtgctggtcatacatttgtggtctgactccttggggtcctttccccggagtacctattgtagataacactatgggtggggcactcctttcttgcactattccacagggataccttaattctttgtttcctctttacctgttcaaaattccatttacttgatcattctcagtatccactgtctatgtacaataaaggatgtttataagcaaa

SEQ ID NO: 6525 - DNA, 2635 bp, Homo sapiens
  source 1..2635: mol_type = unassigned DNA
gtttagatcagggaatttcagacatgcacactcgggtagggaatcttatgaacagaaccaggacagggaggctggccggaggttcctgcagagggagcgtcaaggccctgtgctgctgtccctgggggccagaggggttgcccagcatgcccactggcaggagagagggaactgacccacttgctcctaccagcttctgaaggctccaaagtccggaggtgcagaaagccaggaccaagagacaggcagctcaccagggtggacaaatcgccagagatgtggtgcattgtcctgttttcacttttggcatgggtttatgctgagcctaccatgtatggggagatcctgtcccctaactatcctcaggcatatcccagtgaggtagagaaatcttgggacatagaagttcctgaagggtatgggattcacctctacttcacccatctggacattgagctgtcagagaactgtgcgtatgactcagtgcagataatctcaggagacactgaagaagggaggctctgtggacagaggagcagtaacaatccccactctccaattgtggaagagttccaagtcccatacaacaaactccaggtgatctttaagtcagacttttccaatgaagagcgttttacggggtttgctgcatactatgttgccacagacataaatgaatgcacagattttgtagatgtcccttgtagccacttctgcaacaatttcattggtggttacttctgctcctgccccccggaatatttcctccatgatgacatgaagaattgcggagttaattgcagtggggatgtattcactgcactgattggggagattgcaagtcccaattatcccaaaccatatccagagaactcaaggtgtgaataccagatccggttggagaaagggttccaagtggtggtgaccttgcggagagaagattttgatgtggaagcagctgactcagcgggaaactgccttgacagtttagtttttgttgcaggagatcggcaatttggtccttactgtggtcatggattccctgggcctctaaatattgaaaccaagagtaatgctcttgatatcatcttccaaactgatctaacagggcaaaaaaagggctggaaacttcgctatcatggagatccaatgccctgccctaaggaagacactcccaattctgtttgggagcctgcgaaggcaaaatatgtctttagagatgtggtgcagataacctgtctggatgggtttgaagttgtggagggacgtgttggtgcaacatctttctattcgacttgtcaaagcaatggaaagtggagtaattccaaactgaaatgtcaacctgtggactgtggcattcctgaatccattgagaatggtaaagttgaagacccagagagcactttgtttggttctgtcatccgctacacttgtgaggagccatattactacatggaaaatggaggaggtggggagtatcactgtgctggtaacgggagctgggtgaatgaggtgctgggcccggagctgccgaaatgtgttccagtctgtggagtccccagagaaccctttgaagaaaaacagaggataattggaggatccgatgcagatattaaaaacttcccctggcaagtcttctttgacaacccatgggctggtggagcgctcattaatgagtactgggtgctgacggctgctcatgttgtggagggaaacagggagccaacaatgtatgttgggtccacctcagtgcagacctcacggctggcaaaatccaagatgctcactcctgagcatgtgtttattcatccgggatggaagctgctggaagtcccagaaggacgaaccaattttgataatgacattgcactggtgcggctgaaagacccagtgaaaatgggacccaccgtctctcccatctgcctaccaggcacctcttccgactacaacctcatggatggggacctgggactgatctcaggctggggccgaacagagaagagagatcgtgctgttcgcctcaaggcggcaaggttacctgtagctcctttaagaaaatgcaaagaagtgaaagtggagaaacccacagcagatgcagaggcctatgttttcactcctaacatgatctgtgctggaggagagaagggcatggatagctgtaaaggggacagtggtggggcctttgctgtacaggatcccaatgacaagaccaaattctacgcagctggcctggtgtcctgggggccccagtgtgggacctatgggctctacacacgggtaaagaactatgttgactggataatgaagactatgcaggaaaatagcaccccccgtgaggactaatccagatacatcccaccagcctctccaagggtggtgaccaatgcattaccttctgttccttatgatattctcattatttcatcatgactgaaagaagacacgagcgaatgatttaaatagaacttgattgttgagacgccttgctagaggtagagtttgatcatagaattgtgctggtcatacatttgtggtctgactccttggggtcctttccccggagtacctattgtagataacactatgggtggggcactcctttcttgcactattccacagggataccttaattctt

SEQ ID NO: 6526 - DNA, 2844 bp, Homo sapiens
  source 1..2844: mol_type = unassigned DNA
gtttagatcagggaatttcagacatgcacactcgggtagggaatcttatgaacagaaccaggacagggaggctggccggaggttcctgcagagggagcgtcaaggccctgtgctgctgtccctgggggccagaggggttgcccagcatgcccactggcaggagagagggaactgacccacttgctcctaccagcttctgaaggtgacactgagccccaggtgacgccgcaccaccaaagaaggtgcttgtgtttgtcagacaaatacagccaggcctgccaccccttaggctccaaagtccggaggtgcagaaagccaggaccaagagacaggcagctcaccagggtggacaaatcgccagagatgtggtgcattgtcctgttttcacttttggcatgggtttatgctgagcctaccatgtatggggagatcctgtcccctaactatcctcaggcatatcccagtgaggtagagaaatcttgggacatagaagttcctgaagggtatgggattcacctctacttcacccatctggacattgagctgtcagagaactgtgcgtatgactcagtgcagataatctcaggagacactgaagaagggaggctctgtggacagaggagcagtaacaatccccactctccaattgtggaagagttccaagtcccatacaacaaactccaggtgatctttaagtcagacttttccaatgaagagcgttttacggggtttgctgcatactatgttgccacagataaagatgaatgtagtggtagggctcaactctggaatcatatgtcagatgtcccttgtagccacttctgcaacaatttcattggtggttacttctgctcctgccccccggaatatttcctccatgatgacatgaagaattgcggagttaattgcagtggggatgtattcactgcactgattggggagattgcaagtcccaattatcccaaaccatatccagagaactcaaggtgtgaataccagatccggttggagaaagggttccaagtgcatctttctctgttgctcaagctggagtgcagtggtgcaatcacagctcactgtagccttgatctcttgggctcaattgcaggagatcggcaatttggtccttactgtggtcatggattccctgggcctctaaatattgaaaccaagagtaatgctcttgatatcatcttccaaactgatctaacagggcaaaaaaagggctggaaacttcgctatcatggagatccaatgccctgccctaaggaagacactcccaattctgtttgggagcctgcgaaggcaaaatatgtctttagagatgtggtgcagataacctgtctggatgggtttgaagttgtggagggacgtgttggtgcaacatctttctattcgacttgtcaaagcaatggaaagtggagtaattccaaactgaaatgtcaacctgtggactgtggcattcctgaatccattgagaatggtaaagttgaagacccagagagcactttgtttggttctgtcatccgctacacttgtgaggagccatattactacatggaaaatggaggaggtggagaagagagagagagaggggagtatcactgtgctggtaacgggagctgggtgaatgaggtgctgggcccggagctgccgaaatgtgttccagtctgtggagtccccagagaaccctttgaagaaaaacagaggataattggaggatccgatgcagatattaaaaacttcccctggcaagtcttctttgacaacccatgggctggtggagcgctcattaatgagtactgggtgctgacggctgctcatgttgtggagggaaacagggagccaacaatgtatgttgggtccacctcagtgcagacctcacggctggcaaaatccaagatgctcactcctgagcatgtgtttattcatccgggatggaagctgctggaagtcccagaaggacgaaccaattttgataatgacattgcactggtgcggctgaaagacccagtgaaaatgggacccaccgtctctcccatctgcctaccaggcacctcttccgactacaacctcatggatggggacctgggactgatctcaggctggggccgaacagagaagagagatcgtgctgttcgcctcaaggcggcaaggttacctgtagctcctttaagaaaatgcaaagaagtgaaagtggagaaacccacagcagatgcagaggcctatgttttcactcctaacatgatctgtgctggaggagagaagggcatggatagctgtaaaggggacagtggtggggcctttgctgtacaggatcccaatgacaagaccaaattctacgcagctggcctggtgtcctgggggccccagtgtgggacctatgggctctacacacgggtaaagaactatgttgactggataatgaagactatgcaggaaaatagcaccccccgtgaggactaatccagatacatcccaccagcctctccaagggtggtgaccaatgcattaccttctgttccttatgatattctcattatttcatcatgactgaaagaagacacgagcgaatgatttaaatagaacttgattgttgagacgccttgctagaggtagagtttgatcatagaattgtgctggtcatacatttgtggtctgactccttggggtcctttccccggagtacctattgtagataacactatgggtggggcactcctttcttgcactattccacagggataccttaattctttgtttcctctttacctgttcaaaattccatttacttgatcattctcagtatccactgtctatgtacaataaaggatgtttataagc

SEQ ID NO: 6527 - DNA, 1034 bp, Homo sapiens
  source 1..1034: mol_type = unassigned DNA
agacagggctgcttgaggagatgaggtgatcacggttaaagaagaggggctgtcctacatggatgatcatgatgcgccaagactgttgaaaacctgagtggaaatgggagcatcgttcttgagggcaggagagagactgataccgcgggggtggggctggtggaggacaatagaggaagaagaaaactgggagaaagtactcgattcctttggagaaaaattaggagaaagtctagagaagcaatgagggaaggatacaatttagctatagtctagaaagttagtcgaagttaactagggagggtgtgaggggcacggtgccatgtggggatgttggtgatatggccctgtgtgttatacctttgaaggtgacactgagccccaggtgacgccgcaccaccaaagaaggtgcttgtgtttgtcagacaaatacagccaggcctgccaccccttaggctccaaagtccggaggtgcagaaagccaggaccaagagacaggcagctcaccagggtggacaaatcgccagagatgtggtgcattgtcctgttttcacttttggcatgggtttatgctgagcctaccatgtatggggagatcctgtcccctaactatcctcaggcatatcccagtgaggtagagaaatcttgggacatagaagttcctgaagggtatgggattcacctctacttcacccatctggacattgagctgtcagagaactgtgcgtatgactcagtgcagataatctcaggagacactgaagaagggaggctctgtggacagaggagcagtaacaatccccactctccaattgtggaagagttccaagtcccatacaacaaactccaggtgatctttaagtcagacttttccaatgaagagcgttttacggggtttgctgcatactatgttgccacagacataaatgaatgcacagattttgtagatgtcccttgtagccacttctgcaacaatttcattggtggttacttctgctcctgccccccggaatatttcctccatgatgacatga

SEQ ID NO: 6528 - DNA, 3076 bp, Homo sapiens
  source 1..3076: mol_type = unassigned DNA
agaaaaataaaaagaatgcagcaggccaggttagcaggaacgttaagacggtgacggagaacagcaaagcctggaagcaagccgccgtggagaaggaagaactgtgctgagtacttcactctgttgcccaggctggagtgcagcggcacaatcacagctcactgcagtttcaacttcctgggttcaagtgatcctcctgcctgagcctcccaagtagctaggactataggctcctcctggctgttacactttctcagaccttccttgattatgatgacctcgaagttttgaggagtactgggaaagagtattataggatgccccctactggaatttgtcagatgtttttctcatgattatacagggattatggcttttggggaggaagatctcagagggtctcaccatgttgcccaggctgatctcaaactcctgaactcaagcaaccctcctgctttggcctcctaaagtattggtattacaggtgtgagccaccacacctggcccacaggacatggattctgaacaactggcataaatcgactggcctcaaggctccaaagtccggaggtgcagaaagccaggaccaagagacaggcagctcaccagggtggacaaatcgccagagatgtggtgcattgtcctgttttcacttttggcatgggtttatgctgagcctaccatgtatggggagatcctgtcccctaactatcctcaggcatatcccagtgaggtagagaaatcttgggacatagaagttcctgaagggtatgggattcacctctacttcacccatctggacattgagctgtcagagaactgtgcgtatgactcagtgcagataatctcaggagacactgaagaagggaggctctgtggacagaggagcagtaacaatccccactctccaattgtggaagagttccaagtcccatacaacaaactccaggtgatctttaagtcagacttttccaatgaagagcgttttacggggtttgctgcatactatgttgccacagacataaatgaatgcacagattttgtagatgtcccttgtagccacttctgcaacaatttcattggtggttacttctgctcctgccccccggaatatttcctccatgatgacatgaagaattgcggagttaattgcagtggggatgtattcactgcactgattggggagattgcaagtcccaattatcccaaaccatatccagagaactcaaggtgtgaataccagatccggttggagaaagggttccaagtggtggtgaccttgcggagagaagattttgatgtggaagcagctgactcagcgggaaactgccttgacagtttagtttttgttgcaggagatcggcaatttggtccttactgtggtcatggattccctgggcctctaaatattgaaaccaagagtaatgctcttgatatcatcttccaaactgatctaacagggcaaaaaaagggctggaaacttcgctatcatggagatccaatgccctgccctaaggaagacactcccaattctgtttgggagcctgcgaaggcaaaatatgtctttagagatgtggtgcagataacctgtctggatgggtttgaagttgtggagggacgtgttggtgcaacatctttctattcgacttgtcaaagcaatggaaagtggagtaattccaaactgaaatgtcaacctgtggactgtggcattcctgaatccattgagaatggtaaagttgaagacccagagagcactttgtttggttctgtcatccgctacacttgtgaggagccatattactacatggaaaatggaggaggtggggagtatcactgtgctggtaacgggagctgggtgaatgaggtgctgggcccggagctgccgaaatgtgttccagtctgtggagtccccagagaaccctttgaagaaaaacagaggataattggaggatccgatgcagatattaaaaacttcccctggcaagtcttctttgacaacccatgggctggtggagcgctcattaatgagtactgggtgctgacggctgctcatgttgtggagggaaacagggagccaacaatgtatgttgggtccacctcagtgcagacctcacggctggcaaaatccaagatgctcactcctgagcatgtgtttattcatccgggatggaagctgctggaagtcccagaaggacgaaccaattttgataatgacattgcactggtgcggctgaaagacccagtgaaaatgggacccaccgtctctcccatctgcctaccaggcacctcttccgactacaacctcatggatggggacctgggactgatctcaggctggggccgaacagagaagagagatcgtgctgttcgcctcaaggcggcaaggttacctgtagctcctttaagaaaatgcaaagaagtgaaagtggagaaacccacagcagatgcagaggcctatgttttcactcctaacatgatctgtgctggaggagagaagggcatggatagctgtaaaggggacagtggtggggcctttgctgtacaggatcccaatgacaagaccaaattctacgcagctggcctggtgtcctgggggccccagtgtgggacctatgggctctacacacgggtaaagaactatgttgactggataatgaagactatgcaggaaaatagcaccccccgtgaggactaatccagatacatcccaccagcctctccaagggtggtgaccaatgcattaccttctgttccttatgatattctcattatttcatcatgactgaaagaagacacgagcgaatgatttaaatagaacttgattgttgagacgccttgctagaggtagagtttgatcatagaattgtgctggtcatacatttgtggtctgactccttggggtcctttccccggagtacctattgtagataacactatgggtggggcactcctttcttgcactattccacagggataccttaattctttgtttcctctttacctgttcaaaattccatttacttgatcattctcagtatccactgtctatgtacaataaaggatgtttataagcaaa

SEQ ID NO: 6529 - DNA, 667 bp, Homo sapiens
  source 1..667: mol_type = unassigned DNA
gtcatttggctgtcccttttctccttcctcgcacaaccctgtatcagtggggcagcacttccttctcagaccgcttgtcccagggtccctgccttcccctagtgaaagaagctcctgcctccatcggtgggcgttgggagcatcagcggagatgcacgcaatgataaacagcagacagggctgcttgaggagatgaggtgacactgagccccaggtgacgccgcaccaccaaagaaggtgcttgtgtttgtcagacaaatacagccaggcctgccaccccttaggctccaaagtccggaggtgcagaaagccaggaccaagagacaggcagctcaccagggtggacaaatcgccagagatgtggtgcattgtcctgttttcacttttggcatgggtttatgctgagcctaccatgtatggggagatcctgtcccctaactatcctcaggcatatcccagtgaggtagagaaatcttgggacatagaagttcctgaagggtatgggattcacctctacttcacccatctggacattgagctgtcagagaactgtgcgtatgactcagtgcagataatctcaggagacactgaagaagggaggctctgtggacagaggagcagtaacaatccccactctccaattgtggaagagttccaagtcccatac

SEQ ID NO: 6530 - DNA, 573 bp, Homo sapiens
  source 1..573: mol_type = unassigned DNA
gtcatttggctgtcccttttctccttcctcgcacaaccctgtatcagtggggcagcacttccttctcagaccgcttgtcccagggtccctgccttcccctagtgaaagaagctcctgcctccatcggtgggcgttgggagcatcagcggagatgcacgcaatgataaacagcagacagggctgcttgaggagatgaggctccaaagtccggaggtgcagaaagccaggaccaagagacaggcagctcaccagggtggacaaatcgccagagatgtggtgcattgtcctgttttcacttttggcatgggtttatgctgagcctaccatgtatggggagatcctgtcccctaactatcctcaggcatatcccagtgaggtagagaaatcttgggacatagaagttcctgaagggtatgggattcacctctacttcacccatctggacattgagctgtcagagaactgtgcgtatgactcagtgcagataatctcaggagacactgaagaagggaggctctgtggacagaggagcagtaacaatccccactctccaattgtggaagagttccaagt

SEQ ID NO: 6531 - DNA, 2850 bp, Homo sapiens
  source 1..2850: mol_type = unassigned DNA
gagcgtgggggcagtacacaaagcctgtgggggagatctattgaccctatagatatattagcatcagggagacagggcaaaggtttcacccttcagttcagtccccaatccctgcttattatttccctaacagaagaccatcccccttgccactccctggtttttcttctctggcagcaatgaagcagctgctgacccagctctagttttcgggaagtcagatgaccttttccctcccgcggctctctacctctcgccgcccctagggaggacaccatgggcccactgatggttcttttttgcctgctgttcctgtacccaggtctggcagactcggctccctcctgccctcagaacgtgaatatctcgggtggcaccttcaccctcagccatggctgggctcctgggagccttctcacctactcctgcccccagggcctgtacccatccccagcatcacggctgtgcaagagcagcggacagtggcagaccccaggagccacccggtctctgtctaaggcggtctgcaaacctgtgcgctgtccagcccctgtctcctttgagaatggcatttataccccacggctggggtcctatcccgtgggtggcaatgtgagcttcgagtgtgaggatggcttcatattgcggggctcgcctgtgcgtcagtgtcgccccaacggcatgtgggatggagaaacagctgtgtgtgataatggggctggccactgccccaacccaggcatttcactgggcgcagtgcggacaggcttccgctttggtcatggggacaaggtccgctatcgctgctcctcgaatcttgtgctcacggggtcttcggagcgggagtgccagggcaacggggtctggagtggaacggagcccatctgccgccaaccctactcttatgacttccctgaggacgtggcccctgccctgggcacttccttctcccacatgcttggggccaccaatcccacccagaagacaaaggaaagcctgggccgtaaaatccaaatccagcgctctggtcatctgaacctctacctgctcctggactgttcgcagagtgtgtcggaaaatgactttctcatcttcaaggagagcgcctccctcatggtggacaggatcttcagctttgagatcaatgtgagcgttgccattatcacctttgcctcagagcccaaagtcctcatgtctgtcctgaacgacaactcccgggatatgactgaggtgatcagcagcctggaaaatgccaactataaagatcatgaaaatggaactgggactaacacctatgcggccttaaacagtgtctatctcatgatgaacaaccaaatgcgactcctcggcatggaaacgatggcctggcaggaaatccgacatgccatcatccttctgacagatggaaagtccaatatgggtggctctcccaagacagctgttgaccatatcagagagatcctgaacatcaaccagaagaggaatgactatctggacatctatgccatcggggtgggcaagctggatgtggactggagagaactgaatgagctagggtccaagaaggatggtgagaggcatgccttcattctgcaggacacaaaggctctgcaccaggtctttgaacatatgctggatgtctccaagctcacagacaccatctgcggggtggggaacatgtcagcaaacgcctctgaccaggagaggacaccctggcatgtcactattaagcccaagagccaagagacctgccggggggccctcatctccgaccaatgggtcctgacagcagctcattgcttccgcgatggcaacgaccactccctgtggagggtcaatgtgggagaccccaaatcccagtggggcaaagaattccttattgagaaggcggtgatctccccagggtttgatgtctttgccaaaaagaaccagggaatcctggagttctatggtgatgacatagctctgctgaagctggcccagaaagtaaagatgtccacccatgccaggcccatctgccttccctgcacgatggaggccaatctggctctgcggagacctcaaggcagcacctgtagggaccatgagaatgaactgctgaacaaacagagtgttcctgctcattttgtcgccttgaatgggagcaaactgaacattaaccttaagatgggagtggagtggacaagctgtgccgaggttgtctcccaagaaaaaaccatgttccccaacttgacagatgtcagggaggtggtgacagaccagttcctatgcagtgggacccaggaggatgagagtccctgcaagggagaatctgggggagcagttttccttgagcggagattcaggttttttcaggtgggtctggtgagctggggtctttacaacccctgccttggctctgctgacaaaaactcccgcaaaagggcccctcgtagcaaggtcccgccgccacgagactttcacatcaatctcttccgcatgcagccctggctgaggcagcacctgggggatgtcctgaattttttacccctctagccatggccactgagccctctgctgccctgccagaatctgccgcccctccatcttctacctctgaatggccacccttagaccctgtgatccatcctctctcctagctgagtaaatccgggtctctaggatgccagaggcagcgcacacaagctgggaaatcctcagggctcctaccagcaggactgcctcgctgccccacctcccgctccttggcctgtccccagattccttccctggttgacttgactcatgcttgtttcactttcacatggaatttcccagttatgaaattaataaaaatcaatggtttccaca

SEQ ID NO: 6532 - DNA, 2785 bp, Homo sapiens
  source 1..2785: mol_type = unassigned DNA
agtacacaaagcctgtgggggagatctattgaccctatagatatattagcatcagggagacagggcaaaggtttcacccttcagttcagtccccaatccctgcttattatttccctaacagaagaccatcccccttgccactccctggtttttcttctctggcagcaatgaagcagctgctgacccagctctagttttcgggaagtcagatgaccttttccctcccgcggctctctacctctcgccgcccctagggaggacaccatgggcccactgatggttcttttttgcctgctgttcctgtacccaggtctggcagactcggctccctcctgccctcagaacgtgaatatctcgggtggcaccttcaccctcagccatggctgggctcctgggagccttctcacctactcctgcccccagggcctgtacccatccccagcatcacggctgtgcaagagcagcggacagtggcagaccccaggagccacccggtctctgtctaaggcggtctgcaaacctgtgcgctgtccagcccctgtctcctttgagaatggcatttataccccacggctggggtcctatcccgtgggtggcaatgtgagcttcgagtgtgaggatggcttcatattgcggggctcgcctgtgcgtcagtgtcgccccaacggcatgtgggatggagaaacagctgtgtgtgataatggggctggccactgccccaacccaggcatttcactgggcgcagtgcggacaggcttccgctttggtcatggggacaaggtccgctatcgctgctcctcgaatcttgtgctcacggggtcttcggagcgggagtgccagggcaacggggtctggagtggaacggagcccatctgccgccaaccctactcttatgacttccctgaggacgtggcccctgccctgggcacttccttctcccacatgcttggggccaccaatcccacccagaagacaaaggaaagcctgggccgtaaaatccaaatccagcgctctggtcatctgaacctctacctgctcctggactgttcgcagagtgtgtcggaaaatgactttctcatcttcaaggagagcgcctccctcatggtggacaggatcttcagctttgagatcaatgtgagcgttgccattatcacctttgcctcagagcccaaagtcctcatgtctgtcctgaacgacaactcccgggatatgactgaggtgatcagcagcctggaaaatgccaactataaagatcatgaaaatggaactgggactaacacctatgcggccttaaacagtgtctatctcatgatgaacaaccaaatgcgactcctcggcatggaaacgatggcctggcaggaaatccgacatgccatcatccttctgacagatggaaagtccaatatgggtggctctcccaagacagctgttgaccatatcagagagatcctgaacatcaaccagaagaggaatgactatctggacatctatgccatcggggtgggcaagctggatgtggactggagagaactgaatgagctagggtccaagaaggatggtgagaggcatgccttcattctgcaggacacaaaggctctgcaccaggtctttgaacatatgctggatgtctccaagctcacagacaccatctgcggggtggggaacatgtcagcaaacgcctctgaccaggagaggacaccctggcatgtcactattaagcccaagagccaagagacctgccggggggccctcatctccgaccaatgggtcctgacagcagctcattgcttccgcgatggcaacgaccactccctgtggagggtcaatgtgggagaccccaaatcccagtggggcaaagaattccttattgagaaggcggtgatctccccagggtttgatgtctttgccaaaaagaaccagggaatcctggagttctatggtgatgacatagctctgctgaagctggcccagaaagtaaagatgtccacccatgccaggcccatctgccttccctgcacgatggaggccaatctggctctgcggagacctcaaggcagcacctgtagggaccatgagaatgaactgctgaacaaacagagtgttcctgctcattttgtcgccttgaatgggagcaaactgaacattaaccttaagatgggagtggagtggacaagctgtgccgaggttgtctcccaagaaaaaaccatgttccccaacttgacagatgtcagggaggtggtgacagaccagttcctatgcagtgggacccaggaggatgagagtccctgcaagggtgggtctggtgagctggggtctttacaacccctgccttggctctgctgacaaaaactcccgcaaaagggcccctcgtagcaaggtcccgccgccacgagactttcacatcaatctcttccgcatgcagccctggctgaggcagcacctgggggatgtcctgaattttttacccctctagccatggccactgagccctctgctgccctgccagaatctgccgcccctccatcttctacctctgaatggccacccttagaccctgtgatccatcctctctcctagctgagtaaatccgggtctctaggatgccagaggcagcgcacacaagctgggaaatcctcagggctcctaccagcaggactgcctcgctgccccacctcccgctccttggcctgtccccagattccttccctggttgacttgactcatgcttgtttcactttcacatggaatttcccagttatgaaattaataaaaatcaatggtttcc

SEQ ID NO: 6533 - DNA, 2835 bp, Homo sapiens
  source 1..2835: mol_type = unassigned DNA
acacaaagcctgtgggggagatctattgaccctatagatatattagcatcagggagacagggcaaaggtttcacccttcagttcagtccccaatccctgcttattatttccctaacagaagaccatcccccttgccactccctggtttttcttctctggcagcaatgaagcagctgctgacccagctctagttttcgggaagtcagatgaccttttccctcccgcggctctctacctctcgccgcccctagggaggacaccatgggcccactgatggttcttttttgcctgctgttcctgtacccaggtctggcagactcggctccctcctgccctcagaacgtgaatatctcgggtggcaccttcaccctcagccatggctgggctcctgggagccttctcacctactcctgcccccagggcctgtacccatccccagcatcacggctgtgcaagagcagcggacagtggcagaccccaggagccacccggtctctgtctaaggcggtctgcaaacctgtgcgctgtccagcccctgtctcctttgagaatggcatttataccccacggctggggtcctatcccgtgggtggcaatgtgagcttcgagtgtgaggatggcttcatattgcggggctcgcctgtgcgtcagtgtcgccccaacggcatgtgggatggagaaacagctgtgtgtgataatggggctggccactgccccaacccaggcatttcactgggcgcagtgcggacaggcttccgctttggtcatggggacaaggtccgctatcgctgctcctcgaatcttgtgctcacggggtcttcggagcgggagtgccagggcaacggggtctggagtggaacggagcccatctgccgccaaccctactcttatgacttccctgaggacgtggcccctgccctgggcacttccttctcccacatgcttggggccaccaatcccacccagaagacaaaggaaagcctgggccgtaaaatccaaatccagcgctctggtcatctgaacctctacctgctcctggactgttcgcagagtgtgtcggaaaatgactttctcatcttcaaggagagcgcctccctcatggtggacaggatcttcagctttgagatcaatgtgagcgttgccattatcacctttgcctcagagcccaaagtcctcatgtctgtcctgaacgacaactcccgggatatgactgaggtgatcagcagcctggaaaatgccaactataaagatcatgaaaatggaactgggactaacacctatgcagccttaaacagtgtctatctcatgatgaacaaccaaatgcgactcctcggcatggaaacgatggcctggcaggaaatccgacatgccatcatccttctgacagatggaaagtccaatatgggtggctctcccaagacagctgttgaccatatcagagagatcctgaacatcaaccagaagaggaatgactatctggacatctatgccatcggggtgggcaagctggatgtggactggagagaactgaatgagctagggtccaagaaggatggtgagaggcatgccttcattctgcaggacacaaaggctctgcaccaggtctttgaacatatgctggatgtctccaagctcacagacaccatctgcggggtggggaacatgtcagcaaacgcctctgaccaggagaggacaccctggcatgtcactattaagcccaagagccaagagacctgccggggggccctcatctccgaccaatgggtcctgacagcagctcattgcttccgcgatggcaacgaccactccctgtggagggtcaatgtgggagaccccaaatcccagtggggcaaagaattccttattgagaaggcggtgatctccccagggtttgatgtctttgccaaaaagaaccagggaatcctggagttctatggtgatgacatagctctgctgaagctggcccagaaagtaaagatgtccacccatgccaggcccatctgccttccctgcacgatggaggccaatctggctctgcggagacctcaaggcagcacctgtagggaccatgagaatgaactgctgaacaaacagagtgttcctgctcattttgtcgccttgaatgggagcaaactgaacattaaccttaagatgggagtggagtggacaagctgtgccgaggttgtctcccaagaaaaaaccatgttccccaacttgacagatgtcagggaggtggtgacagaccagttcctatgcagtgggacccaggaggatgagagtccctgcaagggagaatctgggggagcagttttccttgagcggagattcaggttttttcaggtgggtctggtgagctggggtctttacaacccctgccttggctctgctgacaaaaactcccgcaaaagggcccctcgtagcaaggtcccgccgccacgagactttcacatcaatctcttccgcatgcagccctggctgaggcagcacctgggggatgtcctgaattttttacccctctagccatggccactgagccctctgctgccctgccagaatctgccgcccctccatcttctacctctgaatggccacccttagaccctgtgatccatcctctctcctagctgagtaaatccgggtctctaggatgccagaggcagcgcacacaagctgggaaatcctcagggctcctaccagcaggactgcctcgctgccccacctcccgctccttggcctgtccccagattccttccctggttgacttgactcatgcttgtttcactttcacatggaatttcccagttatgaaattaataaaaatcaatggtttccaca

SEQ ID NO: 6534 - DNA, 1895 bp, Homo sapiens
  source 1..1895: mol_type = unassigned DNA
tgatggttcttttttgcctgctgttcctgtacccagctggccactgccccaacccaggcatttcactgggcgcagtgcggacaggcttccgctttggtcatggggacaaggtccgctatcgctgctcctcgaatcttgtgctcacggggtcttcggagcgggagtgccagggcaacggggtctggagtggaacggagcccatctgccgccaaccctactcttatgacttccctgaggacgtggcccctgccctgggcacttccttctcccacatgcttggggccaccaatcccacccagaagacaaaggatcatgaaaatggaactgggactaacacctatgcagccttaaacagtgtctatctcatgatgaacaaccaaatgcgactcctcggcatggaaacgatggcctggcaggaaatccgacatgccatcatccttctgacagatggaaagtccaatatgggtggctctcccaagacagctgttgaccatatcagagagatcctgaacatcaaccagaagaggaatgactatctggacatctatgccatcggggtgggcaagctggatgtggactggagagaactgaatgagctagggtccaagaaggatggtgagaggcatgccttcattctgcaggacacaaaggctctgcaccaggtctttgaacatatgctggatgtctccaagctcacagacaccatctgcggggtggggaacatgtcagcaaacgcctctgaccaggagaggacaccctggcatgtcactattaagcccaagagccaagagacctgccggggggccctcatctccgaccaatgggtcctgacagcagctcattgcttccgcgatggcaacgaccactccctgtggagggtcaatgtgggagaccccaaatcccagtggggcaaagaattccttattgagaaggcggtgatctccccagggtttgatgtctttgccaaaaagaaccagggaatcctggagttctatggtgatgacatagctctgctgaagctggcccagaaagtaaagatgtccacccatgccaggcccatctgccttccctgcacgatggaggccaatctggctctgcggagacctcaaggcagcacctgtagggaccatgagaatgaactgctgaacaaacagagtgttcctgctcattttgtcgccttgaatgggagcaaactgaacattaaccttaagatgggagtggagtggacaagctgtgccgaggttgtctcccaagaaaaaaccatgttccccaacttgacagatgtcagggaggtggtgacagaccagttcctatgcagtgggacccaggaggatgagagtccctgcaagggagaatctgggggagcagttttccttgagcggagattcaggttttttcaggtgggtctggtgagctggggtctttacaacccctgccttggctctgctgacaaaaactcccgcaaaagggcccctcgtagcaaggtcccgccgccacgagactttcacatcaatctcttccgcatgcagccctggctgaggcagcacctgggggatgtcctgaattttttacccctctagccatggccactgagccctctgctgccctgccagaatctgccgcccctccatcttctacctctgaatggccacccttagaccctgtgatccatcctctctcctagctgagtaaatccgggtctctaggatgccagaggcagcgcacacaagctgggaaatcctcagggctcctaccagcaggactgcctcgctgccccacctcccgctccttggcctgtccccagattccttccctggttgacttgactcatgcttgtttcactttcacatggaatttcccagttatgaaattaataaaaatcaatggtttccaca

SEQ ID NO: 6535 - DNA, 2835 bp, Homo sapiens
  source 1..2835: mol_type = unassigned DNA
acacaaagcctgtgggggagatctattgaccctatagatatattagcatcagggagacagggcaaaggtttcacccttcagttcagtccccaatccctgcttattatttccctaacagaagaccatcccccttgccactccctggtttttcttctctggcagcaatgaagcagctgctgacccagctctagttttcgggaagtcagatgaccttttccctcccgcggctctctacctctcgccgcccctagggaggacaccatgggcccactgatggttcttttttgcctgctgttcctgtacccaggtctggcagactcggctccctcctgccctcagaacgtgaatatctcgggtggcaccttcaccctcagccatggctgggctcctgggagccttctcacctactcctgcccccagggcctgtacccatccccagcatcacggctgtgcaagagcagcggacagtggcagaccccaggagccacccggtctctgtctaaggcggtctgcaaacctgtgcgctgtccagcccctgtctcctttgagaatggcatttataccccacggctggggtcctatcccgtgggtggcaatgtgagcttcgagtgtgaggatggcttcatattgcggggctcgcctgtgcgtcagtgtcgccccaacggcatgtgggatggagaaacagctgtgtgtgataatggggctggccactgccccaacccaggcatttcactgggcgcagtgcggacaggcttccgctttggtcatggggacaaggtccgctatcgctgctcctcgaatcttgtgctcacggggtcttcggagcgggagtgccagggcaacggggtctggagtggaacggagcccatctgccgccaaccctactcttatgacttccctgaggacgtggcccctgccctgggcacttccttctcccacatgcttggggccaccaatcccacccagaagacaaaggaaagcctgggccgtaaaatccaaatccagcgctctggtcatctgaacctctacctgctcctggactgttcgcagagtgtgtcggaaaatgactttctcatcttcaaggagagcgcctccctcatggtggacaggatcttcagctttgagatcaatgtgagcgttgccattatcacctttgcctcagagcccaaagtcctcatgtctgtcctgaacgacaactcccgggatatgactgaggtgatcagcagcctggaaaatgccaactataaagatcatgaaaatggaactgggactaacacctatgcggccttaaacagtgtctatctcatgatgaacaaccaaatgcgactcctcggcatggaaacgatggcctggcaggaaatccgacatgccatcatccttctgacagatggaaagtccaatatgggtggctctcccaagacagctgttgaccatatcagagagatcctgaacatcaaccagaagaggaatgactatctggacatctatgccatcggggtgggcaagctggatgtggactggagagaactgaatgagctagggtccaagaaggatggtgagaggcatgccttcattctgcaggacacaaaggctctgcaccaggtctttgaacatatgctggatgtctccaagctcacagacaccatctgcggggtggggaacatgtcagcaaacgcctctgaccaggagaggacaccctggcatgtcactattaagcccaagagccaagagacctgccggggggccctcatctccgaccaatgggtcctgacagcagctcattgcttccgcgatggcaacgaccactccctgtggagggtcaatgtgggagaccccaaatcccagtggggcaaagaattccttattgagaaggcggtgatctccccagggtttgatgtctttgccaaaaagaaccagggaatcctggagttctatggtgatgacatagctctgctgaagctggcccagaaagtaaagatgtccacccatgccaggcccatctgccttccctgcacgatggaggccaatctggctctgcggagacctcaaggcagcacctgtagggaccatgagaatgaactgctgaacaaacagagtgttcctgctcattttgtcgccttgaatgggagcaaactgaacattaaccttaagatgggagtggagtggacaagctgtgccgaggttgtctcccaagaaaaaaccatgttccccaacttgacagatgtcagggaggtggtgacagaccagttcctatgcagtgggacccaggaggatgagagtccctgcaagggagaatctgggggagcagttttccttgagcggagattcaggttttttcaggtgggtctggtgagctggggtctttacaacccctgccttggctctgctgacaaaaactcccgcaaaagggcccctcgtagcaaggtcccgccgccacgagactttcacatcaatctcttccgcatgcagccctggctgaggcagcacctgggggatgtcctgaattttttacccctctagccatggccactgagccctctgctgccctgccagaatctgccgcccctccatcttctacctctgaatggccacccttagaccctgtgatccatcctctctcctagctgagtaaatccgggtctctaggatgccagaggcagcgcacacaagctgggaaatcctcagggctcctaccagcaggactgcctcgctgccccacctcccgctccttggcctgtccccagattccttccctggttgacttgactcatgcttgtttcactttcacatggaatttcccagttatgaaattaataaaaatcaatggtttccaca

SEQ ID NO: 6536 - DNA, 1895 bp, Homo sapiens
  source 1..1895: mol_type = unassigned DNA
tgatggttcttttttgcctgctgttcctgtacccagctggccactgccccaacccaggcatttcactgggcgcagtgcggacaggcttccgctttggtcatggggacaaggtccgctatcgctgctcctcgaatcttgtgctcacggggtcttcggagcgggagtgccagggcaacggggtctggagtggaacggagcccatctgccgccaaccctactcttatgacttccctgaggacgtggcccctgccctgggcacttccttctcccacatgcttggggccaccaatcccacccagaagacaaaggatcatgaaaatggaactgggactaacacctatgcggccttaaacagtgtctatctcatgatgaacaaccaaatgcgactcctcggcatggaaacgatggcctggcaggaaatccgacatgccatcatccttctgacagatggaaagtccaatatgggtggctctcccaagacagctgttgaccatatcagagagatcctgaacatcaaccagaagaggaatgactatctggacatctatgccatcggggtgggcaagctggatgtggactggagagaactgaatgagctagggtccaagaaggatggtgagaggcatgccttcattctgcaggacacaaaggctctgcaccaggtctttgaacatatgctggatgtctccaagctcacagacaccatctgcggggtggggaacatgtcagcaaacgcctctgaccaggagaggacaccctggcatgtcactattaagcccaagagccaagagacctgccggggggccctcatctccgaccaatgggtcctgacagcagctcattgcttccgcgatggcaacgaccactccctgtggagggtcaatgtgggagaccccaaatcccagtggggcaaagaattccttattgagaaggcggtgatctccccagggtttgatgtctttgccaaaaagaaccagggaatcctggagttctatggtgatgacatagctctgctgaagctggcccagaaagtaaagatgtccacccatgccaggcccatctgccttccctgcacgatggaggccaatctggctctgcggagacctcaaggcagcacctgtagggaccatgagaatgaactgctgaacaaacagagtgttcctgctcattttgtcgccttgaatgggagcaaactgaacattaaccttaagatgggagtggagtggacaagctgtgccgaggttgtctcccaagaaaaaaccatgttccccaacttgacagatgtcagggaggtggtgacagaccagttcctatgcagtgggacccaggaggatgagagtccctgcaagggagaatctgggggagcagttttccttgagcggagattcaggttttttcaggtgggtctggtgagctggggtctttacaacccctgccttggctctgctgacaaaaactcccgcaaaagggcccctcgtagcaaggtcccgccgccacgagactttcacatcaatctcttccgcatgcagccctggctgaggcagcacctgggggatgtcctgaattttttacccctctagccatggccactgagccctctgctgccctgccagaatctgccgcccctccatcttctacctctgaatggccacccttagaccctgtgatccatcctctctcctagctgagtaaatccgggtctctaggatgccagaggcagcgcacacaagctgggaaatcctcagggctcctaccagcaggactgcctcgctgccccacctcccgctccttggcctgtccccagattccttccctggttgacttgactcatgcttgtttcactttcacatggaatttcccagttatgaaattaataaaaatcaatggtttccaca

SEQ ID NO: 6537 - DNA, 2835 bp, Homo sapiens; identical to SEQ ID NO: 6535
  source 1..2835: mol_type = unassigned DNA

SEQ ID NO: 6538 - DNA, 561 bp, Homo sapiens
  source 1..561: mol_type = unassigned DNA
gtattttgctgttggttctgtggatgacaggtgacaaaacaggcaatgaagcagctgctgacccagctctagttttcgggaagtcagatgaccttttccctcccgcggctctctacctctcgccgcccctagggaggacaccatgggcccactgatggttcttttttgcctgctgttcctgtacccaggtctggcagactcggctccctcctgccctcagaacgtgaatatctcgggtggcaccttcaccctcagccatggctgggctcctgggagccttctcacctactcctgcccccagggcctgtacccatccccagcatcacggctgtgcaagagcagcggacagtggcagaccccaggagccacccggtctctgtctaaggcggtctgcaaacctgtgcgctgtccagcccctgtctcctttgagaatggcatttataccccacggctggggtcctatcccgtgggtggcaatgtgagcttcgagtgtgaggatggcttcatattgcggggctcgcctgtgcgtcagtgtcgccccaacggcatgtgggatggaga

SEQ ID NO: 6539 - DNA, 576 bp, Homo sapiens
  source 1..576: mol_type = unassigned DNA
agttgacgatgtccctaacagcgaattccaaggcgcccgtgtagcaggagaggagcaagtcggccacgatgcgtgcactgtgcatcagggagacctgcagctccgagctggggttcagcaggaactggtcccgcaggaaggctggccactgccccaacccaggcatttcactgggcgcagtgcggacaggcttccgctttggtcatggggacaaggtccgctatcgctgctcctcgaatcttgtgctcacggggtcttcggagcgggagtgccagggcaacggggtctggagtggaacggagcccatctgccgccaaccctactcttatgacttccctgaggacgtggcccctgccctgggcacttccttctcccacatgcttggggccaccaatcccacccagaagacaaaggatcatgaaaatggaactgggactaacacctatgcggccttaaacagtgtctatctcatgatgaacaaccaaatgcgactcctcggcatggaaacgatggcctggcaggaaatccgacatgccatcatccttctgacagatggaaagtccaatatgggtggct

SEQ ID NO: 6540 - DNA, 561 bp, Homo sapiens; identical to SEQ ID NO: 6538
  source 1..561: mol_type = unassigned DNA

SEQ ID NO: 6541 - DNA, 2835 bp, Homo sapiens; identical to SEQ ID NO: 6535
  source 1..2835: mol_type = unassigned DNA

SEQ ID NO: 6542 - DNA, 605 bp, Homo sapiens
  source 1..605: mol_type = unassigned DNA
atagatatattagcatcagggagacagggcaaaggtttcacccttcagttcagtccccaatccctgcttattatttccctaacagaagaccatcccccttgccactccctggtttttcttctctggcagcaatgaagcagctgctgacccagctctagttttcgggaagtcagatgaccttttccctcccgcggctctctacctctcgccgcccctagggaggacaccatgggcccactgatggttcttttttgcctgctgttcctgtacccaggtctggcagactcggctccctcctgccctcagaacgtgaatatctcgggtggcaccttcaccctcagccatggctgggctcctgggagccttctcacctactcctgcccccagggcctgtacccatccccagcatcacggctgtgcaagagcagcggacagtggcagaccccaggagccacccggtctctgtctaaggcggtctgcaaacctggccactgccccaacccaggcatttcactgggcgcagtgcggacaggcttccgctttggtcatggggacaaggtccgctatcgctgctcctcgaatcttgtgctcacggggtcttcgga

SEQ ID NO: 6543 - DNA, 576 bp, Homo sapiens; identical to SEQ ID NO: 6539
  source 1..576: mol_type = unassigned DNA

SEQ ID NO: 6544 - DNA, 1281 bp, Homo sapiens
  source 1..1281: mol_type = unassigned DNA
atattagcatcagggagacagggcaaaggtttcacccttcagttcagtccccaatccctgcttattatttccctaacagaagaccatcccccttgccactccctggtttttcttctctggcagcaatgaagcagctgctgacccagctctagttttcgggaagtcagatgaccttttccctcccgcggctctctacctctcgccgcccctagggaggacaccatgggcccactgatggttcttttttgcctgctgttcctgtacccagctggccactgccccaacccaggcatttcactgggcgcagtgcggacaggcttccgctttggtcatggggacaaggtccgctatcgctgctcctcgaatcttgtgctcacggggtcttcggagcgggagtgccagggcaacggggtctggagtggaacggagcccatctgccgccaaccctactcttatgacttccctgaggacgtggcccctgccctgggcacttccttctcccacatgcttggggccaccaatcccacccagaagacaaaggaaagcctgggccgtaaaatccaaatccagcgctctggtcatctgaacctctacctgctcctggactgttcgcagagtgtgtcggaaaatgactttctcatcttcaaggagagcgcctccctcatggtggacaggatcttcagctttgagatcaatgtgagcgttgccattatcacctttgcctcagagcccaaagtcctcatgtctgtcctgaacgacaactcccgggatatgactgaggtgatcagcagcctggaaaatgccaactataaagatcatgaaaatggaactgggactaacacctatgcagccttaaacagtgtctatctcatgatgaacaaccaaatgcgactcctcggcatggaaacgatggcctggcaggaaatccgacatgccatcatccttctgacagatggaaagtccaatatgggtggctctcccaagacagctgttgaccatatcagagagatcctgaacatcaaccagaagaggaatgactatctggacatctatgccatcggggtgggcaagctggatgtggactggagagaactgaatgagctagggtccaagaaggatggtgagaggcatgccttcattctgcaggacacaaaggctctgcaccaggtctttgaacatatgctggatgtctccaagctcacagacaccatctgcggggtggggaacatgtcagcaaacgcctctgaccaggagaggacaccctggcatgtcactattaag

SEQ ID NO: 6545 - DNA, 2835 bp, Homo sapiens; identical to SEQ ID NO: 6535
  source 1..2835: mol_type = unassigned DNA

SEQ ID NO: 6546 - DNA, 1281 bp, Homo sapiens
  source 1..1281: mol_type = unassigned DNA
atattagcatcagggagacagggcaaaggtttcacccttcagttcagtccccaatccctgcttattatttccctaacagaagaccatcccccttgccactccctggtttttcttctctggcagcaatgaagcagctgctgacccagctctagttttcgggaagtcagatgaccttttccctcccgcggctctctacctctcgccgcccctagggaggacaccatgggcccactgatggttcttttttgcctgctgttcctgtacccagctggccactgccccaacccaggcatttcactgggcgcagtgcggacaggcttccgctttggtcatggggacaaggtccgctatcgctgctcctcgaatcttgtgctcacggggtcttcggagcgggagtgccagggcaacggggtctggagtggaacggagcccatctgccgccaaccctactcttatgacttccctgaggacgtggcccctgccctgggcacttccttctcccacatgcttggggccaccaatcccacccagaagacaaaggaaagcctgggccgtaaaatccaaatccagcgctctggtcatctgaacctctacctgctcctggactgttcgcagagtgtgtcggaaaatgactttctcatcttcaaggagagcgcctccctcatggtggacaggatcttcagctttgagatcaatgtgagcgttgccattatcacctttgcctcagagcccaaagtcctcatgtctgtcctgaacgacaactcccgggatatgactgaggtgatcagcagcctggaaaatgccaactataaagatcatgaaaatggaactgggactaacacctatgcggccttaaacagtgtctatctcatgatgaacaaccaaatgcgactcctcggcatggaaacgatggcctggcaggaaatccgacatgccatcatccttctgacagatggaaagtccaatatgggtggctctcccaagacagctgttgaccatatcagagagatcctgaacatcaaccagaagaggaatgactatctggacatctatgccatcggggtgggcaagctggatgtggactggagagaactgaatgagctagggtccaagaaggatggtgagaggcatgccttcattctgcaggacacaaaggctctgcaccaggtctttgaacatatgctggatgtctccaagctcacagacaccatctgcggggtggggaacatgtcagcaaacgcctctgaccaggagaggacaccctggcatgtcactattaag

SEQ ID NO: 6547 - DNA, 1281 bp, Homo sapiens; identical to SEQ ID NO: 6546
  source 1..1281: mol_type = unassigned DNA

SEQ ID NO: 6548 - DNA, 576 bp, Homo sapiens; identical to SEQ ID NO: 6539
  source 1..576: mol_type = unassigned DNA

SEQ ID NO: 6549 - DNA, 1895 bp, Homo sapiens; identical to SEQ ID NO: 6536
  source 1..1895: mol_type = unassigned DNA

SEQ ID NO: 6550 - DNA, 1281 bp, Homo sapiens; identical to SEQ ID NO: 6546
  source 1..1281: mol_type = unassigned DNA

SEQ ID NO: 6551 - DNA, 403 bp, Homo sapiens
  source 1..403: mol_type = unassigned DNA
ctggccactgccccaacccaggcatttcactgggcgcagtgcggacaggcttccgctttggtcatggggacaaggtccgctatcgctgctcctcgaatcttgtgctcacggggtcttcggagcgggagtgccagggcaacggggtctggagtggaacggagcccatctgccgccaaccctactcttatgacttccctgaggacgtggcccctgccctgggcacttccttctcccacatgcttggggccaccaatcccacccagaagacaaaggaaagcctgggccgtaaaatccaaatccagcgctctggtcatctgaacctctacctgctcctggactgttcgcagagtgtgtcggaaaatgactttctcatcttcaaggagagcgcctccctcatggtgga

SEQ ID NO: 6552 - DNA, 1895 bp, Homo sapiens; identical to SEQ ID NO: 6536
  source 1..1895: mol_type = unassigned DNA

SEQ ID NO: 6553 - DNA, 1895 bp, Homo sapiens; identical to SEQ ID NO: 6536
  source 1..1895: mol_type = unassigned DNA

SEQ ID NO: 6554 - DNA, 1281 bp, Homo sapiens; identical to SEQ ID NO: 6546
  source 1..1281: mol_type = unassigned DNA

SEQ ID NO: 6555 - DNA, 539 bp, Homo sapiens
  source 1..539: mol_type = unassigned DNA
acgatgtccctaacagcgaattccaaggcgcccgtgtagcaggagaggagcaagtcggccacgatgcgtgcactgtgcatcagggagacctgcagctccgagctggggttcagcaggaactggtcccgcaggaaggctggccactgccccaacccaggcatttcactgggcgcagtgcggacaggcttccgctttggtcatggggacaaggtccgctatcgctgctcctcgaatcttgtgctcacggggtcttcggagcgggagtgccagggcaacggggtctggagtggaacggagcccatctgccgccaaccctactcttatgacttccctgaggacgtggcccctgccctgggcacttccttctcccacatgcttggggccaccaatcccacccagaagacaaaggaaagcctgggccgtaaaatccaaatccagcgctctggtcatctgaacctctacctgctcctggactgttcgcagagtgtgtcggaaaatgactttctcatcttcaaggagagcgcctccctcatggtgga

SEQ ID NO: 6556 - DNA, 539 bp, Homo sapiens; identical to SEQ ID NO: 6555
  source 1..539: mol_type = unassigned DNA

SEQ ID NO: 6557 - DNA, 2150 bp, Homo sapiens
  source 1..2150: mol_type = unassigned DNA
cccctgagagcggcctcggagatggctgtgactgtcctaagctgggagctgcaagggagaattcctgtcattcctggcctcagttctgcagggaccgagggcgagacacgcctgggcccaggtgtggcgtctctgtccccatctggttttagctggccactgccccaacccaggcatttcactgggcgcagtgcggacaggcttccgctttggtcatggggacaaggtccgctatcgctgctcctcgaatcttgtgctcacggggtcttcggagcgggagtgccagggcaacggggtctggagtggaacggagcccatctgccgccaaccctactcttatgacttccctgaggacgtggcccctgccctgggcacttccttctcccacatgcttggggccaccaatcccacccagaagacaaaggatcttcagctttgagatcaatgtgagcgttgccattatcacctttgcctcagagcccaaagtcctcatgtctgtcctgaacgacaactcccgggatatgactgaggtgatcagcagcctggaaaatgccaactataaagatcatgaaaatggaactgggactaacacctatgcggccttaaacagtgtctatctcatgatgaacaaccaaatgcgactcctcggcatggaaacgatggcctggcaggaaatccgacatgccatcatccttctgacagatggaaagtccaatatgggtggctctcccaagacagctgttgaccatatcagagagatcctgaacatcaaccagaagaggaatgactatctggacatctatgccatcggggtgggcaagctggatgtggactggagagaactgaatgagctagggtccaagaaggatggtgagaggcatgccttcattctgcaggacacaaaggctctgcaccaggtctttgaacatatgctggatgtctccaagctcacagacaccatctgcggggtggggaacatgtcagcaaacgcctctgaccaggagaggacaccctggcatgtcactattaagcccaagagccaagagacctgccggggggccctcatctccgaccaatgggtcctgacagcagctcattgcttccgcgatggcaacgaccactccctgtggagggtcaatgtgggagaccccaaatcccagtggggcaaagaattccttattgagaaggcgtgatctccccagggtttgatgtctttgccaaaaagaaccagggaatcctggagttctatggtgatgacatagctctgctgaagctggcccagaaagtaaagatgtccacccatgccaggcccatctgccttccctgcacgatggaggccaatctggctctgcggagacctcaaggcagcacctgtagggaccatgagaatgaactgctgaacaaacagagtgttcctgctcattttgtcgccttgaatgggagcaaactgaacattaaccttaagatgggagtggagtggacaagctgtgccgaggttgtctcccaagaaaaaaccatgttccccaacttgacagatgtcagggaggtggtgacagaccagttcctatgcagtgggacccaggaggatgagagtccctgcaagggcaggagaatctgggggagcagttttccttgagcggagattcaggttttttcaggtgggtctggtgagctggggtctttacaacccctgccttggctctgctgacaaaaactcccgcaaaagggcccctcgtagcaaggtcccgccgccacgagactttcacatcaatctcttccgcatgcagccctggctgaggcagcacctgggggatgtcctgaattttttacccctctagccatggccactgagccctctgctgccctgccagaatctgccgcccctccatcttctacctctgaatggccacccttagaccctgtgatccatcctctctcctagctgagtaaatccgggtctctaggatgccagaggcagcgcacacaagctgggaaatcctcagggctcctaccagcaggactgcctcgctgccccacctcccgctccttggcctgtccccagattccttccctggttgacttgactcatgcttgtttcactttcacatggaatttcccagttatgaaattaataaaaatcaatggtttcc

SEQ ID NO: 6558 - DNA, 539 bp, Homo sapiens; identical to SEQ ID NO: 6555
  source 1..539: mol_type = unassigned DNA

SEQ ID NO: 6559 - DNA, 1281 bp, Homo sapiens; identical to SEQ ID NO: 6546
  source 1..1281: mol_type = unassigned DNA

SEQ ID NO: 6560 - DNA, 561 bp, Homo sapiens; identical to SEQ ID NO: 6538
  source 1..561: mol_type = unassigned DNA

SEQ ID NO: 6561 - DNA, 435 bp, Homo sapiens
  source 1..435: mol_type = unassigned DNA
ctggccactgccccaacccaggcatttcactgggcgcagtgcggacaggcttccgctttggtcatggggacaaggtccgctatcgctgctcctcgaatcttgtgctcacggggtcttcggagcgggagtgccagggcaacggggtctggagtggaacggagcccatctgccgccaaccctactcttatgacttccctgaggacgtggcccctgccctgggcacttccttctcccacatgcttggggccaccaatcccacccagaagacaaaggatcatgaaaatggaactgggactaacacctatgcggccttaaacagtgtctatctcatgatgaacaaccaaatgcgactcctcggcatggaaacgatggcctggcaggaaatccgacatgccatcatccttctgacagatggaaagtccaatatgggtggct

SEQ ID NO: 6562 - DNA, 605 bp, Homo sapiens; identical to SEQ ID NO: 6542
  source 1..605: mol_type = unassigned DNA

SEQ ID NO: 6563 - DNA, 561 bp, Homo sapiens; identical to SEQ ID NO: 6538
  source 1..561: mol_type = unassigned DNA

SEQ ID NO: 6564 - DNA, 539 bp, Homo sapiens; identical to SEQ ID NO: 6555
  source 1..539: mol_type = unassigned DNA

SEQ ID NO: 6565 - DNA, 605 bp, Homo sapiens; identical to SEQ ID NO: 6542
  source 1..605: mol_type = unassigned DNA

SEQ ID NO: 6566 - DNA, 2434 bp, Homo sapiens
  source 1..2434: mol_type = unassigned DNA
aaagcctgtgggggagatctattgaccctatagatatattagcatcagggagacagggcaaaggtttcacccttcagttcagtccccaatccctgcttattatttccctaacagaagaccatcccccttgccactccctggtttttcttctctggcagcaatgaagcagctgctgacccagctctagttttcgggaagtcagatgaccttttccctcccgcggctctctacctctcgccgcccctagggaggacaccatgggcccactgatggttcttttttgcctgctgttcctgtacccagctggccactgccccaacccaggcatttcactgggcgcagtgcggacaggcttccgctttggtcatggggacaaggtccgctatcgctgctcctcgaatcttgtgctcacggggtcttcggagcgggagtgccagggcaacggggtctggagtggaacggagcccatctgccgccaaccctactcttatgacttccctgaggacgtggcccctgccctgggcacttccttctcccacatgcttggggccaccaatcccacccagaagacaaaggaaagcctgggccgtaaaatccaaatccagcgctctggtcatctgaacctctacctgctcctggactgttcgcagagtgtgtcggaaaatgactttctcatcttcaaggagagcgcctccctcatggtggacaggatcttcagctttgagatcaatgtgagcgttgccattatcacctttgcctcagagcccaaagtcctcatgtctgtcctgaacgacaactcccgggatatgactgaggtgatcagcagcctggaaaatgccaactataaagatcatgaaaatggaactgggactaacacctatgcggccttaaacagtgtctatctcatgatgaacaaccaaatgcgactcctcggcatggaaacgatggcctggcaggaaatccgacatgccatcatccttctgacagatggaaagtccaatatgggtggctctcccaagacagctgttgaccatatcagagagatcctgaacatcaaccagaagaggaatgactatctggacatctatgccatcggggtgggcaagctggatgtggactggagagaactgaatgagctagggtccaagaaggatggtgagaggcatgccttcattctgcaggacacaaaggctctgcaccaggtctttgaacatatgctggatgtctccaagctcacagacaccatctgcggggtggggaacatgtcagcaaacgcctctgaccaggagaggacaccctggcatgtcactattaagcccaagagccaagagacctgccggggggccctcatctccgaccaatgggtcctgacagcagctcattgcttccgcgatggcaacgaccactccctgtggagggtcaatgtgggagaccccaaatcccagtggggcaaagaattccttattgagaaggcggtgatctccccagggtttgatgtctttgccaaaaagaaccagggaatcctggagttctatggtgatgacatagctctgctgaagctggcccagaaagtaaagatgtccacccatgccaggcccatctgccttccctgcacgatggaggccaatctggctctgcggagacctcaaggcagcacctgtagggaccatgagaatgaactgctgaacaaacagagtgttcctgctcattttgtcgccttgaatgggagcaaactgaacattaaccttaagatgggagtggagtggacaagctgtgccgaggttgtctcccaagaaaaaaccatgttccccaacttgacagatgtcagggaggtggtgacagaccagttcctatgcagtgggacccaggaggatgagagtccctgcaagggagaatctgggggagcagttttccttgagcggagattcaggttttttcaggtgggtctggtgagctggggtctttacaacccctgccttggctctgctgacaaaaactcccgcaaaagggcccctcgtagcaaggtcccgccgccacgagactttcacatcaatctcttccgcatgcagccctggctgaggcagcacctgggggatgtcctgaattttttacccctctagccatggccactgagccctctgctgccctgccagaatctgccgcccctccatcttctacctctgaatggccacccttagaccctgtgatccatcctctctcctagctgagtaaatccgggtctctaggatgccagaggcagcgcacacaagctgggaaatcctcagggctcctaccagcaggactgcctcgctgccccacctcccgctccttggcctgtccccagattccttccctggttgacttgactcatgcttgtttcactttcacatggaatttcccagttatgaaattaataaaaatcaatggtttccac

SEQ ID NO: 6567 - DNA, 605 bp, Homo sapiens; identical to SEQ ID NO: 6542
  source 1..605: mol_type = unassigned DNA

SEQ ID NO: 6568 - DNA, 561 bp, Homo sapiens; identical to SEQ ID NO: 6538
  source 1..561: mol_type = unassigned DNA

SEQ ID NO: 6569 - DNA, 605 bp, Homo sapiens; identical to SEQ ID NO: 6542
  source 1..605: mol_type = unassigned DNA

SEQ ID NO: 6570 - DNA, 2835 bp, Homo sapiens; identical to SEQ ID NO: 6535
  source 1..2835: mol_type = unassigned DNA

SEQ ID NO: 6571 - DNA, 605 bp, Homo sapiens; identical to SEQ ID NO: 6542
  source 1..605: mol_type = unassigned DNA

SEQ ID NO: 6572 - DNA, 576 bp, Homo sapiens; identical to SEQ ID NO: 6539
  source 1..576: mol_type = unassigned DNA

SEQ ID NO: 6573 - DNA, 1895 bp, Homo sapiens; identical to SEQ ID NO: 6536
  source 1..1895: mol_type = unassigned DNA

SEQ ID NO: 6574 - DNA, 435 bp, Homo sapiens
  source 1..435: mol_type = unassigned DNA
ctggccactgccccaacccaggcatttcactgggcgcagtgcggacaggcttccgctttggtcatggggacaaggtccgctatcgctgctcctcgaatcttgtgctcacggggtcttcggagcgggagtgccagggcaacggggtctggagtggaacggagcccatctgccgccaaccctactcttatgacttccctgaggacgtggcccctgccctgggcacttccttctcccacatgcttggggccaccaatcccacccagaagacaaaggatcatgaaaatggaactgggactaacacctatgcagccttaaacagtgtctatctcatgatgaacaaccaaatgcgactcctcggcatggaaacgatggcctggcaggaaatccgacatgccatcatccttctgacagatggaaagtccaatatgggtggct

SEQ ID NO: 6575 - DNA, 403 bp, Homo sapiens; identical to SEQ ID NO: 6551
  source 1..403: mol_type = unassigned DNA

SEQ ID NO: 6576 - DNA, 561 bp, Homo sapiens; identical to SEQ ID NO: 6538
  source 1..561: mol_type = unassigned DNA

SEQ ID NO: 6577 - DNA, 561 bp, Homo sapiens; identical to SEQ ID NO: 6538
  source 1..561: mol_type = unassigned DNA

SEQ ID NO: 6578 - DNA, 1999 bp, Homo sapiens
  source 1..1999: mol_type = unassigned DNA
agttgacgatgtccctaacagcgaattccaaggcgcccgtgtagcaggagaggagcaagtcggccacgatgcgtgcactgtgcatcagggagacctgcagctccgagctggggttcagcaggaactggtcccgcaggaaggctggccactgccccaacccaggcatttcactgggcgcagtgcggacaggcttccgctttggtcatggggacaaggtccgctatcgctgctcctcgaatcttgtgctcacggggtcttcggagcgggagtgccagggcaacggggtctggagtggaacggagcccatctgccgccaaccctactcttatgacttccctgaggacgtggcccctgccctgggcacttccttctcccacatgcttggggccaccaatcccacccagaagacaaaggatcatgaaaatggaactgggactaacacctatgcggccttaaacagtgtctatctcatgatgaacaaccaaatgcgactcctcggcatggaaacgatggcctggcaggaaatccgacatgccatcatccttctgacagatggaaagtccaatatgggtggctctcccaagacagctgttgaccatatcagagagatcctgaacatcaaccagaagaggaatgactatctggacatctatgccatcggggtgggcaagctggatgtggactggagagaactgaatgagctagggtccaagaaggatggtgagaggcatgccttcattctgcaggacacaaaggctctgcaccaggtctttgaacatatgctggatgtctccaagctcacagacaccatctgcggggtggggaacatgtcagcaaacgcctctgaccaggagaggacaccctggcatgtcactattaagcccaagagccaagagacctgccggggggccctcatctccgaccaatgggtcctgacagcagctcattgcttccgcgatggcaacgaccactccctgtggagggtcaatgtgggagaccccaaatcccagtggggcaaagaattccttattgagaaggcggtgatctccccagggtttgatgtctttgccaaaaagaaccagggaatcctggagttctatggtgatgacatagctctgctgaagctggcccagaaagtaaagatgtccacccatgccaggcccatctgccttccctgcacgatggaggccaatctggctctgcggagacctcaaggcagcacctgtagggaccatgagaatgaactgctgaacaaacagagtgttcctgctcattttgtcgccttgaatgggagcaaactgaacattaaccttaagatgggagtggagtggacaagctgtgccgaggttgtctcccaagaaaaaaccatgttccccaacttgacagatgtcagggaggtggtgacagaccagttcctatgcagtgggacccaggaggatgagagtccctgcaagggagaatctgggggagcagttttccttgagcggagattcaggttttttcaggtgggtctggtgagctggggtctttacaacccctgccttggctctgctgacaaaaactcccgcaaaagggcccctcgtagcaaggtcccgccgccacgagactttcacatcaatctcttccgcatgcagccctggctgaggcagcacctgggggatgtcctgaattttttacccctctagccatggccactgagccctctgctgccctgccagaatctgccgcccctccatcttctacctctgaatggccacccttagaccctgtgatccatcctctctcctagctgagtaaatccgggtctctaggatgccagaggcagcgcacacaagctgggaaatcctcagggctcctaccagcaggactgcctcgctgccccacctcccgctccttggcctgtccccagattccttccctggttgacttgactcatgcttgtttcactttcacatggaatttcccagttatgaaattaataaaaatcaatggtttccac

SEQ ID NO: 6579 - DNA, 1906 bp, Homo sapiens
  source 1..1906: mol_type = unassigned DNA
cattttcccctgagagcggcctcggagatggctgtgactgtcctaagctgggagctgcaagggagaattcctgtcattcctggcctcagttctgcagggaccgagggcgagacacgcctgggcccaggtgtggcgtctctgtccccatctggttttagctggccactgccccaacccaggcatttcactgggcgcagtgcggacaggcttccgctttggtcatggggacaaggtccgctatcgctgctcctcgaatcttgtgctcacggggtcttcggagcgggagtgccagggcaacggggtctggagtggaacggagcccatctgccgccatcttcagctttgagatcaatgtgagcgttgccattatcacctttgcctcagagcccaaagtcctcatgtctgtcctgaacgacaactcccgggatatgactgaggtgatcagcagcctggaaaatgccaactataaagatcatgaaaatggaactgggactaacacctatgcggccttaaacagtgtctatctcatgatgaacaaccaaatgcgactcctcggcatggaaacgatggcctggcaggaaatccgacatgccatcatccttctgacagatggaaagtccaatatgggtggctctcccaagacagctgttgaccatatcagagagatcctgaacatcaaccagaagaggaatgactatctggacatctatgccatcggggtgggcaagctggatgtggactggagagaactgaatgagctagggtccaagaaggatggtgagaggcatgccttcattctgcaggacacaaaggctctgcaccaggtctttgaacatatgctggatgtctccaagctcacagacaccatctgcggggtggggaacatgtcagcaaacgcctctgaccaggagaggacaccctggcatgtcactattaagcccaagagccaagagacctgccggggggccctcatctccgaccaatgggtcctgacagcagctcattgcttccgcgatggcaacgaccactccctgtggagggtcaatgtgggagaccccaaatcccagtggggcaaagaattccttattgagaaggcggtgatctccccagggtttgatgtctttgccaaaaagaaccagggaatcctggagttctatggtgatgacatagctctgctgaagctggcccagaaagtaaagatgtccacccatgccaggcccatctgccttccctgcacgatggaggccaatctggctctgcggagacctcaaggcagcacctgtagggaccatgagaatgaactgctgaacaaacagagtgttcctgctcattttgtcgccttgaatgggagcaaactgaacattaaccttaagatgggagtggagtggacaagctgtgccgaggttgtctcccaagaaaaaaccatgttccccaacttgacagatgtcagggaggtggtgacagaccagttcctatgcagtgggacccaggaggatgagagtccctgcaagggagaatctgggggagcagttttccttgagcggagattcaggttttttcaggtgggtctggtgagctggggtctttacaacccctgccttggctctgctgacaaaaactcccgcaaaagggcccctcgtagcaaggtcccgccgccacgagactttcacatcaatctcttccgcatgcagccctggctgaggcagcacctgggggatgtcctgaattttttacccctctagccatggccactgagccctctgctgccctgccagaatctgccgcccctccatcttctacctctgaatggccacccttagaccctgtgatccatcctctctcctagctgagtaaatccgggtctctaggatgccagaggcagcgcacacaagctgggaaatcctca

SEQ ID NO: 6580 - DNA, 1906 bp, Homo sapiens; identical to SEQ ID NO: 6579
  source 1..1906: mol_type = unassigned DNA

SEQ ID NO: 6581 - DNA, 1906 bp, Homo sapiens; identical to SEQ ID NO: 6579
  source 1..1906: mol_type = unassigned DNA

SEQ ID NO: 6582 - DNA, 2785 bp, Homo sapiens; identical to SEQ ID NO: 6532
  source 1..2785: mol_type = unassigned DNA

SEQ ID NO: 6583 - DNA, 2150 bp, Homo sapiens; identical to SEQ ID NO: 6557
  source 1..2150: mol_type = unassigned DNA

SEQ ID NO: 6584 - DNA, 2602 bp, Homo sapiens
  source 1..2602: mol_type = unassigned DNA
agtacacaaagcctgtgggggagatctattgaccctatagatatattagcatcagggagacagggcaaaggtttcacccttcagttcagtccccaatccctgcttattatttccctaacagaagaccatcccccttgccactccctggtttttcttctctggcagcaatgaagcagctgctgacccagctctagttttcgggaagtcagatgaccttttccctcccgcggctctctacctctcgccgcccctagggaggacaccatgggcccactgatggttcttttttgcctgctgttcctgtacccaggtctggcagactcggctccctcctgccctcagaacgtgaatatctcgggtggcaccttcaccctcagccatggctgggctcctgggagccttctcacctactcctgcccccagggcctgtacccatccccagcatcacggctgtgcaagagcagcggacagtggcagaccccaggagccacccggtctctgtctaaggcggtctgcaaacctgtgcgctgtccagcccctgtctcctttgagaatggcatttataccccacggctggggtcctatcccgtgggtggcaatgtgagcttcgagtgtgaggatggcttcatattgcggggctcgcctgtgcgtcagtgtcgccccaacggcatgtgggatggagaaacagctgtgtgtgataatggggctggccactgccccaacccaggcatttcactgggcgcagtgcggacaggcttccgctttggtcatggggacaaggtccgctatcgctgctcctcgaatcttgtgctcacggggtcttcggagcgggagtgccagggcaacggggtctggagtggaacggagcccatctgccgccatcttcagctttgagatcaatgtgagcgttgccattatcacctttgcctcagagcccaaagtcctcatgtctgtcctgaacgacaactcccgggatatgactgaggtgatcagcagcctggaaaatgccaactataaagatcatgaaaatggaactgggactaacacctatgcagccttaaacagtgtctatctcatgatgaacaaccaaatgcgactcctcggcatggaaacgatggcctggcaggaaatccgacatgccatcatccttctgacagatggaaagtccaatatgggtggctctcccaagacagctgttgaccatatcagagagatcctgaacatcaaccagaagaggaatgactatctggacatctatgccatcggggtgggcaagctggatgtggactggagagaactgaatgagctagggtccaagaaggatggtgagaggcatgccttcattctgcaggacacaaaggctctgcaccaggtctttgaacatatgctggatgtctccaagctcacagacaccatctgcggggtggggaacatgtcagcaaacgcctctgaccaggagaggacaccctggcatgtcactattaagcccaagagccaagagacctgccggggggccctcatctccgaccaatgggtcctgacagcagctcattgcttccgcgatggcaacgaccactccctgtggagggtcaatgtgggagaccccaaatcccagtggggcaaagaattccttattgagaaggcggtgatctccccagggtttgatgtctttgccaaaaagaaccagggaatcctggagttctatggtgatgacatagctctgctgaagctggcccagaaagtaaagatgtccacccatgccaggcccatctgccttccctgcacgatggaggccaatctggctctgcggagacctcaaggcagcacctgtagggaccatgagaatgaactgctgaacaaacagagtgttcctgctcattttgtcgccttgaatgggagcaaactgaacattaaccttaagatgggagtggagtggacaagctgtgccgaggttgtctcccaagaaaaaaccatgttccccaacttgacagatgtcagggaggtggtgacagaccagttcctatgcagtgggacccaggaggatgagagtccctgcaagggagaatctgggggagcagttttccttgagcggagattcaggttttttcaggtgggtctggtgagctggggtctttacaacccctgccttggctctgctgacaaaaactcccgcaaaagggcccctcgtagcaaggtcccgccgccacgagactttcacatcaatctcttccgcatgcagccctggctgaggcagcacctgggggatgtcctgaattttttacccctctagccatggccactgagccctctgctgccctgccagaatctgccgcccctccatcttctacctctgaatggccacccttagaccctgtgatccatcctctctcctagctgagtaaatccgggtctctaggatgccagaggcagcgcacacaagctgggaaatcctcagggctcctaccagcaggactgcctcgctgccccacctcccgctccttggcctgtccccagattccttccctggttgacttgactcatgcttgtttcactttcacatggaatttcccagttatgaaattaataaaaatcaatggtttcc

SEQ ID NO: 6585 - DNA, 2602 bp, Homo sapiens
  source 1..2602: mol_type = unassigned DNA
agtacacaaagcctgtgggggagatctattgaccctatagatatattagcatcagggagacagggcaaaggtttcacccttcagttcagtccccaatccctgcttattatttccctaacagaagaccatcccccttgccactccctggtttttcttctctggcagcaatgaagcagctgctgacccagctctagttttcgggaagtcagatgaccttttccctcccgcggctctctacctctcgccgcccctagggaggacaccatgggcccactgatggttcttttttgcctgctgttcctgtacccaggtctggcagactcggctccctcctgccctcagaacgtgaatatctcgggtggcaccttcaccctcagccatggctgggctcctgggagccttctcacctactcctgcccccagggcctgtacccatccccagcatcacggctgtgcaagagcagcggacagtggcagaccccaggagccacccggtctctgtctaaggcggtctgcaaacctgtgcgctgtccagcccctgtctcctttgagaatggcatttataccccacggctggggtcctatcccgtgggtggcaatgtgagcttcgagtgtgaggatggcttcatattgcggggctcgcctgtgcgtcagtgtcgccccaacggcatgtgggatggagaaacagctgtgtgtgataatggggctggccactgccccaacccaggcatttcactgggcgcagtgcggacaggcttccgctttggtcatggggacaaggtccgctatcgctgctcctcgaatcttgtgctcacggggtcttcggagcgggagtgccagggcaacggggtctggagtggaacggagcccatctgccgccatcttcagctttgagatcaatgtgagcgttgccattatcacctttgcctcagagcccaaagtcctcatgtctgtcctgaacgacaactcccgggatatgactgaggtgatcagcagcctggaaaatgccaactataaagatcatgaaaatggaactgggactaacacctatgcggccttaaacagtgtctatctcatgatgaacaaccaaatgcgactcctcggcatggaaacgatggcctggcaggaaatccgacatgccatcatccttctgacagatggaaagtccaatatgggtggctctcccaagacagctgttgaccatatcagagagatcctgaacatcaaccagaagaggaatgactatctggacatctatgccatcggggtgggcaagctggatgtggactggagagaactgaatgagctagggtccaagaaggatggtgagaggcatgccttcattctgcaggacacaaaggctctgcaccaggtctttgaacatatgctggatgtctccaagctcacagacaccatctgcggggtggggaacatgtcagcaaacgcctctgaccaggagaggacaccctggcatgtcactattaagcccaagagccaagagacctgccggggggccctcatctccgaccaatgggtcctgacagcagctcattgcttccgcgatggcaacgaccactccctgtggagggtcaatgtgggagaccccaaatcccagtggggcaaagaattccttattgagaaggcggtgatctccccagggtttgatgtctttgccaaaaagaaccagggaatcctggagttctatggtgatgacatagctctgctgaagctggcccagaaagtaaagatgtccacccatgccaggcccatctgccttccctgcacgatggaggccaatctggctctgcggagacctcaaggcagcacctgtagggaccatgagaatgaactgctgaacaaacagagtgttcctgctcattttgtcgccttgaatgggagcaaactgaacattaaccttaagatgggagtggagtggacaagctgtgccgaggttgtctcccaagaaaaaaccatgttccccaacttgacagatgtcagggaggtggtgacagaccagttcctatgcagtgggacccaggaggatgagagtccctgcaagggagaatctgggggagcagttttccttgagcggagattcaggttttttcaggtgggtctggtgagctggggtctttacaacccctgccttggctctgctgacaaaaactcccgcaaaagggcccctcgtagcaaggtcccgccgccacgagactttcacatcaatctcttccgcatgcagccctggctgaggcagcacctgggggatgtcctgaattttttacccctctagccatggccactgagccctctgctgccctgccagaatctgccgcccctccatcttctacctctgaatggccacccttagaccctgtgatccatcctctctcctagctgagtaaatccgggtctctaggatgccagaggcagcgcacacaagctgggaaatcctcagggctcctaccagcaggactgcctcgctgccccacctcccgctccttggcctgtccccagattccttccctggttgacttgactcatgcttgtttcactttcacatggaatttcccagttatgaaattaataaaaatcaatggtttcc

SEQ ID NO: 6586 - DNA, 1999 bp, Homo sapiens; identical to SEQ ID NO: 6578
  source 1..1999: mol_type = unassigned DNA

SEQ ID NO: 6587 - DNA, 2785 bp, Homo sapiens
  source 1..2785: mol_type = unassigned DNA
agtacacaaagcctgtgggggagatctattgaccctatagatatattagcatcagggagacagggcaaaggtttcacccttcagttcagtccccaatccctgcttattatttccctaacagaagaccatcccccttgccactccctggtttttcttctctggcagcaatgaagcagctgctgacccagctctagttttcgggaagtcagatgaccttttccctcccgcggctctctacctctcgccgcccctagggaggacaccatgggcccactgatggttcttttttgcctgctgttcctgtacccaggtctggcagactcggctccctcctgccctcagaacgtgaatatctcgggtggcaccttcaccctcagccatggctgggctcctgggagccttctcacctactcctgcccccagggcctgtacccatccccagcatcacggctgtgcaagagcagcggacagtggcagaccccaggagccacccggtctctgtctaaggcggtctgcaaacctgtgcgctgtccagcccctgtctcctttgagaatggcatttataccccacggctggggtcctatcccgtgggtggcaatgtgagcttcgagtgtgaggatggcttcatattgcggggctcgcctgtgcgtcagtgtcgccccaacggcatgtgggatggagaaacagctgtgtgtgataatggggctggccactgccccaacccaggcatttcactgggcgcagtgcggacaggcttccgctttggtcatggggacaaggtccgctatcgctgctcctcgaatcttgtgctcacggggtcttcggagcgggagtgccagggcaacggggtctggagtggaacggagcccatctgccgccaaccctactcttatgacttccctgaggacgtggcccctgccctgggcacttccttctcccacatgcttggggccaccaatcccacccagaagacaaaggaaagcctgggccgtaaaatccaaatccagcgctctggtcatctgaacctctacctgctcctggactgttcgcagagtgtgtcggaaaatgactttctcatcttcaaggagagcgcctccctcatggtggacaggatcttcagctttgagatcaatgtgagcgttgccattatcacctttgcctcagagcccaaagtcctcatgtctgtcctgaacgacaactcccgggatatgactgaggtgatcagcagcctggaaaatgccaactataaagatcatgaaaatggaactgggactaacacctatgcagccttaaacagtgtctatctcatgatgaacaaccaaatgcgactcctcggcatggaaacgatggcctggcaggaaatccgacatgccatcatccttctgacagatggaaagtccaatatgggtggctctcccaagacagctgttgaccatatcagagagatcctgaacatcaaccagaagaggaatgactatctggacatctatgccatcggggtgggcaagctggatgtggactggagagaactgaatgagctagggtccaagaaggatggtgagaggcatgccttcattctgcaggacacaaaggctctgcaccaggtctttgaacatatgctggatgtctccaagctcacagacaccatctgcggggtggggaacatgtcagcaaacgcctctgaccaggagaggacaccctggcatgtcactattaagcccaagagccaagagacctgccggggggccctcatctccgaccaatgggtcctgacagcagctcattgcttccgcgatggcaacgaccactccctgtggagggtcaatgtgggagaccccaaatcccagtggggcaaagaattccttattgagaaggcggtgatctccccagggtttgatgtctttgccaaaaagaaccagggaatcctggagttctatggtgatgacatagctctgctgaagctggcccagaaagtaaagatgtccacccatgccaggcccatctgccttccctgcacgatggaggccaatctggctctgcggagacctcaaggcagcacctgtagggaccatgagaatgaactgctgaacaaacagagtgttcctgctcattttgtcgccttgaatgggagcaaactgaacattaaccttaagatgggagtggagtggacaagctgtgccgaggttgtctcccaagaaaaaaccatgttccccaacttgacagatgtcagggaggtggtgacagaccagttcctatgcagtgggacccaggaggatgagagtccctgcaagggtgggtctggtgagctggggtctttacaacccctgccttggctctgctgacaaaaactcccgcaaaagggcccctcgtagcaaggtcccgccgccacgagactttcacatcaatctcttccgcatgcagccctggctgaggcagcacctgggggatgtcctgaattttttacccctctagccatggccactgagccctctgctgccctgccagaatctgccgcccctccatcttctacctctgaatggccacccttagaccctgtgatccatcctctctcctagctgagtaaatccgggtctctaggatgccagaggcagcgcacacaagctgggaaatcctcagggctcctaccagcaggactgcctcgctgccccacctcccgctccttggcctgtccccagattccttccctggttgacttgactcatgcttgtttcactttcacatggaatttcccagttatgaaattaataaaaatcaatggtttcc

SEQ ID NO: 6588 - DNA, 2439 bp, Homo sapiens
  source 1..2439: mol_type = unassigned DNA
agtacacaaagcctgtgggggagatctattgaccctatagatatattagcatcagggagacagggcaaaggtttcacccttcagttcagtccccaatccctgcttattatttccctaacagaagaccatcccccttgccactccctggtttttcttctctggcagcaatgaagcagctgctgacccagctctagttttcgggaagtcagatgaccttttccctcccgcggctctctacctctcgccgcccctagggaggacaccatgggcccactgatggttcttttttgcctgctgttcctgtacccagctggccactgccccaacccaggcatttcactgggcgcagtgcggacaggcttccgctttggtcatggggacaaggtccgctatcgctgctcctcgaatcttgtgctcacggggtcttcggagcgggagtgccagggcaacggggtctggagtggaacggagcccatctgccgccaaccctactcttatgacttccctgaggacgtggcccctgccctgggcacttccttctcccacatgcttggggccaccaatcccacccagaagacaaaggaaagcctgggccgtaaaatccaaatccagcgctctggtcatctgaacctctacctgctcctggactgttcgcagagtgtgtcggaaaatgactttctcatcttcaaggagagcgcctccctcatggtggacaggatcttcagctttgagatcaatgtgagcgttgccattatcacctttgcctcagagcccaaagtcctcatgtctgtcctgaacgacaactcccgggatatgactgaggtgatcagcagcctggaaaatgccaactataaagatcatgaaaatggaactgggactaacacctatgcggccttaaacagtgtctatctcatgatgaacaaccaaatgcgactcctcggcatggaaacgatggcctggcaggaaatccgacatgccatcatccttctgacagatggaaagtccaatatgggtggctctcccaagacagctgttgaccatatcagagagatcctgaacatcaaccagaagaggaatgactatctggacatctatgccatcggggtgggcaagctggatgtggactggagagaactgaatgagctagggtccaagaaggatggtgagaggcatgccttcattctgcaggacacaaaggctctgcaccaggtctttgaacatatgctggatgtctccaagctcacagacaccatctgcggggtggggaacatgtcagcaaacgcctctgaccaggagaggacaccctggcatgtcactattaagcccaagagccaagagacctgccggggggccctcatctccgaccaatgggtcctgacagcagctcattgcttccgcgatggcaacgaccactccctgtggagggtcaatgtgggagaccccaaatcccagtggggcaaagaattccttattgagaaggcggtgatctccccagggtttgatgtctttgccaaaaagaaccagggaatcctggagttctatggtgatgacatagctctgctgaagctggcccagaaagtaaagatgtccacccatgccaggcccatctgccttccctgcacgatggaggccaatctggctctgcggagacctcaaggcagcacctgtagggaccatgagaatgaactgctgaacaaacagagtgttcctgctcattttgtcgccttgaatgggagcaaactgaacattaaccttaagatgggagtggagtggacaagctgtgccgaggttgtctcccaagaaaaaaccatgttccccaacttgacagatgtcagggaggtggtgacagaccagttcctatgcagtgggacccaggaggatgagagtccctgcaagggagaatctgggggagcagttttccttgagcggagattcaggttttttcaggtgggtctggtgagctggggtctttacaacccctgccttggctctgctgacaaaaactcccgcaaaagggcccctcgtagcaaggtcccgccgccacgagactttcacatcaatctcttccgcatgcagccctggctgaggcagcacctgggggatgtcctgaattttttacccctctagccatggccactgagccctctgctgccctgccagaatctgccgcccctccatcttctacctctgaatggccacccttagaccctgtgatccatcctctctcctagctgagtaaatccgggtctctaggatgccagaggcagcgcacacaagctgggaaatcctcagggctcctaccagcaggactgcctcgctgccccacctcccgctccttggcctgtccccagattccttccctggttgacttgactcatgcttgtttcactttcacatggaatttcccagttatgaaattaataaaaatcaatggtttcc

SEQ ID NO: 6589 - DNA, 2439 bp, Homo sapiens
  source 1..2439: mol_type = unassigned DNA
agtacacaaagcctgtgggggagatctattgaccctatagatatattagcatcagggagacagggcaaaggtttcacccttcagttcagtccccaatccctgcttattatttccctaacagaagaccatcccccttgccactccctggtttttcttctctggcagcaatgaagcagctgctgacccagctctagttttcgggaagtcagatgaccttttccctcccgcggctctctacctctcgccgcccctagggaggacaccatgggcccactgatggttcttttttgcctgctgttcctgtacccagctggccactgccccaacccaggcatttcactgggcgcagtgcggacaggcttccgctttggtcatggggacaaggtccgctatcgctgctcctcgaatcttgtgctcacggggtcttcggagcgggagtgccagggcaacggggtctggagtggaacggagcccatctgccgccaaccctactcttatgacttccctgaggacgtggcccctgccctgggcacttccttctcccacatgcttggggccaccaatcccacccagaagacaaaggaaagcctgggccgtaaaatccaaatccagcgctctggtcatctgaacctctacctgctcctggactgttcgcagagtgtgtcggaaaatgactttctcatcttcaaggagagcgcctccctcatggtggacaggatcttcagctttgagatcaatgtgagcgttgccattatcacctttgcctcagagcccaaagtcctcatgtctgtcctgaacgacaactcccgggatatgactgaggtgatcagcagcctggaaaatgccaactataaagatcatgaaaatggaactgggactaacacctatgcagccttaaacagtgtctatctcatgatgaacaaccaaatgcgactcctcggcatggaaacgatggcctggcaggaaatccgacatgccatcatccttctgacagatggaaagtccaatatgggtggctctcccaagacagctgttgaccatatcagagagatcctgaacatcaaccagaagaggaatgactatctggacatctatgccatcggggtgggcaagctggatgtggactggagagaactgaatgagctagggtccaagaaggatggtgagaggcatgccttcattctgcaggacacaaaggctctgcaccaggtctttgaacatatgctggatgtctccaagctcacagacaccatctgcggggtggggaacatgtcagcaaacgcctctgaccaggagaggacaccctggcatgtcactattaagcccaagagccaagagacctgccggggggccctcatctccgaccaatgggtcctgacagcagctcattgcttccgcgatggcaacgaccactccctgtggagggtcaatgtgggagaccccaaatcccagtggggcaaagaattccttattgagaaggcggtgatctccccagggtttgatgtctttgccaaaaagaaccagggaatcctggagttctatggtgatgacatagctctgctgaagctggcccagaaagtaaagatgtccacccatgccaggcccatctgccttccctgcacgatggaggccaatctggctctgcggagacctcaaggcagcacctgtagggaccatgagaatgaactgctgaacaaacagagtgttcctgctcattttgtcgccttgaatgggagcaaactgaacattaaccttaagatgggagtggagtggacaagctgtgccgaggttgtctcccaagaaaaaaccatgttccccaacttgacagatgtcagggaggtggtgacagaccagttcctatgcagtgggacccaggaggatgagagtccctgcaagggagaatctgggggagcagttttccttgagcggagattcaggttttttcaggtgggtctggtgagctggggtctttacaacccctgccttggctctgctgacaaaaactcccgcaaaagggcccctcgtagcaaggtcccgccgccacgagactttcacatcaatctcttccgcatgcagccctggctgaggcagcacctgggggatgtcctgaattttttacccctctagccatggccactgagccctctgctgccctgccagaatctgccgcccctccatcttctacctctgaatggccacccttagaccctgtgatccatcctctctcctagctgagtaaatccgggtctctaggatgccagaggcagcgcacacaagctgggaaatcctcagggctcctaccagcaggactgcctcgctgccccacctcccgctccttggcctgtccccagattccttccctggttgacttgactcatgcttgtttcactttcacatggaatttcccagttatgaaattaataaaaatcaatggtttcc

SEQ ID NO: 6590 - DNA, 2701 bp, Homo sapiens
  source 1..2701: mol_type = unassigned DNA
agtacacaaagcctgtgggggagatctattgaccctatagatatattagcatcagggagacagggcaaaggtttcacccttcagttcagtccccaatccctgcttattatttccctaacagaagaccatcccccttgccactccctggtttttcttctctggcagcaatgaagcagctgctgacccagctctagttttcgggaagtcagatgaccttttccctcccgcggctctctacctctcgccgcccctagggaggacaccatgggcccactgatggttcttttttgcctgctgttcctgtacccaggtctggcagactcggctccctcctgccctcagaacgtgaatatctcgggtggcaccttcaccctcagccatggctgggctcctgggagccttctcacctactcctgcccccagggcctgtacccatccccagcatcacggctgtgcaagagcagcggacagtggcagaccccaggagccacccggtctctgtctaaggcggtctgcaaacctgtgcgctgtccagcccctgtctcctttgagaatggcatttataccccacggctggggtcctatcccgtgggtggcaatgtgagcttcgagtgtgaggatggcttcatattgcggggctcgcctgtgcgtcagtgtcgccccaacggcatgtgggatggagaaacagctgtgtgtgataatggggctggccactgccccaacccaggcatttcactgggcgcagtgcggacaggcttccgctttggtcatggggacaaggtccgctatcgctgctcctcgaatcttgtgctcacggggtcttcggagcgggagtgccagggcaacggggtctggagtggaacggagcccatctgccgccaaccctactcttatgacttccctgaggacgtggcccctgccctgggcacttccttctcccacatgcttggggccaccaatcccacccagaagacaaaggatcttcagctttgagatcaatgtgagcgttgccattatcacctttgcctcagagcccaaagtcctcatgtctgtcctgaacgacaactcccgggatatgactgaggtgatcagcagcctggaaaatgccaactataaagatcatgaaaatggaactgggactaacacctatgcagccttaaacagtgtctatctcatgatgaacaaccaaatgcgactcctcggcatggaaacgatggcctggcaggaaatccgacatgccatcatccttctgacagatggaaagtccaatatgggtggctctcccaagacagctgttgaccatatcagagagatcctgaacatcaaccagaagaggaatgactatctggacatctatgccatcggggtgggcaagctggatgtggactggagagaactgaatgagctagggtccaagaaggatggtgagaggcatgccttcattctgcaggacacaaaggctctgcaccaggtctttgaacatatgctggatgtctccaagctcacagacaccatctgcggggtggggaacatgtcagcaaacgcctctgaccaggagaggacaccctggcatgtcactattaagcccaagagccaagagacctgccggggggccctcatctccgaccaatgggtcctgacagcagctcattgcttccgcgatggcaacgaccactccctgtggagggtcaatgtgggagaccccaaatcccagtggggcaaagaattccttattgagaaggcggtgatctccccagggtttgatgtctttgccaaaaagaaccagggaatcctggagttctatggtgatgacatagctctgctgaagctggcccagaaagtaaagatgtccacccatgccaggcccatctgccttccctgcacgatggaggccaatctggctctgcggagacctcaaggcagcacctgtagggaccatgagaatgaactgctgaacaaacagagtgttcctgctcattttgtcgccttgaatgggagcaaactgaacattaaccttaagatgggagtggagtggacaagctgtgccgaggttgtctcccaagaaaaaaccatgttccccaacttgacagatgtcagggaggtggtgacagaccagttcctatgcagtgggacccaggaggatgagagtccctgcaagggagaatctgggggagcagttttccttgagcggagattcaggttttttcaggtgggtctggtgagctggggtctttacaacccctgccttggctctgctgacaaaaactcccgcaaaagggcccctcgtagcaaggtcccgccgccacgagactttcacatcaatctcttccgcatgcagccctggctgaggcagcacctgggggatgtcctgaattttttacccctctagccatggccactgagccctctgctgccctgccagaatctgccgcccctccatcttctacctctgaatggccacccttagaccctgtgatccatcctctctcctagctgagtaaatccgggtctctaggatgccagaggcagcgcacacaagctgggaaatcctcagggctcctaccagcaggactgcctcgctgccccacctcccgctccttggcctgtccccagattccttccctggttgacttgactcatgcttgtttcactttcacatggaatttcccagttatgaaattaataaaaatcaatggtttcc

SEQ ID NO: 6591 - DNA, 2150 bp, Homo sapiens; identical to SEQ ID NO: 6557
  source 1..2150: mol_type = unassigned DNA

SEQ ID NO: 6592 - DNA, 1906 bp, Homo sapiens; identical to SEQ ID NO: 6579
  source 1..1906: mol_type = unassigned DNA

SEQ ID NO: 6593 - DNA, 2150 bp, Homo sapiens; identical to SEQ ID NO: 6557
  source 1..2150: mol_type = unassigned DNA

SEQ ID NO: 6594 - DNA, 2439 bp, Homo sapiens; identical to SEQ ID NO: 6588
  source 1..2439: mol_type = unassigned DNA

SEQ ID NO: 6595 - DNA, 2785 bp, Homo sapiens; identical to SEQ ID NO: 6532
  source 1..2785: mol_type = unassigned DNA

SEQ ID NO: 6596 - DNA, 2785 bp, Homo sapiens; identical to SEQ ID NO: 6532
  source 1..2785: mol_type = unassigned DNA

SEQ ID NO: 6597 - DNA, 2701 bp, Homo sapiens
  source 1..2701: mol_type = unassigned DNA
agtacacaaagcctgtgggggagatctattgaccctatagatatattagcatcagggagacagggcaaaggtttcacccttcagttcagtccccaatccctgcttattatttccctaacagaagaccatcccccttgccactccctggtttttcttctctggcagcaatgaagcagctgctgacccagctctagttttcgggaagtcagatgaccttttccctcccgcggctctctacctctcgccgcccctagggaggacaccatgggcccactgatggttcttttttgcctgctgttcctgtacccaggtctggcagactcggctccctcctgccctcagaacgtgaatatctcgggtggcaccttcaccctcagccatggctgggctcctgggagccttctcacctactcctgcccccagggcctgtacccatccccagcatcacggctgtgcaagagcagcggacagtggcagaccccaggagccacccggtctctgtctaaggcggtctgcaaacctgtgcgctgtccagcccctgtctcctttgagaatggcatttataccccacggctggggtcctatcccgtgggtggcaatgtgagcttcgagtgtgaggatggcttcatattgcggggctcgcctgtgcgtcagtgtcgccccaacggcatgtgggatggagaaacagctgtgtgtgataatggggctggccactgccccaacccaggcatttcactgggcgcagtgcggacaggcttccgctttggtcatggggacaaggtccgctatcgctgctcctcgaatcttgtgctcacggggtcttcggagcgggagtgccagggcaacggggtctggagtggaacggagcccatctgccgccaaccctactcttatgacttccctgaggacgtggcccctgccctgggcacttccttctcccacatgcttggggccaccaatcccacccagaagacaaaggatcttcagctttgagatcaatgtgagcgttgccattatcacctttgcctcagagcccaaagtcctcatgtctgtcctgaacgacaactcccgggatatgactgaggtgatcagcagcctggaaaatgccaactataaagatcatgaaaatggaactgggactaacacctatgcggccttaaacagtgtctatctcatgatgaacaaccaaatgcgactcctcggcatggaaacgatggcctggcaggaaatccgacatgccatcatccttctgacagatggaaagtccaatatgggtggctctcccaagacagctgttgaccatatcagagagatcctgaacatcaaccagaagaggaatgactatctggacatctatgccatcggggtgggcaagctggatgtggactggagagaactgaatgagctagggtccaagaaggatggtgagaggcatgccttcattctgcaggacacaaaggctctgcaccaggtctttgaacatatgctggatgtctccaagctcacagacaccatctgcggggtggggaacatgtcagcaaacgcctctgaccaggagaggacaccctggcatgtcactattaagcccaagagccaagagacctgccggggggccctcatctccgaccaatgggtcctgacagcagctcattgcttccgcgatggcaacgaccactccctgtggagggtcaatgtgggagaccccaaatcccagtggggcaaagaattccttattgagaaggcggtgatctccccagggtttgatgtctttgccaaaaagaaccagggaatcctggagttctatggtgatgacatagctctgctgaagctggcccagaaagtaaagatgtccacccatgccaggcccatctgccttccctgcacgatggaggccaatctggctctgcggagacctcaaggcagcacctgtagggaccatgagaatgaactgctgaacaaacagagtgttcctgctcattttgtcgccttgaatgggagcaaactgaacattaaccttaagatgggagtggagtggacaagctgtgccgaggttgtctcccaagaaaaaaccatgttccccaacttgacagatgtcagggaggtggtgacagaccagttcctatgcagtgggacccaggaggatgagagtccctgcaagggagaatctgggggagcagttttccttgagcggagattcaggttttttcaggtgggtctggtgagctggggtctttacaacccctgccttggctctgctgacaaaaactcccgcaaaagggcccctcgtagcaaggtcccgccgccacgagactttcacatcaatctcttccgcatgcagccctggctgaggcagcacctgggggatgtcctgaattttttacccctctagccatggccactgagccctctgctgccctgccagaatctgccgcccctccatcttctacctctgaatggccacccttagaccctgtgatccatcctctctcctagctgagtaaatccgggtctctaggatgccagaggcagcgcacacaagctgggaaatcctcagggctcctaccagcaggactgcctcgctgccccacctcccgctccttggcctgtccccagattccttccctggttgacttgactcatgcttgtttcactttcacatggaatttcccagttatgaaattaataaaaatcaatggtttcc

SEQ ID NO: 6598 - DNA, 2785 bp, Homo sapiens; identical to SEQ ID NO: 6532
  source 1..2785: mol_type = unassigned DNA

SEQ ID NO: 6599 - DNA, 1999 bp, Homo sapiens; identical to SEQ ID NO: 6578
  source 1..1999: mol_type = unassigned DNA

SEQ ID NO: 6600 - DNA, 2439 bp, Homo sapiens; identical to SEQ ID NO: 6588
  source 1..2439: mol_type = unassigned DNA

SEQ ID NO: 6601 - DNA, 2439 bp, Homo sapiens; identical to SEQ ID NO: 6588
  source 1..2439: mol_type = unassigned DNA

SEQ ID NO: 6602 - DNA, 2439 bp, Homo sapiens; identical to SEQ ID NO: 6588
  source 1..2439: mol_type = unassigned DNA

SEQ ID NO: 6603 - DNA, 2150 bp, Homo sapiens; identical to SEQ ID NO: 6557
  source 1..2150: mol_type = unassigned DNA

SEQ ID NO: 6604 - DNA, 2785 bp, Homo sapiens; identical to SEQ ID NO: 6532
  source 1..2785: mol_type = unassigned DNA

SEQ ID NO: 6605 - DNA, 1999 bp, Homo sapiens; identical to SEQ ID NO: 6578
  source 1..1999: mol_type = unassigned DNA

SEQ ID NO: 6606 - DNA, 1999 bp, Homo sapiens; identical to SEQ ID NO: 6578
  source 1..1999: mol_type = unassigned DNA

SEQ ID NO: 6607 - DNA, 5132 bp, Homo sapiens
  source 1..5132: mol_type = unassigned DNA
agataaaaagccagctccagcaggcgctgctcactcctccccatcctctccctctgtccctctgtccctctgaccctgcactgtcccagcaccatgggacccacctcaggtcccagcctgctgctcctgctactaacccacctccccctggctctggggagtcccatgtactctatcatcacccccaacatcttgcggctggagagcgaggagaccatggtgctggaggcccacgacgcgcaaggggatgttccagtcactgttactgtccacgacttcccaggcaaaaaactagtgctgtccagtgagaagactgtgctgacccctgccaccaaccacatgggcaacgtcaccttcacgatcccagccaacagggagttcaagtcagaaaaggggcgcaacaagttcgtgaccgtgcaggccaccttcgggacccaagtggtggagaaggtggtgctggtcagcctgcagagcgggtacctcttcatccagacagacaagaccatctacacccctggctccacagttctctatcggatcttcaccgtcaaccacaagctgctacccgtgggccggacggtcatggtcaacattgagaacccggaaggcatcccggtcaagcaggactccttgtcttctcagaaccagcttggcgtcttgcccttgtcttgggacattccggaactcgtcaacatgggccagtggaagatccgagcctactatgaaaactcaccacagcaggtcttctccactgagtttgaggtgaaggagtacgtgctgcccagtttcgaggtcatagtggagcctacagagaaattctactacatctataacgagaagggcctggaggtcaccatcaccgccaggttcctctacgggaagaaagtggagggaactgcctttgtcatcttcgggatccaggatggcgaacagaggatttccctgcctgaatccctcaagcgcattccgattgaggatggctcgggggaggttgtgctgagccggaaggtactgctggacggggtgcagaacccccgagcagaagacctggtggggaagtctttgtacgtgtctgccaccgtcatcttgcactcaggcagtgacatggtgcaggcagagcgcagcgggatccccatcgtgacctctccctaccagatccacttcaccaagacacccaagtacttcaaaccaggaatgccctttgacctcatggtgttcgtgacgaaccctgatggctctccagcctaccgagtccccgtggcagtccagggcgaggacactgtgcagtctctaacccagggagatggcgtggccaaactcagcatcaacacacaccccagccagaagcccttgagcatcacggtgcgcacgaagaagcaggagctctcggaggcagagcaggctaccaggaccatgcaggctctgccctacagcaccgtgggcaactccaacaattacctgcatctctcagtgctacgtacagagctcagacccggggagaccctcaacgtcaacttcctcctgcgaatggaccgcgcccacgaggccaagatccgctactacacctacctgatcatgaacaagggcaggctgttgaaggcgggacgccaggtgcgagagcccggccaggacctggtggtgctgcccctgtccatcaccaccgacttcatcccttccttccgcctggtggcgtactacacgctgatcggtgccagcggccagagggaggtggtggccgactccgtgtgggtggacgtcaaggactcctgcgtgggctcgctggtggtaaaaagcggccagtcagaagaccggcagcctgtacctgggcagcagatgaccctgaagatagagggtgaccacggggcccgggtggtactggtggccgtggacaagggcgtgttcgtgctgaataagaagaacaaactgacgcagagtaagatctgggacgtggtggagaaggcagacatcggctgcaccccgggcagtgggaaggattacgccggtgtcttctccgacgcagggctgaccttcacgagcagcagtggccagcagaccgcccagagggcagaacttcagtgcccgcagccagccgcccgccgacgccgttccgtgcagctcacggagaagcgaatggacaaagtcggcaagtaccccaaggagctgcgcaagtgctgcgaggacggcatgcgggagaaccccatgaggttctcgtgccagcgccggacccgtttcatctccctgggcgaggcgtgcaagaaggtcttcctggactgctgcaactacatcacagagctgcggcggcagcacgcgcgggccagccacctgggcctggccaggagtaacctggatgaggacatcattgcagaagagaacatcgtttcccgaagtgagttcccagagagctggctgtggaacgttgaggacttgaaagagccaccgaaaaatggaatctctacgaagctcatgaatatatttttgaaagactccatcaccacgtgggagattctggctgtgagcatgtcggacaagaaagggatctgtgtggcagaccccttcgaggtcacagtaatgcaggacttcttcatcgacctgcggctaccctactctgttgttcgaaacgagcaggtggaaatccgagccgttctctacaattaccggcagaaccaagagctcaaggtgagggtggaactactccacaatccagccttctgcagcctggccaccaccaagaggcgtcaccagcagaccgtaaccatcccccccaagtcctcgttgtccgttccatatgtcatcgtgccgctaaagaccggcctgcaggaagtggaagtcaaggctgctgtctaccatcatttcatcagtgacggtgtcaggaagtccctgaaggtcgtgccggaaggaatcagaatgaacaaaactgtggctgttcgcaccctggatccagaacgcctgggccgtgaaggagtgcagaaagaggacatcccacctgcagacctcagtgaccaagtcccggacaccgagtctgagaccagaattctcctgcaagggaccccagtggcccagatgacagaggatgccgtcgacgcggaacggctgaagcacctcattgtgaccccctcgggctgcggggaacagaacatgatcggcatgacgcccacggtcatcgctgtgcattacctggatgaaacggagcagtgggagaagttcggcctagagaagcggcagggggccttggagctcatcaagaaggggtacacccagcagctggccttcagacaacccagctctgcctttgcggccttcgtgaaacgggcacccagcacctggctgaccgcctacgtggtcaaggtcttctctctggctgtcaacctcatcgccatcgactcccaagtcctctgcggggctgttaaatggctgatcctggagaagcagaagcccgacggggtcttccaggaggatgcgcccgtgatacaccaagaaatgattggtggattacggaacaacaacgagaaagacatggccctcacggcctttgttctcatctcgctgcaggaggctaaagatatttgcgaggagcaggtcaacagcctgccaggcagcatcactaaagcaggagacttccttgaagccaactacatgaacctacagagatcctacactgtggccattgctggctatgctctggcccagatgggcaggctgaaggggcctcttcttaacaaatttctgaccacagccaaagataagaaccgctgggaggaccctggtaagcagctctacaacgtggaggccacatcctatgccctcttggccctactgcagctaaaagactttgactttgtgcctcccgtcgtgcgttggctcaatgaacagagatactacggtggtggctatggctctacccaggccaccttcatggtgttccaagccttggctcaataccaaaaggacgcccctgaccaccaggaactgaaccttgatgtgtccctccaactgcccagccgcagctccaagatcacccaccgtatccactgggaatctgccagcctcctgcgatcagaagagaccaaggaaaatgagggtttcacagtcacagctgaaggaaaaggccaaggcaccttgtcggtggtgacaatgtaccatgctaaggccaaagatcaactcacctgtaataaattcgacctcaaggtcaccataaaaccagcaccggaaacagaaaagaggcctcaggatgccaagaacactatgatccttgagatctgtaccaggtaccggggagaccaggatgccactatgtctatattggacatatccatgatgactggctttgctccagacacagatgacctgaagcagctggccaatggtgttgacagatacatctccaagtatgagctggacaaagccttctccgataggaacaccctcatcatctacctggacaaggtctcacactctgaggatgactgtctagctttcaaagttcaccaatactttaatgtagagcttatccagcctggagcagtcaaggtctacgcctattacaacctggaggaaagctgtacccggttctaccatccggaaaaggaggatggaaagctgaacaagctctgccgtgatgaactgtgccgctgtgctgaggagaattgcttcatacaaaagtcggatgacaaggtcaccctggaagaacggctggacaaggcctgtgagccaggagtggactatgtgtacaagacccgactggtcaaggttcagctgtccaatgactttgacgagtacatcatggccattgagcagaccatcaagtcaggctcggatgaggtgcaggttggacagcagcgcacgttcatcagccccatcaagtgcagagaagccctgaagctggaggagaagaaacactacctcatgtggggtctctcctccgatttctggggagagaagcccaacctcagctacatcatcgggaaggacacttgggtggagcactggcccgaggaggacgaatgccaagacgaagagaaccagaaacaatgccaggacctcggcgccttcaccgagagcatggttgtctttgggtgccccaactgaccacacccccattcccccactccagataaagcttcagttatatctca

SEQ ID NO: 6608 - DNA, 2243 bp, Homo sapiens
  source 1..2243: mol_type = unassigned DNA
tgaaattcagggactctttggtggagcaattaccagtcaacttcagggtattatgataaactctgatctggggaggaaccaggactacatagatcaaggcagttttcttctttgagaaactatcccagatatcatcatagagtcttctgctcttcctcaactaccaaagaaaaacatcagcgaagcagcaggccatgcaccccccaaaaactccatctggggctcttcatagaaaaaggaaaatggcagcctggcccttctccaggctgtggaaagtctctgatccaattctcttccaaatgaccttgatcgctgctctgttgcctgctgttcttggcaattgtggtcctccacccactttatcatttgctgccccgatggatattacgttgactgagacacgcttcaaaactggaactactctgaaatacacctgcctccctggctacgtcagatcccattcaactcagacgcttacctgtaattctgatggcgaatgggtgtataacaccttctgtatctacaaacgatgcagacacccaggagagttacgtaatgggcaagtagagattaagacagatttatcttttggatcacaaatagaattcagctgttcagaaggatttttcttaattggctcaaccactagtcgttgtgaagtccaagatagaggagttggctggagtcatcctctcccacaatgtgaaattgtcaagtgtaagcctcctccagacatcaggaatggaaggcacagcggtgaagaaaatttctacgcatacggcttttctgtcacctacagctgtgacccccgcttctcactcttgggccatgcctccatttcttgcactgtggagaatgaaacaataggtgtttggagaccaagccctcctacctgtgaaaaaatcacctgtcgcaagccagatgtttcacatggggaaatggtctctggatttggacccatctataattacaaagacactattgtgtttaagtgccaaaaaggttttgttctcagaggcagcagtgtaattcattgtgatgctgatagcaaatggaatccttctcctcctgcttgtgagcccaatagttgtattaatttaccagacattccacatgcttcctgggaaacatatcctaggccgacaaaagaggatgtgtatgttgttgggactgtgttaaggtaccgctgtcatcctggctacaaacccactacagatgagcctacgactgtgatttgtcagaaaaatttgagatggaccccataccaaggatgtgaggcgttatgttgccctgaaccaaagctaaataatggtgaaatcactcaacacaggaaaagtcgtcctgccaatcactgtgtttatttctatggagatgagatttcattttcatgtcatgagaccagtaggttttcagctatatgccaaggagatggcacgtggagtccccgaacaccatcatgtggagacatttgcaattttcctcctaaaattgcccatgggcattataaacaatctagttcatacagctttttcaaagaagagattatatatgaatgtgataaaggctacattctggtcggacaggcgaaactctcctgcagttattcacactggtcagctccagcccctcaatgtaaagctctgtgtcggaaaccagaattagtgaatggaaggttgtctgtggataaggatcagtatgttgagcctgaaaatgtcaccatccaatgtgattctggctatggtgtggttggtccccaaagtatcacttgctctgggaacagaacctggtacccagaggtgcccaagtgtgagtgggagacccccgaaggctgtgaacaagtgctcacaggcaaaagactcatgcagtgtctcccaaacccagaggatgtgaaaatggccctggaggtatataagctgtctctggaaattgaacaactggaactacagagagacagcgcaagacaatccactttggataaagaactataatttttctcaaaagaaggaggaaaaggtgtcttgctggcttgcctcttgcaattcaatacagatcagtttagcaaatctactgtcaatttggcagtgatattcatcataataaatatctagaaatgataatttgctaaagtttagtgctttgagattgtgaaattattaatcatcctctgtgtggctcatgtttttgcttttcaacacacaaagcacaaattttttttcgattaaaaatgtatgtataaaaaacta

SEQ ID NO: 6609 - DNA, 708 bp, Homo sapiens
  source 1..708: mol_type = unassigned DNA
agggtattatgataaactctgatctggggaggaaccaggactacatagatcaaggcagttttcttctttgagaaactatcccagatatcatcatagagtcttctgctcttcctcaactaccaaaggctgtcatttccttgaagacatggatcccataacatttattctagtgctttatgacaagttggaattcaatgactatttattaaattgagttctttcagcagaaaaacatcagcgaagcagcaggccatgcaccccccaaaaactccatctggggctcttcatagaaaaaggaaaatggcagcctggcccttctccaggctgtggaaagtctctgatccaattctcttccaaatgaccttgatcgctgctctgttgcctgctgttcttggcaattgtggtcctccacccactttatcatttgctgccccgatggatattacgttgactgagacacgcttcaaaactggaactactctgaaatacacctgcctccctggctacgtcagatcccattcaactcagacgcttacctgtaattctgatggcgaatgggtgtataacaccttctgtatctacaaacgatgcagacacccaggagagttacgtaatgggcaagtagagattaagacagatttatcttttggatcacaaatagaattcagctgttcagaaggatttttcttaattggctcaaccactagt

SEQ ID NO: 6610 - DNA, 1117 bp, Homo sapiens
  source 1..1117: mol_type = unassigned DNA
cattcccagaaaccaggaaatttctgaaactgagttttaaacctggcaactcttttaccatccctttgtatttttgcagttcctccctataccagcttccttacagctgttctgatttcctgtcgtaagattttttcttttcattttctccagggagggtaaatcaatataacctcttctctagagaggaggtggttaggttggtcttaagcagtgttagaagatctattttttttcaaaccaggtgtctgagctgggtgaattccagcctggggagaggactttgatcaccagatgtttttttggtgtgcgtgctgtcttatggttgcgtggcgagtttctgcttcagatgcagagcactgtccagagcttcctccagtggacaatagcatatttgtcgcaaaggaggtggaaggacagattctggggacttacgtttgtatcaagggctaccacctggtaggaaagaagacccttttttgcaatgcctctaaggagtgggataacaccactactgagtgccgcttgggccactgtcctgatcctgtgctggtgaatggagagttcagttcttcagggcctgtgaatgtaagtgacaaaatcacgtttatgtgcaatgaccactacatcctcaagggcagcaatcggagccagtgtctagaggaccacacctgggcacctccctttcccatctgcaaaagtagggactgtgaccctcctgggaatccagttcatggctattttgaaggaaataacttcaccttaggatccaccattagttattactgtgaagacaggtactacttagtgggcgtgcaggagcagcaatgcgttgatggggagtggagcagtgcacttccagtctgcaagttgatccaggaagctcccaaaccagagtgtgagaaggcacttcttgcctttcaggagagtaagaacctctgcgaagccatggagaactttatgcaacaattaaaggaaagtggcatgacaatggaggagctaaaatattctctggagctgaagaaagctgagttgaaggcaaaattgttgtaacactacagctgagcagatgtaatagaaataaacctatgaataaattttcttcttggttctgaaa

SEQ ID NO: 6611 - DNA, 1113 bp, Homo sapiens
  source 1..1113: mol_type = unassigned DNA
attcccagaaaccaggaaatttctgaaactgagttttaaacctggcaactcttttaccatccctttgtatttttgcagttcctccctataccagcttccttacagctgttctgatttcctgtcgtaagattttttcttttcattttctccagggagggtaaatcaatataacctcttctctagagaggaggtggttaggttggtcttaagcagtgttagaagatctattttttttcaaaccaggtgtctgagctgggtgaattccagcctggggagaggactttgatcaccagatgtttttttggtgtgcgtgctgtcttatggttgcgtggcgagtttctgcttcagatgagcactgtccagagcttcctccagtggacaatagcatatttgtcgcaaaggaggtggaaggacagattctggggacttacgtttgtatcaagggctaccacctggtaggaaagaagacccttttttgcaatgcctctaaggagtgggataacaccactactgagtgccgcttgggccactgtcctgatcctgtgctggtgaatggagagttcagttcttcagggcctgtgaatgtaagtgacaaaatcacgtttatgtgcaatgaccactacatcctcaagggcagcaatcggagccagtgtctagaggaccacacctgggcacctccctttcccatctgcaaaagtagggactgtgaccctcctgggaatccagttcatggctattttgaaggaaataacttcaccttaggatccaccattagttattactgtgaagacaggtactacttagtgggcgtgcaggagcagcaatgcgttgatggggagtggagcagtgcacttccagtctgcaagttgatccaggaagctcccaaaccagagtgtgagaaggcacttcttgcctttcaggagagtaagaacctctgcgaagccatggagaactttatgcaacaattaaaggaaagtggcatgacaatggaggagctaaaatattctctggagctgaagaaagctgagttgaaggcaaaattgttgtaacactacagctgagcagatgtaatagaaataaacctatgaataaattttcttcttggttctgaaa

SEQ ID NO: 6612 - DNA, 978 bp, Homo sapiens
  source 1..978: mol_type = unassigned DNA
aagcgagaacaatgtgtcactgcaggactttggagctctcagctttggagtcagttaagaccagttccttgctgggaagccctaactctggagggacagagacaggtgtctgagctgggtgaattccagcctggggagaggactttgatcaccagatgtttttttggtgtgcgtgctgtcttatggttgcgtggcgagtttctgcttcagatgcagagcactgtccagagcttcctccagtggacaatagcatatttgtcgcaaaggaggtggaaggacagattctggggacttacgtttgtatcaagggctaccacctggtaggaaagaagacccttttttgcaatgcctctaaggagtgggataacaccactactgagtgccgcttgggccactgtcctgatcctgtgctggtgaatggagagttcagttcttcagggcctgtgaatgtaagtgacaaaatcacgtttatgtgcaatgaccactacatcctcaagggcagcaatcggagccagtgtctagaggaccacacctgggcacctccctttcccatctgcaaaagtagggactgtgaccctcctgggaatccagttcatggctattttgaaggaaataacttcaccttaggatccaccattagttattactgtgaagacaggtactacttagtgggcgtgcaggagcagcaatgcgttgatggggagtggagcagtgcacttccagtctgcaagttgatccaggaagctcccaaaccagagtgtgagaaggcacttcttgcctttcaggagagtaagaacctctgcgaagccatggagaactttatgcaacaattaaaggaaagtggcatgacaatggaggagctaaaatattctctggagctgaagaaagctgagttgaaggcaaaattgttgtaacactacagctgagcagatgtaatagaaataaacctatgaataaattttcttcttggttctgaaa

SEQ ID NO: 6613 - DNA, 949 bp, Homo sapiens
  source 1..949: mol_type = unassigned DNA
gcaactcttttaccatccctttgtatttttgcagttcctccctataccagcttccttacagctgttctgatttcctgtcgtgtctgagctgggtgaattccagcctggggagaggactttgatcaccagatgtttttttggtgtgcgtgctgtcttatggttgcgtggcgagtttctgcttcagatgcagagcactgtccagagcttcctccagtggacaatagcatatttgtcgcaaaggaggtggaaggacagattctggggacttacgtttgtatcaagggctaccacctggtaggaaagaagacccttttttgcaatgcctctaaggagtgggataacaccactactgagtgccgcttgggccactgtcctgatcctgtgctggtgaatggagagttcagttcttcagggcctgtgaatgtaagtgacaaaatcacgtttatgtgcaatgaccactacatcctcaagggcagcaatcggagccagtgtctagaggaccacacctgggcacctccctttcccatctgcaaaagtagggactgtgaccctcctgggaatccagttcatggctattttgaaggaaataacttcaccttaggatccaccattagttattactgtgaagacaggtactacttagtgggcgtgcaggagcagcaatgcgttgatggggagtggagcagtgcacttccagtctgcaagttgatccaggaagctcccaaaccagagtgtgagaaggcacttcttgcctttcaggagagtaagaacctctgcgaagccatggagaactttatgcaacaattaaaggaaagtggcatgacaatggaggagctaaaatattctctggagctgaagaaagctgagttgaaggcaaaattgttgtaacactacagctgagcagatgtaatagaaataaacctatgaataaattttcttcttggttctg

SEQ ID NO: 6614 - DNA, 1001 bp, Homo sapiens
  source 1..1001: mol_type = unassigned DNA
ggtgtgcgtgctgtcttatggttgcgtggcgagtttctgcttcagatgagcactgtccagagcttcctccagtggacaatagcatatttgtcgcaaaggaggtggaaggacagattctggggacttacgtttgtatcaagggctaccacctggtaggaaagaagacccttttttgcaatgcctctaaggagtgggataacaccactactgagtgccgcttgggccactgtcctgatcctgtgctggtgaatggagagttcagttcttcagggcctgtgaatgtaagtgacaaaatcacgtttatgtgcaatgaccactacatcctcaagggcagcaatcggagccagtgtctagaggaccacacctgggcacctccctttcccatctgcaaaagtattccacagactcgtcctcttcccttccagccatgttctcccctatttctttttcttttgagacagagtcttgctctgtttcccaggctggagtgcagtggcagaatcttggctcactgcaacctccacctcccaggttcaagcagttctcatgcctcagcctcccaagtagctgggattacaggtgcgcacccacgctgggctaatttttgtatttttagtagagactgggtttcaccatgttggccaggctggtctcaaattcctgacctcaggtgatccacccccttcagcctcccaaagtgctgggattacaggtgtgagccactgctcccaccttctcccctttttctgatactctctttgatatagtttggatgtgtgttcctgctcaaatctcatattgaattgtaatctccagtgttggaggtggtgcttggtgggaggtgactggatcatgcgggtggatttctcatgaatggtctagcaccatctccctaggtactgtcctcatgacagcgagtgagttctcatgagatctggttgtttaaaagtgtgtaacgcctcctccctctctcgttcctgcacctgttatgtgagatgcct

SEQ ID NO: 6615 - DNA, 743 bp, Homo sapiens
  source 1..743: mol_type = unassigned DNA
caaaaagactggtcaactggatttgcattcccagaaaccaggaaatttctgaaactgagttttaaacctggcaactcttttaccatccctttgtatttttgcagttcctccctataccagcttccttacagctgttctgatttcctgtcggtgtctgagctgggtgaattccagcctggggagaggactttgatcaccagatgtttttttggtgtgcgtgctgtcttatggttgcgtggcgagtttctgcttcagatgcagagcactgtccagagcttcctccagtggacaatagcatatttgtcgcaaaggaggtggaaggacagattctggggacttacgtttgtatcaagggctaccacctggtaggaaagaagacccttttttgcaatgcctctaaggagtgggataacaccactactgagtgccgcttgggccactgtcctgatcctgtgctggtgaatggagagttcagttcttcagggcctgtgaatgtaagtgacaaaatcacgtttatgtgcaatgaccactacatcctcaagggcagcaatcggagccagtgtctagaggaccacacctgggcacctccctttcccatctgcaaaagtagggactgtgaccctcctgggaatccagttcatggctattttgaaggaaataacttcaccttaggatccaccattagttattactgtgaagacaggtactacttagtgggcgtgcaggagcagcaatgcgttgat

SEQ ID NO: 6616 - DNA, 5460 bp, Homo sapiens
  source 1..5460: mol_type = unassigned DNA
agagtcaactctgccccgaggcctagcttggccagaaggtagcagacagacagacggatctaacctctcttggatcctccagccatgaggctgctctgggggctgatctgggcatccagcttcttcaccttatctctgcagaagcccaggttgctcttgttctctccttctgtggttcatctgggggtccccctatcggtgggggtgcagctccaggatgtgccccgaggacaggtagtgaaaggatcagtgttcctgagaaacccatctcgtaataatgtcccctgctccccaaaggtggacttcacccttagctcagaaagagacttcgcactcctcagtctccaggtgcccttgaaagatgcgaagagctgtggcctccatcaactcctcagaggccctgaggtccagctggtggcccattcgccatggctaaaggactctctgtccagaacgacaaacatccagggtatcaacctgctcttctcctctcgccgggggcacctctttttgcagacggaccagcccatttacaaccctggccagcgggttcggtaccgggtctttgctctggatcagaagatgcgcccgagcactgacaccatcacagtcatggtggagaactctcacggcctccgcgtgcggaagaaggaggtgtacatgccctcgtccatcttccaggatgactttgtgatcccagacatctcagagccagggacctggaagatctcagcccgattctcagatggcctggaatccaacagcagcacccagtttgaggtgaagaaatatgtccttcccaactttgaggtgaagatcacccctggaaagccctacatcctgacggtgccaggccatcttgatgaaatgcagttagacatccaggccaggtacatctatgggaagccagtgcagggggtggcatatgtgcgctttgggctcctagatgaggatggtaagaagactttctttcgggggctggagagtcagaccaagctggtgaatggacagagccacatttccctctcaaaggcagagttccaggacgccctggagaagctgaatatgggcattactgacctccaggggctgcgcctctacgttgctgcagccatcattgagtatccaggtggggagatggaggaggcagagctcacatcctggtattttgtgtcatctcccttctccttggatcttagcaagaccaagcgacaccttgtgcctggggcccccttcctgctgcaggccttggtccgtgagatgtcaggctccccagcttctggcattcctgtcaaagtttctgccacggtgtcttctcctgggtctgttcctgaagtccaggacattcagcaaaacacagacgggagcggccaagtcagcattccaataattatccctcagaccatctcagagctgcagctctcagtatctgcaggctccccacatccagcgatagccaggctcactgtggcagccccaccttcaggaggccccgggtttctgtctattgagtggccggattctcgacctcctcgtgttggggacactctgaacctgaacttgcgagccgtgggcagtggggccaccttttctcattactactacatgatcctatcccgagggcagatcgtgttcatgaatcgagagcccaagaggaccctgacctcggtctcggtgtttgtggaccatcacctggcaccctccttctactttgtggccttctactaccatggagaccacccagtggccaactccctgcgagtggatgtccaggctggggcctgcgagggcaagctggagctcagcgtggacggtgccaagcagtaccggaacggggagtccgtgaagctccacttagaaaccgactccctagccctggtggcgctgggagccttggacacagctctgtatgctgcaggcagcaagtcccacaagcccctcaacatgggcaaggtctttgaagctatgaacagctatgacctcggctgtggtcctgggggtggggacagtgcccttcaggtgttccaggcagcgggcctggccttttctgatggagaccagtggaccttatccagaaagagactaagctgtcccaaggagaagacaacccggaaaaagagaaacgtgaacttccaaaaggcgattaatgagaaattgggtcagtatgcttccccgacagccaagcgctgctgccaggatggggtgacacgtctgcccatgatgcgttcctgcgagcagcgggcagcccgcgtgcagcagccggactgccgggagcccttcctgtcctgctgccaatttgctgagagtctgcgcaagaagagcagggacaagggccaggcgggcctccaacgagccctggagatcctgcaggaggaggacctgattgatgaggatgacattcccgtgcgcagcttcttcccagagaactggctctggagagtggaaacagtggaccgctttcaaatattgacactgtggctccccgactctctgaccacgtgggagatccatggcctgagcctgtccaaaaccaaaggcctatgtgtggccaccccagtccagctccgggtgttccgcgagttccacctgcacctccgcctgcccatgtctgtccgccgctttgagcagctggagctgcggcctgtcctctataactacctggataaaaacctgactgtgagcgtccacgtgtccccagtggaggggctgtgcctggctgggggcggagggctggcccagcaggtgctggtgcctgcgggctctgcccggcctgttgccttctctgtggtgcccacggcagccgccgctgtgtctctgaaggtggtggctcgagggtccttcgaattccctgtgggagatgcggtgtccaaggttctgcagattgagaaggaaggggccatccatagagaggagctggtctatgaactcaaccccttggaccaccgaggccggaccttggaaatacctggcaactctgatcccaatatgatccctgatggggactttaacagctacgtcagggttacagcctcagatccattggacactttaggctctgagggggccttgtcaccaggaggcgtggcctccctcttgaggcttcctcgaggctgtggggagcaaaccatgatctacttggctccgacactggctgcttcccgctacctggacaagacagagcagtggagcacactgcctcccgagaccaaggaccacgccgtggatctgatccagaaaggctacatgcggatccagcagtttcggaaggcggatggttcctatgcggcttggttgtcacgggacagcagcacctggctcacagcctttgtgttgaaggtcctgagtttggcccaggagcaggtaggaggctcgcctgagaaactgcaggagacatctaactggcttctgtcccagcagcaggctgacggctcgttccaggacccctgtccagtgttagacaggagcatgcaggggggtttggtgggcaatgatgagactgtggcactcacagcctttgtgaccatcgcccttcatcatgggctggccgtcttccaggatgagggtgcagagccattgaagcagagagtggaagcctccatctcaaaggcaaactcatttttgggggagaaagcaagtgctgggctcctgggtgcccacgcagctgccatcacggcctatgccctgacactgaccaaggcgcctgtggacctgctcggtgttgcccacaacaacctcatggcaatggcccaggagactggagataacctgtactggggctcagtcactggttctcagagcaatgccgtgtcgcccaccccggctcctcgcaacccatccgaccccatgccccaggccccagccctgtggattgaaaccacagcctacgccctgctgcacctcctgcttcacgagggcaaagcagagatggcagaccaggctgcggcctggctcacccgtcagggcagcttccaagggggattccgcagtacccaagacacggtgattgccctggatgccctgtctgcctactggattgcctcccacaccactgaggagaggggtctcaatgtgactctcagctccacaggccggaatgggttcaagtcccacgcgctgcagctgaacaaccgccagattcgcggcctggaggaggagctgcagttttccttgggcagcaagatcaatgtgaaggtgggaggaaacagcaaaggaaccctgaaggtccttcgtacctacaatgtcctggacatgaagaacacgacctgccaggacctacagatagaagtgacagtcaaaggccacgtcgagtacacgatggaagcaaacgaggactatgaggactatgagtacgatgagcttccagccaaggatgacccagatgcccctctgcagcccgtgacacccctgcagctgtttgagggtcggaggaaccgccgcaggagggaggcgcccaaggtggtggaggagcaggagtccagggtgcactacaccgtgtgcatctggcggaacggcaaggtggggctgtctggcatggccatcgcggacgtcaccctcctgagtggattccacgccctgcgtgctgacctggagaagctgacctccctctctgaccgttacgtgagtcactttgagaccgaggggccccacgtcctgctgtattttgactcggtccccacctcccgggagtgcgtgggctttgaggctgtgcaggaagtgccggtggggctggtgcagccggccagcgcaaccctgtacgactactacaaccccgagcgcagatgttctgtgttttacggggcaccaagtaagagcagactcttggccaccttgtgttctgctgaagtctgccagtgtgctgaggggaagtgccctcgccagcgtcgcgccctggagcggggtctgcaggacgaggatggctacaggatgaagtttgcctgctactacccccgtgtggagtacggcttccaggttaaggttctccgagaagacagcagagctgctttccgcctctttgagaccaagatcacccaagtcctgcacttcaccaaggatgtcaaggccgctgctaatcagatgcgcaacttcctggttcgagcctcctgccgccttcgcttggaacctgggaaagaatatttgatcatgggtctggatggggccacctatgacctcgagggacacccccagtacctgctggactcgaatagctggatcgaggagatgccctctgaacgcctgtgccggagcacccgccagcgggcagcctgtgcccagctcaacgacttcctccaggagtatggcactcaggggtgccaggtgtgagggctgccctcccacctccactgggaggaacctgaacctgggaaccatgaagctggaagcactgctgtgtccgctttcatgaacacagcctgggaccagggcatattaaaggcttttggcagcaaagtgtcagtgttggca

SEQ ID NO: 6617 - DNA, 5460 bp, Homo sapiens
  source 1..5460: mol_type = unassigned DNA
agagtcaactctgccccgaggcctagcttggccagaaggtagcagacagacagacggatctaacctctcttggatcctccagccatgaggctgctctgggggctgatctgggcatccagcttcttcaccttatctctgcagaagcccaggttgctcttgttctctccttctgtggttcatctgggggtccccctatcggtgggggtgcagctccaggatgtgccccgaggacaggtagtgaaaggatcagtgttcctgagaaacccatctcgtaataatgtcccctgctccccaaaggtggacttcacccttagctcagaaagagacttcgcactcctcagtctccaggtgcccttgaaagatgcgaagagctgtggcctccatcaactcctcagaggccctgaggtccagctggtggcccattcgccatggctaaaggactctctgtccagaacgacaaacatccagggtatcaacctgctcttctcctctcgccgggggcacctctttttgcagacggaccagcccatttacaaccctggccagcgggttcggtaccgggtctttgctctggatcagaagatgcgcccgagcactgacaccatcacagtcatggtggagaactctcacggcctccgcgtgcggaagaaggaggtgtacatgccctcgtccatcttccaggatgactttgtgatcccagacatctcagagccagggacctggaagatctcagcccgattctcagatggcctggaatccaacagcagcacccagtttgaggtgaagaaatatgtccttcccaactttgaggtgaagatcacccctggaaagccctacatcctgacggtgccaggccatcttgatgaaatgcagttagacatccaggccaggtacatctatgggaagccagtgcagggggtggcatatgtgcgctttgggctcctagatgaggatggtaagaagactttctttcgggggctggagagtcagaccaagctggtgaatggacagagccacatttccctctcaaaggcagagttccaggacgccctggagaagctgaatatgggcattactgacctccaggggctgcgcctctacgttgctgcagccatcattgagtctccaggtggggagatggaggaggcagagctcacatcctggtattttgtgtcatctcccttctccttggatcttagcaagaccaagcgacaccttgtgcctggggcccccttcctgctgcaggccttggtccgtgagatgtcaggctccccagcttctggcattcctgtcaaagtttctgccacggtgtcttctcctgggtctgttcctgaagtccaggacattcagcaaaacacagacgggagcggccaagtcagcattccaataattatccctcagaccatctcagagctgcagctctcagtatctgcaggctccccacatccagcgatagccaggctcactgtggcagccccaccttcaggaggccccgggtttctgtctattgagcggccggattctcgacctcctcgtgttggggacactctgaacctgaacttgcgagccgtgggcagtggggccaccttttctcattactactacatgatcctatcccgagggcagatcgtgttcatgaatcgagagcccaagaggaccctgacctcggtctcggtgtttgtggaccatcacctggcaccctccttctactttgtggccttctactaccatggagaccacccagtggccaactccctgcgagtggatgtccaggctggggcctgcgagggcaagctggagctcagcgtggacggtgccaagcagtaccggaacggggagtccgtgaagctccacttagaaaccgactccctagccctggtggcgctgggagccttggacacagctctgtatgctgcaggcagcaagtcccacaagcccctcaacatgggcaaggtctttgaagctatgaacagctatgacctcggctgtggtcctgggggtggggacagtgcccttcaggtgttccaggcagcgggcctggccttttctgatggagaccagtggaccttatccagaaagagactaagctgtcccaaggagaagacaacccggaaaaagagaaacgtgaacttccaaaaggcgattaatgagaaattgggtcagtatgcttccccgacagccaagcgctgctgccaggatggggtgacacgtctgcccatgatgcgttcctgcgagcagcgggcagcccgcgtgcagcagccggactgccgggagcccttcctgtcctgctgccaatttgctgagagtctgcgcaagaagagcagggacaagggccaggcgggcctccaacgagccctggagatcctgcaggaggaggacctgattgatgaggatgacattcccgtgcgcagcttcttcccagagaactggctctggagagtggaaacagtggaccgctttcaaatattgacactgtggctccccgactctctgaccacgtgggagatccatggcctgagcctgtccaaaaccaaaggcctatgtgtggccaccccagtccagctccgggtgttccgcgagttccacctgcacctccgcctgcccatgtctgtccgccgctttgagcagctggagctgcggcctgtcctctataactacctggataaaaacctgactgtgagcgtccacgtgtccccagtggaggggctgtgcctggctgggggcggagggctggcccagcaggtgctggtgcctgcgggctctgcccggcctgttgccttctctgtggtgcccacggcagccgccgctgtgtctctgaaggtggtggctcgagggtccttcgaattccctgtgggagatgcggtgtccaaggttctgcagattgagaaggaaggggccatccatagagaggagctggtctatgaactcaaccccttggaccaccgaggccggaccttggaaatacctggcaactctgatcccaatatgatccctgatggggactttaacagctacgtcagggttacagcctcagatccattggacactttaggctctgagggggccttgtcaccaggaggcgtggcctccctcttgaggcttcctcgaggctgtggggagcaaaccatgatctacttggctccgacactggctgcttcccgctacctggacaagacagagcagtggagcacactgcctcccgagaccaaggaccacgccgtggatctgatccagaaaggctacatgcggatccagcagtttcggaaggcggatggttcctatgcggcttggttgtcacgggacagcagcacctggctcacagcctttgtgttgaaggtcctgagtttggcccaggagcaggtaggaggctcgcctgagaaactgcaggagacatctaactggcttctgtcccagcagcaggctgacggctcgttccaggacccctgtccagtgttagacaggagcatgcaggggggtttggtgggcaatgatgagactgtggcactcacagcctttgtgaccatcgcccttcatcatgggctggccgtcttccaggatgagggtgcagagccattgaagcagagagtggaagcctccatctcaaaggcaagctcatttttgggggagaaagcaagtgctgggctcctgggtgcccacgcagctgccatcacggcctatgccctgacactgaccaaggcgcctgtggacctgctcggtgttgcccacaacaacctcatggcaatggcccaggagactggagataacctgtactggggctcagtcactggttctcagagcaatgccgtgtcgcccaccccggctcctcgcaacccatccgaccccatgccccaggccccagccctgtggattgaaaccacagcctacgccctgctgcacctcctgcttcacgagggcaaagcagagatggcagaccaggctgcggcctggctcacccgtcagggcagcttccaagggggattccgcagtacccaagacacggtgattgccctggatgccctgtctgcctactggattgcctcccacaccactgaggagaggggtctcaatgtgactctcagctccacaggccggaatgggttcaagtcccacgcgctgcagctgaacaaccgccagattcgcggcctggaggaggagctgcagttttccttgggcagcaagatcaatgtgaaggtgggaggaaacagcaaaggaaccctgaaggtccttcgtacctacaatgtcctggacatgaagaacacgacctgccaggacctacagatagaagtgacagtcaaaggccacgtcgagtacacgatggaagcaaacgaggactatgaggactatgagtacgatgagcttccagccaaggatgacccagatgcccctctgcagcccgtgacacccctgcagctgtttgagggtcggaggaaccgccgcaggagggaggcgcccaaggtggtggaggagcaggagtccagggtgcactacaccgtgtgcatctggcggaacggcaaggtggggctgtctggcatggccatcgcggacgtcaccctcctgagtggattccacgccctgcgtgctgacctggagaagctgacctccctctctgaccgttacgtgagtcactttgagaccgaggggccccacgtcctgctgtattttgactcggtccccacctcccgggagtgcgtgggctttgaggctgtgcaggaagtgccggtggggctggtgcagccggccagcgcaaccctgtacgactactacaaccccgagcgcagatgttctgtgttttacggggcaccaagtaagagcagactcttggccaccttgtgttctgctgaagtctgccagtgtgctgaggggaagtgccctcgccagcgtcgcgccctggagcggggtctgcaggacgaggatggctacaggatgaagtttgcctgctactacccccgtgtggagtacggcttccaggttaaggttctccgagaagacagcagagctgctttccgcctctttgagaccaagatcacccaagtcctgcacttcaccaaggatgtcaaggccgctgctaatcagatgcgcaacttcctggttcgagcctcctgccgccttcgcttggaacctgggaaagaatatttgatcatgggtctggatggggccacctatgacctcgagggacacccccagtacctgctggactcgaatagctggatcgaggagatgccctctgaacgcctgtgccggagcacccgccagcgggcagcctgtgcccagctcaacgacttcctccaggagtatggcactcaggggtgccaggtgtgagggctgccctcccacctccgctgggaggaacctgaacctgggaaccatgaagctggaagcactgctgtgtccgctttcatgaacacagcctgggaccagggcatattaaaggcttttggcagcaaagtgtcagtgttggca

SEQ ID NO: 6618 - DNA, 5460 bp, Homo sapiens
  source 1..5460: mol_type = unassigned DNA
agagtcaactctgccccgaggcctagcttggccagaaggtagcagacagacagacggatctaacctctcttggatcctccagccatgaggctgctctgggggctgatctgggcatccagcttcttcaccttatctctgcagaagcccaggttgctcttgttctctccttctgtggttcatctgggggtccccctatcggtgggggtgcagctccaggatgtgccccgaggacaggtagtgaaaggatcagtgttcctgagaaacccatctcgtaataatgtcccctgctccccaaaggtggacttcacccttagctcagaaagagacttcgcactcctcagtctccaggtgcccttgaaagatgcgaagagctgtggcctccatcaactcctcagaggccctgaggtccagctggtggcccattcgccatggctaaaggactctctgtccagaacgacaaacatccagggtatcaacctgctcttctcctctcgccgggggcacctctttttgcagacggaccagcccatttacaaccctggccagcgggttcggtaccgggtctttgctctggatcagaagatgcgcccgagcactgacaccatcacagtcatggtggagaactctcacggcctccgcgtgcggaagaaggaggtgtacatgccctcgtccatcttccaggatgactttgtgatcccagacatctcagagccagggacctggaagatctcagcccgattctcagatggcctggaatccaacagcagcacccagtttgaggtgaagaaatatgtccttcccaactttgaggtgaagatcacccctggaaagccctacatcctgacggtgccaggccatcttgatgaaatgcagttagacatccaggccaggtacatctatgggaagccagtgcagggggtggcatatgtgcgctttgggctcctagatgaggatggtaagaagactttctttcgggggctggagagtcagaccaagctggtgaatggacagagccacatttccctctcaaaggcagagttccaggacgccctggagaagctgaatatgggcattactgacctccaggggctgcgcctctacgttgctgcagccatcattgagtatccaggtggggagatggaggaggcagagctcacatcctggtattttgtgtcatctcccttctccttggatcttagcaagaccaagcgacaccttgtgcctggggcccccttcctgctgcaggccttggtccgtgagatgtcaggctccccagcttctggcattcctgtcaaagtttctgccacggtgtcttctcctgggtctgttcctgaagtccaggacattcagcaaaacacagacgggagcggccaagtcagcattccaataattatccctcagaccatctcagagctgcagctctcagtatctgcaggctccccacatccagcgatagccaggctcactgtggcagccccaccttcaggaggccccgggtttctgtctattgagcggccggattctcgacctcctcgtgttggggacactctgaacctgaacttgcgagccgtgggcagtggggccaccttttctcattactactacatgatcctatcccgagggcagatcgtgttcatgaatcgagagcccaagaggaccctgacctcggtctcggtgtttgtggaccatcacctggcaccctccttctactttgtggccttctactaccatggagaccacccagtggccaactccctgcgagtggatgtccaggctggggcctgcgagggcaagctggagctcagcgtggacggtgccaagcagtaccggaacggggagtccgtgaagctccacttagaaaccgactccctagccctggtggcgctgggagccttggacacagctctgtatgctgcaggcagcaagtcccacaagcccctcaacatgggcaaggtctttgaagctatgaacagctatgacctcggctgtggtcctgggggtggggacagtgcccttcaggtgttccaggcagcgggcctggccttttctgatggagaccagtggaccttatccagaaagagactaagctgtcccaaggagaagacaacccggaaaaagagaaacgtgaacttccaaaaggcgattaatgagaaattgggtcagtatgcttccccgacagccaagcgctgctgccaggatggggtgacacgtctgcccatgatgcgttcctgcgagcagcgggcagcccgcgtgcagcagccggactgccgggagcccttcctgtcctgctgccaatttgctgagagtctgcgcaagaagagcagggacaagggccaggcgggcctccaacgagccctggagatcctgcaggaggaggacctgattgatgaggatgacattcccgtgcgcagcttcttcccagagaactggctctggagagtggaaacagtggaccgctttcaaatattgacactgtggctccccgactctctgaccacgtgggagatccatggcctgagcctgtccaaaaccaaaggcctatgtgtggccaccccagtccagctccgggtgttccgcgagttccacctgcacctccgcctgcccatgtctgtccgccgctttgagcagctggagctgcggcctgtcctctataactacctggataaaaacctgactgtgagcgtccacgtgtccccagtggaggggctgtgcctggctgggggcggagggctggcccagcaggtgctggtgcctgcgggctctgcccggcctgttgccttctctgtggtgcccacggcagccgccgctgtgtctctgaaggtggtggctcgagggtccttcgaattccctgtgggagatgcggtgtccaaggttctgcagattgagaaggaaggggccatccatagagaggagctggtctatgaactcaaccccttggaccaccgaggccggaccttggaaatacctggcaactctgatcccaatatgatccctgatggggactttaacagctacgtcagggttacagcctcagatccattggacactttaggctctgagggggccttgtcaccaggaggcgtggcctccctcttgaggcttcctcgaggctgtggggagcaaaccatgatctacttggctccgacactggctgcttcccgctacctggacaagacagagcagtggagcacactgcctcccgagaccaaggaccacgccgtggatctgatccagaaaggctacatgcggatccagcagtttcggaaggcggatggttcctatgcggcttggttgtcacgggacagcagcacctggctcacagcctttgtgttgaaggtcctgagtttggcccaggagcaggtaggaggctcgcctgagaaactgcaggagacatctaactggcttctgtcccagcagcaggctgacggctcgttccaggacccctgtccagtgttagacaggagcatgcaggggggtttggtgggcaatgatgagactgtggcactcacagcctttgtgaccatcgcccttcatcatgggctggccgtcttccaggatgagggtgcagagccattgaagcagagagtggaagcctccatctcaaaggcaaactcatttttgggggagaaagcaagtgctgggctcctgggtgcccacgcagctgccatcacggcctatgccctgacactgaccaaggcgcctgtggacctgctcggtgttgcccacaacaacctcatggcaatggcccaggagactggagataacctgtactggggctcagtcactggttctcagagcaatgccgtgtcgcccaccccggctcctcgcaacccatccgaccccatgccccaggccccagccctgtggattgaaaccacagcctacgccctgctgcacctcctgcttcacgagggcaaagcagagatggcagaccaggctgcggcctggctcacccgtcagggcagcttccaagggggattccgcagtacccaagacacggtgattgccctggatgccctgtctgcctactggattgcctcccacaccactgaggagaggggtctcaatgtgactctcagctccacaggccggaatgggttcaagtcccacgcgctgcagctgaacaaccgccagattcgcggcctggaggaggagctgcagttttccttgggcagcaagatcaatgtgaaggtgggaggaaacagcaaaggaaccctgaaggtccttcgtacctacaatgtcctggacatgaagaacacgacctgccaggacctacagatagaagtgacagtcaaaggccacgtcgagtacacgatggaagcaaacgaggactatgaggactatgagtacgatgagcttccagccaaggatgacccagatgcccctctgcagcccgtgacacccctgcagctgtttgagggtcggaggaaccgccgcaggagggaggcgcccaaggtggtggaggagcaggagtccagggtgcactacaccgtgtgcatctggcggaacggcaaggtggggctgtctggcatggccatcgcggacgtcaccctcctgagtggattccacgccctgcgtgctgacctggagaagctgacctccctctctgaccgttacgtgagtcactttgagaccgaggggccccacgtcctgctgtattttgactcggtccccacctcccgggagtgcgtgggctttgaggctgtgcaggaagtgccggtggggctggtgcagccggccagcgcaaccctgtacgactactacaaccccgagcgcagatgttctgtgttttacggggcaccaagtaagagcagactcttggccaccttgtgttctgctgaagtctgccagtgtgctgaggggaagtgccctcgccagcgtcgcgccctggagcggggtctgcaggacgaggatggctacaggatgaagtttgcctgctactacccccgtgtggagtacggcttccaggttaaggttctccgagaagacagcagagctgctttccgcctctttgagaccaagatcacccaagtcctgcacttcaccaaggatgtcaaggccgctgctaatcagatgcgcaacttcctggttcgagcctcctgccgccttcgcttggaacctgggaaagaatatttgatcatgggtctagatggggccacctatgacctcgagggacacccccagtacctgctggactcgaatagctggatcgaggagatgccctctgaacgcctgtgccggagcacccgccagcgggcagcctgtgcccagctcaacgacttcctccaggagtatggcactcaggggtgccaggtgtgagggctgccctcccacctccgctgggaggaacctgaacctgggaaccatgaagctggaagcactgctgtgtccgctttcatgaacacagcctgggaccagggcatattaaaggcttttggcagcaaagtgtcagtgttggca

SEQ ID NO: 6619 - DNA, 5460 bp, Homo sapiens
  source 1..5460: mol_type = unassigned DNA
agagtcaactctgccccgaggcctagcttggccagaaggtagcagacagacagacggatctaacctctcttggatcctccagccatgaggctgctctgggggctgatctgggcatccagcttcttcaccttatctctgcagaagcccaggttgctcttgttctctccttctgtggttcatctgggggtccccctatcggtgggggtgcagctccaggatgtgccccgaggacaggtagtgaaaggatcagtgttcctgagaaacccatctcgtaataatgtcccctgctccccaaaggtggacttcacccttagctcagaaagagacttcgcactcctcagtctccaggtgcccttgaaagatgcgaagagctgtggcctccatcaactcctcagaggccctgaggtccagctggtggcccattcgccatggctaaaggactctctgtccagaacgacaaacatccagggtatcaacctgctcttctcctctcgccgggggcacctctttttgcagacggaccagcccatttacaaccctggccagcgggttcggtaccgggtctttgctctggatcagaagatgcgcccgagcactgacaccatcacagtcatggtggagaactctcacggcctccgcgtgcggaagaaggaggtgtacatgccctcgtccatcttccaggatgactttgtgatcccagacatctcagagccagggacctggaagatctcagcccgattctcagatggcctggaatccaacagcagcacccagtttgaggtgaagaaatatgtccttcccaactttgaggtgaagatcacccctggaaagccctacatcctgacggtgccaggccatcttgatgaaatgcagttagacatccaggccaggtacatctatgggaagccagtgcagggggtggcatatgtgcgctttgggctcctagatgaggatggtaagaagactttctttcgggggctggagagtcagaccaagctggtgaatggacagagccacatttccctctcaaaggcagagttccaggacgccctggagaagctgaatatgggcattactgacctccaggggctgcgcctctacgttgctgcagccatcattgagtctccaggtggggagatggaggaggcagagctcacatcctggtattttgtgtcatctcccttctccttggatcttagcaagaccaagcgacaccttgtgcctggggcccccttcctgctgcaggccttggtccgtgagatgtcaggctccccagcttctggcattcctgtcaaagtttctgccacggtgtcttctcctgggtctgttcctgaagtccaggacattcagcaaaacacagacgggagcggccaagtcagcattccaataattatccctcagaccatctcagagctgcagctctcagtatctgcaggctccccacatccagcgatagccaggctcactgtggcagccccaccttcaggaggccccgggtttctgtctattgagcggccggattctcgacctcctcgtgttggggacactctgaacctgaacttgcgagccgtgggcagtggggccaccttttctcattactactacatgatcctatcccgagggcagatcgtgttcatgaatcgagagcccaagaggaccctgacctcggtctcggtgtttgtggaccatcacctggcaccctccttctactttgtggccttctactaccatggagaccacccagtggccaactccctgcgagtggatgtccaggctggggcctgcgagggcaagctggagctcagcgtggacggtgccaagcagtaccggaacggggagtccgtgaagctccacttagaaaccgactccctagccctggtggcgctgggagccttggacacagctctgtatgctgcaggcagcaagtcccacaagcccctcaacatgggcaaggtctttgaagctatgaacagctatgacctcggctgtggtcctgggggtggggacagtgcccttcaggtgttccaggcagcgggcctggccttttctgatggagaccagtggaccttatccagaaagagactaagctgtcccaaggagaagacaacccggaaaaagagaaacgtgaacttccaaaaggcgattaatgagaaattgggtcagtatgcttccccgacagccaagcgctgctgccaggatggggtgacacgtctgcccatgatgcgttcctgcgagcagcgggcagcccgcgtgcagcagccggactgccgggagcccttcctgtcctgctgccaatttgctgagagtctgcgcaagaagagcagggacaagggccaggcgggcctccaacgagccctggagatcctgcaggaggaggacctgattgatgaggatgacattcccgtgcgcagcttcttcccagagaactggctctggagagtggaaacagtggaccgctttcaaatattgacactgtggctccccgactctctgaccacgtgggagatccatggcctgagcctgtccaaaaccaaaggcctatgtgtggccaccccagtccagctccgggtgttccgcgagttccacctgcacctccgcctgcccatgtctgtccgccgctttgagcagctggagctgcggcctgtcctctataactacctggataaaaacctgactgtgagcgtccacgtgtccccagtggaggggctgtgcctggctgggggcggagggctggcccagcaggtgctggtgcctgcgggctctgcccggcctgttgccttctctgtggtgcccacggcagccgccgctgtgtctctgaaggtggtggctcgagggtccttcgaattccctgtgggagatgcggtgtccaaggttctgcagattgagaaggaaggggccatccatagagaggagctggtctatgaactcaaccccttggaccaccgaggccggaccttggaaatacctggcaactctgatcccaatatgatccctgatggggactttaacagctacgtcagggttacagcctcagatccattggacactttaggctctgagggggccttgtcaccaggaggcgtggcctccctcttgaggcttcctcgaggctgtggggagcaaaccatgatctacttggctccgacactggctgcttcccgctacctggacaagacagagcagtggagcacactgcctcccgagaccaaggaccacgccgtggatctgatccagaaaggctacatgcggatccagcagtttcggaaggcggatggttcctatgcggcttggttgtcacgggacagcagcacctggctcacagcctttgtgttgaaggtcctgagtttggcccaggagcaggtaggaggctcgcctgagaaactgcaggagacatctaactggcttctgtcccagcagcaggctgacggctcgttccaggacccctgtccagtgttagacaggagcatgcaggggggtttggtgggcaatgatgagactgtggcactcacagcctttgtgaccatcgcccttcatcatgggctggccgtcttccaggatgagggtgcagagccattgaagcagagagtggaagcctccatctcaaaggcaaactcatttttgggggagaaagcaagtgctgggctcctgggtgcccacgcagctgccatcacggcctatgccctgacactgaccaaggcgcctgtggacctgctcggtgttgcccacaacaacctcatggcaatggcccaggagactggagataacctgtactggggctcagtcactggttctcagagcaatgccgtgtcgcccaccccggctcctcgcaacccatccgaccccatgccccaggccccagccctgtggattgaaaccacagcctacgccctgctgcacctcctgcttcacgagggcaaagcagagatggcagaccaggcttcggcctggctcacccgtcagggcagcttccaagggggattccgcagtacccaagacacggtgattgccctggatgccctgtctgcctactggattgcctcccacaccactgaggagaggggtctcaatgtgactctcagctccacaggccggaatgggttcaagtcccacgcgctgcagctgaacaaccgccagattcgcggcctggaggaggagctgcagttttccttgggcagcaagatcaatgtgaaggtgggaggaaacagcaaaggaaccctgaaggtccttcgtacctacaatgtcctggacatgaagaacacgacctgccaggacctacagatagaagtgacagtcaaaggccacgtcgagtacacgatggaagcaaacgaggactatgaggactatgagtacgatgagcttccagccaaggatgacccagatgcccctctgcagcccgtgacacccctgcagctgtttgagggtcggaggaaccgccgcaggagggaggcgcccaaggtggtggaggagcaggagtccagggtgcactacaccgtgtgcatctggcggaacggcaaggtggggctgtctggcatggccatcgcggacgtcaccctcctgagtggattccacgccctgcgtgctgacctggagaagctgacctccctctctgaccgttacgtgagtcactttgagaccgaggggccccacgtcctgctgtattttgactcggtccccacctcccgggagtgcgtgggctttgaggctgtgcaggaagtgccggtggggctggtgcagccggccagcgcaaccctgtacgactactacaaccccgagcgcagatgttctgtgttttacggggcaccaagtaagagcagactcttggccaccttgtgttctgctgaagtctgccagtgtgctgaggggaagtgccctcgccagcgtcgcgccctggagcggggtctgcaggacgaggatggctacaggatgaagtttgcctgctactacccccgtgtggagtacggcttccaggttaaggttctccgagaagacagcagagctgctttccgcctctttgagaccaagatcacccaagtcctgcacttcaccaaggatgtcaaggccgctgctaatcagatgcgcaacttcctggttcgagcctcctgccgccttcgcttggaacctgggaaagaatatttgatcatgggtctggatggggccacctatgacctcgagggacacccccagtacctgctggactcgaatagctggatcgaggagatgccctctgaacgcctgtgccggagcacccgccagcgggcagcctgtgcccagctcaacgacttcctccaggagtatggcactcaggggtgccaggtgtgagggctgccctcccacctccgctgggaggaacctgaacctgggaaccatgaagctggaagcactgctgtgtccgctttcatgaacacagcctgggaccagggcatattaaaggcttttggcagcaaagtgtcagtgttggca

SEQ ID NO: 6620 - DNA, 5269 bp, Homo sapiens
  source 1..5269: mol_type = unassigned DNA
gacagacagacggatctaacctctcttggatcctccagccatgaggctgctctgggggctgatctgggcatccagcttcttcaccttatctctgcagaagcccaggttgctcttgttctctccttctgtggttcatctgggggtccccctatcggtgggggtgcagctccaggatgtgccccgaggacaggtagtgaaaggatcagtgttcctgagaaacccatctcgtaataatgtcccctgctccccaaaggtggacttcacccttagctcagaaagagacttcgcactcctcagtctccaggtgcccttgaaagatgcgaagagctgtggcctccatcaactcctcagaggccctgaggtccagctggtggcccattcgccatggctaaaggactctctgtccagaacgacaaacatccagggtatcaacctgctcttctcctctcgccgggggcacctctttttgcagacggaccagcccatttacaaccctggccagcgggttcggtaccgggtctttgctctggatcagaagatgcgcccgagcactgacaccatcacagtcatggtggagaactctcacggcctccgcgtgcggaagaaggaggtgtacatgccctcgtccatcttccaggatgactttgtgatcccagacatctcagagccagggacctggaagatctcagcccgattctcagatggcctggaatccaacagcagcacccagtttgaggtgaagaaatatgtccttcccaactttgaggtgaagatcacccctggaaagccctacatcctgacggtgccaggccatcttgatgaaatgcagttagacatccaggccaggtacatctatgggaagccagtgcagggggtggcatatgtgcgctttgggctcctagatgaggatggtaagaagactttctttcgggggctggagagtcagaccaagctggtgaatggacagagccacatttccctctcaaaggcagagttccaggacgccctggagaagctgaatatgggcattactgacctccaggggctgcgcctctacgttgctgcagccatcattgagtctccaggtggggagatggaggaggcagagctcacatcctggtattttgtgtcatctcccttctccttggatcttagcaagaccaagcgacaccttgtgcctggggcccccttcctgctgcaggccttggtccgtgagatgtcaggctccccagcttctggcattcctgtcaaagtttctgccacggtgtcttctcctgggtctgttcctgaagtccaggacattcagcaaaacacagacgggagcggccaagtcagcattccaataattatccctcagaccatctcagagctgcagctctcagtatctgcaggctccccacatccagcgatagccaggctcactgtggcagccccaccttcaggaggccccgggtttctgtctattgagcggccggattctcgacctcctcgtgttggggacactctgaacctgaacttgcgagccgtgggcagtggggccaccttttctcattactactacatgatcctatcccgagggcagatcgtgttcatgaatcgagagcccaagaggaccctgacctcggtctcggtgtttgtggaccatcacctggcaccctccttctactttgtggccttctactaccatggagaccacccagtggccaactccctgcgagtggatgtccaggctggggcctgcgagggcaagctggagctcagcgtggacggtgccaagcagtaccggaacggggagtccgtgaagctccacttagaaaccgactccctagccctggtggcgctgggagccttggacacagctctgtatgctgcaggcagcaagtcccacaagcccctcaacatgggcaaggtctttgaagctatgaacagctatgacctcggctgtggtcctgggggtggggacagtgcccttcaggtgttccaggcagcgggcctggccttttctgatggagaccagtggaccttatccagaaagagactaagctgtcccaaggagaagacaacccggaaaaagagaaacgtgaacttccaaaaggcgattaatgagaaattgggtcagtatgcttccccgacagccaagcgctgctgccaggatggggtgacacgtctgcccatgatgcgttcctgcgagcagcgggcagcccgcgtgcagcagccggactgccgggagcccttcctgtcctgctgccaatttgctgagagtctgcgcaagaagagcagggacaagggccaggcgggcctccaacgagccctggagatcctgcaggaggaggacctgattgatgaggatgacattcccgtgcgcagcttcttcccagagaactggctctggagagtggaaacagtggaccgctttcaaatattgacactgtggctccccgactctctgaccacgtgggagatccatggcctgagcctgtccaaaaccaaaggcctatgtgtggccaccccagtccagctccgggtgttccgcgagttccacctgcacctccgcctgcccatgtctgtccgccgctttgagcagctggagctgcggcctgtcctctataactacctggataaaaacctgactgtgagcgtccacgtgtccccagtggaggggctgtgcctggctgggggcggagggctggcccagcaggtgctggtgcctgcgggctctgcccggcctgttgccttctctgtggtgcccacggcagccgccgctgtgtctctgaaggtggtggctcgagggtccttcgaattccctgtgggagatgcggtgtccaaggttctgcagattgagaaggaaggggccatccatagagaggagctggtctatgaactcaaccccttggaccaccgaggccggaccttggaaatacctggcaactctgatcccaatatgatccctgatggggactttaacagctacgtcagggttacagcctcagatccattggacactttaggctctgagggggccttgtcaccaggaggcgtggcctccctcttgaggcttcctcgaggctgtggggagcaaaccatgatctacttggctccgacactggctgcttcccgctacctggacaagacagagcagtggagcacactgcctcccgagaccaaggaccacgccgtggatctgatccagaaaggctacatgcggatccagcagtttcggaaggcggatggttcctatgcggcttggttgtcacgggacagcagcacctggctcacagcctttgtgttgaaggtcctgagtttggcccaggagcaggtaggaggctcgcctgagaaactgcaggagacatctaactggcttctgtcccagcagcaggctgacggctcgttccaggacccctgtccagtgttagacaggagcatgcaggggggtttggtgggcaatgatgagactgtggcactcacagcctttgtgaccatcgcccttcatcatgggctggccgtcttccaggatgagggtgcagagccattgaagcagagagtggaagcctccatctcaaaggcaaactcatttttgggggagaaagcaagtgctgggctcctgggtgcccacgcagctgccatcacggcctatgccctgacactgaccaaggcgcctgtggacctgctcggtgttgcccacaacaacctcatggcaatggcccaggagactggagataacctgtactggggctcagtcactggttctcagagcaatgccgtgtcgcccaccccggctcctcgcaacccatccgaccccatgccccaggccccagccctgtggattgaaaccacagcctacgccctgctgcacctcctgcttcacgagggcaaagcagagatggcagaccaggcttcggcctggctcacccgtcagggcagcttccaagggggattccgcagtacccaagacacggtgattgccctggatgccctgtctgcctactggattgcctcccacaccactgaggagaggggtctcaatgtgactctcagctccacaggccggaatgggttcaagtcccacgcgctgcagctgaacaaccgccagattcgcggcctggaggaggagctgcagttttccttgggcagcaagatcaatgtgaaggtgggaggaaacagcaaaggaaccctgaaggtccttcgtacctacaatgtcctggacatgaagaacacgacctgccaggacctacagatagaagtgacagtcaaaggccacgtcgagtacacgatggaagcaaacgaggactatgaggactatgagtacgatgagcttccagccaaggatgacccagatgcccctctgcagcccgtgacacccctgcagctgtttgagggtcggaggaaccgccgcaggagggaggcgcccaagctgacctccctctctgaccgttacgtgagtcactttgagaccgaggggccccacgtcctgctgtattttgactcggtccccacctcccgggagtgcgtgggctttgaggctgtgcaggaagtgccggtggggctggtgcagccggccagcgcaaccctgtacgactactacaaccccgagcgcagatgttctgtgttttacggggcaccaagtaagagcagactcttggccaccttgtgttctgctgaagtctgccagtgtgctgaggggaagtgccctcgccagcgtcgcgccctggagcggggtctgcaggacgaggatggctacaggatgaagtttgcctgctactacccccgtgtggagtacggcttccaggttaaggttctccgagaagacagcagagctgctttccgcctctttgagaccaagatcacccaagtcctgcacttcaccaaggatgtcaaggccgctgctaatcagatgcgcaacttcctggttcgagcctcctgccgccttcgcttggaacctgggaaagaatatttgatcatgggtctggatggggccacctatgacctcgagggacacccccagtacctgctggactcgaatagctggatcgaggagatgccctctgaacgcctgtgccggagcacccgccagcgggcagcctgtgcccagctcaacgacttcctccaggagtatggcactcaggggtgccaggtgtgagggctgccctcccacctccgctgggaggaacctgaacctgggaaccatgaagctggaagcactgctgtgtccgctttcatgaacacagcctgggaccagggcatattaaaggcttttggcagcaaagtgtca

SEQ ID NO: 6621 - DNA, 813 bp, Homo sapiens
  source 1..813: mol_type = unassigned DNA
atgtgccccgaggacagtctccaggtgcccttgaaagatgcgaagagctgtggcctccatcaactcctcagaggccctgaggtccagctggtggcccattcgccatggctaaaggactctctgtccagaacgacaaacatccagggtatcaacctgctcttctcctctcgccgggggcacctctttttgcagacggaccagcccatttacaaccctggccagcgggttcggtaccgggtctttgctctggatcagaagatgcgcccgagcactgacaccatcacagtcatggtggagaactctcacggcctccgcgtgcggaagaaggaggtgtacatgccctcgtccatcttccaggatgactttgtgatcccagacatctcagagccagggacctggaagatctcagcccgattctcagatggcctggaatccaacagcagcacccagtttgaggtgaagaaatatgtccttcccaactttgaggtgaagatcacccctggaaagccctacatcctgacggtgccaggccatcttgatgaaatgcagttagacatccaggccaggtacatctatgggaagccagtgcagggggtggcatatgtgcgctttgggctcctagatgaggatggtaagaagactttctttcgggggctggagagtcagaccaagctggtgaatggacagagccacatttccctctcaaaggcagagttccaggacgccctggagaagctgaatatgggcattactgacctccaggggctgcgcctctacgttgctgcagccatcattgagtctccaggtgggtga

SEQ ID NO: 6622 - DNA, 5181 bp, Homo sapiens
  source 1..5181: mol_type = unassigned DNA
agagtcaactctgccccgaggcctagcttggccagaaggtagcagacagacagacggatctaacctctcttggatcctccagccatgaggctgctctgggggctgatctgggcatccagcttcttcaccttatctctgcagaagcccaggttgctcttgttctctccttctgtggttcatctgggggtccccctatcggtgggggtgcagctccaggatgtgccccgaggacaggtagtgaaaggatcagtgttcctgagaaacccatctcgtaataatgtcccctgctccccaaaggtggacttcacccttagctcagaaagagacttcgcactcctcagtctccaggtgcccttgaaagatgcgaagagctgtggcctccatcaactcctcagaggccctgaggtccagctggtggcccattcgccatggctaaaggactctctgtccagaacgacaaacatccagggtatcaacctgctcttctcctctcgccgggggcacctctttttgcagacggaccagcccatttacaaccctggccagcgggttcggtaccgggtctttgctctggatcagaagatgcgcccgagcactgacaccatcacagtcatggtggagaactctcacggcctccgcgtgcggaagaaggaggtgtacatgccctcgtccatcttccaggatgactttgtgatcccagacatctcagagccagggacctggaagatctcagcccgattctcagatggcctggaatccaacagcagcacccagtttgaggtgaagaaatatgtccttcccaactttgaggtgaagatcacccctggaaagccctacatcctgacggtgccaggccatcttgatgaaatgcagttagacatccaggccaggtacatctatgggaagccagtgcagggggtggcatatgtgcgctttgggctcctagatgaggatggtaagaagactttctttcgggggctggagagtcagaccaagctggtgaatggacagagccacatttccctctcaaaggcagagttccaggacgccctggagaagctgaatatgggcattactgacctccaggggctgcgcctctacgttgctgcagccatcattgagtatccaggtggggagatggaggaggcagagctcacatcctggtattttgtgtcatctcccttctccttggatcttagcaagaccaagcgacaccttgtgcctggggcccccttcctgctgcaggccttggtccgtgagatgtcaggctccccagcttctggcattcctgtcaaagtttctgccacggtgtcttctcctgggtctgttcctgaagtccaggacattcagcaaaacacagacgggagcggccaagtcagcattccaataattatccctcagaccatctcagagctgcagctctcagtatctgcaggctccccacatccagcgatagccaggctcactgtggcagccccaccttcaggaggccccgggtttctgtctattgagtggccggattctcgacctcctcgtgttggggacactctgaacctgaacttgcgagccgtgggcagtggggccaccttttctcattactactacatgatcctatcccgagggcagatcgtgttcatgaatcgagagcccaagaggaccctgacctcggtctcggtgtttgtggaccatcacctggcaccctccttctactttgtggccttctactaccatggagaccacccagtggccaactccctgcgagtggatgtccaggctggggcctgcgagggcaagctggagctcagcgtggacggtgccaagcagtaccggaacggggagtccgtgaagctccacttagaaaccgactccctagccctggtggcgctgggagccttggacacagctctgtatgctgcaggcagcaagtcccacaagcccctcaacatgggcaaggtctttgaagctatgaacagctatgacctcggctgtggtcctgggggtggggacagtgcccttcaggtgttccaggcagcgggcctggccttttctgatggagaccagtggaccttatccagaaagagactaagctgtcccaaggagaagacaacccggaaaaagagaaacgtgaacttccaaaaggcgattaatgagaaattgggtcagtatgcttccccgacagccaagcgctgctgccaggatggggtgacacgtctgcccatgatgcgttcctgcgagcagcgggcagcccgcgtgcagcagccggactgccgggagcccttcctgtcctgctgccaatttgctgagagtctgcgcaagaagagcagggacaagggccaggcgggcctccaacgagccctggagatcctgcaggaggaggacctgattgatgaggatgacattcccgtgcgcagcttcttcccagagaactggctctggagagtggaaacagtggaccgctttcaaatattgacactgtggctccccgactctctgaccacgtgggagatccatggcctgagcctgtccaaaaccaaaggcctatgtgtggccaccccagtccagctccgggtgttccgcgagttccacctgcacctccgcctgcccatgtctgtccgccgctttgagcagctggagctgcggcctgtcctctataactacctggataaaaacctgactgtgagcgtccacgtgtccccagtggaggggctgtgcctggctgggggcggagggctggcccagcaggtgctggtgcctgcgggctctgcccggcctgttgccttctctgtggtgcccacggcagccgccgctgtgtctctgaaggtggtggctcgagggtccttcgaattccctgtgggagatgcggtgtccaaggttctgcagattgagaaggaaggggccatccatagagaggagctggtctatgaactcaaccccttggaccaccgaggccggaccttggaaatacctggcaactctgatcccaatatgatccctgatggggactttaacagctacgtcagggttacagcctcagatccattggacactttaggctctgagggggccttgtcaccaggaggcgtggcctccctcttgaggcttcctcgaggctgtggggagcaaaccatgatctacttggctccgacactggctgcttcccgctacctggacaagacagagcagtggagcacactgcctcccgagaccaaggaccacgccgtggatctgatccagaaaggctacatgcggatccagcagtttcggaaggcggatggttcctatgcggcttggttgtcacgggacagcagcacctggctcacagcctttgtgttgaaggtcctgagtttggcccaggagcaggtaggaggctcgcctgagaaactgcaggagacatctaactggcttctgtcccagcagcaggctgacggctcgttccaggacccctgtccagtgttagacaggagcatgcaggggggtttggtgggcaatgatgagactgtggcactcacagcctttgtgaccatcgcccttcatcatgggctggccgtcttccaggatgagggtgcagagccattgaagcagagagtggaagcctccatctcaaaggcaaactcatttttgggggagaaagcaagtgctgggctcctgggtgcccacgcagctgccatcacggcctatgccctgacactgaccaaggcgcctgtggacctgctcggtgttgcccacaacaacctcatggcaatggcccaggagactggagataacctgtactggggctcagtcactggttctcagagcaatgccgtgtcgcccaccccggctcctcgcaacccatccgaccccatgccccaggccccagccctgtggattgaaaccacagcctacgccctgctgcacctcctgcttcacgagggcaaagcagagatggcagaccaggctgcggcctggctcacccgtcagggcagcttccaagggggattccgcagtacccaagacacggtgattgccctggatgccctgtctgcctactggattgcctcccacaccactgaggagaggggtctcaatgtgactctcagctccacaggccggaatgggttcaagtcccacgcgctgcagctgaacaaccgccagattcgcggcctggaggaggagctgcagttttccttgggcagcaagatcaatgtgaaggtgggaggaaacagcaaaggaaccctgaaggtccttcgtacctacaatgtcctggacatgaagaacacgacctgccaggacctacagatagaagtgacagtcaaaggccacgtcgagtacacgatggaagcaaacgaggactatgaggactatgagtacgatgagcttccagccaaggatgacccagatgcccctctgcagcccgtgacacccctgcagctgtttgagggtcggaggaaccgccgcaggagggaggcgcccaagctgacctccctctctgaccgttacgtgagtcactttgagaccgaggggccccacgtcctgctgtattttgactcggtccccacctcccgggagtgcgtgggctttgaggctgtgcaggaagtgccggtggggctggtgcagccggccagcgcaaccctgtacgactactacaaccccgagcgcagatgttctgtgttttacggggcaccaagtaagagcagactcttggccaccttgtgttctgctgaagtctgccagtgtgctgaggggaagtgccctcgccagcgtcgcgccctggagcggggtctgcaggacgaggatggctacaggatgaagtttgcctgctactacccccgtgtggagtacggcttccaggttaaggttctccgagaagacagcagagctgctttccgcctctttgagaccaagatcacccaagtcctgcacttcaccaaggatgtcaaggccgctgctaatcagatgcgcaacttcctggttcgagcctcctgccgccttcgcttggaacctgggaaagaatatttgatcatgggtctggatggggccacctatgacctcgagggacacccccagtacctgctggactcgaatagctggatcgaggagatgccctctgaacgcctgtgccggagcacccgccagcgggcagcctgtgcccagctcaacgacttcctccaggagtatggcactcaggggtgccaggtgtga

SEQ ID NO: 6623 - DNA, 2054 bp, Homo sapiens
  source 1..2054: mol_type = unassigned DNA
agaaggtagcagacagacagacggatctaacctctcttggatcctccagccatgaggctgctctgggggctgatctgggcatccagcttcttcaccttatctctgcagaagcccaggttgctcttgttctctccttctgtggttcatctgggggtccccctatcggtgggggtgcagctccaggatgtgccccgaggacaggtagtgaaaggatcagtgttcctgagaaacccatctcgtaataatgtcccctgctccccaaaggtggacttcacccttagctcagaaagagacttcgcactcctcagtctccaggtgcccttgaaagatgcgaagagctgtggcctccatcaactcctcagaggccctgaggtccagctggtggcccattcgccatggctaaaggactctctgtccagaacgacaaacatccagggtatcaacctgctcttctcctctcgccgggggcacctctttttgcagacggaccagcctacgccctgctgcacctcctgcttcacgagggcaaagcagagatggcagaccaggctgcggcctggctcacccgtcagggcagcttccaagggggattccgcagtacccaagacacggtgattgccctggatgccctgtctgcctactggattgcctcccacaccactgaggagaggggtctcaatgtgactctcagctccacaggccggaatgggttcaagtcccacgcgctgcagctgaacaaccgccagattcgcggcctggaggaggagctgcagttttccttgggcagcaagatcaatgtgaaggtgggaggaaacagcaaaggaaccctgaaggtccttcgtacctacaatgtcctggacatgaagaacacgacctgccaggacctacagatagaagtgacagtcaaaggccacgtcgagtacacgatggaagcaaacgaggactatgaggactatgagtacgatgagcttccagccaaggatgacccagatgcccctctgcagcccgtgacacccctgcagctgtttgagggtcggaggaaccgccgcaggagggaggcgcccaaggtggtggaggagcaggagtccagggtgcactacaccgtgtgcatctggcggaacggcaaggtggggctgtctggcatggccatcgcggacgtcaccctcctgagtggattccacgccctgcgtgctgacctggagaagctgacctccctctctgaccgttacgtgagtcactttgagaccgaggggccccacgtcctgctgtattttgactcggtccccacctcccgggagtgcgtgggctttgaggctgtgcaggaagtgccggtggggctggtgcagccggccagcgcaaccctgtacgactactacaaccccgagcgcagatgttctgtgttttacggggcaccaagtaagagcagactcttggccaccttgtgttctgctgaagtctgccagtgtgctgaggggaagtgccctcgccagcgtcgcgccctggagcggggtctgcaggacgaggatggctacaggatgaagtttgcctgctactacccccgtgtggagtacggcttccaggttaaggttctccgagaagacagcagagctgctttccgcctctttgagaccaagatcacccaagtcctgcacttcaccaaggatgtcaaggccgctgctaatcagatgcgcaacttcctggttcgagcctcctgccgccttcgcttggaacctgggaaagaatatttgatcatgggtctagatggggccacctatgacctcgagggacacccccagtacctgctggactcgaatagctggatcgaggagatgccctctgaacgcctgtgccggagcacccgccagcgggcagcctgtgcccagctcaacgacttcctccaggagtatggcactcaggggtgccaggtgtgagggctgccctcccacctccgctgggaggaacctgaacctgggaaccatgaagctggaagcactgctgtgtccgctttcatgaacacagcctgggaccagggcatattaaaggcttttggcagc

SEQ ID NO: 6624 - DNA, 5268 bp, Homo sapiens
  source 1..5268: mol_type = unassigned DNA
gacagacagacggatctaacctctcttggatcctccagccatgaggctgctctgggggctgatctgggcatccagcttcttcaccttatctctgcagaagcccaggttgctcttgttctctccttctgtggttcatctgggggtccccctatcggtgggggtgcagctccaggatgtgccccgaggacaggtagtgaaaggatcagtgttcctgagaaacccatctcgtaataatgtcccctgctccccaaaggtggacttcacccttagctcagaaagagacttcgcactcctcagtctccaggtgcccttgaaagatgcgaagagctgtggcctccatcaactcctcagaggccctgaggtccagctggtggcccattcgccatggctaaaggactctctgtccagaacgacaaacatccagggtatcaacctgctcttctcctctcgccgggggcacctctttttgcagacggaccagcccatttacaaccctggccagcgggttcggtaccgggtctttgctctggatcagaagatgcgcccgagcactgacaccatcacagtcatggtggagaactctcacggcctccgcgtgcggaagaaggaggtgtacatgccctcgtccatcttccaggatgactttgtgatcccagacatctcagagccagggacctggaagatctcagcccgattctcagatggcctggaatccaacagcagcacccagtttgaggtgaagaaatatgtccttcccaactttgaggtgaagatcacccctggaaagccctacatcctgacggtgccaggccatcttgatgaaatgcagttagacatccaggccaggtacatctatgggaagccagtgcagggggtggcatatgtgcgctttgggctcctagatgaggatggtaagaagactttctttcgggggctggagagtcagaccaagctggtgaatggacagagccacatttccctctcaaaggcagagttccaggacgccctggagaagctgaatatgggcattactgacctccaggggctgcgcctctacgttgctgcagccatcattgagtctccaggtggggagatggaggaggcagagctcacatcctggtattttgtgtcatctcccttctccttggatcttagcaagaccaagcgacaccttgtgcctggggcccccttcctgctgcaggccttggtccgtgagatgtcaggctccccagcttctggcattcctgtcaaagtttctgccacggtgtcttctcctgggtctgttcctgaagtccaggacattcagcaaaacacagacgggagcggccaagtcagcattccaataattatccctcagaccatctcagagctgcagctctcagtatctgcaggctccccacatccagcgatagccaggctcactgtggcagccccaccttcaggaggccccgggtttctgtctattgagcggccggattctcgacctcctcgtgttggggacactctgaacctgaacttgcgagccgtgggcagtggggccaccttttctcattactactacatgatcctatcccgagggcagatcgtgttcatgaatcgagagcccaagaggaccctgacctcggtctcggtgtttgtggaccatcacctggcaccctccttctactttgtggccttctactaccatggagaccacccagtggccaactccctgcgagtggatgtccaggctggggcctgcgagggcaagctggagctcagcgtggacggtgccaagcagtaccggaacggggagtccgtgaagctccacttagaaaccgactccctagccctggtggcgctgggagccttggacacagctctgtatgctgcaggcagcaagtcccacaagcccctcaacatgggcaaggtctttgaagctatgaacagctatgacctcggctgtggtcctgggggtggggacagtgcccttcaggtgttccaggcagcgggcctggccttttctgatggagaccagtggaccttatccagaaagagactaagctgtcccaaggagaagacaacccggaaaaagagaaacgtgaacttccaaaaggcgattaatgagaaattgggtcagtatgcttccccgacagccaagcgctgctgccaggatggggtgacacgtctgcccatgatgcgttcctgcgagcagcgggcagcccgcgtgcagcagccggactgccgggagcccttcctgtcctgctgccaatttgctgagagtctgcgcaagaagagcagggacaagggccaggcgggcctccaacgagccctggagatcctgcaggaggaggacctgattgatgaggatgacattcccgtgcgcagcttcttcccagagaactggctctggagagtggaaacagtggaccgctttcaaatattgacactgtggctccccgactctctgaccacgtgggagatccatggcctgagcctgtccaaaaccaaaggcctatgtgtggccaccccagtccagctccgggtgttccgcgagttccacctgcacctccgcctgcccatgtctgtccgccgctttgagcagctggagctgcggcctgtcctctataactacctggataaaaacctgactgtgagcgtccacgtgtccccagtggaggggctgtgcctggctgggggcggagggctggcccagcaggtgctggtgcctgcgggctctgcccggcctgttgccttctctgtggtgcccacggcagccgccgctgtgtctctgaaggtggtggctcgagggtccttcgaattccctgtgggagatgcggtgtccaaggttctgcagattgagaaggaaggggccatccatagagaggagctggtctatgaactcaaccccttggaccaccgaggccggaccttggaaatacctggcaactctgatcccaatatgatccctgatggggactttaacagctacgtcagggttacagcctcagatccattggacactttaggctctgagggggccttgtcaccaggaggcgtggcctccctcttgaggcttcctcgaggctgtggggagcaaaccatgatctacttggctccgacactggctgcttcccgctacctggacaagacagagcagtggagcacactgcctcccgagaccaaggaccacgccgtggatctgatccagaaaggctacatgcggatccagcagtttcggaaggcggatggttcctatgcggcttggttgtcacgggacagcagcacctggctcacagcctttgtgttgaaggtcctgagtttggcccaggagcaggtaggaggctcgcctgagaaactgcaggagacatctaactggcttctgtcccagcagcaggctgacggctcgttccaggacccctgtccagtgttagacaggagcatgcaggggggtttggtgggcaatgatgagactgtggcactcacagcctttgtgaccatcgcccttcatcatgggctggccgtcttccaggatgagggtgcagagccattgaagcagagagtggaagcctccatctcaaaggcaagctcatttttgggggagaaagcaagtgctgggctcctgggtgcccacgcagctgccatcacggcctatgccctgacactgaccaaggcgcctgtggacctgctcggtgttgcccacaacaacctcatggcaatggcccaggagactggagataacctgtactggggctcagtcactggttctcagagcaatgccgtgtcgcccaccccggctcctcgcaacccatccgaccccatgccccaggccccagccctgtggattgaaaccacagcctacgccctgctgcacctcctgcttcacgagggcaaagcagagatggcagaccaggctgcggcctggctcacccgtcagggcagcttccaagggggattccgcagtacccaagacacggtgattgccctggatgccctgtctgcctactggattgcctcccacaccactgaggagaggggtctcaatgtgactctcagctccacaggccggaatgggttcaagtcccacgcgctgcagctgaacaaccgccagattcgcggcctggaggaggagctgcagttttccttgggcagcaagatcaatgtgaaggtgggaggaaacagcaaaggaaccctgaaggtccttcgtacctacaatgtcctggacatgaagaacacgacctgccaggacctacagatagaagtgacagtcaaaggccacgtcgagtacacgatggaagcaaacgaggactatgaggactatgagtacgatgagcttccagccaaggatgacccagatgcccctctgcagcccgtgacacccctgcagctgtttgagggtcggaggaaccgccgcaggagggaggcgcccaagctgacctccctctctgaccgttacgtgagtcactttgagaccgaggggccccacgtcctgctgtattttgactcggtccccacctcccgggagtgcgtgggctttgaggctgtgcaggaagtgccggtggggctggtgcagccggccagcgcaaccctgtacgactactacaaccccgagcgcagatgttctgtgttttacggggcaccaagtaagagcagactcttggccaccttgtgttctgctgaagtctgccagtgtgctgaggggaagtgccctcgccagcgtcgcgccctggagcggggtctgcaggacgaggatggctacaggatgaagtttgcctgctactacccccgtgtggagtacggcttccaggttaaggttctccgagaagacagcagagctgctttccgcctctttgagaccaagatcacccaagtcctgcacttcaccaaggatgtcaaggccgctgctaatcagatgcgcaacttcctggttcgagcctcctgccgccttcgcttggaacctgggaaagaatatttgatcatgggtctggatggggccacctatgacctcgagggacacccccagtacctgctggactcgaatagctggatcgaggagatgccctctgaacgcctgtgccggagcacccgccagcgggcagcctgtgcccagctcaacgacttcctccaggagtatggcactcaggggtgccaggtgtgagggctgccctcccacctccgctgggaggaacctgaacctgggaaccatgaagctggaagcactgctgtgtccgctttcatgaacacagcctgggaccagggcatattaaaggcttttggcagcaaagtgtc

SEQ ID NO: 6625 - DNA, 5268 bp, Homo sapiens
  source 1..5268: mol_type = unassigned DNA
gacagacagacggatctaacctctcttggatcctccagccatgaggctgctctgggggctgatctgggcatccagcttcttcaccttatctctgcagaagcccaggttgctcttgttctctccttctgtggttcatctgggggtccccctatcggtgggggtgcagctccaggatgtgccccgaggacaggtagtgaaaggatcagtgttcctgagaaacccatctcgtaataatgtcccctgctccccaaaggtggacttcacccttagctcagaaagagacttcgcactcctcagtctccaggtgcccttgaaagatgcgaagagctgtggcctccatcaactcctcagaggccctgaggtccagctggtggcccattcgccatggctaaaggactctctgtccagaacgacaaacatccagggtatcaacctgctcttctcctctcgccgggggcacctctttttgcagacggaccagcccatttacaaccctggccagcgggttcggtaccgggtctttgctctggatcagaagatgcgcccgagcactgacaccatcacagtcatggtggagaactctcacggcctccgcgtgcggaagaaggaggtgtacatgccctcgtccatcttccaggatgactttgtgatcccagacatctcagagccagggacctggaagatctcagcccgattctcagatggcctggaatccaacagcagcacccagtttgaggtgaagaaatatgtccttcccaactttgaggtgaagatcacccctggaaagccctacatcctgacggtgccaggccatcttgatgaaatgcagttagacatccaggccaggtacatctatgggaagccagtgcagggggtggcatatgtgcgctttgggctcctagatgaggatggtaagaagactttctttcgggggctggagagtcagaccaagctggtgaatggacagagccacatttccctctcaaaggcagagttccaggacgccctggagaagctgaatatgggcattactgacctccaggggctgcgcctctacgttgctgcagccatcattgagtatccaggtggggagatggaggaggcagagctcacatcctggtattttgtgtcatctcccttctccttggatcttagcaagaccaagcgacaccttgtgcctggggcccccttcctgctgcaggccttggtccgtgagatgtcaggctccccagcttctggcattcctgtcaaagtttctgccacggtgtcttctcctgggtctgttcctgaagtccaggacattcagcaaaacacagacgggagcggccaagtcagcattccaataattatccctcagaccatctcagagctgcagctctcagtatctgcaggctccccacatccagcgatagccaggctcactgtggcagccccaccttcaggaggccccgggtttctgtctattgagcggccggattctcgacctcctcgtgttggggacactctgaacctgaacttgcgagccgtgggcagtggggccaccttttctcattactactacatgatcctatcccgagggcagatcgtgttcatgaatcgagagcccaagaggaccctgacctcggtctcggtgtttgtggaccatcacctggcaccctccttctactttgtggccttctactaccatggagaccacccagtggccaactccctgcgagtggatgtccaggctggggcctgcgagggcaagctggagctcagcgtggacggtgccaagcagtaccggaacggggagtccgtgaagctccacttagaaaccgactccctagccctggtggcgctgggagccttggacacagctctgtatgctgcaggcagcaagtcccacaagcccctcaacatgggcaaggtctttgaagctatgaacagctatgacctcggctgtggtcctgggggtggggacagtgcccttcaggtgttccaggcagcgggcctggccttttctgatggagaccagtggaccttatccagaaagagactaagctgtcccaaggagaagacaacccggaaaaagagaaacgtgaacttccaaaaggcgattaatgagaaattgggtcagtatgcttccccgacagccaagcgctgctgccaggatggggtgacacgtctgcccatgatgcgttcctgcgagcagcgggcagcccgcgtgcagcagccggactgccgggagcccttcctgtcctgctgccaatttgctgagagtctgcgcaagaagagcagggacaagggccaggcgggcctccaacgagccctggagatcctgcaggaggaggacctgattgatgaggatgacattcccgtgcgcagcttcttcccagagaactggctctggagagtggaaacagtggaccgctttcaaatattgacactgtggctccccgactctctgaccacgtgggagatccatggcctgagcctgtccaaaaccaaaggcctatgtgtggccaccccagtccagctccgggtgttccgcgagttccacctgcacctccgcctgcccatgtctgtccgccgctttgagcagctggagctgcggcctgtcctctataactacctggataaaaacctgactgtgagcgtccacgtgtccccagtggaggggctgtgcctggctgggggcggagggctggcccagcaggtgctggtgcctgcgggctctgcccggcctgttgccttctctgtggtgcccacggcagccgccgctgtgtctctgaaggtggtggctcgagggtccttcgaattccctgtgggagatgcggtgtccaaggttctgcagattgagaaggaaggggccatccatagagaggagctggtctatgaactcaaccccttggaccaccgaggccggaccttggaaatacctggcaactctgatcccaatatgatccctgatggggactttaacagctacgtcagggttacagcctcagatccattggacactttaggctctgagggggccttgtcaccaggaggcgtggcctccctcttgaggcttcctcgaggctgtggggagcaaaccatgatctacttggctccgacactggctgcttcccgctacctggacaagacagagcagtggagcacactgcctcccgagaccaaggaccacgccgtggatctgatccagaaaggctacatgcggatccagcagtttcggaaggcggatggttcctatgcggcttggttgtcacgggacagcagcacctggctcacagcctttgtgttgaaggtcctgagtttggcccaggagcaggtaggaggctcgcctgagaaactgcaggagacatctaactggcttctgtcccagcagcaggctgacggctcgttccaggacccctgtccagtgttagacaggagcatgcaggggggtttggtgggcaatgatgagactgtggcactcacagcctttgtgaccatcgcccttcatcatgggctggccgtcttccaggatgagggtgcagagccattgaagcagagagtggaagcctccatctcaaaggcaaactcatttttgggggagaaagcaagtgctgggctcctgggtgcccacgcagctgccatcacggcctatgccctgacactgaccaaggcgcctgtggacctgctcggtgttgcccacaacaacctcatggcaatggcccaggagactggagataacctgtactggggctcagtcactggttctcagagcaatgccgtgtcgcccaccccggctcctcgcaacccatccgaccccatgccccaggccccagccctgtggattgaaaccacagcctacgccctgctgcacctcctgcttcacgagggcaaagcagagatggcagaccaggctgcggcctggctcacccgtcagggcagcttccaagggggattccgcagtacccaagacacggtgattgccctggatgccctgtctgcctactggattgcctcccacaccactgaggagaggggtctcaatgtgactctcagctccacaggccggaatgggttcaagtcccacgcgctgcagctgaacaaccgccagattcgcggcctggaggaggagctgcagttttccttgggcagcaagatcaatgtgaaggtgggaggaaacagcaaaggaaccctgaaggtccttcgtacctacaatgtcctggacatgaagaacacgacctgccaggacctacagatagaagtgacagtcaaaggccacgtcgagtacacgatggaagcaaacgaggactatgaggactatgagtacgatgagcttccagccaaggatgacccagatgcccctctgcagcccgtgacacccctgcagctgtttgagggtcggaggaaccgccgcaggagggaggcgcccaagctgacctccctctctgaccgttacgtgagtcactttgagaccgaggggccccacgtcctgctgtattttgactcggtccccacctcccgggagtgcgtgggctttgaggctgtgcaggaagtgccggtggggctggtgcagccggccagcgcaaccctgtacgactactacaaccccgagcgcagatgttctgtgttttacggggcaccaagtaagagcagactcttggccaccttgtgttctgctgaagtctgccagtgtgctgaggggaagtgccctcgccagcgtcgcgccctggagcggggtctgcaggacgaggatggctacaggatgaagtttgcctgctactacccccgtgtggagtacggcttccaggttaaggttctccgagaagacagcagagctgctttccgcctctttgagaccaagatcacccaagtcctgcacttcaccaaggatgtcaaggccgctgctaatcagatgcgcaacttcctggttcgagcctcctgccgccttcgcttggaacctgggaaagaatatttgatcatgggtctagatggggccacctatgacctcgagggacacccccagtacctgctggactcgaatagctggatcgaggagatgccctctgaacgcctgtgccggagcacccgccagcgggcagcctgtgcccagctcaacgacttcctccaggagtatggcactcaggggtgccaggtgtgagggctgccctcccacctccgctgggaggaacctgaacctgggaaccatgaagctggaagcactgctgtgtccgctttcatgaacacagcctgggaccagggcatattaaaggcttttggcagcaaagtgtc

SEQ ID NO: 6626 - DNA, 2054 bp, Homo sapiens
  source 1..2054: mol_type = unassigned DNA
agaaggtagcagacagacagacggatctaacctctcttggatcctccagccatgaggctgctctgggggctgatctgggcatccagcttcttcaccttatctctgcagaagcccaggttgctcttgttctctccttctgtggttcatctgggggtccccctatcggtgggggtgcagctccaggatgtgccccgaggacaggtagtgaaaggatcagtgttcctgagaaacccatctcgtaataatgtcccctgctccccaaaggtggacttcacccttagctcagaaagagacttcgcactcctcagtctccaggtgcccttgaaagatgcgaagagctgtggcctccatcaactcctcagaggccctgaggtccagctggtggcccattcgccatggctaaaggactctctgtccagaacgacaaacatccagggtatcaacctgctcttctcctctcgccgggggcacctctttttgcagacggaccagcctacgccctgctgcacctcctgcttcacgagggcaaagcagagatggcagaccaggctgcggcctggctcacccgtcagggcagcttccaagggggattccgcagtacccaagacacggtgattgccctggatgccctgtctgcctactggattgcctcccacaccactgaggagaggggtctcaatgtgactctcagctccacaggccggaatgggttcaagtcccacgcgctgcagctgaacaaccgccagattcgcggcctggaggaggagctgcagttttccttgggcagcaagatcaatgtgaaggtgggaggaaacagcaaaggaaccctgaaggtccttcgtacctacaatgtcctggacatgaagaacacgacctgccaggacctacagatagaagtgacagtcaaaggccacgtcgagtacacgatggaagcaaacgaggactatgaggactatgagtacgatgagcttccagccaaggatgacccagatgcccctctgcagcccgtgacacccctgcagctgtttgagggtcggaggaaccgccgcaggagggaggcgcccaaggtggtggaggagcaggagtccagggtgcactacaccgtgtgcatctggcggaacggcaaggtggggctgtctggcatggccatcgcggacgtcaccctcctgagtggattccacgccctgcgtgctgacctggagaagctgacctccctctctgaccgttacgtgagtcactttgagaccgaggggccccacgtcctgctgtattttgactcggtccccacctcccgggagtgcgtgggctttgaggctgtgcaggaagtgccggtggggctggtgcagccggccagcgcaaccctgtacgactactacaaccccgagcgcagatgttctgtgttttacggggcaccaagtaagagcagactcttggccaccttgtgttctgctgaagtctgccagtgtgctgaggggaagtgccctcgccagcgtcgcgccctggagcggggtctgcaggacgaggatggctacaggatgaagtttgcctgctactacccccgtgtggagtacggcttccaggttaaggttctccgagaagacagcagagctgctttccgcctctttgagaccaagatcacccaagtcctgcacttcaccaaggatgtcaaggccgctgctaatcagatgcgcaacttcctggttcgagcctcctgccgccttcgcttggaacctgggaaagaatatttgatcatgggtctggatggggccacctatgacctcgagggacacccccagtacctgctggactcgaatagctggatcgaggagatgccctctgaacgcctgtgccggagcacccgccagcgggcagcctgtgcccagctcaacgacttcctccaggagtatggcactcaggggtgccaggtgtgagggctgccctcccacctccgctgggaggaacctgaacctgggaaccatgaagctggaagcactgctgtgtccgctttcatgaacacagcctgggaccagggcatattaaaggcttttggcagc

SEQ ID NO: 6627 - DNA, 979 bp, Homo sapiens
  source 1..979: mol_type = unassigned DNA
agacggatctaacctctcttggatcctccagccatgaggctgctctgggggctgatctgggcatccagcttcttcaccttatctctgcagaagcccaggttgctcttgttctctccttctgtggttcatctgggggtccccctatcggtgggggtgcagctccaggatgtgccccgaggacagtctccaggtgcccttgaaagatgcgaagagctgtggcctccatcaactcctcagaggccctgaggtccagctggtggcccattcgccatggctaaaggactctctgtccagaacgacaaacatccagggtatcaacctgctcttctcctctcgccgggggcacctctttttgcagacggaccagcccatttacaaccctggccagcgggttcggtaccgggtctttgctctggatcagaagatgcgcccgagcactgacaccatcacagtcatggtggagaactctcacggcctccgcgtgcggaagaaggaggtgtacatgccctcgtccatcttccaggatgactttgtgatcccagacatctcagagccagggacctggaagatctcagcccgattctcagatggcctggaatccaacagcagcacccagtttgaggtgaagaaatatgtccttcccaactttgaggtgaagatcacccctggaaagccctacatcctgacggtgccaggccatcttgatgaaatgcagttagacatccaggccaggtacatctatgggaagccagtgcagggggtggcatatgtgcgctttgggctcctagatgaggatggtaagaagactttctttcgggggctggagagtcagaccaagctggtgaatggacagagccacatttccctctcaaaggcagagttccaggacgccctggagaagctgaatatgggcattactgacctccaggggctgcgcctctacgttgctgcagccatcattgagtatccaggtgggtga

SEQ ID NO: 6628 - DNA, 5460 bp, Homo sapiens
  source 1..5460: mol_type = unassigned DNA
agagtcaactctgccccgaggcctagcttggccagaaggtagcagacagacagacggatctaacctctcttggatcctccagccatgaggctgctctgggggctgatctgggcatccagcttcttcaccttatctctgcagaagcccaggttgctcttgttctctccttctgtggttcatctgggggtccccctatcggtgggggtgcagctccaggatgtgccccgaggacaggtagtgaaaggatcagtgttcctgagaaacccatctcgtaataatgtcccctgctccccaaaggtggacttcacccttagctcagaaagagacttcgcactcctcagtctccaggtgcccttgaaagatgcgaagagctgtggcctccatcaactcctcagaggccctgaggtccagctggtggcccattcgccatggctaaaggactctctgtccagaacgacaaacatccagggtatcaacctgctcttctcctctcgccgggggcacctctttttgcagacggaccagcccatttacaaccctggccagcgggttcggtaccgggtctttgctctggatcagaagatgcgcccgagcactgacaccatcacagtcatggtggagaactctcacggcctccgcgtgcggaagaaggaggtgtacatgccctcgtccatcttccaggatgactttgtgatcccagacatctcagagccagggacctggaagatctcagcccgattctcagatggcctggaatccaacagcagcacccagtttgaggtgaagaaatatgtccttcccaactttgaggtgaagatcacccctggaaagccctacatcctgacggtgccaggccatcttgatgaaatgcagttagacatccaggccaggtacatctatgggaagccagtgcagggggtggcatatgtgcgctttgggctcctagatgaggatggtaagaagactttctttcgggggctggagagtcagaccaagctggtgaatggacagagccacatttccctctcaaaggcagagttccaggacgccctggagaagctgaatatgggcattactgacctccaggggctgcgcctctacgttgctgcagccatcattgagtctccaggtggggagatggaggaggcagagctcacatcctggtattttgtgtcatctcccttctccttggatcttagcaagaccaagcgacaccttgtgcctggggcccccttcctgctgcaggccttggtccgtgagatgtcaggctccccagcttctggcattcctgtcaaagtttctgccacggtgtcttctcctgggtctgttcctgaagtccaggacattcagcaaaacacagacgggagcggccaagtcagcattccaataattatccctcagaccatctcagagctgcagctctcagtatctgcaggctccccacatccagcgatagccaggctcactgtggcagccccaccttcaggaggccccgggtttctgtctattgagcggccggattctcgacctcctcgtgttggggacactctgaacctgaacttgcgagccgtgggcagtggggccaccttttctcattactactacatgatcctatcccgagggcagatcgtgttcatgaatcgagagcccaagaggaccctgacctcggtctcggtgtttgtggaccatcacctggcaccctccttctactttgtggccttctactaccatggagaccacccagtggccaactccctgcgagtggatgtccaggctggggcctgcgagggcaagctggagctcagcgtggacggtgccaagcagtaccggaacggggagtccgtgaagctccacttagaaaccgactccctagccctggtggcgctgggagccttggacacagctctgtatgctgcaggcagcaagtcccacaagcccctcaacatgggcaaggtctttgaagctatgaacagctatgacctcggctgtggtcctgggggtggggacagtgcccttcaggtgttccaggcagcgggcctggccttttctgatggagaccagtggaccttatccagaaagagactaagctgtcccaaggagaagacaacccggaaaaagagaaacgtgaacttccaaaaggcgattaatgagaaattgggtcagtatgcttccccgacagccaagcgctgctgccaggatggggtgacacgtctgcccatgatgcgttcctgcgagcagcgggcagcccgcgtgcagcagccggactgccgggagcccttcctgtcctgctgccaatttgctgagagtctgcgcaagaagagcagggacaagggccaggcgggcctccaacgagccctggagatcctgcaggaggaggacctgattgatgaggatgacattcccgtgcgcagcttcttcccagagaactggctctggagagtggaaacagtggaccgctttcaaatattgacactgtggctccccgactctctgaccacgtgggagatccatggcctgagcctgtccaaaaccaaaggcctatgtgtggccaccccagttcagctccgggtgttccgcgagttccacctgcacctccgcctgcccatgtctgtccgccgctttgagcagctggagctgcggcctgtcctctataactacctggataaaaacctgactgtgagcgtccacgtgtccccagtggaggggctgtgcctggctgggggcggagggctggcccagcaggtgctggtgcctgcgggctctgcccggcctgttgccttctctgtggtgcccacggcagccaccgctgtgtctctgaaggtggtggctcgagggtccttcgaattccctgtgggagatgcggtgtccaaggttctgcagattgagaaggaaggggccatccatagagaggagctggtctatgaactcaaccccttggaccaccgaggccggaccttggaaatacctggcaactctgatcccaatatgatccctgatggggactttaacagctacgtcagggttacagcctcagatccattggacactttaggctctgagggggccttgtcaccaggaggcgtggcctccctcttgaggcttcctcgaggctgtggggagcaaaccatgatctacttggctccgacactggctgcttcccgctacctggacaagacagagcagtggagcacactgcctcccgagaccaaggaccacgccgtggatctgatccagaaaggctacatgcggatccagcagtttcggaaggcggatggttcctatgcggcttggttgtcacggggcagcagcacctggctcacagcctttgtgttgaaggtcctgagtttggcccaggagcaggtaggaggctcgcctgagaaactgcaggagacatctaactggcttctgtcccagcagcaggctgacggctcgttccaggacctctctccagtgatacataggagcatgcaggggggtttggtgggcaatgatgagactgtggcactcacagcctttgtgaccatcgcccttcatcatgggctggccgtcttccaggatgagggtgcagagccattgaagcagagagtggaagcctccatctcaaaggcaagctcatttttgggggagaaagcaagtgctgggctcctgggtgcccacgcagctgccatcacggcctatgccctgacactgaccaaggcccctgcggacctgcggggtgttgcccacaacaacctcatggcaatggcccaggagactggagataacctgtactggggctcagtcactggttctcagagcaatgccgtgtcgcccaccccggctcctcgcaacccatccgaccccatgccccaggccccagccctgtggattgaaaccacagcctacgccctgctgcacctcctgcttcacgagggcaaagcagagatggcagaccaggctgcggcctggctcacccgtcagggcagcttccaagggggattccgcagtacccaagacacggtgattgccctggatgccctgtctgcctactggattgcctcccacaccactgaggagaggggtctcaatgtgactctcagctccacaggccggaatgggttcaagtcccacgcgctgcagctgaacaaccgccagattcgcggcctggaggaggagctgcagttttccttgggcagcaagatcaatgtgaaggtgggaggaaacagcaaaggaaccctgaaggtccttcgtacctacaatgtcctggacatgaagaacacgacctgccaggacctacagatagaagtgacagtcaaaggccacgtcgagtacacgatggaagcaaacgaggactatgaggactatgagtacgatgagcttccagccaaggatgacccagatgcccctctgcagcccgtgacacccctgcagctgtttgagggtcggaggaaccgccgcaggagggaggcgcccaaggtggtggaggagcaggagtccagggtgcactacaccgtgtgcatctggcggaacggcaaggtggggctgtctggcatggccatcgcggacgtcaccctcctgagtggattccacgccctgcgtgctgacctggagaagctgacctccctctctgaccgttacgtgagtcactttgagaccgaggggccccacgtcctgctgtattttgactcggtccccacctcccgggagtgcgtgggctttgaggctgtgcaggaagtgccggtggggctggtgcagccggccagcgcaaccctgtacgactactacaaccccgagcgcagatgttctgtgttttacggggcaccaagtaagagcagactcttggccaccttgtgttctgctgaagtctgccagtgtgctgaggggaagtgccctcgccagcgtcgcgccctggagcggggtctgcaggacgaggatggctacaggatgaagtttgcctgctactacccccgtgtggagtacggcttccaggttaaggttctccgagaagacagcagagctgctttccgcctctttgagaccaagatcacccaagtcctgcacttcaccaaggatgtcaaggccgctgctaatcagatgcgcaacttcctggttcgagcctcctgccgccttcgcttggaacctgggaaagaatatttgatcatgggtctggatggggccacctatgacctcgagggacacccccagtacctgctggactcgaatagctggatcgaggagatgccctctgaacgcctgtgccggagcacccgccagcgggcagcctgtgcccagctcaacgacttcctccaggagtatggcactcaggggtgccaggtgtgagggctgccctcccacctccgctgggaggaacctgaacctgggaaccatgaagctggaagcactgctgtgtccgctttcatgaacacagcctgggaccagggcatattaaaggcttttggcagcaaagtgtcagtgttggca

SEQ ID NO: 6629 - DNA, 5220 bp, Homo sapiens
  source 1..5220: mol_type = unassigned DNA
atgaggctgctctgggggctgatctgggcatccagcttcttcaccttatctctgcagaagcccaggttgctcttgttctctccttctgtggttcatctgggggtccccctatcggtgggggtgcagctccaggatgtgccccgaggacaggtagtgaaaggatcagtgttcctgagaaacccatctcgtaataatgtcccctgctccccaaaggtggacttcacccttagctcagaaagagacttcgcactcctcagtctccaggtgcccttgaaagatgcgaagagctgtggcctccatcaactcctcagaggccctgaggtccagctggtggcccattcgccatggctaaaggactctctgtccagaacgacaaacatccagggtatcaacctgctcttctcctctcgccgggggcacctctttttgcagacggaccagcccatttacaaccctggccagcgggttcggtaccgggtctttgctctggatcagaagatgcgcccgagcactgacaccatcacagtcatggtggagaactctcacggcctccgcgtgcggaagaaggaggtgtacatgccctcgtccatcttccaggatgactttgtgatcccagacatctcagagccagggacctggaagatctcagcccgattctcagatggcctggaatccaacagcagcacccagtttgaggtgaagaaatatgtccttcccaactttgaggtgaagatcacccctggaaagccctacatcctgacggtgccaggccatcttgatgaaatgcagttagacatccaggccaggtacatctatgggaagccagtgcagggggtggcatatgtgcgctttgggctcctagatgaggatggtaagaagactttctttcgggggctggagagtcagaccaagctggtgaatggacagagccacatttccctctcaaaggcagagttccaggacgccctggagaagctgaatatgggcattactgacctccaggggctgcgcctctacgttgctgcagccatcattgagtctccaggtggggagatggaggaggcagagctcacatcctggtattttgtgtcatctcccttctccttggatcttagcaagaccaagcgacaccttgtgcctggggcccccttcctgctgcaggccttggtccgtgagatgtcaggctccccagcttctggcattcctgtcaaagtttctgccacggtgtcttctcctgggtctgttcctgaagtccaggacattcagcaaaacacagacgggagcggccaagtcagcattccaataattatccctcagaccatctcagagctgcagctctcagtatctgcaggctccccacatccagcgatagccaggctcactgtggcagccccaccttcaggaggccccgggtttctgtctattgagcggccggattctcgacctcctcgtgttggggacactctgaacctgaacttgcgagccgtgggcagtggggccaccttttctcattactactacatgatcctatcccgagggcagatcgtgttcatgaatcgagagcccaagaggaccctgacctcggtctcggtgtttgtggaccatcacctggcaccctccttctactttgtggccttctactaccatggagaccacccagtggccaactccctgcgagtggatgtccaggctggggcctgcgagggcaagctggagctcagcgtggacggtgccaagcagtaccggaacggggagtccgtgaagctccacttagaaaccgactccctagccctggtggcgctgggagccttggacacagctctgtatgctgcaggcagcaagtcccacaagcccctcaacatgggcaaggtctttgaagctatgaacagctatgacctcggctgtggtcctgggggtggggacagtgcccttcaggtgttccaggcagcgggcctggccttttctgatggagaccagtggaccttatccagaaagagactaagctgtcccaaggagaagacaacccggaaaaagagaaacgtgaacttccaaaaggcgattaatgagaaattgggtcagtatgcttccccgacagccaagcgctgctgccaggatggggtgacacgtctgcccatgatgcgttcctgcgagcagcgggcagcccgcgtgcagcagccggactgccgggagcccttcctgtcctgctgccaatttgctgagagtctgcgcaagaagagcagggacaagggccaggcgggcctccaacgagccctggagatcctgcaggaggaggacctgattgatgaggatgacattcccgtgcgcagcttcttcccagagaactggctctggagagtggaaacagtggaccgctttcaaatattgacactgtggctccccgactctctgaccacgtgggagatccatggcctgagcctgtccaaaaccaaaggcctatgtgtggccaccccagtccagctccgggtgttccgcgagttccacctgcacctccgcctgcccatgtctgtccgccgctttgagcagctggagctgcggcctgtcctctataactacctggataaaaacctgactgtgagcgtccacgtgtccccagtggaggggctgtgcctggctgggggcggagggctggcccagcaggtgctggtgcctgcgggctctgcccggcctgttgccttctctgtggtgcccacggcagccaccgctgtgtctctgaaggtggtggctcgagggtccttcgaattccctgtgggagatgcggtgtccaaggttctgcagattgagaaggaaggggccatccatagagaggagctggtctatgaactcaaccccttggaccaccgaggccggaccttggaaatacctggcaactctgatcccaatatgatccctgatggggactttaacagctacgtcagggttacagcctcagatccattggacactttaggctctgagggggccttgtcaccaggaggcgtggcctccctcttgaggcttcctcgaggctgtggggagcaaaccatgatctacttggctccgacactggctgcttcccgctacctggacaagacagagcagtggagcacactgcctcccgagaccaaggaccacgccgtggatctgatccagaaaggctacatgcggatccagcagtttcggaaggcggatggttcctatgcggcttggttgtcacggggcagcagcacctggctcacagcctttgtgttgaaggtcctgagtttggcccaggagcaggtaggaggctcgcctgagaaactgcaggagacatctaactggcttctgtcccagcagcaggctgacggctcgttccaggacctctctccagtgatacataggagcatgcaggggggtttggtgggcaatgatgagactgtggcactcacagcctttgtgaccatcgcccttcatcatgggctggccgtcttccaggatgagggtgcagagccattgaagcagagagtggaagcctccatctcaaaggcaagctcatttttgggggagaaagcaagtgctgggctcctgggtgcccacgcagctgccatcacggcctatgccctgacactgaccaaggcccctgcggacctgcggggtgttgcccacaacaacctcatggcaatggcccaggagactggagataacctgtactggggctcagtcactggttctcagagcaatgccgtgtcgcccaccccggctcctcgcaacccatccgaccccatgccccaggccccagccctgtggattgaaaccacagcctacgccctgctgcacctcctgcttcacgagggcaaagcagagatggcagaccaggctgcggcctggctcacccgtcagggcagcttccaagggggattccgcagtacccaagacacggtgattgccctggatgccctgtctgcctactggattgcctcccacaccactgaggagaggggtctcaatgtgactctcagctccacaggccggaatgggttcaagtcccacgcgctgcagctgaacaaccgccagattcgcggcctggaggaggagctgcagttttccttgggcagcaagatcaatgtgaaggtgggaggaaacagcaaaggaaccctgaaggtccttcgtacctacaatgtcctggacatgaagaacacgacctgccaggacctacagatagaagtgacagtcaaaggccacgtcgagtacacgatggaagcaaacgaggactatgaggactatgagtacgatgagcttccagccaaggatgacccagatgcccctctgcagcccgtgacacccctgcagctgtttgagggtcggaggaaccgccgcaggagggaggcgcccaagctgacctccctctctgaccgttacgtgagtcactttgagaccgaggggccccacgtcctgctgtattttgactcggtccccacctcccgggagtgcgtgggctttgaggctgtgcaggaagtgccggtggggctggtgcagccggccagcgcaaccctgtacgactactacaaccccgagcgcagatgttctgtgttttacggggcaccaagtaagagcagactcttggccaccttgtgttctgctgaagtctgccagtgtgctgaggggaagtgccctcgccagcgtcgcgccctggagcggggtctgcaggacgaggatggctacaggatgaagtttgcctgctactacccccgtgtggagtacggcttccaggttaaggttctccgagaagacagcagagctgctttccgcctctttgagaccaagatcacccaagtcctgcacttcaccaaggatgtcaaggccgctgctaatcagatgcgcaacttcctggttcgagcctcctgccgccttcgcttggaacctgggaaagaatatttgatcatgggtctggatggggccacctatgacctcgagggacacccccagtacctgctggactcgaatagctggatcgaggagatgccctctgaacgcctgtgccggagcacccgccagcgggcagcctgtgcccagctcaacgacttcctccaggagtatggcactcaggggtgccaggtgtgagggctgccctcccacctccgctgggaggaacctgaacctgggaaccatgaagctggaagcactgctgtgtccgctttcatgaacacagcctgggaccagggcatattaaaggcttttggcagc

SEQ ID NO: 6630 - DNA, 5460 bp, Homo sapiens
  source 1..5460: mol_type = unassigned DNA
agagtcaactctgccccgaggcctagcttggccagaaggtagcagacagacagacggatctaacctctcttggatcctccagccatgaggctgctctgggggctgatctgggcatccagcttcttcaccttatctctgcagaagcccaggttgctcttgttctctccttctgtggttcatctgggggtccccctatcggtgggggtgcagctccaggatgtgccccgaggacaggtagtgaaaggatcagtgttcctgagaaacccatctcgtaataatgtcccctgctccccaaaggtggacttcacccttagctcagaaagagacttcgcactcctcagtctccaggtgcccttgaaagatgcgaagagctgtggcctccatcaactcctcagaggccctgaggtccagctggtggcccattcgccatggctaaaggactctctgtccagaacgacaaacatccagggtatcaacctgctcttctcctctcgccgggggcacctctttttgcagacggaccagcccatttacaaccctggccagcgggttcggtaccgggtctttgctctggatcagaagatgcgcccgagcactgacaccatcacagtcatggtggagaactctcacggcctccgcgtgcggaagaaggaggtgtacatgccctcgtccatcttccaggatgactttgtgatcccagacatctcagagccagggacctggaagatctcagcccgattctcagatggcctggaatccaacagcagcacccagtttgaggtgaagaaatatgtccttcccaactttgaggtgaagatcacccctggaaagccctacatcctgacggtgccaggccatcttgatgaaatgcagttagacatccaggccaggtacatctatgggaagccagtgcagggggtggcatatgtgcgctttgggctcctagatgaggatggtaagaagactttctttcgggggctggagagtcagaccaagctggtgaatggacagagccacatttccctctcaaaggcagagttccaggacgccctggagaagctgaatatgggcattactgacctccaggggctgcgcctctacgttgctgcagccatcattgagtctccaggtggggagatggaggaggcagagctcacatcctggtattttgtgtcatctcccttctccttggatcttagcaagaccaagcgacaccttgtgcctggggcccccttcctgctgcaggccttggtccgtgagatgtcaggctccccagcttctggcattcctgtcaaagtttctgccacggtgtcttctcctgggtctgttcctgaagtccaggacattcagcaaaacacagacgggagcggccaagtcagcattccaataattatccctcagaccatctcagagctgcagctctcagtatctgcaggctccccacatccagcgatagccaggctcactgtggcagccccaccttcaggaggccccgggtttctgtctattgagcggccggattctcgacctcctcgtgttggggacactctgaacctgaacttgcgagccgtgggcagtggggccaccttttctcattactactacatgatcctatcccgagggcagatcgtgttcatgaatcgagagcccaagaggaccctgacctcggtctcggtgtttgtggaccatcacctggcaccctccttctactttgtggccttctactaccatggagaccacccagtggccaactccctgcgagtggatgtccaggctggggcctgcgagggcaagctggagctcagcgtggacggtgccaagcagtaccggaacggggagtccgtgaagctccacttagaaaccgactccctagccctggtggcgctgggagccttggacacagctctgtatgctgcaggcagcaagtcccacaagcccctcaacatgggcaaggtctttgaagctatgaacagctatgacctcggctgtggtcctgggggtggggacagtgcccttcaggtgttccaggcagcgggcctggccttttctgatggagaccagtggaccttatccagaaagagactaagctgtcccaaggagaagacaacccggaaaaagagaaacgtgaacttccaaaaggcgattaatgagaaattgggtcagtatgcttccccgacagccaagcgctgctgccaggatggggtgacacgtctgcccatgatgcgttcctgcgagcagcgggcagcccgcgtgcagcagccggactgccgggagcccttcctgtcctgctgccaatttgctgagagtctgcgcaagaagagcagggacaagggccaggcgggcctccaacgagccctggagatcctgcaggaggaggacctgattgatgaggatgacattcccgtgcgcagcttcttcccagagaactggctctggagagtggaaacagtggaccgctttcaaatattgacactgtggctccccgactctctgaccacgtgggagatccatggcctgagcctgtccaaaaccaaaggcctatgtgtggccaccccagtccagctccgggtgttccgcgagttccacctgcacctccgcctgcccatgtctgtccgccgctttgagcagctggagctgcggcctgtcctctataactacctggataaaaacctgactgtgagcgtccacgtgtccccagtggaggggctgtgcctggctgggggcggagggctggcccagcaggtgctggtgcctgcgggctctgcccggcctgttgccttctctgtggtgcccacggcagccaccgctgtgtctctgaaggtggtggctcgagggtccttcgaattccctgtgggagatgcggtgtccaaggttctgcagattgagaaggaaggggccatccatagagaggagctggtctatgaactcaaccccttggaccaccgaggccggaccttggaaatacctggcaactctgatcccaatatgatccctgatggggactttaacagctacgtcagggttacagcctcagatccattggacactttaggctctgagggggccttgtcaccaggaggcgtggcctccctcttgaggcttcctcgaggctgtggggagcaaaccatgatctacttggctccgacactggctgcttcccgctacctggacaagacagagcagtggagcacactgcctcccgagaccaaggaccacgccgtggatctgatccagaaaggctacatgcggatccagcagtttcggaaggcggatggttcctatgcggcttggttgtcacggggcagcagcacctggctcacagcctttgtgttgaaggtcctgagtttggcccaggagcaggtaggaggctcgcctgagaaactgcaggagacatctaactggcttctgtcccagcagcaggctgacggctcgttccaggacctctctccagtgatacataggagcatgcaggggggtttggtgggcaatgatgagactgtggcactcacagcctttgtgaccatcgcccttcatcatgggctggccgtcttccaggatgagggtgcagagccattgaagcagagagtggaagcctccatctcaaaggcaagctcatttttgggggagaaagcaagtgctgggctcctgggtgcccacgcagctgccatcacggcctatgccctgacactgaccaaggcccctgcggacctgcggggtgttgcccacaacaacctcatggcaatggcccaggagactggagataacctgtactggggctcagtcactggttctcagagcaatgccgtgtcgcccaccccggctcctcgcaacccatccgaccccatgccccaggccccagccctgtggattgaaaccacagcctacgccctgctgcacctcctgcttcacgagggcaaagcagagatggcagaccaggctgcggcctggctcacccgtcagggcagcttccaagggggattccgcagtacccaagacacggtgattgccctggatgccctgtctgcctactggattgcctcccacaccactgaggagaggggtctcaatgtgactctcagctccacaggccggaatgggttcaagtcccacgcgctgcagctgaacaaccgccagattcgcggcctggaggaggagctgcagttttccttgggcagcaagatcaatgtgaaggtgggaggaaacagcaaaggaaccctgaaggtccttcgtacctacaatgtcctggacatgaagaacacgacctgccaggacctacagatagaagtgacagtcaaaggccacgtcgagtacacgatggaagcaaacgaggactatgaggactatgagtacgatgagcttccagccaaggatgacccagatgcccctctgcagcccgtgacacccctgcagctgtttgagggtcggaggaaccgccgcaggagggaggcgcccaaggtggtggaggagcaggagtccagggtgcactacaccgtgtgcatctggcggaacggcaaggtggggctgtctggcatggccatcgcggacgtcaccctcctgagtggattccacgccctgcgtgctgacctggagaagctgacctccctctctgaccgttacgtgagtcactttgagaccgaggggccccacgtcctgctgtattttgactcggtccccacctcccgggagtgcgtgggctttgaggctgtgcaggaagtgccggtggggctggtgcagccggccagcgcaaccctgtacgactactacaaccccgagcgcagatgttctgtgttttacggggcaccaagtaagagcagactcttggccaccttgtgttctgctgaagtctgccagtgtgctgaggggaagtgccctcgccagcgtcgcgccctggagcggggtctgcaggacgaggatggctacaggatgaagtttgcctgctactacccccgtgtggagtacggcttccaggttaaggttctccgagaagacagcagagctgctttccgcctctttgagaccaagatcacccaagtcctgcacttcaccaaggatgtcaaggccgctgctaatcagatgcgcaacttcctggttcgagcctcctgccgccttcgcttggaacctgggaaagaatatttgatcatgggtctggatggggccacctatgacctcgagggacacccccagtacctgctggactcgaatagctggatcgaggagatgccctctgaacgcctgtgccggagcacccgccagcgggcagcctgtgcccagctcaacgacttcctccaggagtatggcactcaggggtgccaggtgtgagggctgccctcccacctccgctgggaggaacctgaacctgggaaccatgaagctggaagcactgctgtgtccgctttcatgaacacagcctgggaccagggcatattaaaggcttttggcagcaaagtgtcagtgttggca

SEQ ID NO: 6631 - DNA, 5460 bp, Homo sapiens
  source 1..5460: mol_type = unassigned DNA
agagtcaactctgccccgaggcctagcttggccagaaggtagcagacagacagacggatctaacctctcttggatcctccagccatgaggctgctctgggggctgatctgggcatccagcttcttcaccttatctctgcagaagcccaggttgctcttgttctctccttctgtggttcatctgggggtccccctatcggtgggggtgcagctccaggatgtgccccgaggacaggtagtgaaaggatcagtgttcctgagaaacccatctcgtaataatgtcccctgctccccaaaggtggacttcacccttagctcagaaagagactttgcactcctcagtctccaggtgcccttgaaagatgcgaagagctgtggcctccatcaactcctcagaggccctgaggtccagctggtggcccattcgccatggctaaaggactctctgtccagaacgacaaacatccagggtatcaacctgctcttctcctctcgccgggggcacctctttttgcagacggaccagcccatttacaaccctggccagcgggttcggtaccgggtctttgctctggatcagaagatgcgcccgagcactgacaccatcacagtcatggtggagaactctcacggcctccgcgtgcggaagaaggaggtgtacatgccctcgtccatcttccaggatgactttgtgatcccagacatctcagagccagggacctggaagatctcagcccgattctcagatggcctggaatccaacagcagcacccagtttgaggtgaagaaatatgtccttcccaactttgaggtgaagatcacccctggaaagccctacatcctgacggtgccaggccatcttgatgaaatgcagttagacatccaggccaggtacatctatgggaagccagtgcagggggtggcatatgtgcgctttgggctcctagatgaggatggtaagaagactttctttcgggggctggagagtcagaccaagctggtgaatggacagagccacatttccctctcaaaggcagagttccaggacgccctggagaagctgaatatgggcattactgacctccaggggctgcgcctctacgttgctgcagccatcattgagtctccaggtggggagatggaggaggcagagctcacatcctggtattttgtgtcatctcccttctccttggatcttagcaagaccaagcgacaccttgtgcctggggcccccttcctgctgcaggccttggtccgtgagatgtcaggctccccagcttctggcattcctgtcaaagtttctgccacggtgtcttctcctgggtctgttcctgaagtccaggacattcagcaaaacacagacgggagcggccaagtcagcattccaataattatccctcagaccatctcagagctgcagctctcagtatctgcaggctccccacatccagcgatagccaggctcactgtggcagccccaccttcaggaggccccgggtttctgtctattgagcggccggattctcgacctcctcgtgttggggacactctgaacctgaacttgcgagccgtgggcagtggggccaccttttctcattactactacatgatcctatcccgagggcagatcgtgttcatgaatcgagagcccaagaggaccctgacctcggtctcggtgtttgtggaccatcacctggcaccctccttctactttgtggccttctactaccatggagaccacccagtggccaactccctgcgagtggatgtccaggctggggcctgcgagggcaagctggagctcagcgtggacggtgccaagcagtaccggaacggggagtccgtgaagctccacttagaaaccgactccctagccctggtggcgctgggagccttggacacagctctgtatgctgcaggcagcaagtcccacaagcccctcaacatgggcaaggtctttgaagctatgaacagctatgacctcggctgtggtcctgggggtggggacagtgcccttcaggtgttccaggcagcgggcctggccttttctgatggagaccagtggaccttatccagaaagagactaagctgtcccaaggagaagacaacccggaaaaagagaaacgtgaacttccaaaaggcgattaatgagaaattgggtcagtatgcttccccgacagccaagcgctgctgccaggatggggtgacacgtctgcccatgatgcgttcctgcgagcagcgggcagcccgcgtgcagcagccggactgccgggagcccttcctgtcctgctgccaatttgctgagagtctgcgcaagaagagcagggacaagggccaggcgggcctccaacgagccctggagatcctgcaggaggaggacctgattgatgaggatgacattcccgtgcgcagcttcttcccagagaactggctctggagagtggaaacagtggaccgctttcaaatattgacactgtggctccccgactctctgaccacgtgggagatccatggcctgagcctgtccaaaaccaaaggcctatgtgtggccaccccagtccagctccgggtgttccgcgagttccacctgcacctccgcctgcccatgtctgtccgccgctttgagcagctggagctgcggcctgtcctctataactacctggataaaaacctgactgtgagcgtccacgtgtccccagtggaggggctgtgcctggctgggggcggagggctggcccagcaggtgctggtgcctgcgggctctgcccggcctgttgccttctctgtggtgcccacggcagccgccgctgtgtctctgaaggtggtggctcgagggtccttcgaattccctgtgggagatgcggtgtccaaggttctgcagattgagaaggaaggggccatccatagagaggagctggtctatgaactcaaccccttggaccaccgaggccggaccttggaaatacctggcaactctgatcccaatatgatccctgatggggactttaacagctacgtcagggttacagcctcagatccattggacactttaggctctgagggggccttgtcaccaggaggcgtggcctccctcttgaggcttcctcgaggctgtggggagcaaaccatgatctacttggctccgacactggctgcttcccgctacctggacaagacagagcagtggagcacactgcctcccgagaccaaggaccacgccgtggatctgatccagaaaggctacatgcggatccagcagtttcggaaggcggatggttcctatgcggcttggttgtcacggggcagcagcacctggctcacagcctttgtgttgaaggtcctgagtttggcccaggagcaggtaggaggctcgcctgagaaactgcaggagacatctaactggcttctgtcccagcagcaggctgacggctcgttccaggacctctctccagtgatacataggagcatgcaggggggtttggtgggcaatgatgagactgtggcactcacagcctttgtgaccatcgcccttcatcatgggctggccgtcttccaggatgagggtgcagagccattgaagcagagagtggaagcctccatctcaaaggcaaactcatttttgggggagaaagcaagtgctgggctcctgggtgcccacgcagctgccatcacggcctatgccctgacactgaccaaggcccctgcggacctgcggggtgttgcccacaacaacctcatggcaatggcccaggagactggagataacctgtactggggctcagtcactggttctcagagcaatgccgtgtcgcccaccccggctcctcgcaacccatccgaccccatgccccaggccccagccctgtggattgaaaccacagcctacgccctgctgcacctcctgcttcacgagggcaaagcagagatggcagaccaggctgcggcctggctcacccgtcagggcagcttccaagggggattccgcagtacccaagacacggtgattgccctggatgccctgtctgcctactggattgcctcccacaccactgaggagaggggtctcaatgtgactctcagctccacaggccggaatgggttcaagtcccacgcgctgcagctgaacaaccgccagattcgcggcctggaggaggagctgcagttttccttgggcagcaagatcaatgtgaaggtgggaggaaacagcaaaggaaccctgaaggtccttcgtacctacaatgtcctggacatgaagaacacgacctgccaggacctacagatagaagtgacagtcaaaggccacgtcgagtacacgatggaagcaaacgaggactatgaggactatgagtacgatgagcttccagccaaggatgacccagatgcccctctgcagcccgtgacacccctgcagctgtttgagggtcggaggaaccgccgcaggagggaggcgcccaaggtggtggaggagcaggagtccagggtgcactacaccgtgtgcatctggcggaacggcaaggtggggctgtctggcatggccatcgcggacgtcaccctcctgagtggattccacgccctgcgtgctgacctggagaagctgacctccctctctgaccgttacgtgagtcactttgagaccgaggggccccacgtcctgctgtattttgactcggtccccacctcccgggagtgcgtgggctttgaggctgtgcaggaagtgccggtggggctggtgcagccggccagcgcaaccctgtacgactactacaaccccgagcgcagatgttctgtgttttacggggcaccaagtaagagcagactcttggccaccttgtgttctgctgaagtctgccagtgtgctgaggggaagtgccctcgccagcgtcgcgccctggagcggggtctgcaggacgaggatggctacaggatgaagtttgcctgctactacccccgtgtggagtacggcttccaggttaaggttctccgagaagacagcagagctgctttccgcctctttgagaccaagatcacccaagtcctgcacttcaccaaggatgtcaaggccgctgctaatcagatgcgcaacttcctggttcgagcctcctgccgccttcgcttggaacctgggaaagaatatttgatcatgggtctggatggggccacctatgacctcgagggacacccccagtacctgctggactcgaatagctggatcgaggagatgccctctgaacgcctgtgccggagcacccgccagcgggcagcctgtgcccagctcaacgacttcctccaggagtatggcactcaggggtgccaggtgtgagggctgccctcccacctccgctgggaggaacctgaacctgggaaccatgaagctggaagcactgctgtgtccgctttcatgaacacagcctgggaccagggcatattaaaggcttttggcagcaaagtgtcagtgttggca

SEQ ID NO: 6632 - DNA, 982 bp, Homo sapiens
  source 1..982: mol_type = unassigned DNA
atgtgccccgaggacagtctccaggtgcccttgaaagatgcgaagagctgtggcctccatcaactcctcagaggccctgaggtccagctggtggcccattcgccatggctaaaggactctctgtccagaacgacaaacatccagggtatcaacctgctcttctcctctcgccgggggcacctctttttgcagacggaccagcccatttacaaccctggccagcgggttcggtaccgggtctttgctctggatcagaagatgcgcccgagcactgacaccatcacagtcatggtggagaactctcacggcctccgcgtgcggaagaaggaggtgtacatgccctcgtccatcttccaggatgactttgtgatcccagacatctcagagccagggacctggaagatctcagcccgattctcagatggcctggaatccaacagcagcacccagtttgaggtgaagaaatatgtccttcccaactttgaggtgaagatcacccctggaaagccctacatcctgacggtgccaggccatcttgatgaaatgcagttagacatccaggccaggtacatctatgggaagccagtgcagggggtggcatatgtgcgctttgggctcctagatgaggatggtaagaagactttctttcgggggctggagagtcagaccaagctggtgaatggacagagccacatttccctctcaaaggcagagttccaggacgccctggagaagctgaatatgggcattactgacctccaggggctgcgcctctacgttgctgcagccatcattgagtctccaggtggggagatggaggaggcagagctcacatcctggtattttgtgtcatctcccttctccttggatcttagcaagaccaagcgacaccttgtgcctggggcccccttcctgctgcaggccttggtccgtgagatgtcaggctccccagcttctggcattcctgtcaaagtttctgcca

SEQ ID NO: 6633 - DNA, 5220 bp, Homo sapiens
  source 1..5220: mol_type = unassigned DNA
atgaggctgctctgggggctgatctgggcatccagcttcttcaccttatctctgcagaagcccaggttgctcttgttctctccttctgtggttcatctgggggtccccctatcggtgggggtgcagctccaggatgtgccccgaggacaggtagtgaaaggatcagtgttcctgagaaacccatctcgtaataatgtcccctgctccccaaaggtggacttcacccttagctcagaaagagactttgcactcctcagtctccaggtgcccttgaaagatgcgaagagctgtggcctccatcaactcctcagaggccctgaggtccagctggtggcccattcgccatggctaaaggactctctgtccagaacgacaaacatccagggtatcaacctgctcttctcctctcgccgggggcacctctttttgcagacggaccagcccatttacaaccctggccagcgggttcggtaccgggtctttgctctggatcagaagatgcgcccgagcactgacaccatcacagtcatggtggagaactctcacggcctccgcgtgcggaagaaggaggtgtacatgccctcgtccatcttccaggatgactttgtgatcccagacatctcagagccagggacctggaagatctcagcccgattctcagatggcctggaatccaacagcagcacccagtttgaggtgaagaaatatgtccttcccaactttgaggtgaagatcacccctggaaagccctacatcctgacggtgccaggccatcttgatgaaatgcagttagacatccaggccaggtacatctatgggaagccagtgcagggggtggcatatgtgcgctttgggctcctagatgaggatggtaagaagactttctttcgggggctggagagtcagaccaagctggtgaatggacagagccacatttccctctcaaaggcagagttccaggacgccctggagaagctgaatatgggcattactgacctccaggggctgcgcctctacgttgctgcagccatcattgagtctccaggtggggagatggaggaggcagagctcacatcctggtattttgtgtcatctcccttctccttggatcttagcaagaccaagcgacaccttgtgcctggggcccccttcctgctgcaggccttggtccgtgagatgtcaggctccccagcttctggcattcctgtcaaagtttctgccacggtgtcttctcctgggtctgttcctgaagtccaggacattcagcaaaacacagacgggagcggccaagtcagcattccaataattatccctcagaccatctcagagctgcagctctcagtatctgcaggctccccacatccagcgatagccaggctcactgtggcagccccaccttcaggaggccccgggtttctgtctattgagcggccggattctcgacctcctcgtgttggggacactctgaacctgaacttgcgagccgtgggcagtggggccaccttttctcattactactacatgatcctatcccgagggcagatcgtgttcatgaatcgagagcccaagaggaccctgacctcggtctcggtgtttgtggaccatcacctggcaccctccttctactttgtggccttctactaccatggagaccacccagtggccaactccctgcgagtggatgtccaggctggggcctgcgagggcaagctggagctcagcgtggacggtgccaagcagtaccggaacggggagtccgtgaagctccacttagaaaccgactccctagccctggtggcgctgggagccttggacacagctctgtatgctgcaggcagcaagtcccacaagcccctcaacatgggcaaggtctttgaagctatgaacagctatgacctcggctgtggtcctgggggtggggacagtgcccttcaggtgttccaggcagcgggcctggccttttctgatggagaccagtggaccttatccagaaagagactaagctgtcccaaggagaagacaacccggaaaaagagaaacgtgaacttccaaaaggcgattaatgagaaattgggtcagtatgcttccccgacagccaagcgctgctgccaggatggggtgacacgtctgcccatgatgcgttcctgcgagcagcgggcagcccgcgtgcagcagccggactgccgggagcccttcctgtcctgctgccaatttgctgagagtctgcgcaagaagagcagggacaagggccaggcgggcctccaacgagccctggagatcctgcaggaggaggacctgattgatgaggatgacattcccgtgcgcagcttcttcccagagaactggctctggagagtggaaacagtggaccgctttcaaatattgacactgtggctccccgactctctgaccacgtgggagatccatggcctgagcctgtccaaaaccaaaggcctatgtgtggccaccccagtccagctccgggtgttccgcgagttccacctgcacctccgcctgcccatgtctgtccgccgctttgagcagctggagctgcggcctgtcctctataactacctggataaaaacctgactgtgagcgtccacgtgtccccagtggaggggctgtgcctggctgggggcggagggctggcccagcaggtgctggtgcctgcgggctctgcccggcctgttgccttctctgtggtgcccacggcagccgccgctgtgtctctgaaggtggtggctcgagggtccttcgaattccctgtgggagatgcggtgtccaaggttctgcagattgagaaggaaggggccatccatagagaggagctggtctatgaactcaaccccttggaccaccgaggccggaccttggaaatacctggcaactctgatcccaatatgatccctgatggggactttaacagctacgtcagggttacagcctcagatccattggacactttaggctctgagggggccttgtcaccaggaggcgtggcctccctcttgaggcttcctcgaggctgtggggagcaaaccatgatctacttggctccgacactggctgcttcccgctacctggacaagacagagcagtggagcacactgcctcccgagaccaaggaccacgccgtggatctgatccagaaaggctacatgcggatccagcagtttcggaaggcggatggttcctatgcggcttggttgtcacggggcagcagcacctggctcacagcctttgtgttgaaggtcctgagtttggcccaggagcaggtaggaggctcgcctgagaaactgcaggagacatctaactggcttctgtcccagcagcaggctgacggctcgttccaggacctctctccagtgatacataggagcatgcaggggggtttggtgggcaatgatgagactgtggcactcacagcctttgtgaccatcgcccttcatcatgggctggccgtcttccaggatgagggtgcagagccattgaagcagagagtggaagcctccatctcaaaggcaaactcatttttgggggagaaagcaagtgctgggctcctgggtgcccacgcagctgccatcacggcctatgccctgacactgaccaaggcccctgcggacctgcggggtgttgcccacaacaacctcatggcaatggcccaggagactggagataacctgtactggggctcagtcactggttctcagagcaatgccgtgtcgcccaccccggctcctcgcaacccatccgaccccatgccccaggccccagccctgtggattgaaaccacagcctacgccctgctgcacctcctgcttcacgagggcaaagcagagatggcagaccaggctgcggcctggctcacccgtcagggcagcttccaagggggattccgcagtacccaagacacggtgattgccctggatgccctgtctgcctactggattgcctcccacaccactgaggagaggggtctcaatgtgactctcagctccacaggccggaatgggttcaagtcccacgcgctgcagctgaacaaccgccagattcgcggcctggaggaggagctgcagttttccttgggcagcaagatcaatgtgaaggtgggaggaaacagcaaaggaaccctgaaggtccttcgtacctacaatgtcctggacatgaagaacacgacctgccaggacctacagatagaagtgacagtcaaaggccacgtcgagtacacgatggaagcaaacgaggactatgaggactatgagtacgatgagcttccagccaaggatgacccagatgcccctctgcagcccgtgacacccctgcagctgtttgagggtcggaggaaccgccgcaggagggaggcgcccaagctgacctccctctctgaccgttacgtgagtcactttgagaccgaggggccccacgtcctgctgtattttgactcggtccccacctcccgggagtgcgtgggctttgaggctgtgcaggaagtgccggtggggctggtgcagccggccagcgcaaccctgtacgactactacaaccccgagcgcagatgttctgtgttttacggggcaccaagtaagagcagactcttggccaccttgtgttctgctgaagtctgccagtgtgctgaggggaagtgccctcgccagcgtcgcgccctggagcggggtctgcaggacgaggatggctacaggatgaagtttgcctgctactacccccgtgtggagtacggcttccaggttaaggttctccgagaagacagcagagctgctttccgcctctttgagaccaagatcacccaagtcctgcacttcaccaaggatgtcaaggccgctgctaatcagatgcgcaacttcctggttcgagcctcctgccgccttcgcttggaacctgggaaagaatatttgatcatgggtctggatggggccacctatgacctcgagggacacccccagtacctgctggactcgaatagctggatcgaggagatgccctctgaacgcctgtgccggagcacccgccagcgggcagcctgtgcccagctcaacgacttcctccaggagtatggcactcaggggtgccaggtgtgagggctgccctcccacctccgctgggaggaacctgaacctgggaaccatgaagctggaagcactgctgtgtccgctttcatgaacacagcctgggaccagggcatattaaaggcttttggcagc

SEQ ID NO: 6634 - DNA, 1276 bp, Homo sapiens
  source 1..1276: mol_type = unassigned DNA
agacggatctaacctctcttggatcctccagccatgaggctgctctgggggctgatctgggcatccagcttcttcaccttatctctgcagaagcccaggttgctcttgttctctccttctgtggttcatctgggggtccccctatcggtgggggtgcagctccaggatgtgccccgaggacagtctccaggtgcccttgaaagatgcgaagagctgtggcctccatcaactcctcagaggccctgaggtccagctggtggcccattcgccatggctaaaggactctctgtccagaacgacaaacatccagggtatcaacctgctcttctcctctcgccgggggcacctctttttgcagacggaccagcccatttacaaccctggccagcgggttcggtaccgggtctttgctctggatcagaagatgcgcccgagcactgacaccatcacagtcatggtggagaactctcacggcctccgcgtgcggaagaaggaggtgtacatgccctcgtccatcttccaggatgactttgtgatcccagacatctcagagccagggacctggaagatctcagcccgattctcagatggcctggaatccaacagcagcacccagtttgaggtgaagaaatatgtccttcccaactttgaggtgaagatcacccctggaaagccctacatcctgacggtgccaggccatcttgatgaaatgcagttagacatccaggccaggtacatctatgggaagccagtgcagggggtggcatatgtgcgctttgggctcctagatgaggatggtaagaagactttctttcgggggctggagagtcagaccaagctggtgaatggacagagccacatttccctctcaaaggcagagttccaggacgccctggagaagctgaatatgggcattactgacctccaggggctgcgcctctacgttgctgcagccatcattgagtctccaggtgggtgactttcccttattgtaaccccagacccttgcctctgacctctgagctaaccctctgtcctccggcaccaacaccaccccacttctcacatctcatctcagactcaaaaccaggaaacacccaggagacctggtttctctccaactctgtctctgtgactcggcccttttccctggctgagtttatttatttctttgctcgttctgctcattccttcactcctccagtggacatgtgttgttcaatgccctgtgctgggcctcagcatgtacagacaggaatacagcagcctgcgccct

SEQ ID NO: 6635 - DNA, 5268 bp, Homo sapiens
  source 1..5268: mol_type = unassigned DNA
gacagacagacggatctaacctctcttggatcctccagccatgaggctgctctgggggctgatctgggcatccagcttcttcaccttatctctgcagaagcccaggttgctcttgttctctccttctgtggttcatctgggggtccccctatcggtgggggtgcagctccaggatgtgccccgaggacaggtagtgaaaggatcagtgttcctgagaaacccatctcgtaataatgtcccctgctccccaaaggtggacttcacccttagctcagaaagagacttcgcactcctcagtctccaggtgcccttgaaagatgcgaagagctgtggcctccatcaactcctcagaggccctgaggtccagctggtggcccattcgccatggctaaaggactctctgtccagaacgacaaacatccagggtatcaacctgctcttctcctctcgccgggggcacctctttttgcagacggaccagcccatttacaaccctggccagcgggttcggtaccgggtctttgctctggatcagaagatgcgcccgagcactgacaccatcacagtcatggtggagaactctcacggcctccgcgtgcggaagaaggaggtgtacatgccctcgtccatcttccaggatgactttgtgatcccagacatctcagagccagggacctggaagatctcagcccgattctcagatggcctggaatccaacagcagcacccagtttgaggtgaagaaatatgtccttcccaactttgaggtgaagatcacccctggaaagccctacatcctgacggtgccaggccatcttgatgaaatgcagttagacatccaggccaggtacatctatgggaagccagtgcagggggtggcatatgtgcgctttgggctcctagatgaggatggtaagaagactttctttcgggggctggagagtcagaccaagctggtgaatggacagagccacatttccctctcaaaggcagagttccaggacgccctggagaagctgaatatgggcattactgacctccaggggctgcgcctctacgttgctgcagccatcattgagtctccaggtggggagatggaggaggcagagctcacatcctggtattttgtgtcatctcccttctccttggatcttagcaagaccaagcgacaccttgtgcctggggcccccttcctgctgcaggccttggtccgtgagatgtcaggctccccagcttctggcattcctgtcaaagtttctgccacggtgtcttctcctgggtctgttcctgaagtccaggacattcagcaaaacacagacgggagcggccaagtcagcattccaataattatccctcagaccatctcagagctgcagctctcagtatctgcaggctccccacatccagcgatagccaggctcactgtggcagccccaccttcaggaggccccgggtttctgtctattgagcggccggattctcgacctcctcgtgttggggacactctgaacctgaacttgcgagccgtgggcagtggggccaccttttctcattactactacatgatcctatcccgagggcagatcgtgttcatgaatcgagagcccaagaggaccctgacctcggtctcggtgtttgtggaccatcacctggcaccctccttctactttgtggccttctactaccatggagaccacccagtggccaactccctgcgagtggatgtccaggctggggcctgcgagggcaagctggagctcagcgtggacggtgccaagcagtaccggaacggggagtccgtgaagctccacttagaaaccgactccctagccctggtggcgctgggagccttggacacagctctgtatgctgcaggcagcaagtcccacaagcccctcaacatgggcaaggtctttgaagctatgaacagctatgacctcggctgtggtcctgggggtggggacagtgcccttcaggtgttccaggcagcgggcctggccttttctgatggagaccagtggaccttatccagaaagagactaagctgtcccaaggagaagacaacccggaaaaagagaaacgtgaacttccaaaaggcgattaatgagaaattgggtcagtatgcttccccgacagccaagcgctgctgccaggatggggtgacacgtctgcccatgatgcgttcctgcgagcagcgggcagcccgcgtgcagcagccggactgccgggagcccttcctgtcctgctgccaatttgctgagagtctgcgcaagaagagcagggacaagggccaggcgggcctccaacgagccctggagatcctgcaggaggaggacctgattgatgaggatgacattcccgtgcgcagcttcttcccagagaactggctctggagagtggaaacagtggaccgctttcaaatattgacactgtggctccccgactctctgaccacgtgggagatccatggcctgagcctgtccaaaaccaaaggcctatgtgtggccaccccagttcagctccgggtgttccgcgagttccacctgcacctccgcctgcccatgtctgtccgccgctttgagcagctggagctgcggcctgtcctctataactacctggataaaaacctgactgtgagcgtccacgtgtccccagtggaggggctgtgcctggctgggggcggagggctggcccagcaggtgctggtgcctgcgggctctgcccggcctgttgccttctctgtggtgcccacggcagccaccgctgtgtctctgaaggtggtggctcgagggtccttcgaattccctgtgggagatgcggtgtccaaggttctgcagattgagaaggaaggggccatccatagagaggagctggtctatgaactcaaccccttggaccaccgaggccggaccttggaaatacctggcaactctgatcccaatatgatccctgatggggactttaacagctacgtcagggttacagcctcagatccattggacactttaggctctgagggggccttgtcaccaggaggcgtggcctccctcttgaggcttcctcgaggctgtggggagcaaaccatgatctacttggctccgacactggctgcttcccgctacctggacaagacagagcagtggagcacactgcctcccgagaccaaggaccacgccgtggatctgatccagaaaggctacatgcggatccagcagtttcggaaggcggatggttcctatgcggcttggttgtcacggggcagcagcacctggctcacagcctttgtgttgaaggtcctgagtttggcccaggagcaggtaggaggctcgcctgagaaactgcaggagacatctaactggcttctgtcccagcagcaggctgacggctcgttccaggacctctctccagtgatacataggagcatgcaggggggtttggtgggcaatgatgagactgtggcactcacagcctttgtgaccatcgcccttcatcatgggctggccgtcttccaggatgagggtgcagagccattgaagcagagagtggaagcctccatctcaaaggcaagctcatttttgggggagaaagcaagtgctgggctcctgggtgcccacgcagctgccatcacggcctatgccctgacactgaccaaggcccctgcggacctgcggggtgttgcccacaacaacctcatggcaatggcccaggagactggagataacctgtactggggctcagtcactggttctcagagcaatgccgtgtcgcccaccccggctcctcgcaacccatccgaccccatgccccaggccccagccctgtggattgaaaccacagcctacgccctgctgcacctcctgcttcacgagggcaaagcagagatggcagaccaggctgcggcctggctcacccgtcagggcagcttccaagggggattccgcagtacccaagacacggtgattgccctggatgccctgtctgcctactggattgcctcccacaccactgaggagaggggtctcaatgtgactctcagctccacaggccggaatgggttcaagtcccacgcgctgcagctgaacaaccgccagattcgcggcctggaggaggagctgcagttttccttgggcagcaagatcaatgtgaaggtgggaggaaacagcaaaggaaccctgaaggtccttcgtacctacaatgtcctggacatgaagaacacgacctgccaggacctacagatagaagtgacagtcaaaggccacgtcgagtacacgatggaagcaaacgaggactatgaggactatgagtacgatgagcttccagccaaggatgacccagatgcccctctgcagcccgtgacacccctgcagctgtttgagggtcggaggaaccgccgcaggagggaggcgcccaagctgacctccctctctgaccgttacgtgagtcactttgagaccgaggggccccacgtcctgctgtattttgactcggtccccacctcccgggagtgcgtgggctttgaggctgtgcaggaagtgccggtggggctggtgcagccggccagcgcaaccctgtacgactactacaaccccgagcgcagatgttctgtgttttacggggcaccaagtaagagcagactcttggccaccttgtgttctgctgaagtctgccagtgtgctgaggggaagtgccctcgccagcgtcgcgccctggagcggggtctgcaggacgaggatggctacaggatgaagtttgcctgctactacccccgtgtggagtacggcttccaggttaaggttctccgagaagacagcagagctgctttccgcctctttgagaccaagatcacccaagtcctgcacttcaccaaggatgtcaaggccgctgctaatcagatgcgcaacttcctggttcgagcctcctgccgccttcgcttggaacctgggaaagaatatttgatcatgggtctggatggggccacctatgacctcgagggacacccccagtacctgctggactcgaatagctggatcgaggagatgccctctgaacgcctgtgccggagcacccgccagcgggcagcctgtgcccagctcaacgacttcctccaggagtatggcactcaggggtgccaggtgtgagggctgccctcccacctccgctgggaggaacctgaacctgggaaccatgaagctggaagcactgctgtgtccgctttcatgaacacagcctgggaccagggcatattaaaggcttttggcagcaaagtgtc

SEQ ID NO: 6636 - DNA, 2054 bp, Homo sapiens; identical to SEQ ID NO: 6626
  source 1..2054: mol_type = unassigned DNA

SEQ ID NO: 6637 - DNA, 2076 bp, Homo sapiens
  source 1..2076: mol_type = unassigned DNA
atgggaagccagtgcagggggtggcatatgtgcgctttgggctcccagcagcaggctgacggctcgttccaggacctctctccagtgatacataggagcatgcaggggggtttggtgggcaatgatgagactgtggcactcacagcctttgtgaccatcgcccttcatcatgggctggccgtcttccaggatgagggtgcagagccattgaagcagagagtggaagcctccatctcaaaggcaagctcatttttgggggagaaagcaagtgctgggctcctgggtgcccacgcagctgccatcacggcctatgccctgacactgaccaaggcccctgcggacctgcggggtgttgcccacaacaacctcatggcaatggcccaggagactggagataacctgtactggggctcagtcactggttctcagagcaatgccgtgtcgcccaccccggctcctcgcaacccatccgaccccatgccccaggccccagccctgtggattgaaaccacagcctacgccctgctgcacctcctgcttcacgagggcaaagcagagatggcagaccaggctgcggcctggctcacccgtcagggcagcttccaagggggattccgcagtacccaagacacggtgattgccctggatgccctgtctgcctactggattgcctcccacaccactgaggagaggggtctcaatgtgactctcagctccacaggccggaatgggttcaagtcccacgcgctgcagctgaacaaccgccagattcgcggcctggaggaggagctgcagttttccttgggcagcaagatcaatgtgaaggtgggaggaaacagcaaaggaaccctgaaggtccttcgtacctacaatgtcctggacatgaagaacacgacctgccaggacctacagatagaagtgacagtcaaaggccacgtcgagtacacgatggaagcaaacgaggactatgaggactatgagtacgatgagcttccagccaaggatgacccagatgcccctctgcagcccgtgacacccctgcagctgtttgagggtcggaggaaccgccgcaggagggaggcgcccaaggtggtggaggagcaggagtccagggtgcactacaccgtgtgcatctggcggaacggcaaggtggggctgtctggcatggccatcgcggacgtcaccctcctgagtggattccacgccctgcgtgctgacctggagaagctgacctccctctctgaccgttacgtgagtcactttgagaccgaggggccccacgtcctgctgtattttgactcggtccccacctcccgggagtgcgtgggctttgaggctgtgcaggaagtgccggtggggctggtgcagccggccagcgcaaccctgtacgactactacaaccccgagcgcagatgttctgtgttttacggggcaccaagtaagagcagactcttggccaccttgtgttctgctgaagtctgccagtgtgctgaggggaagtgccctcgccagcgtcgcgccctggagcggggtctgcaggacgaggatggctacaggatgaagtttgcctgctactacccccgtgtggagtacggcttccaggttaaggttctccgagaagacagcagagctgctttccgcctctttgagaccaagatcacccaagtcctgcacttcaccaaggatgtcaaggccgctgctaatcagatgcgcaacttcctggttcgagcctcctgccgccttcgcttggaacctgggaaagaatatttgatcatgggtctggatggggccacctatgacctcgagggacacccccagtacctgctggactcgaatagctggatcgaggagatgccctctgaacgcctgtgccggagcacccgccagcgggcagcctgtgcccagctcaacgacttcctccaggagtatggcactcaggggtgccaggtgtgagggctgccctcccacctccgctgggaggaacctgaacctgggaaccatgaagctggaagcactgctgtgtccgctttcatgaacacagcctgggaccagggcatattaaaggcttttggcagc

SEQ ID NO: 6638 - DNA, 5462 bp, Homo sapiens
  source 1..5462: mol_type = unassigned DNA
tatatccgtggtttcctgctacctccaaccatgggccttttgggaatactttgttttttaatcttcctggggaaaacctggggacaggagcaaacatatgtcatttcagcaccaaaaatattccgtgttggagcatctgaaaatattgtgattcaagtttatggatacactgaagcatttgatgcaacaatctctattaaaagttatcctgataaaaaatttagttactcctcaggccatgttcatttatcctcagagaataaattccaaaactctgcaatcttaacaatacaaccaaaacaattgcctggaggacaaaacccagtttcttatgtgtatttggaagttgtatcaaagcatttttcaaaatcaaaaagaatgccaataacctatgacaatggatttctcttcattcatacagacaaacctgtttatactccagaccagtcagtaaaagttagagtttattcgttgaatgacgacttgaagccagccaaaagagaaactgtcttaactttcatagatcctgaaggatcagaagttgacatggtagaagaaattgatcatattggaattatctcttttcctgacttcaagattccgtctaatcctagatatggtatgtggacgatcaaggctaaatataaagaggacttttcaacaactggaaccgcatattttgaagttaaagaatatgtcttgccacatttttctgtctcaatcgagccagaatataatttcattggttacaagaactttaagaattttgaaattactataaaagcaagatatttttataataaagtagtcactgaggctgacgtttatatcacatttggaataagagaagacttaaaagatgatcaaaaagaaatgatgcaaacagcaatgcaaaacacaatgttgataaatggaattgctcaagtcacatttgattctgaaacagcagtcaaagaactgtcatactacagtttagaagatttaaacaacaagtacctttatattgctgtaacagtcatagagtctacaggtggattttctgaagaggcagaaatacctggcatcaaatatgtcctctctccctacaaactgaatttggttgctactcctcttttcctgaagcctgggattccatatcccatcaaggtgcaggttaaagattcgcttgaccagttggtaggaggagtcccagtaacactgaatgcacaaacaattgatgtaaaccaagagacatctgacttggatccaagcaaaagtgtaacacgtgttgatgatggagtagcttcctttgtgcttaatctcccatctggagtgacggtgctggagtttaatgtcaaaactgatgctccagatcttccagaagaaaatcaggccagggaaggttaccgagcaatagcatactcatctctcagccaaagttacctttatattgattggactgataaccataaggctttgctagtgggagaacatctgaatattattgttacccccaaaagcccatatattgacaaaataactcactataattacttgattttatccaagggcaaaattatccactttggcacgagggagaaattttcagatgcatcttatcaaagtataaacattccagtaacacagaacatggttccttcatcccgacttctggtctattacatcgtcacaggagaacagacagcagaattagtgtctgattcagtctggttaaatattgaagaaaaatgtggcaaccagctccaggttcatctgtctcctgatgcagatgcatattctccaggccaaactgtgtctcttaatatggcaactggaatggattcctgggtggcattagcagcagtggacagtgctgtgtatggagtccaaagaggagccaaaaagcccttggaaagagtatttcaattcttagagaagagtgatctgggctgtggggcaggtggtggcctcaacaatgccaatgtgttccacctagctggacttaccttcctcactaatgcaaatgcagatgactcccaagaaaatgatgaaccttgtaaagaaattctcaggccaagaagaacgctgcaaaagaagatagaagaaatagctgctaaatataaacattcagtagtgaagaaatgttgttacgatggagcctgcgttaataatgatgaaacctgtgagcagcgagctgcacggattagtttagggccaagatgcatcaaagctttcactgaatgttgtgtcgtcgcaagccagctccgtgctaatatctctcataaagacatgcaattgggaaggctacacatgaagaccctgttaccagtaagcaagccagaaattcggagttattttccagaaagctggttgtgggaagttcatcttgttcccagaagaaaacagttgcagtttgccctacctgattctctaaccacctgggaaattcaaggcgttggcatttcaaacactggtatatgtgttgctgatactgtcaaggcaaaggtgttcaaagatgtcttcctggaaatgaatataccatattctgttgtacgaggagaacagatccaattgaaaggaactgtttacaactataggacttctgggatgcagttctgtgttaaaatgtctgctgtggagggaatctgcacttcggaaagcccagtcattgatcatcagggcacaaagtcctccaaatgtgtgcgccagaaagtagagggctcctccagtcacttggtgacattcactgtgcttcctctggaaattggccttcacaacatcaatttttcactggagacttggtttggaaaagaaatcttagtaaaaacattacgagtggtgccagaaggtgtcaaaagggaaagctattctggtgttactttggatcctaggggtatttatggtaccattagcagacgaaaggagttcccatacaggatacccttagatttggtccccaaaacagaaatcaaaaggattttgagtgtaaaaggactgcttgtaggtgagatcttgtctgcagttctaagtcaggaaggcatcaatatcctaacccacctccccaaagggagtgcagaggcggagctgatgagcgttgtcccagtattctatgtttttcactacctggaaacaggaaatcattggaacatttttcattctgacccattaattgaaaagcagaaactgaagaaaaaattaaaagaagggatgttgagcattatgtcctacagaaatgctgactactcttacagtgtgtggaagggtggaagtgctagcacttggttaacagcttttgctttaagagtacttggacaagtaaataaatacgtagagcagaaccaaaattcaatttgtaattctttattgtggctagttgagaattatcaattagataatggatctttcaaggaaaattcacagtatcaaccaataaaattacagggtaccttgcctgttgaagcccgagagaacagcttatatcttacagcctttactgtgattggaattagaaaggctttcgatatatgccccctggtgaaaatcgacacagctctaattaaagctgacaactttctgcttgaaaatacactgccagcccagagcacctttacattggccatttctgcgtatgctctttccctgggagataaaactcacccacagtttcgttcaattgtttcagctttgaagagagaagctttggttaaaggtaatccacccatttatcgtttttggaaagacaatcttcagcataaagacagctctgtacctaacactggtacggcacgtatggtagaaacaactgcctatgctttactcaccagtctgaacttgaaagatataaattatgttaacccagtcatcaaatggctatcagaagagcagaggtatggaggtggcttttattcaacccaggacacaatcaatgccattgagggcctgacggaatattcactcctggttaaacaactccgcttgagtatggacatcgatgtttcttacaagcataaaggtgccttacataattataaaatgacagacaagaatttccttgggaggccagtagaggtgcttctcaatgatgacctcattgtcagtacaggatttggcagtggcttggctacagtacatgtaacaactgtagttcacaaaaccagtacctctgaggaagtttgcagcttttatttgaaaatcgatactcaggatattgaagcatcccactacagaggctacggaaactctgattacaaacgcatagtagcatgtgccagctacaagcccagcagggaagaatcatcatctggatcctctcatgcggtgatggacatctccttgcctactggaatcagtgcaaatgaagaagacttaaaagcccttgtggaaggggtggatcaactattcactgattaccaaatcaaagatggacatgttattctgcaactgaattcgattccctccagtgatttcctttgtgtacgattccggatatttgaactctttgaagttgggtttctcagtcctgccactttcacagtgtacgaataccacagaccagataaacagtgtaccatgttttatagcacttccaatatcaaaattcagaaagtctgtgaaggagccgcgtgcaagtgtgtagaagctgattgtgggcaaatgcaggaagaattggatctgacaatctctgcagagacaagaaaacaaacagcatgtaaaccagagattgcatatgcttataaagttagcatcacatccatcactgtagaaaatgtttttgtcaagtacaaggcaacccttctggatatctacaaaactggggaagctgttgctgagaaagactctgagattaccttcattaaaaaggtaacctgtactaacgctgagctggtaaaaggaagacagtacttaattatgggtaaagaagccctccagataaaatacaatttcagtttcaggtacatctaccctttagattccttgacctggattgaatactggcctagagacacaacatgttcatcgtgtcaagcatttttagctaatttagatgaatttgccgaagatatctttttaaatggatgctaaaattcctgaagttcagctgcatacagtttgcacttatggactcctgttgttgaagttcgtttttttgttttcttctttttttaaacattcatagctggtcttatttgtaaagctcactttacttagaattagtggcacttgcttttattagagaatgatttcaaatgctgtaactttctgaaataacatggccttggagggcatgaagacagatactcctccaaggttattggacaccggaaacaataaattggaacacctcctcaaacctaccactcaggaatgtttgctggggccgaaagaacagtccattgaaagggagtattacaaaaacatggcctttgcttgaaagaaaataccaaggaacaggaaactgatcattaaagcctgagtttgctttc

SEQ ID NO: 6639 - DNA, 3461 bp, Homo sapiens
  source 1..3461: mol_type = unassigned DNA
caagccggcccacaccacgcccggtccgggccttcccgcctttgccgccggcccccactgctcgggccggatgccggggaacgggctcggccaggtctgacgctcaccgcctagaagccgagccgagcagtcccgcaggctgaggtagagcgggagaagttcgggctctttcctcaggggcccagcggcgcggcagccattttgttgtgttgtgccggttgccgaggggccgcgcgcgcgtggtcggggctagtctcagccacgcccctctccctctccggtactgttggaagggacgcggaggcgtttcccgcctcttttgcagccagcgcgctaggatgccggggagtcttgggcgcgaggcttccggccgcgcggggccgacgggatgcggtgccttcgccttcggattgcgttgcagatatgtcatttcagcaccaaaaatattccgtgttggagcatctgaaaatattgtgattcaagtttatggatacactgaagcatttgatgcaacaatctctattaaaagttatcctgataaaaaatttagttactcctcaggccatgttcatttatcctcagagaataaattccaaaactctgcaatcttaacaatacaaccaaaacaattgcctggaggacaaaacccagtttcttatgtgtatttggaagttgtatcaaagcatttttcaaaatcaaaaagaatgccaataacctatgacaatggatttctcttcattcatacagacaaacctgtttatactccagaccagtcagtaaaagttagagtttattcgttgaatgacgacttgaagccagccaaaagagaaactgtcttaactttcatagatcctgaaggatcagaagttgacatggtagaagaaattgatcatattggaattatctcttttcctgacttcaagattccgtctaatcctagatatggtatgtggacgatcaaggctaaatataaagaggacttttcaacaactggaaccgcatattttgaagttaaagaatatgtcttgccacatttttctgtctcaatcgagccagaatataatttcattggttacaagaactttaagaattttgaaattactataaaagcaagatatttttataataaagtagtcactgaggctgacgtttatatcacatttggaataagagaagacttaaaagatgatcaaaaagaaatgatgcaaacagcaatgcaaaacacaatgttgataaatggaattgctcaagtcacatttgattctgaaacagcagtcaaagaactgtcatactacagtttagaagatttaaacaacaagtacctttatattgctgtaacagtcatagagtctacaggtggattttctgaagaggcagaaatacctggcatcaaatatgtcctctctccctacaaactgaatttggttgctactcctcttttcctgaagcctgggattccatatcccatcaaggtgcaggttaaagattcgcttgaccagttggtaggaggagtcccagtaacactgaatgcacaaacaattgatgtaaaccaagagacatctgacttggatccaagcaaaagtgtaacacgtgttgatgatggagtagcttcctttgtgcttaatctcccatctggagtgacggtgctggagtttaatgtcaaaactgatgctccagatcttccagaagaaaatcaggccagggaaggttaccgagcaatagcatactcatctctcagccaaagttacctttatattgattggactgataaccataaggctttgctagtgggagaacatctgaatattattgttacccccaaaagcccatatattgacaaaataactcactataattacttgattttatccaagggcaaaattatccactttggcacgagggagaaattttcagatgcatcttatcaaagtataaacattccagtaacacagaacatggttccttcatcccgacttctggtctattacatcgtcacaggagaacagacagcagaattagtgtctgattcagtctggttaaatattgaagaaaaatgtggcaaccagctccaggttcatctgtctcctgatgcagatgcatattctccaggccaaactgtgtctcttaatatggcaactggaatggattcctgggtggcattagcagcagtggacagtgctgtgtatggagtccaaagaggagccaaaaagcccttggaaagagtatttcaattcttagagaagagtgatctgggctgtggggcaggtggtggcctcaacaatgccaatgtgttccacctagctggacttaccttcctcactaatgcaaatgcagatgactcccaagaaaatgatgaaccttgtaaagaaattctcaggccaagaagaacgctgcaaaagaagatagaagaaatagctgctaaatataaacattcagtagtgaagaaatgttgttacgatggagcctgcgttaataatgatgaaacctgtgagcagcgagctgcacggattagtttagggccaagatgcatcaaagctttcactgaatgttgtgtcgtcgcaagccagctccgtgctaatatctctcataaagacatgcaattgggaaggctacacatgaagaccctgttaccagtaagcaagccagaaattcggagttattttccagaaagctggttgtgggaagttcatcttgttcccagaagaaaacagttgcagtttgccctacctgattctctaaccacctgggaaattcaaggcgttggcatttcaaacactggtatatgtgttgctgatactgtcaaggcaaaggtgttcaaagatgtcttcctggaaatgaatataccatattctgttgtacgaggagaacagatccaattgaaaggaactgtttacaactataggacttctgggatgcagttctgtgttaaaatgtctgctgtggagggaatctgcacttcggaaagcccagtcattgatcatcagggcacaaagtcctccaaatgtgtgcgccagaaagtagagggctcctccagtcacttggtgacattcactgtgcttcctctggaaattggccttcacaacatcaatttttcactggagacttggtttggaaaagaaatcttagtaaaaacattacgagtggtgccagaaggtgtcaaaagggaaagctattctggtgttactttggatcctaggggtatttatggtaccattagcagacgaaaggagttcccatacaggatacccttagatttggtccccaaaacagaaatcaaaaggattttgagtgtaaaaggactgcttgtaggtgagatcttgtctgcagttctaagtcaggaaggcatcaatatcctaacccacctccccaaagggagtgcagaggcggagctgatgagcgttgtcccagtattctatgtttttcctggaaacaggaaatcattggaacatttttcattctga

SEQ ID NO: 6640 - DNA, 3661 bp, Homo sapiens
  source 1..3661: mol_type = unassigned DNA
ctaaaatatacccgtctctcttaattttgtatgtcttcaacataacattcattaaattttattctgaaactgagtcttaaaaactgaaatacttttaaagagagatgtttctagcttaaatatttcatcatatagtaagattcctgctgagagctcataataagaaatatgaaaccagttactctggacttggattttgatgtgctgaagtatctgctggtatttcttcaagtcatagatgcataggcctggaggctctcaaggcatggccagacgctctgtcttgtacttcatcctgctgaatgctctgatcaacaagggccaagcctgcttctgtgatcactatgcatggactcagtggaccagctgctcaaaaacttgcaattctggaacccagagcagacacagacaaatagtagtagataagtactaccaggaaaacttttgtgaacagatttgcagcaagcaggagactagagaatgtaactggcaaagatgccccatcaactgcctcctgggagattttggaccatggtcagactgtgacccttgtattgaaaaacagtctaaagttagatctgtcttgcgtcccagtcagtttgggggacagccatgcactgcgcctctggtagcctttcaaccatgcattccatctaagctctgcaaaattgaagaggctgactgcaagaataaatttcgctgtgacagtggccgctgcattgccagaaagttagaatgcaatggagaaaatgactgtggagacaattcagatgaaagggactgtgggaggacaaaggcagtatgcacacggaagtataatcccatccctagtgtacagttgatgggcaatgggtttcattttctggcaggagagcccagaggagaagtccttgataactctttcactggaggaatatgtaaaactgtcaaaagcagtaggacaagtaatccataccgtgttccggccaatctggaaaatgtcggctttgaggtacaaactgcagaagatgacttgaaaacagatttctacaaggatttaacttctcttggacacaatgaaaatcaacaaggctcattctcaagtcagggggggagctctttcagtgtaccaattttttattcctcaaagagaagtgaaaatatcaaccataattctgccttcaaacaagccattcaagcctctcacaaaaaggattctagttttattaggatccataaagtgatgaaagtcttaaacttcacaacgaaagctaaagatctgcacctttctgatgtctttttgaaagcacttaaccatctgcctctagaatacaactctgctttgtacagccgaatattcgatgactttgggactcattacttcacctctggctccctgggaggcgtgtatgaccttctctatcagtttagcagtgaggaactaaagaactcaggtttaaccgaggaagaagccaaacactgtgtcaggattgaaacaaagaaacgcgttttatttgctaagaaaacaaaagtggaacataggtgcaccaccaacaagctgtcagagaaacatgaaggttcatttatacagggagcagagaaatccatatccctgattcgaggtggaaggagtgaatatggagcagctttggcatgggagaaagggagctctggtctggaggagaagacattttctgagtggttagaatcagtgaaggaaaatcctgctgtgattgactttgagcttgcccccatcgtggacttggtaagaaacatcccctgtgcagtgacaaaacggaacaacctcaggaaagctttgcaagagtatgcagccaagttcgatccttgccagtgtgctccatgccctaataatggccgacccaccctctcagggactgaatgtctgtgtgtgtgtcagagtggcacctatggtgagaactgtgagaaacagtctccagattataaatccaatgcagtagacggacagtggggttgttggtcttcctggagtacctgtgatgctacttataagagatcgagaacccgagaatgcaataatcctgccccccaacgaggagggaaacgctgtgagggggagaagcgacaagaggaagactgcacattttcaatcatggaaaacaatggacaaccatgtatcaatgatgacgaagaaatgaaagaggtcgatcttcctgagatagaagcagattccgggtgtcctcagccagttcctccagaaaatggatttatccggaatgaaaagcaactatacttggttggagaagatgttgaaatttcatgccttactggctttgaaactgttggataccagtacttcagatgcttaccagacgggacctggagacaaggggatgtggaatgccaacggacggagtgcatcaagccagttgtgcaggaagtcctgacaattacaccatttcagagattgtatagaattggtgaatccattgagctaacttgccccaaaggctttgttgttgctgggccatcaaggtacacatgccaggggaattcctggacaccacccatttcaaactctctcacctgtgaaaaagatactctaacaaaattaaaaggccattgtcagctgggacagaaacaatcaggatctgaatgcatttgtatgtctccagaagaagactgtagccatcattcagaagatctctgtgtgtttgacacagactccaacgattactttacttcacccgcttgtaagtttttggctgagaaatgtttaaataatcagcaactccattttctacatattggttcctgccaagacggccgccagttagaatggggtcttgaaaggacaagactttcatccaacagcacaaagaaagaatcctgtggctatgacacctgctatgactgggaaaaatgttcagcctccacttccaaatgtgtctgcctattgcccccacagtgcttcaagggtggaaaccaactctactgtgtcaaaatgggatcatcaacaagtgagaaaacattgaacatctgtgaagtgggaactataagatgtgcaaacaggaagatggaaatactgcatcctggaaagtgtttggcctagcacaattactgctaggcccagcacaatgaacagatttaccatcccgaagaaccaactcctacaaatgagaattcttgcacaaacagcagactggcatgctcaaagttactgacaaaaattattttctgttagtttgagatcattattctcccctgactctcctgtttgggcatgtcttattcagttccagctcatgacgccctgtagcatacccctaggtaccaacttccacagcagtctcgtaaattctcctgttcacattgtacaaaaataatgtgacttctgaggcccttatgtagcctgtgacattaagcattctcgcaattagaaataagaataaaacccataattttcttcaatgagttaataaacagaaatctccagaacctctgaaacacattcttgaagcccagctttcatatcttcattcaacaaataatttctgagtgtgtatacaggatgtcaagtactgaccaaagtcctgagaactcggcagataataaaacagacaaaagcctttgccttcatgaagcatacattcattcaggggtagacacacaaaaaatgaaataaacaggtaaaatatgtagc

SEQ ID NO: 6641 - DNA, 3551 bp, Homo sapiens
  source 1..3551: mol_type = unassigned DNA
ttgccttgtgttagctagcaataagaaaagaagctttgtttggattaacatatataccctcttcattctgcatacctattttttccccaataatttgcagcttaggtccgaggacaccacaaactctgcttaaagggcctggaggctctcaaggcatggccagacgctctgtcttgtacttcatcctgctgaatgctctgatcaacaagggccaagcctgcttctgtgatcactatgcatggactcagtggaccagctgctcaaaaacttgcaattctggaacccagagcagacacagacaaatagtagtagataagtactaccaggaaaacttttgtgaacagatttgcagcaagcaggagactagagaatgtaactggcaaagatgccccatcaactgcctcctgggagattttggaccatggtcagactgtgacccttgtattgaaaaacagtctaaagttagatctgtcttgcgtcccagtcagtttgggggacagccatgcactgcgcctctggtagcctttcaaccatgcattccatctaagctctgcaaaattgaagaggctgactgcaagaataaatttcgctgtgacagtggccgctgcattgccagaaagttagaatgcaatggagaaaatgactgtggagacaattcagatgaaagggactgtgggaggacaaaggcagtatgcacacggaagtataatcccatccctagtgtacagttgatgggcaatgggtttcattttctggcaggagagcccagaggagaagtccttgataactctttcactggaggaatatgtaaaactgtcaaaagcagtaggacaagtaatccataccgtgttccggccaatctggaaaatgtcggctttgaggtacaaactgcagaagatgacttgaaaacagatttctacaaggatttaacttctcttggacacaatgaaaatcaacaaggctcattctcaagtcagggggggagctctttcagtgtaccaattttttattcctcaaagagaagtgaaaatatcaaccataattctgccttcaaacaagccattcaagcctctcacaaaaaggattctagttttattaggatccataaagtgatgaaagtcttaaacttcacaacgaaagctaaagatctgcacctttctgatgtctttttgaaagcacttaaccatctgcctctagaatacaactctgctttgtacagccgaatattcgatgactttgggactcattacttcacctctggctccctgggaggcgtgtatgaccttctctatcagtttagcagtgaggaactaaagaactcaggtttaaccgaggaagaagccaaacactgtgtcaggattgaaacaaagaaacgcgttttatttgctaagaaaacaaaagtggaacataggtgcaccaccaacaagctgtcagagaaacatgaaggttcatttatacagggagcagagaaatccatatccctgattcgaggtggaaggagtgaatatggagcagctttggcatgggagaaagggagctctggtctggaggagaagacattttctgagtggttagaatcagtgaaggaaaatcctgctgtgattgactttgagcttgcccccatcgtggacttggtaagaaacatcccctgtgcagtgacaaaacggaacaacctcaggaaagctttgcaagagtatgcagccaagttcgatccttgccagtgtgctccatgccctaataatggccgacccaccctctcagggactgaatgtctgtgtgtgtgtcagagtggcacctatggtgagaactgtgagaaacagtctccagattataaatccaatgcagtagacggacagtggggttgttggtcttcctggagtacctgtgatgctacttataagagatcgagaacccgagaatgcaataatcctgccccccaacgaggagggaaacgctgtgagggggagaagcgacaagaggaagactgcacattttcaatcatggaaaacaatggacaaccatgtatcaatgatgacgaagaaatgaaagaggtcgatcttcctgagatagaagcagattccgggtgtcctcagccagttcctccagaaaatggatttatccggaatgaaaagcaactatacttggttggagaagatgttgaaatttcatgccttactggctttgaaactgttggataccagtacttcagatgcttaccagacgggacctggagacaaggggatgtggaatgccaacggacggagtgcatcaagccagttgtgcaggaagtcctgacaattacaccatttcagagattgtatagaattggtgaatccattgagctaacttgccccaaaggctttgttgttgctgggccatcaaggtacacatgccaggggaattcctggacaccacccatttcaaactctctcacctgtgaaaaagatactctaacaaaattaaaaggccattgtcagctgggacagaaacaatcaggatctgaatgcatttgtatgtctccagaagaagactgtagccatcattcagaagatctctgtgtgtttgacacagactccaacgattactttacttcacccgcttgtaagtttttggctgagaaatgtttaaataatcagcaactccattttctacatattggttcctgccaagacggccgccagttagaatggggtcttgaaaggacaagactttcatccaacagcacaaagaaagaatcctgtggctatgacacctgctatgactgggaaaaatgttcagcctccacttccaaatgtgtctgcctattgcccccacagtgcttcaagggtggaaaccaactctactgtgtcaaaatgggatcatcaacaagtgagaaaacattgaacatctgtgaagtgggaactataagatgtgcaaacaggaagatggaaatactgcatcctggaaagtgtttggcctagcacaattactgctaggcccagcacaatgaacagatttaccatcccgaagaaccaactcctacaaatgagaattcttgcacaaacagcagactggcatgctcaaagttactgacaaaaattattttctgttagtttgagatcattattctcccctgactctcctgtttgggcatgtcttattcagttccagctcatgacgccctgtagcatacccctaggtaccaacttccacagcagtctcgtaaattctcctgttcacattgtacaaaaataatgtgacttctgaggcccttatgtagcctgtgacattaagcattctcgcaattagaaataagaataaaacccataattttcttcaatgagttaataaacagaaatctccagaacctctgaaacacattcttgaagcccagctttcatatcttcattcaacaaataatttctgagtgtgtatacaggatgtcaagtactgaccaaagtcctgagaactcggcagataataaaacagacaaaagcctttgccttcatgaagcatacattcattcaggggtagacacacaaaaaatgaaataaacaggtaaaatatgtagc

SEQ ID NO: 6642 - DNA, 4257 bp, Homo sapiens
  source 1..4257: mol_type = unassigned DNA
attgaactgagaacatttgctgtgtttcctgatttatagatatgtttctaagaaacatatctataacttccaaacagtcccagctggctgtagctaaggctgtgtaattgataagatgcatctggtttcaaggcacagattaagtacaaggtcaggctcttgctgtcgttggagaatccggttggggtaggagctaaatctcaggaccacttgctctatatatgagtgccaagataatctagagcagggagaggcagagaggcaggcagcctgctgggctcttcctgctgttgaaaacttacccggcccttacagaggaaatcttcctcctctcttctgccctgaatgttttcccaaacatgaaggtgataagcttattcattttggtgggatttataggagagttccaaagtttttcaagtgcctcctctccagtcaactgccagtgggacttctatgccccttggtcagaatgcaatggctgtaccaagactcagactcgcaggcggtcagttgctgtgtatgggcagtatggaggccagccttgtgttggaaatgcttttgaaacacagtcctgtgaacctacaagaggatgtccaacagaggagggatgtggagagcgtttcaggtgcttttcaggtcagtgcatcagcaaatcattggtttgcaatggggattctgactgtgatgaagacagtgctgatgaagacagatgtgaggactcagaaaggagaccttcctgtgatatcgataaacctcctcctaacatagaacttactggaaatggttacaatgaactcactggccagtttaggaacagagtcatcaataccaaaagttttggtggtcaatgtagaaaggtgtttagtggggatggaaaagatttctacaggctgagtggaaatgtcctgtcctatacattccaggtgaaaataaataatgattttaattatgaattttacaatagtacttggtcttatgtaaaacatacgtcgacagaacacacatcatctagtcggaagcgctccttttttagatcttcatcatcttcttcacgcagttatacttcacataccaatgaaatccataaaggaaagagttaccaactgctggttgttgagaacactgttgaagtggctcagttcattaataacaatccagaatttttacaacttgctgagccattctggaaggagctttcccacctcccctctctgtatgactacagtgcctaccgaagattaatcgaccagtacgggacacattatctgcaatctgggtcgttaggaggagaatacagagttctattttatgtggactcagaaaaattaaaacaaaatgattttaattcagtcgaagaaaagaaatgtaaatcctcaggttggcattttgtcgttaaattttcaagtcatggatgcaaggaactggaaaacgctttaaaagctgcttcaggaacccagaacaatgtattgcgaggagaaccgttcatcagagggggaggtgcaggcttcatatctggccttagttacctagagctggacaatcctgctggaaacaaaaggcgatattctgcctgggcagaatctgtgactaatcttcctcaagtcataaaacaaaagctgacacctttatatgagctggtaaaggaagtaccttgtgcctctgtgaaaaaactatacctgaaatgggctcttgaagagtatctggatgaatttgacccctgtcattgccggccttgtcaaaatggtggtttggctactgttgaggggacccattgtctgtgccattgcaaaccgtacacatttggtgcggcgtgtgagcaaggagtcctcgtagggaatcaagcaggaggggttgatggaggttggagttgctggtcctcttggagcccctgtgtccaagggaagaaaacaagaagccgtgaatgcaataacccacctcccagtgggggtgggagatcctgcgttggagaaacgacagaaagcacacaatgcgaagatgaggagctggagcacttgaggttgcttgaaccacattgctttcctttgtctttggttccaacagaattctgtccatcacctcctgccttgaaagatggatttgttcaagatgaaggtacaatgtttcctgtggggaaaaatgtagtgtacacttgcaatgaaggatactctcttattggaaacccagtggccagatgtggagaagatttacggtggcttgttggggaaatgcattgtcagaaaattgcctgtgttctacctgtactgatggatggcatacagagtcacccccaaaaacctttctacacagttggtgagaaggtgactgtttcctgttcaggtggcatgtccttagaaggtccttcagcatttctctgtggctccagccttaagtggagtcctgagatgaagaatgcccgctgtgtacaaaaagaaaatccgttaacacaggcagtgcctaaatgtcagcgctgggagaaactgcagaattcaagatgtgtttgtaaaatgccctacgaatgtggaccttccttggatgtatgtgctcaagatgagagaagcaaaaggatactgcctctgacagtttgcaagatgcatgttctccactgtcagggtagaaattacacccttactggtagggacagctgtactctgcctgcctcagctgagaaagcttgtggtgcctgcccactgtggggaaaatgtgatgctgagagcagcaaatgtgtctgccgagaagcatcggagtgcgaggaagaagggtttagcatttgtgtggaagtgaacggcaaggagcagacgatgtctgagtgtgaggcgggcgctctgagatgcagagggcagagcatctctgtcaccagcataaggccttgtgctgcggaaacccagtaggctcctggaggccctggtcagcttgcttggaatccagcaggcagctggggctgagtgaaaacatctgcacaactgggcactggacagcttttccttcttctccagtgtctaccttcctcctcaactcccagccatctgtataaacacaatcctttgttctcccaaatctgaatcgaattactcttttgcctcctttttaatgtcagtaaggatatgagcctttgcacaggctggctgcgtgttcttgaaataggtgttaccttctctgggccttggttttttaaaatctgtaaaattagaggattgcactagagaaacttgaatgctccattcaggcctatcattttattaagtatgattgacacagcccatgggccagaacacactctacaaaatgactaggataacagaaagaacgtgatctcctgattagagagggtggttttcctcaatggaaccaaatataaagaggacttgaacaaaaatgacagatacaaactatttctatcctgagtagtaatctcacacttcatcctatagagtcaaccaccacagataggaattccttattctttttttaatttttttaagacagagtctcactttgttgcccaggctggagcgcagtggggtgatctcatctccctgcaacctccgcctcctgggttcaagcgattcttgtgcctcagcttcccaagcagctgggattacaggtgcccgccaccacgcccagctaatttttgcatttttagtagagatggggtttcaccatgttggccacgctcgtctccaactcctgacctcaggtaatccgcctgccttggcctcccaaagtgctgggattacagacatgaaccaccacgcctggctggaatacttactcttgtcgggagattgaaccactaaaatgttagagcagaattcattatgctgtggtcacaggggtgtcttgtctgagaacaaatacaattcagtcttctctttggggttttagtatgtgtcaaacataggactggaagtttgcccctgttcttttttcttttgaaagaacatcagttcatgcctgaggcatgagtgactgtgcatttgagaatagttttccctattctgtggatacagtcccagagttttcagggagtacacaggtagattagtttgaagcattgaccttttatttattccttatttctctttcatcaaaacaaaacagcagctgtgggaggagaaatgagagggcttaaatgaaatttaaaataagctatattatacaaatactatctctgtattgttctgaccctggtaaatatatttcaaaacttcagatgacaaggattagaacactcattaaagatgctattcttcagaa

SEQ ID NO: 6643 - DNA, 1575 bp, Homo sapiens
  source 1..1575: mol_type = unassigned DNA
agggagaggcagagaggcaggcagcctgctgggctcttcctgctgttgaaaacttacccggcccttacagaggaaatcttcctcctctcttctgccctgaatgttttcccaaacatgaaggtgataagcttattcattttggtgggatttataggagagttccaaagtttttcaagtgcctcctctccagtcaactgccagtgggacttctatgccccttggtcagaatgcaatggctgtaccaagactcagactcgcaggcggtcagttgctgtgtatgggcagtatggaggccagccttgtgttggaaatgcttttgaaacacagtcctgtgaacctacaagaggatgtccaacagaggagggatgtggagagcgtttcaggtgcttttcaggtcagtgcatcagcaaatcattggtttgcaatggggattctgactgtgatgaagacagtgctgatgaagacagatgtgaggactcagaaaggagaccttcctgtgatatcgataaacctcctcctaacatagaacttactggaaatggttacaatgaactcactggccagtttaggaacagagttctattttatgtggactcagaaaaattaaaacaaaatgattttaattcagtcgaagaaaagaaatgtaaatcctcaggttggcattttgtcgttaaattttcaagtcatggatgcaaggaactggaaaacgctttaaaagctgcttcaggaacccagaacaatgtattgcgaggagaaccgttcatcagagggggaggtgcaggcttcatatctggccttagttacctagagctggacaatcctgctggaaacaaaaggcgatattctgcctgggcagaatctgtgactaatcttcctcaagtcataaaacaaaagctgacacctttatatgagctggtaaaggaagtaccttgtgcctctgtgaaaaaactatacctgaaatgggctcttgaagagtatctggatgaatttgacccctgtcattgccggccttgtcaaaatggtggtttggctactgttgaggggacccattgtctgtgccattgcaaaccgtacacatttggtgcggcgtgtgagcaaggagtcctcgtagggaatcaagcaggaggggttgatggaggttggagttgctggtcctcttggagcccctgtgtccaagggaagaaaacaagaagccgtgaatgcaataacccacctcccagtgggggtgggagatcctgcgttggagaaacgacagaaagcacacaatgcgaagatgaggagctggagcacttgaggttgcttgaaccacattgctttcctttgtctttggttccaacagaattctgtccatcacctcctgccttgaaagatggatttgttcaagatgaaggtacaatgtttcctgtggggaaaaatgtagtgtacacttgcaatgaaggatactctcttattggaaacccagtggccagatgtggagaagatttacggtggcttgttggggaaatgcattgtcagaacggcaaaatatccaactggatgaaagttaatgaaactctcctggtggaacatcactag

SEQ ID NO: 6644 - DNA, 1143 bp, Homo sapiens
  source 1..1143: mol_type = unassigned DNA
agggagaggcagagaggcaggcagcctgctgggctcttcctgctgttgaaaacttacccggcccttacagaggaaatcttcctcctctcttctgccctgaatgttttcccaaacatgaaggtgataagcttattcattttggtgggatttataggagagttccaaagtttttcaagtgcctcctctccagtcaactgccagtgggacttctatgccccttggtcagaatgcaatggctgtaccaagactcagactcgcaggcggtcagttgctgtgtatgggcagtatggaggccagccttgtgttggaaatgcttttgaaacacagtcctgtgaacctacaagaggatgtccaacagaggagggatgtggagagcgtttcaggtgcttttcaggtcagtgcatcagcaaatcattggtttgcaatggggattctgactgtgatgaagacagtgctgatgaagacagatgtgaggactcagaaaggagaccttcctgtgatatcgataaacctcctcctaacatagaacttactggaaatggttacaatgaactcactggccagtttaggaacagagtcatcaataccaaaagttttggtggtcaatgtagaaaggtgtttagtggggatggaaaagatttctacaggctgagtggaaatgtcctgtcctatacattccaggtgaaaataaataatgattttaattatgaattttacaatagtacttggtcttatgtaaaacatacgtcgacagaacacacatcatctagtcggaagcgctccttttttagatcttcatcatcttcttcacgcagttatacttcacataccaatgaaatccataaaggaaagagttaccaactgctggttgttgagaacactgttgaagtggctcagttcattaataacaatccagaatttttacaacttgctgagccattctggaaggagctttcccacctcccctctctgtatgactacagtgcctaccgaagattaatcgaccagtacgggacacattatctgcaatctgggtcgttaggaggagaatacagagttctattttatgtggactcagaaaaattaaaacaaaatgattttaattcagtcgaaaaaaaaaaaaaaaaaaaaaaaaaaaagaaa

SEQ ID NO: 6645 - DNA, 2356 bp, Homo sapiens
  source 1..2356: mol_type = unassigned DNA
ttacaggtcccagcctgtagacatcttttactccaatttcctgaatagatagctttattccttcaaggtaatatagtgcggtggcttctggctgagatgtttgctgttgttttcttcatcttgtctttgatgacttgtcagcctggggtaactgcacaggagaaggtgaaccagagagtaagacgggcagctacacccgcagcagttacctgccagctgagcaactggtcagagtggacagattgctttccgtgccaggacaaaaagtaccgacaccggagcctcttgcagccaaacaagtttgggggaaccatctgcagtggtgacatctgggatcaagccagctgctccagttctacaacttgtgtaaggcaagcacagtgtggacaggatttccagtgtaaggagacaggtcgctgcctgaaacgccaccttgtgtgtaatggagaccaggactgccttgatggctctgatgaggacgactgtgaagatgtcagggccattgacgaagactgcagccagtatgaaccaattccaggatcacagaaggcagccttggggtacaatatcctgacccaggaagatgctcagagtgtgtacgatgccagttattatgggggccagtgtgagacggtatacaatggggaatggagggagcttcgatatgactccacctgtgaacgtctctactatggagatgatgagaaatactttcggaaaccctacaactttctgaagtaccactttgaagccctggcagatactggaatctcctcagagttttatgataatgcaaatgaccttctttccaaagttaaaaaagacaagtctgactcatttggagtgaccatcggcataggcccagccggcagccctttattggtgggtgtaggtgtatcccactcacaagacacttcattcttgaacgaattaaacaagtataatgagaagaaattcattttcacaagaatcttcacaaaggtgcagactgcacattttaagatgaggaaggatgacattatgctggatgaaggaatgctgcagtcattaatggagcttccagatcagtacaattatggcatgtatgccaagttcatcaatgactatggcacccattacatcacatctggatccatgggtggcatttatgaatatatcctggtgattgacaaagcaaaaatggaatcccttggtattaccagcagagatatcacgacatgttttggaggctccttgggcattcaatatgaagacaaaataaatgttggtggaggtttatcaggagaccattgtaaaaaatttggaggtggcaaaactgaaagggccaggaaggccatggctgtggaagacattatttctcgggtgcgaggtggcagttctggctggagcggtggcttggcacagaacaggagcaccattacataccgttcctgggggaggtcattaaagtataatcctgttgttatcgattttgagatgcagcctatccacgaggtgctgcggcacacaagcctggggcctctggaggccaagcgccagaacctgcgccgcgccttggaccagtatctgatggaattcaatgcctgccgatgtgggccttgcttcaacaatggggtgcccatcctcgagggcaccagctgcaggtgccagtgccgcctgggtagcttgggtgctgcctgtgagcaaacacagacagaaggagccaaagcagatgggagctggagttgctggagctcctggtctgtatgcagagcaggcatccaggaaaggagaagagagtgtgacaatccagcacctcagaatggaggggcctcgtgtccagggcggaaagtacagacgcaggcttgctgagggcctctggacacaggctggaccagatgctgtggatgtcgacccctgcactgactattggataaagacttctttcaactaagagaagatgcaaatcagcacacttttttctttgttctgccagcttccaggcctaagactaggttttgctgtctacagccaactattctattagttacaaaactcaatcattttattcagcaactggatgttgactgttaactagaagctctgtcctacttacagcactttggatcatcaaaaaaataaagtaaaatagaaaactgagaaaactcaatccatgaccagggagaacttacaggatgttagagacaaaacaagcagacacctgaaacaatcaacgcccaataaaacaaagtaggatgaaaattctcttagttctttgataacaatttgttcactcatagaaacattattaattggtagggtaagcagacactctgaaacaatgagaaaaatactaaaaattgacttgagttatttc

SEQ ID NO: 6646 - DNA, 2037 bp, Homo sapiens
  source 1..2037: mol_type = unassigned DNA
ggcactcacagcacaggcttgttatgggtctagcagcctctgtggcatctcctgtcacattgggaaaatgaagaattccaggacatgggcttggagggcgccggtggagctatttcttctctgtgctgccctgggctgtctcagtttgcctggctccagaggtgaaaggccacattcctttgggtcaaatgcagtcaacaagagctttgctaagagcagacagatgcggagtgtggatgttaccctgatgcccattgattgtgagctgtctagttggtcctcttggaccacatgtgacccctgtcagaagaaaaggtacaggtatgcctacttgctccagccctctcagttccatggggaaccgtgcaacttctctgacaaggaagtcgaagactgtgttaccaacagaccatgcggaagtcaagtgcgatgtgaaggctttgtgtgtgcacagacaggaaggtgtgtaaaccgcagacttctttgcaatggggacaatgactgtggagaccagtcagatgaagcaaactgtagaaggatttataaaaaatgtcagcatgaaatggaccaatactggggaattggcagtctggccagtgggataaatttgttcacaaacagttttgagggcccagttcttgatcacaggtattatgcaggtggatgctccccgcattacatcctgaacacgaggtttaggaagccctacaatgtggaaagctacacgccacagacccaaggcaaatacgaattcatattaaaagagtatgaatcatactcagattttgaacgcaatgtcacagagaaaatggcaagcaagtctggtttcagttttggttttaaaatacctggaatatttgaacttggcatcagtagtcaaagtgatcgaggcaaacactatattaggagaaccaaacgattctctcatactaaaagcgtatttctgcatgcacgctctgaccttgaagtagcacattacaagctgaaacccagaagcctcatgctccattacgagttccttcagagagttaagcggctgcccctggagtacagctacggggaatacagagatctcttccgtgattttgggacccactacatcacagaggctgtgcttgggggcatttatgaatacaccctcgttatgaacaaagaggccatggagagaggagattatactcttaacaacgtccatgcctgtgccaaaaatgattttaaaattggtggtgccattgaagaggtctacgtcagtctgggtgtgtctgtaggcaaatgcagaggtattctgaatgaaataaaagacagaaacaagagggacaccatggtggaggacttggtggtcctggtacgaggaggggcaagtgagcacatcaccaccctggcataccaggagctgccgacggcggacctgatgcaggagtggggagacgctgtgcagtacaacccagccatcatcaaagttaaggtggagcctctgtatgaactagtgacagccacagattttgcctattccagcacagtgaggcagaacatgaagcaggcactggaggagttccagaaggaagttagttcctgccactgtgctccctgccaaggaaatggagtccctgtcctgaaaggatcacgctgtgactgcatctgtcctgttggatcccaaggcctagcctgtgaggtctcctatcggaagaatacccccattgatgggaagtggaattgctggtcaaattggtcttcatgctctggaagacgtaagacaagacaaaggcagtgtaacaatccacctcctcaaaatgggggtagcccctgttcaggccctgcttcagaaacacttgactgctcctagcagatgatacagcagtgggctacatacaatgagagccctgagccctcaagaactcatgccagctcagccctacaccagtttccacctggagttcatgcaagggcaaaaggcagtgccatgcaagctgtttaaaataaagatgttaccttgtaaaatgcaagttgatttaaataaatactgagttaaaggcttaa

SEQ ID NO: 6647 - DNA, 2065 bp, Homo sapiens
  source 1..2065: mol_type = unassigned DNA
actttgcagagctatttgctcttggggacagaagctgacagtggcactcacagcacaggcttgttatgggtctagcagcctctgtggcatctcctgtcacattgggaaaatgaagaattccaggacatgggcttggagggcgccggtggagctatttcttctctgtgctgccctgggctgtctcagtttgcctggctccagaggtgaaaggccacattcctttgggtcaaatgcagtcaacaagagctttgctaagagcagacagatgcggagtgtggatgttaccctgatgcccattgattgtgagctgtctagttggtcctcttggaccacatgtgacccctgtcagaagaaaagggatcaagtccaggatcatggttttcgaggatccctgtgaccgaatctagcctacatttccagcacaatggacacttgtatgactctggccttcactctctctgggcgtttcttcatgctgctttctcagtacaggtatgcctacttgctccagccctctcagttccatggggaaccgtgcaacttctctgacaaggaagtcgaagactgtgttaccaacagaccatgcggaagtcaagtgcgatgtgaaggctttgtgtgtgcacagacaggaaggtgtgtaaaccgcagacttctttgcaatggggacaatgactgtggagaccagtcagatgaagcaaactgtagaaggatttataaaaaatgtcagcatgaaatggaccaatactggggaattggcagtctggccagtgggataaatttgttcacaaacagttttgagggcccagttcttgatcacaggtattatgcaggtggatgctccccgcattacatcctgaacacgaggtttaggaagccctacaatgtggaaagctacacgccacagacccaaggcaaatacgaattcatattaaaagagtatgaatcatactcagattttgaacgcaatgtcacagagaaaatggcaagcaagtctggtttcagttttggttttaaaatacctggaatatttgaacttggcatcagtagtcaaagtgatcgaggcaaacactatattaggagaaccaaacgattctctcatactaaaagcgtatttctgcatgcacgctctgaccttgaagtagcacattacaagctgaaacccagaagcctcatgctccattacgagttccttcagagagttaagcggctgcccctggagtacagctacggggaatacagagatctcttccgtgattttgggacccactacatcacagaggctgtgcttgggggcatttatgaatacaccctcgttatgaacaaagaggccatggagagaggagattatactcttaacaacgtccatgcctgtgccaaaaatgattttaaaattggtggtgccattgaagaggtctacgtcagtctgggtgtgtctgtaggcaaatgcagaggtattctgaatgaaataaaagacagaaacaagagggacaccatggtggaggacttggtggtcctggtacgaggaggggcaagtgagcacatcaccaccctggcataccaggagctgccgacggcggacctgatgcaggagtggggagacgctgtgcagtacaacccagccatcatcaaagttaaggtggagcctctgtatgaactagtgacagccacagattttgcctattccagcacagtgaggcagaacatgaagcaggcactggaggagttccagaaggaagttagttcctgccactgtgctccctgccaaggaaatggagtccctgtcctgaaaggatcacgctgtgactgcatctgtcctgttggatcccaaggcctagcctgtgaggtctcctatcggaagaatacccccattgatgggaagtggaattgctggtcaaattggtcttcatgctctggaagacgtaagacaagacaaaggcagtgtaacaatccacctcctcaaaatgggggtagcccctgttcaggccctgcttcagaaacacttgactgctcctagcagatgatacagcagtgggctacatacaatgagagccctgagccctcaaga

SEQ ID NO: 6648 - DNA, 2379 bp, Homo sapiens
  source 1..2379: mol_type = unassigned DNA
attctggttggtttccagagtgacaggtaagtttttggtctgtgcaaagtctgtttccagtcactagtggctttctgtttactttgcagagctatttgctcttggggacagaagctgacagtggcactcacagcacaggcttgttatgggtctagcagcctctgtggcatctcctgtcacattgggaaaatgaagaattccaggacatgggcttggagggcgccggtggagctatttcttctctgtgctgccctgggctgtctcagtttgcctggctccaggtatttgaattccatctgcgagtagaagaatagtctttggttctggaacagaaaatgctgagaccaccttcgtattggccaaaagagttttttgttcttacttactcttgtaatcaagtcagatgatgaaatcacaatcactgtgtcgtaagacctattatgtattgccactctgtgccagcaacttggaaacattagctataatcctcacagctattccagaggtgaaaggccacattcctttgggtcaaatgcagtcaacaagagctttgctaagagcagacagatgcggagtgtggatgttaccctgatgcccattgattgtgagctgtctagttggtcctcttggaccacatgtgacccctgtcagaagaaaaggtacaggtatgcctacttgctccagccctctcagttccatggggaaccgtgcaacttctctgacaaggaagtcgaagactgtgttaccaacagaccatgcggaagtcaagtgcgatgtgaaggctttgtgtgtgcacagacaggaaggtgtgtaaaccgcagacttctttgcaatggggacaatgactgtggagaccagtcagatgaagcaaactgtagaaggatttataaaaaatgtcagcatgaaatggaccaatactggggaattggcagtctggccagtgggataaatttgttcacaaacagttttgagggcccagttcttgatcacaggtattatgcaggtggatgctccccgcattacatcctgaacacgaggtttaggaagccctacaatgtggaaagctacacgccacagacccaaggcaaatacgaattcatattaaaagagtatgaatcatactcagattttgaacgcaatgtcacagagaaaatggcaagcaagtctggtttcagttttggttttaaaatacctggaatatttgaacttggcatcagtagtcaaagtgatcgaggcaaacactatattaggagaaccaaacgattctctcatactaaaagcgtatttctgcatgcacgctctgaccttgaagtagcacattacaagctgaaacccagaagcctcatgctccattacgagttccttcagagagttaagcggctgcccctggagtacagctacggggaatacagagatctcttccgtgattttgggacccactacatcacagaggctgtgcttgggggcatttatgaatacaccctcgttatgaacaaagaggccatggagagaggagattatactcttaacaacgtccatgcctgtgccaaaaatgattttaaaattggtggtgccattgaagaggtctacgtcagtctgggtgtgtctgtaggcaaatgcagaggtattctgaatgaaataaaagacagaaacaagagggacaccatggtggaggacttggtggtcctggtacgaggaggggcaagtgagcacatcaccaccctggcataccaggagctgccgacggcggacctgatgcaggagtggggagacgctgtgcagtacaacccagccatcatcaaagttaaggtggagcctctgtatgaactagtgacagccacagattttgcctattccagcacagtgaggcagaacatgaagcaggcactggaggagttccagaaggaagttagttcctgccactgtgctccctgccaaggaaatggagtccctgtcctgaaaggatcacgctgtgactgcatctgtcctgttggatcccaaggcctagcctgtgaggtctcctatcggaagaatacccccattgatgggaagtggaattgctggtcaaattggtcttcatgctctggaagacgtaagacaagacaaaggcagtgtaacaatccacctcctcaaaatgggggtagcccctgttcaggccctgcttcagaaacacttgactgctcctagcagatgatacagcagtgggctacatacaatgagagccctgagccctcaagaactcatgccagctcagccctacaccagtttccacctggagttcatgcaagggcaaaaggcagtgccatgcaagctgtttaaaataaagatgttaccttgtaaaatgcaagttgatttaaataaatactgagttaaaggctt

SEQ ID NO: 6649 - DNA, 855 bp, Homo sapiens
  source 1..855: mol_type = unassigned DNA
ctgggacttggtggtgctacccttggcctcccacagtcctgccaccctgctgccgccaccatgctgccccctgggactgcgaccctcttgactctgctcctggcagctggctcgctgggccagaagcctcagaggccacgccggcccgcatcccccatcagcaccatccagcccaaggccaattttgatgctcagcagtttgcagggacctggctccttgtggctgtgggctccgcttgccgtttcctgcaggagcagggccaccgggccgaggccaccacactgcatgtggctccccagggcacagccatggctgtcagtaccttccgaaagctggatgggatctgctggcaggtgcgccagctctatggagacacaggggtcctcggccgcttcctgcttcaagcccgagacgcccgaggggctgtgcacgtggttgtcgctgagaccgactaccagagtttcgctgtcctgtacctggagcgggcggggcagctgtcagtgaagctctacgcccgctcgctccctgtgagcgactcggtcctgagtgggtttgagcagcgggtccaggaggcccacctgactgaggaccagatcttctacttccccaagtacggcttctgcgaggctgcagaccagttccacgtcctggacgaagtgaggaggtgaggccggcacacagctccagtgctgagaagtcagtgccccgagagacgaccccaccagtggggtgcccgctgcctgtcctccgtgaaaccagcctcagatcagggccctgccacccagggcaggggatcttctgccggctgccccagaggacagtgggtggagtggtacctacttattaaatgtctc

SEQ ID NO: 6650 - DNA, 567 bp, Homo sapiens
  source 1..567: mol_type = unassigned DNA
agagtagactctgtcctgggacttggtggtgctacccttggcctcccacagtcctgccaccctgctgccgccaccatgctgccccctgggactgcgaccctcttgactctgctcctggcagctggctcgctgggccagaagcctcagaggccacgccggcccgcatcccccatcagcaccatccagcccaaggccaattttgatgctcagcagtttgcagggacctggctccttgtggctgtgggctccgcttgccgtttcctgcaggagcagggccaccgggccgaggccaccacactgcatgtggctccccagggcacagccatggctgtcagtaccttccgaaagctggatgggatctgctggcaggtgcgccagctctatggagacacaggggtcctcggccgcttcctgcttcaagcccgagacgcccgaggggctgtgcacgtggttgtcgctgagaccgactaccagagtttcgctgtcctgtacctggagcgggcggggcagctgtcagtgaagctctacggggcccagggagtagtgacagacaggcctggtgtggga

SEQ ID NO: 6651 - DNA, 2713 bp, Homo sapiens
  source 1..2713: mol_type = unassigned DNA
aaacaatgcttgttccctgtcctctggccctttgcaaataaatgccttaccagacctgccctgccaccccactcgcagccacccagcaagagcagcatgtcagcctgccggagctttgcagttgcaatctgcattttagaaataagcatcctcacagcacagtacacgaccagttatgacccagagctaacagaaagcagtggctctgcatcacacatagactgcagaatgagcccctggagtgaatggtcacaatgcgatccttgtctcagacaaatgtttcgttcaagaagcattgaggtctttggacaatttaatgggaaaagatgcaccgacgctgtgggagacagacgacagtgtgtgcccacagagccctgtgaggatgctgaggatgactgcggaaatgactttcaatgcagtacaggcagatgcataaagatgcgacttcggtgtaatggtgacaatgactgcggagacttttcagatgaggatgattgtgaaagtgagccccgtcccccctgcagagacagagtggtagaagagtctgagctggcacgaacagcaggctatgggatcaacattttagggatggatcccctaagcacaccttttgacaatgagttctacaatggactctgtaaccgggatcgggatggaaacactctgacatactaccgaagaccttggaacgtggcttctttgatctatgaaaccaaaggcgagaaaaatttcagaaccgaacattacgaagaacaaattgaagcatttaaaagtatcatccaagagaagacatcaaattttaatgcagctatatctctaaaatttacacccactgaaacaaataaagctgaacaatgttgtgaggaaacagcctcctcaatttctttacatggcaagggtagttttcggttttcatattccaaaaatgaaacttaccaactatttttgtcatattcttcaaagaaggaaaaaatgtttctgcatgtgaaaggagaaattcatctgggaagatttgtaatgagaaatcgcgatgttgtgctcacaacaacttttgtggatgatataaaagctttgccaactacctatgaaaagggagaatattttgcctttttggaaacctatggaactcactacagtagctctgggtctctaggaggactctatgaactaatatatgttttggataaagcttccatgaagcggaaaggtgttgaactaaaagacataaagagatgccttgggtatcatctggatgtatctctggctttctctgaaatctctgttggagctgaatttaataaagatgattgtgtaaagaggggagagggtagagctgtaaacatcaccagtgaaaacctcatagatgatgttgtttcactcataagaggtggaaccagaaaatatgcatttgaactgaaagaaaagcttctccgaggaaccgtgattgatgtgactgactttgtcaactgggcctcttccataaatgatgctcctgttctcattagtcaaaaactgtctcctatatataatctggttccagtgaaaatgaaaaatgcacacctaaagaaacaaaacttggaaagagccattgaagactatatcaatgaatttagtgtaagaaaatgccacacatgccaaaatggaggtacagtgattctaatggatggaaagtgtttgtgtgcctgcccattcaaatttgagggaattgcctgtgaaatcagtaaacaaaaaatttctgaaggattgccagccctagagttccccaatgaaaaatagagctgttggcttctctgagctccagtggaagaagaaaacactagtaccttcagatcctacccctgaagataatcttagctgccaagtaaatagcaacatgcttcatgaaaatcctaccaacctctgaagtctcttctctcttaggtctataatttttttttaaatttttcttccttaaactcctgtgatgtttccattttttgttccctaatgagaagtcaacagtgaaatacgccagaactgctttatcccacggaaaatgccaatctcttctaaaaaaaaacaaaattaaattaaaaacagaatgttggtttaaaaaacttcaaagtaattttcaaacggctttgtatggttaacatattctgccaggtccatgaccacacgtctgtaccatgcaatttaactcttatttacattgttatgtttagtttggttatttgcttaggtgtgcatacattcattcagcaaatgctgagcaccagccacgtgcacagcagttgcttttactagtcttagctctacgatttaaatccatgtgtccaagggggaaaacatattatatttgtaaccaaaaactactagtttaccagaggactgaagggagataaagaggagttggttaatgggtacaaaaatccagttagatgaaaggaataatatagatagtgttcagtagcagaatagaatgaacataaactattagtttaaattatgtgaaattccttctatttgatcatattttacaagaaaaaacatcaattttatatagtccaacttaatacctagccttatgagttgtataaggtaaggttacctacctgagaagctgattaacattggttgtacaatcttattcattagagaacatggtgcttagggtctgagaccttttgaaaggtctgagaactctttaaaaaaaggaaagaaagaaagaaaa

SEQ ID NO: 6652 - DNA, 1921 bp, Homo sapiens
  source 1..1921: mol_type = unassigned DNA
aataaaaatcaatggtttccacatctctcagtgcctctatctggaggccaggtctggagtttcagcttggacactgagccaagcagacaagcaaagcaagccaggacacaccatcctgccccaggcccagcttctctcctgccttccaacgccatggggagcaatctcagcccccaactctgcctgatgccctttatcttgggcctcttgtctggaggtgtgaccaccactccatggtctttggcccagccccagggatcctgctctctggagggggtagagatcaaaggcggctccttccgacttctccaagagggccaggcactggagtacgtgtgtccttctggcttctacccgtaccctgtgcagacacgtacctgcagatctacggggtcctggagcaccctgaagactcaagaccaaaagactgtcaggaaggcagagtgcagagcaatccactgtccaagaccacacgacttcgagaacggggaatactggccccggtctccctactacaatgtgagtgatgagatctctttccactgctatgacggttacactctccggggctctgccaatcgcacctgccaagtgaatggccggtggagtgggcagacagcgatctgtgacaacggagcggggtactgctccaacccgggcatccccattggcacaaggaaggtgggcagccagtaccgccttgaagacagcgtcacctaccactgcagccgggggcttaccctgcgtggctcccagcggcgaacgtgtcaggaaggtggctcttggagcgggacggagccttcctgccaagactccttcatgtacgacacccctcaagaggtggccgaagctttcctgtcttccctgacagagaccatagaaggagtcgatgctgaggatgggcacggcccaggggaacaacagaagcggaagatcgtcctggacccttcaggctccatgaacatctacctggtgctagatggatcagacagcattggggccagcaacttcacaggagccaaaaagtgtctagtcaacttaattgagaaggtggcaagttatggtgtgaagccaagatatggtctagtgacatatgccacataccccaaaatttgggtcaaagtgtctgaagcagacagcagtaatgcagactgggtcacgaagcagctcaatgaaatcaattatgaagaccacaagttgaagtcagggactaacaccaagaaggccctccaggcagtgtacagcatgatgagctggccagatgacgtccctcctgaaggctggaaccgcacccgccatgtcatcatcctcatgactgatggattgcacaacatgggcggggacccaattactgtcattgatgagatccgggacttgctatacattggcaaggatcgcaaaaacccaagggaggattatctggatgtctatgtgtttggggtcgggcctttggtgaaccaagtgaacatcaatgctttggcttccaagaaagacaatgagcaacatgtgttcaaagtcaaggatatggaaaacctggaagatgttttctaccaaatgatcgatgaaagccagtctctgagtctctgtggcatggtttgggaacacaggaagggtaccgattaccacaagcaaccatggcaggccaagatctcagtcattcgcccttcaaagggacacgagagctgtatgggggctgtggtgtctgagtactttgtgctgacagcagcacattgtttcactgtggatgacaaggaacactcaatcaaggtcagcgtaggaggggagaagcgggacctggagatagaagtagtcctatttcaccccaactacaacattaatgggaaaaaagaagcaggaattcctgaattttatgactatgacgttgccctgatcaagctcaagaataagctgaaatatggcc

SEQ ID NO: 6653 - DNA, 1996 bp, Homo sapiens
  source 1..1996: mol_type = unassigned DNA
gcttggatgttccgggaaagtgatgtgggtaggacaggcggggcgagccgcaggtgccagaacacagattgtataaaaggctgggggctggtggggagcaggggaagggaatgtgaccaggtctaggtctggagtttcagcttggacactgagccaagcagacaagcaaagcaagccaggacacaccatcctgccccaggcccagcttctctcctgccttccaacgccatggggagcaatctcagcccccaactctgcctgatgccctttatcttgggcctcttgtctggaggtgtgaccaccactccatggtctttggcccagccccagggatcctgctctctggagggggtagagatcaaaggcggctccttccgacttctccaagagggccaggcactggagtacgtgtgtccttctggcttctacccgtaccctgtgcagacacgtacctgcagatctacggggtcctggagcaccctgaagactcaagaccaaaagactgtcaggaaggcagagtgcagagcaatccactgtccaagaccacacgacttcgagaacggggaatactggccccggtctccctactacaatgtgagtgatgagatctctttccactgctatgacggttacactctccggggctctgccaatcgcacctgccaagtgaatggccggtggagtgggcagacagcgatctgtgacaacggagcggggtactgctccaacccgggcatccccattggcacaaggaaggtgggcagccagtaccgccttgaagacagcgtcacctaccactgcagccgggggcttaccctgcgtggctcccagcggcgaacgtgtcaggaaggtggctcttggagcgggacggagccttcctgccaagactccttcatgtacgacacccctcaagaggtggccgaagctttcctgtcttccctgacagagaccatagaaggagtcgatgctgaggatgggcacggcccaggggaacaacagaagcggaagatcgtcctggacccttcaggctccatgaacatctacctggtgctagatggatcagacagcattggggccagcaacttcacaggagccaaaaagtgtctagtcaacttaattgagaaggtggcaagttatggtgtgaagccaagatatggtctagtgacatatgccacataccccaaaatttgggtcaaagtgtctgaagcagacagcagtaatgcagactgggtcacgaagcagctcaatgaaatcaattatgaagaccacaagttgaagtcagggactaacaccaagaaggccctccaggcagtgtacagcatgatgagctggccagatgacgtccctcctgaaggctggaaccgcacccgccatgtcatcatcctcatgactgatggattgcacaacatgggcggggacccaattactgtcattgatgagatccgggacttgctatacattggcaaggatcgcaaaaacccaagggaggattatctggatgtctatgtgtttggggtcgggcctttggtgaaccaagtgaacatcaatgctttggcttccaagaaagacaatgagcaacatgtgttcaaagtcaaggatatggaaaacctggaagatgttttctaccaaatgatcgatgaaagccagtctctgagtctctgtggcatggtttgggaacacaggaagggtaccgattaccacaagcaaccatggcaggccaagatctcagtcattcgcccttcaaagggacacgagagctgtatgggggctgtggtgtctgagtactttgtgctgacagcagcacattgtttcactgtggatgacaaggaacactcaatcaaggtcagcgtaggaggggagaagcgggacctggagatagaagtagtcctatttcaccccaactacaacattaatgggaaaaaagaagcaggaattcctgaattttatgactatgacgttgccctgatcaagctcaagaataagctgaaatatggcc

SEQ ID NO: 6654 - DNA, 2502 bp, Homo sapiens
  source 1..2502: mol_type = unassigned DNA
aataaaaatcaatggtttccacatctctcagtgcctctatctggaggccaggtctggagtttcagcttggacactgagccaagcagacaagcaaagcaagccaggacacaccatcctgccccaggcccagcttctctcctgccttccaacgccatggggagcaatctcagcccccaactctgcctgatgccctttatcttgggcctcttgtctggaggtgtgaccaccactccatggtctttggcccggccccagggatcctgctctctggagggggtagagatcaaaggcggctccttccgacttctccaagagggccaggcactggagtacgtgtgtccttctggcttctacccgtaccctgtgcagacacgtacctgcagatctacggggtcctggagcaccctgaagactcaagaccaaaagactgtcaggaaggcagagtgcagagcaatccactgtccaagaccacacgacttcgagaacggggaatactggccccggtctccctactacaatgtgagtgatgagatctctttccactgctatgacggttacactctccggggctctgccaatcgcacctgccaagtgaatggccggtggagtgggcagacagcgatctgtgacaacggagcggggtactgctccaacccgggcatccccattggcacaaggaaggtgggcagccagtaccgccttgaagacagcgtcacctaccactgcagccgggggcttaccctgcgtggctcccagcggcgaacgtgtcaggaaggtggctcttggagcgggacggagccttcctgccaagactccttcatgtacgacacccctcaagaggtggccgaagctttcctgtcttccctgacagagaccatagaaggagtcgatgctgaggatgggcacggcccaggggaacaacagaagcggaagatcgtcctggacccttcaggctccatgaacatctacctggtgctagatggatcagacagcattggggccagcaacttcacaggagccaaaaagtgtctagtcaacttaattgagaaggtggcaagttatggtgtgaagccaagatatggtctagtgacatatgccacataccccaaaatttgggtcaaagtgtctgaagcagacagcagtaatgcagactgggtcacgaagcagctcaatgaaatcaattatgaagaccacaagttgaagtcagggactaacaccaagaaggccctccaggcagtgtacagcatgatgagctggccagatgacgtccctcctgaaggctggaaccgcacccgccatgtcatcatcctcatgactgatggattgcacaacatgggcggggacccaattactgtcattgatgagatccgggacttgctatacattggcaaggatcgcaaaaacccaagggaggattatctggatgtctatgtgtttggggtcgggcctttggtgaaccaagtgaacatcaatgctttggcttccaagaaagacaatgagcaacatgtgttcaaagtcaaggatatggaaaacctggaagatgttttctaccaaatgatcgatgaaagccagtctctgagtctctgtggcatggtttgggaacacaggaagggtaccgattaccacaagcaaccatggcaggccaagatctcagtcattcgcccttcaaagggacacgagagctgtatgggggctgtggtgtctgagtactttgtgctgacagcagcacattgtttcactgtggatgacaaggaacactcaatcaaggtcagcgtaggaggggagaagcgggacctggagatagaagtagtcctatttcaccccaactacaacattaatgggaaagaagaagcaggaattcctgaattttatgactatgacgttgccctgatcaagctcaagaataagctgaaatatggccagactatcaggcccatttgtctcccctgcaccgagggaacaactcgagctttgaggcttcctccaactaccacttgccagcaacaaaaggaagagctgctccctgcacaggatatcaaagctctgtttgtgtctgaggaggagaaaaagctgactcggaaggaggtctacatcaagaatggggataagaaaggcagctgtgagagagatgctcaatatgccccaggctatgacaaagtcaaggacatctcagaggtggtcacccctcggttcctttgtactggaggagtgagtccctatgctgaccccaatacttgcagaggtgattctggcggccccttgatagttcacaagagaagtcgtttcattcaagttggtgtaatcagctggggagtagtggatgtctgcaaaaaccagaagcggcaaaagcaggtacctgctcacgcccgagactttcacatcaacctctttcaagtgctgccctggctgaaggagaaactccaagatgaggatttgggttttctataaggggtttcctgctggacaggggcgtgggattgaattaaaacagctgcgacaaca

SEQ ID NO: 6655 - DNA, 2502 bp, Homo sapiens
  source 1..2502: mol_type = unassigned DNA
aataaaaatcaatggtttccacatctctcagtgcctctatctggaggccaggtctggagtttcagcttggacactgagccaagcagacaagcaaagcaagccaggacacaccatcctgccccaggcccagcttctctcctgccttccaacgccatggggagcaatctcagcccccaactctgcctgatgccctttatcttgggcctcttgtctggaggtgtgaccaccactccatggtctttggcccggccccagggatcctgctctctggagggggtagagatcaaaggcggctccttccgacttctccaagagggccaggcactggagtacgtgtgtccttctggcttctacccgtaccctgtgcagacacgtacctgcagatctacggggtcctggagcaccctgaagactcaagaccaaaagactgtcaggaaggcagagtgcagagcaatccactgtccaagaccacacgacttcgagaacggggaatactggccccggtctccctactacaatgtgagtgatgagatctctttccactgctatgacggttacactctccggggctctgccaatcgcacctgccaagtgaatggccggtggagtgggcagacagcgatctgtgacaacggagcggggtactgctccaacccgggcatccccattggcacaaggaaggtgggcagccagtaccgccttgaagacagcgtcacctaccactgcagccgggggcttaccctgcgtggctcccagcggcgaacgtgtcaggaaggtggctcttggagcgggacggagccttcctgccaagactccttcatgtacgacacccctcaagaggtggccgaagctttcctgtcttccctgacagagaccatagaaggagtcgatgctgaggatgggcacggcccaggggaacaacagaagcggaagatcgtcctggacccttcaggctccatgaacatctacctggtgctagatggatcagacagcattggggccagcaacttcacaggagccaaaaagtgtctagtcaacttaattgagaaggtggcaagttatggtgtgaagccaagatatggtctagtgacatatgccacataccccaaaatttgggtcaaagtgtctgaagcagacagcagtaatgcagactgggtcacgaagcagctcaatgaaatcaattatgaagaccacaagttgaagtcagggactaacaccaagaaggccctccaggcagtgtacagcatgatgagctggccagatgacgtccctcctgaaggctggaaccgcacccgccatgtcatcatcctcatgactgatggattgcacaacatgggcggggacccaattactgtcattgatgagatccgggacttgctatacattggcaaggatcgcaaaaacccaagggaggattatctggatgtctatgtgtttggggtcgggcctttggtgaaccaagtgaacatcaatgctttggcttccaagaaagacaatgagcaacatgtgttcaaagtcaaggatatggaaaacctggaagatgttttctaccaaatgatcgatgaaagccagtctctgagtctctgtggcatggtttgggaacacaggaagggtaccgattaccacaagcaaccatggcaggccaagatctcagtcattcgcccttcaaagggacacgagagctgtatgggggctgtggtgtctgagtactttgtgctgacagcagcacattgtttcactgtggatgacaaggaacactcaatcaaggtcagcgtaggaggggagaagcgggacctggagatagaagtagtcctatttcaccccaactacaacattaatgggaaaaaagaagcaggaattcctgaattttatgactatgacgttgccctgatcaagctcaagaataagctgaaatatggccagactatcaggcccatttgtctcccctgcaccgagggaacaactcgagctttgaggcttcctccaactaccacttgccagcaacaaaaggaagagctgctccctgcacaggatatcaaagctctgtttgtgtctgaggaggagaaaaagctgactcggaaggaggtctacatcaagaatggggataagaaaggcagctgtgagagagatgctcaatatgccccaggctatgacaaagtcaaggacatctcagaggtggtcacccctcggttcctttgtactggaggagtgagtccctatgctgaccccaatacttgcagaggtgattctggcggccccttgatagttcacaagagaagtcgtttcattcaagttggtgtaatcagctggggagtagtggatgtctgcaaaaaccagaagcggcaaaagcaggtacctgctcacgcccgagactttcacatcaacctctttcaagtgctgccctggctgaaggagaaactccaagatgaggatttgggttttctataaggggtttcctgctggacaggggcgtgggattgaattaaaacagctgcgacaaca

SEQ ID NO: 6656 - DNA, 2577 bp, Homo sapiens
  source 1..2577: mol_type = unassigned DNA
gcttggatgttccgggaaagtgatgtgggtaggacaggcggggcgagccgcaggtgccagaacacagattgtataaaaggctgggggctggtggggagcaggggaagggaatgtgaccaggtctaggtctggagtttcagcttggacactgagccaagcagacaagcaaagcaagccaggacacaccatcctgccccaggcccagcttctctcctgccttccaacgccatggggagcaatctcagcccccaactctgcctgatgccctttatcttgggcctcttgtctggaggtgtgaccaccactccatggtctttggcccggccccagggatcctgctctctggagggggtagagatcaaaggcggctccttccgacttctccaagagggccaggcactggagtacgtgtgtccttctggcttctacccgtaccctgtgcagacacgtacctgcagatctacggggtcctggagcaccctgaagactcaagaccaaaagactgtcaggaaggcagagtgcagagcaatccactgtccaagaccacacgacttcgagaacggggaatactggccccggtctccctactacaatgtgagtgatgagatctctttccactgctatgacggttacactctccggggctctgccaatcgcacctgccaagtgaatggccggtggagtgggcagacagcgatctgtgacaacggagcggggtactgctccaacccgggcatccccattggcacaaggaaggtgggcagccagtaccgccttgaagacagcgtcacctaccactgcagccgggggcttaccctgcgtggctcccagcggcgaacgtgtcaggaaggtggctcttggagcgggacggagccttcctgccaagactccttcatgtacgacacccctcaagaggtggccgaagctttcctgtcttccctgacagagaccatagaaggagtcgatgctgaggatgggcacggcccaggggaacaacagaagcggaagatcgtcctggacccttcaggctccatgaacatctacctggtgctagatggatcagacagcattggggccagcaacttcacaggagccaaaaagtgtctagtcaacttaattgagaaggtggcaagttatggtgtgaagccaagatatggtctagtgacatatgccacataccccaaaatttgggtcaaagtgtctgaagcagacagcagtaatgcagactgggtcacgaagcagctcaatgaaatcaattatgaagaccacaagttgaagtcagggactaacaccaagaaggccctccaggcagtgtacagcatgatgagctggccagatgacgtccctcctgaaggctggaaccgcacccgccatgtcatcatcctcatgactgatggattgcacaacatgggcggggacccaattactgtcattgatgagatccgggacttgctatacattggcaaggatcgcaaaaacccaagggaggattatctggatgtctatgtgtttggggtcgggcctttggtgaaccaagtgaacatcaatgctttggcttccaagaaagacaatgagcaacatgtgttcaaagtcaaggatatggaaaacctggaagatgttttctaccaaatgatcgatgaaagccagtctctgagtctctgtggcatggtttgggaacacaggaagggtaccgattaccacaagcaaccatggcaggccaagatctcagtcattcgcccttcaaagggacacgagagctgtatgggggctgtggtgtctgagtactttgtgctgacagcagcacattgtttcactgtggatgacaaggaacactcaatcaaggtcagcgtaggaggggagaagcgggacctggagatagaagtagtcctatttcaccccaactacaacattaatgggaaaaaagaagcaggaattcctgaattttatgactatgacgttgccctgatcaagctcaagaataagctgaaatatggccagactatcaggcccatttgtctcccctgcaccgagggaacaactcgagctttgaggcttcctccaactaccacttgccagcaacaaaaggaagagctgctccctgcacaggatatcaaagctctgtttgtgtctgaggaggagaaaaagctgactcggaaggaggtctacatcaagaatggggataagaaaggcagctgtgagagagatgctcaatatgccccaggctatgacaaagtcaaggacatctcagaggtggtcacccctcggttcctttgtactggaggagtgagtccctatgctgaccccaatacttgcagaggtgattctggcggccccttgatagttcacaagagaagtcgtttcattcaagttggtgtaatcagctggggagtagtggatgtctgcaaaaaccagaagcggcaaaagcaggtacctgctcacgcccgagactttcacatcaacctctttcaagtgctgccctggctgaaggagaaactccaagatgaggatttgggttttctataaggggtttcctgctggacaggggcgtgggattgaattaaaacagctgcgacaaca

SEQ ID NO: 6657 - DNA, 2577 bp, Homo sapiens
  source 1..2577: mol_type = unassigned DNA
gcttggatgttccgggaaagtgatgtgggtaggacaggcggggcgagccgcaggtgccagaacacagattgtataaaaggctgggggctggtggggagcaggggaagggaatgtgaccaggtctaggtctggagtttcagcttggacactgagccaagcagacaagcaaagcaagccaggacacaccatcctgccccaggcccagcttctctcctgccttccaacgccatggggagcaatctcagcccccaactctgcctgatgccctttatcttgggcctcttgtctggaggtgtgaccaccactccatggtctttggcccggccccagggatcctgctctctggagggggtagagatcaaaggcggctccttccgacttctccaagagggccaggcactggagtacgtgtgtccttctggcttctacccgtaccctgtgcagacacgtacctgcagatctacggggtcctggagcaccctgaagactcaagaccaaaagactgtcaggaaggcagagtgcagagcaatccactgtccaagaccacacgacttcgagaacggggaatactggccccggtctccctactacaatgtgagtgatgagatctctttccactgctatgacggttacactctccggggctctgccaatcgcacctgccaagtgaatggccggtggagtgggcagacagcgatctgtgacaacggagcggggtactgctccaacccgggcatccccattggcacaaggaaggtgggcagccagtaccgccttgaagacagcgtcacctaccactgcagccgggggcttaccctgcgtggctcccagcggcgaacgtgtcaggaaggtggctcttggagcgggacggagccttcctgccaagactccttcatgtacgacacccctcaagaggtggccgaagctttcctgtcttccctgacagagaccatagaaggagtcgatgctgaggatgggcacggcccaggggaacaacagaagcggaagatcgtcctggacccttcaggctccatgaacatctacctggtgctagatggatcagacagcattggggccagcaacttcacaggagccaaaaagtgtctagtcaacttaattgagaaggtggcaagttatggtgtgaagccaagatatggtctagtgacatatgccacataccccaaaatttgggtcaaagtgtctgaagcagacagcagtaatgcagactgggtcacgaagcagctcaatgaaatcaattatgaagaccacaagttgaagtcagggactaacaccaagaaggccctccaggcagtgtacagcatgatgagctggccagatgacgtccctcctgaaggctggaaccgcacccgccatgtcatcatcctcatgactgatggattgcacaacatgggcggggacccaattactgtcattgatgagatccgggacttgctatacattggcaaggatcgcaaaaacccaagggaggattatctggatgtctatgtgtttggggtcgggcctttggtgaaccaagtgaacatcaatgctttggcttccaagaaagacaatgagcaacatgtgttcaaagtcaaggatatggaaaacctggaagatgttttctaccaaatgatcgatgaaagccagtctctgagtctctgtggcatggtttgggaacacaggaagggtaccgattaccacaagcaaccatggcaggccaagatctcagtcattcgcccttcaaagggacacgagagctgtatgggggctgtggtgtctgagtactttgtgctgacagcagcacattgtttcactgtggatgacaaggaacactcaatcaaggtcagcgtaggaggggagaagcgggacctggagatagaagtagtcctatttcaccccaactacaacattaatgggaaagaagaagcaggaattcctgaattttatgactatgacgttgccctgatcaagctcaagaataagctgaaatatggccagactatcaggcccatttgtctcccctgcaccgagggaacaactcgagctttgaggcttcctccaactaccacttgccagcaacaaaaggaagagctgctccctgcacaggatatcaaagctctgtttgtgtctgaggaggagaaaaagctgactcggaaggaggtctacatcaagaatggggataagaaaggcagctgtgagagagatgctcaatatgccccaggctatgacaaagtcaaggacatctcagaggtggtcacccctcggttcctttgtactggaggagtgagtccctatgctgaccccaatacttgcagaggtgattctggcggccccttgatagttcacaagagaagtcgtttcattcaagttggtgtaatcagctggggagtagtggatgtctgcaaaaaccagaagcggcaaaagcaggtacctgctcacgcccgagactttcacatcaacctctttcaagtgctgccctggctgaaggagaaactccaagatgaggatttgggttttctataaggggtttcctgctggacaggggcgtgggattgaattaaaacagctgcgacaaca

SEQ ID NO: 6658 - DNA, 2502 bp, Homo sapiens; identical to SEQ ID NO: 6655
  source 1..2502: mol_type = unassigned DNA

SEQ ID NO: 6659 - DNA, 2862 bp, Homo sapiens
  source 1..2862: mol_type = unassigned DNA
ggccttgggggagggggaggccagaatgactccaagagctacaggaaggcaggtcagagaccccactggacaaacagtggctggactctgcaccataacacacaatcaacaggggagtgagctggatccttatttctggtccctaagtgggtggtttgggcttactggggaggagctaaggccggagaggaggtactgaaggggagagtcctggacctttggcagcaaagggtgggacttctgcagtttctgtttccttgactggcagctcagcggggccctcccgcttggatgttccgggaaagtgatgtgggtaggacaggcggggcgagccgcaggtgccagaacacagattgtataaaaggctgggggctggtggggagcaggggaagggaatgtgaccaggtctaggtctggagtttcagcttggacactgagccaagcagacaagcaaagcaagccaggacacaccatcctgccccaggcccagcttctctcctgccttccaacgccatggggagcaatctcagcccccaactctgcctgatgccctttatcttgggcctcttgtctggaggtgtgaccaccactccatggtctttggcccggccccagggatcctgctctctggagggggtagagatcaaaggcggctccttccgacttctccaagagggccaggcactggagtacgtgtgtccttctggcttctacccgtaccctgtgcagacacgtacctgcagatctacggggtcctggagcaccctgaagactcaagaccaaaagactgtcaggaaggcagagtgcagagcaatccactgtccaagaccacacgacttcgagaacggggaatactggccccggtctccctactacaatgtgagtgatgagatctctttccactgctatgacggttacactctccggggctctgccaatcgcacctgccaagtgaatggccgatggagtgggcagacagcgatctgtgacaacggagcggggtactgctccaacccgggcatccccattggcacaaggaaggtgggcagccagtaccgccttgaagacagcgtcacctaccactgcagccgggggcttaccctgcgtggctcccagcggcgaacgtgtcaggaaggtggctcttggagcgggacggagccttcctgccaagactccttcatgtacgacacccctcaagaggtggccgaagctttcctgtcttccctgacagagaccatagaaggagtcgatgctgaggatgggcacggcccaggggaacaacagaagcggaagatcgtcctggacccttcaggctccatgaacatctacctggtgctagatggatcagacagcattggggccagcaacttcacaggagccaaaaagtgtctagtcaacttaattgagaaggtggcaagttatggtgtgaagccaagatatggtctagtgacatatgccacataccccaaaatttgggtcaaagtgtctgaagcagacagcagtaatgcagactgggtcacgaagcagctcaatgaaatcaattatgaagaccacaagttgaagtcagggactaacaccaagaaggccctccaggcagtgtacagcatgatgagctggccagatgacgtccctcctgaaggctggaaccgcacccgccatgtcatcatcctcatgactgatggattgcacaacatgggcggggacccaattactgtcattgatgagatccgggacttgctatacattggcaaggatcgcaaaaacccaagggaggattatctggatgtctatgtgtttggggtcgggcctttggtgaaccaagtgaacatcaatgctttggcttccaagaaagacaatgagcaacatgtgttcaaagtcaaggatatggaaaacctggaagatgttttctaccaaatgatcgatgaaagccagtctctgagtctctgtggcatggtttgggaacacaggaagggtaccgattaccacaagcaaccatggcaggccaagatctcagtcattcgcccttcaaagggacacgagagctgtatgggggctgtggtgtctgagtactttgtgctgacagcagcacattgtttcactgtggatgacaaggaacactcaatcaaggtcagcgtaggaggggagaagcgggacctggagatagaagtagtcctatttcaccccaactacaacattaatgggaaaaaagaagcaggaattcctgaattttatgactatgacgttgccctgatcaagctcaagaataagctgaaatatggccagactatcaggcccatttgtctcccctgcaccgagggaacaactcgagctttgaggcttcctccaactaccacttgccagcaacaaaaggaagagctgctccctgcacaggatatcaaagctctgtttgtgtctgaggaggagaaaaagctgactcggaaggaggtctacatcaagaatggggataagaaaggcagctgtgagagagatgctcaatatgccccaggctatgacaaagtcaaggacatctcagaggtggtcacccctcggttcctttgtactggaggagtgagtccctatgctgaccccaatacttgcagaggtgattctggcggccccttgatagttcacaagagaagtcgtttcattcaagttggtgtaatcagctggggagtagtggatgtctgcaaaaaccagaagcggcaaaagcaggtacctgctcacgcccgagactttcacatcaacctctttcaagtgctgccctggctgaaggagaaactccaagatgaggatttgggttttctataaggggtttcctgctggacaggggcgtgggattgaattaaaacagctgcgacaaca

SEQ ID NO: 6660 - DNA, 2502 bp, Homo sapiens; identical to SEQ ID NO: 6655
  source 1..2502: mol_type = unassigned DNA

SEQ ID NO: 6661 - DNA, 2577 bp, Homo sapiens; identical to SEQ ID NO: 6656
  source 1..2577: mol_type = unassigned DNA

SEQ ID NO: 6662 - DNA, 2577 bp, Homo sapiens; identical to SEQ ID NO: 6656
  source 1..2577: mol_type = unassigned DNA

SEQ ID NO: 6663 - DNA, 2577 bp, Homo sapiens; identical to SEQ ID NO: 6656
  source 1..2577: mol_type = unassigned DNA

SEQ ID NO: 6664 - DNA, 2502 bp, Homo sapiens; identical to SEQ ID NO: 6655
  source 1..2502: mol_type = unassigned DNA

SEQ ID NO: 6665 - DNA, 586 bp, Homo sapiens
  source 1..586: mol_type = unassigned DNA
aataaaaatcaatggtttccacatctctcagtgcctctatctggaggccaggtctggagtttcagcttggacactgagccaagcagacaagcaaagcaagccaggacacaccatcctgccccaggcccagcttctctcctgccttccaacgccatggggagcaatctcagcccccaactctgcctgatgccctttatcttgggcctcttgtctggaggtgtgaccaccactccatggtctttggcccggccccagggatcctgctctctggagggggtagagatcaaaggcggctccttccgacttctccaagagggccaggcactggagtacgtgtgtccttctggcttctacccgtaccctgtgcagacacgtacctgcagatctacggggtcctggagcaccctgaagactcaagaccaaaagactgtcaggaaggcagagtgcagagcaatccactgtccaagaccacacgacttcgagaacggggaatactggccccggtctccctactacaatgtgagtgatgagatctctttccactgctatgacggttacactctccggggctctgccaatcgcacct

SEQ ID NO: 6666 - DNA, 3874 bp, Homo sapiens
  source 1..3874: mol_type = unassigned DNA
atgaccttttccctcccgcggctctctacctctcgccgcccctagggaggacaccatgggcccactgatggttcttttttgcctgctgttcctgtacccaggtctggcagactcggctccctcctgccctcagaacgtgaatatctcgggtggcaccttcaccctcagccatggctgggctcctgggagccttctcacctactcctgcccccagggcctgtacccatccccagcatcacggctgtgcaagagcagcggacagtggcagaccccaggagccacccggtctctgtctaaggcggtctgcaaacctggccactgccccaacccaggcatttcactgggcgcagtgcggacaggcttccgctttggtcatggggacaaggtccgctatcgctgctcctcgaatcttgtgctcacggggtcttcggagcgggagtgccagggcaacggggtctggagtggaacggagcccatctgccgccaaccctactcttatgacttccctgaggacgtggcccctgccctgggcacttccttctcccacatgcttggggccaccaatcccacccagaagacaaaggatcatgaaaatggaactgggactaacacctatgcggccttaaacagtgtctatctcatgatgaacaaccaaatgcgactcctcggcatggaaacgatggcctggcaggaaatccgacatgccatcatccttctgacagatggaaagtccaatatgggtggctctcccaagacagctgttgaccatatcagagagatcctgaacatcaaccagaagaggaatgactatctggacatctatgccatcggggtgggcaagctggatgtggactggagagaactgaatgagctagggtccaagaaggatggtgagaggcatgccttcattctgcaggacacaaaggctctgcaccaggtctttgaacatatgctggatgtctccaagctcacagacaccatctgcggggtggggaacatgtcagcaaacgcctctgaccaggagaggacaccctggcatgtcactattaagcccaagagccaagagacctgccggggggccctcatctccgaccaatgggtcctgacagcagctcattgcttccgcgatggcaacgaccactccctgtggagggtcaatgtgggagaccccaaatcccagtggggcaaagaattccttattgagaaggcggtgatctccccagggtttgatgtctttgccaaaaagaaccagggaatcctggagttctatggtgatgacatagctctgctgaagctggcccagaaagtaaagatgtccacccatgccaggcccatctgccttccctgcacgatggaggccaatctggctctgcggagacctcaaggcagcacctgtagggaccatgagaatgaactgctgaacaaacagagtgttcctgctcattttgtcgccttgaatgggagcaaactgaacattaaccttaagatgggagtggagtggacaagctgtgccgaggttgtctcccaagaaaaaaccatgttccccaacttgacagatgtcagggaggtggtgacagaccagttcctatgcagtgggacccaggaggatgagagtccctgcaagggtgtgaccaccactccatggtctttggcccggccccagggatcctgctctctggagggggtagagatcaaaggcggctccttccgacttctccaagagggccaggcactggagtacgtgtgtccttctggcttctacccgtaccctgtgcagacacgtacctgcagatctacggggtcctggagcaccctgaagactcaagaccaaaagactgtcaggaaggcagagtgcagagcaatccactgtccaagaccacacgacttcgagaacggggaatactggccccggtctccctactacaatgtgagtgatgagatctctttccactgctatgacggttacactctccggggctctgccaatcgcacctgccaagtgaatggccggtggagtgggcagacagcgatctgtgacaacggagcggggtactgctccaacccgggcatccccattggcacaaggaaggtgggcagccagtaccgccttgaagacagcgtcacctaccactgcagccgggggcttaccctgcgtggctcccagcggcgaacgtgtcaggaaggtggctcttggagcgggacggagccttcctgccaagactccttcatgtacgacacccctcaagaggtggccgaagctttcctgtcttccctgacagagaccatagaaggagtcgatgctgaggatgggcacggcccaggggaacaacagaagcggaagatcgtcctggacccttcaggctccatgaacatctacctggtgctagatggatcagacagcattggggccagcaacttcacaggagccaaaaagtgtctagtcaacttaattgagaaggtggcaagttatggtgtgaagccaagatatggtctagtgacatatgccacataccccaaaatttgggtcaaagtgtctgaagcagacagcagtaatgcagactgggtcacgaagcagctcaatgaaatcaattatgaagaccacaagttgaagtcagggactaacaccaagaaggccctccaggcagtgtacagcatgatgagctggccagatgacgtccctcctgaaggctggaaccgcacccgccatgtcatcatcctcatgactgatggattgcacaacatgggcggggacccaattactgtcattgatgagatccgggacttgctatacattggcaaggatcgcaaaaacccaagggaggattatctggatgtctatgtgtttggggtcgggcctttggtgaaccaagtgaacatcaatgctttggcttccaagaaagacaatgagcaacatgtgttcaaagtcaaggatatggaaaacctggaagatgttttctaccaaatgatcgatgaaagccagtctctgagtctctgtggcatggtttgggaacacaggaagggtaccgattaccacaagcaaccatggcaggccaagatctcagtcattcgcccttcaaagggacacgagagctgtatgggggctgtggtgtctgagtactttgtgctgacagcagcacattgtttcactgtggatgacaaggaacactcaatcaaggtcagcgtaggaggggagaagcgggacctggagatagaagtagtcctatttcaccccaactacaacattaatgggaaaaaagaagcaggaattcctgaattttatgactatgacgttgccctgatcaagctcaagaataagctgaaatatggccagactatcaggcccatttgtctcccctgcaccgagggaacaactcgagctttgaggcttcctccaactaccacttgccagcaacaaaaggaagagctgctccctgcacaggatatcaaagctctgtttgtgtctgaggaggagaaaaagctgactcggaaggaggtctacatcaagaatggggataagaaaggcagctgtgagagagatgctcaatatgccccaggctatgacaaagtcaaggacatctcagaggtggtcacccctcggttcctttgtactggaggagtgagtccctatgctgaccccaatacttgcagaggtgattctggcggccccttgatagttcacaagagaagtcgtttcattcaagttggtgtaatcagctggggagtagtggatgtctgcaaaaaccagaagcggcaaaagcaggtacctgctcacgcccgagactttcacatcaacctctttcaagtgctgccctggctgaaggagaaactccaagatgaggatttgggttttctataaggggtttcctgctggaca

SEQ ID NO: 6667 - DNA, 3874 bp, Homo sapiens
  source 1..3874: mol_type = unassigned DNA
atgaccttttccctcccgcggctctctacctctcgccgcccctagggaggacaccatgggcccactgatggttcttttttgcctgctgttcctgtacccaggtctggcagactcggctccctcctgccctcagaacgtgaatatctcgggtggcaccttcaccctcagccatggctgggctcctgggagccttctcacctactcctgcccccagggcctgtacccatccccagcatcacggctgtgcaagagcagcggacagtggcagaccccaggagccacccggtctctgtctaaggcggtctgcaaacctggccactgccccaacccaggcatttcactgggcgcagtgcggacaggcttccgctttggtcatggggacaaggtccgctatcgctgctcctcgaatcttgtgctcacggggtcttcggagcgggagtgccagggcaacggggtctggagtggaacggagcccatctgccgccaaccctactcttatgacttccctgaggacgtggcccctgccctgggcacttccttctcccacatgcttggggccaccaatcccacccagaagacaaaggatcatgaaaatggaactgggactaacacctatgcggccttaaacagtgtctatctcatgatgaacaaccaaatgcgactcctcggcatggaaacgatggcctggcaggaaatccgacatgccatcatccttctgacagatggaaagtccaatatgggtggctctcccaagacagctgttgaccatatcagagagatcctgaacatcaaccagaagaggaatgactatctggacatctatgccatcggggtgggcaagctggatgtggactggagagaactgaatgagctagggtccaagaaggatggtgagaggcatgccttcattctgcaggacacaaaggctctgcaccaggtctttgaacatatgctggatgtctccaagctcacagacaccatctgcggggtggggaacatgtcagcaaacgcctctgaccaggagaggacaccctggcatgtcactattaagcccaagagccaagagacctgccggggggccctcatctccgaccaatgggtcctgacagcagctcattgcttccgcgatggcaacgaccactccctgtggagggtcaatgtgggagaccccaaatcccagtggggcaaagaattccttattgagaaggcggtgatctccccagggtttgatgtctttgccaaaaagaaccagggaatcctggagttctatggtgatgacatagctctgctgaagctggcccagaaagtaaagatgtccacccatgccaggcccatctgccttccctgcacgatggaggccaatctggctctgcggagacctcaaggcagcacctgtagggaccatgagaatgaactgctgaacaaacagagtgttcctgctcattttgtcgccttgaatgggagcaaactgaacattaaccttaagatgggagtggagtggacaagctgtgccgaggttgtctcccaagaaaaaaccatgttccccaacttgacagatgtcagggaggtggtgacagaccagttcctatgcagtgggacccaggaggatgagagtccctgcaagggtgtgaccaccactccatggtctttggcccggccccagggatcctgctctctggagggggtagagatcaaaggcggctccttccgacttctccaagagggccaggcactggagtacgtgtgtccttctggcttctacccgtaccctgtgcagacacgtacctgcagatctacggggtcctggagcaccctgaagactcaagaccaaaagactgtcaggaaggcagagtgcagagcaatccactgtccaagaccacacgacttcgagaacggggaatactggccccggtctccctactacaatgtgagtgatgagatctctttccactgctatgacggttacactctccggggctctgccaatcgcacctgccaagtgaatggccggtggagtgggcagacagcgatctgtgacaacggagcggggtactgctccaacccgggcatccccattggcacaaggaaggtgggcagccagtaccgccttgaagacagcgtcacctaccactgcagccgggggcttaccctgcgtggctcccagcggcgaacgtgtcaggaaggtggctcttggagcgggacggagccttcctgccaagactccttcatgtacgacacccctcaagaggtggccgaagctttcctgtcttccctgacagagaccatagaaggagtcgatgctgaggatgggcacggcccaggggaacaacagaagcggaagatcgtcctggacccttcaggctccatgaacatctacctggtgctagatggatcagacagcattggggccagcaacttcacaggagccaaaaagtgtctagtcaacttaattgagaaggtggcaagttatggtgtgaagccaagatatggtctagtgacatatgccacataccccaaaatttgggtcaaagtgtctgaagcagacagcagtaatgcagactgggtcacgaagcagctcaatgaaatcaattatgaagaccacaagttgaagtcagggactaacaccaagaaggccctccaggcagtgtacagcatgatgagctggccagatgacgtccctcctgaaggctggaaccgcacccgccatgtcatcatcctcatgactgatggattgcacaacatgggcggggacccaattactgtcattgatgagatccgggacttgctatacattggcaaggatcgcaaaaacccaagggaggattatctggatgtctatgtgtttggggtcgggcctttggtgaaccaagtgaacatcaatgctttggcttccaagaaagacaatgagcaacatgtgttcaaagtcaaggatatggaaaacctggaagatgttttctaccaaatgatcgatgaaagccagtctctgagtctctgtggcatggtttgggaacacaggaagggtaccgattaccacaagcaaccatggcaggccaagatctcagtcattcgcccttcaaagggacacgagagctgtatgggggctgtggtgtctgagtactttgtgctgacagcagcacattgtttcactgtggatgacaaggaacactcaatcaaggtcagcgtaggaggggagaagcgggacctggagatagaagtagtcctatttcaccccaactacaacattaatgggaaagaagaagcaggaattcctgaattttatgactatgacgttgccctgatcaagctcaagaataagctgaaatatggccagactatcaggcccatttgtctcccctgcaccgagggaacaactcgagctttgaggcttcctccaactaccacttgccagcaacaaaaggaagagctgctccctgcacaggatatcaaagctctgtttgtgtctgaggaggagaaaaagctgactcggaaggaggtctacatcaagaatggggataagaaaggcagctgtgagagagatgctcaatatgccccaggctatgacaaagtcaaggacatctcagaggtggtcacccctcggttcctttgtactggaggagtgagtccctatgctgaccccaatacttgcagaggtgattctggcggccccttgatagttcacaagagaagtcgtttcattcaagttggtgtaatcagctggggagtagtggatgtctgcaaaaaccagaagcggcaaaagcaggtacctgctcacgcccgagactttcacatcaacctctttcaagtgctgccctggctgaaggagaaactccaagatgaggatttgggttttctataaggggtttcctgctggaca

SEQ ID NO: 6668 - DNA, 3874 bp, Homo sapiens; identical to SEQ ID NO: 6666
  source 1..3874: mol_type = unassigned DNA

SEQ ID NO: 6669 - DNA, 3874 bp, Homo sapiens; identical to SEQ ID NO: 6666
  source 1..3874: mol_type = unassigned DNA

SEQ ID NO: 6670 - DNA, 3874 bp, Homo sapiens; identical to SEQ ID NO: 6666
  source 1..3874: mol_type = unassigned DNA

SEQ ID NO: 6671 - DNA, 3874 bp, Homo sapiens
  source 1..3874: mol_type = unassigned DNA
atgaccttttccctcccgcggctctctacctctcgccgcccctagggaggacaccatgggcccactgatggttcttttttgcctgctgttcctgtacccaggtctggcagactcggctccctcctgccctcagaacgtgaatatctcgggtggcaccttcaccctcagccatggctgggctcctgggagccttctcacctactcctgcccccagggcctgtacccatccccagcatcacggctgtgcaagagcagcggacagtggcagaccccaggagccacccggtctctgtctaaggcggtctgcaaacctggccactgccccaacccaggcatttcactgggcgcagtgcggacaggcttccgctttggtcatggggacaaggtccgctatcgctgctcctcgaatcttgtgctcacggggtcttcggagcgggagtgccagggcaacggggtctggagtggaacggagcccatctgccgccaaccctactcttatgacttccctgaggacgtggcccctgccctgggcacttccttctcccacatgcttggggccaccaatcccacccagaagacaaaggatcatgaaaatggaactgggactaacacctatgcggccttaaacagtgtctatctcatgatgaacaaccaaatgcgactcctcggcatggaaacgatggcctggcaggaaatccgacatgccatcatccttctgacagatggaaagtccaatatgggtggctctcccaagacagctgttgaccatatcagagagatcctgaacatcaaccagaagaggaatgactatctggacatctatgccatcggggtgggcaagctggatgtggactggagagaactgaatgagctagggtccaagaaggatggtgagaggcatgccttcattctgcaggacacaaaggctctgcaccaggtctttgaacatatgctggatgtctccaagctcacagacaccatctgcggggtggggaacatgtcagcaaacgcctctgaccaggagaggacaccctggcatgtcactattaagcccaagagccaagagacctgccggggggccctcatctccgaccaatgggtcctgacagcagctcattgcttccgcgatggcaacgaccactccctgtggagggtcaatgtgggagaccccaaatcccagtggggcaaagaattccttattgagaaggcggtgatctccccagggtttgatgtctttgccaaaaagaaccagggaatcctggagttctatggtgatgacatagctctgctgaagctggcccagaaagtaaagatgtccacccatgccaggcccatctgccttccctgcacgatggaggccaatctggctctgcggagacctcaaggcagcacctgtagggaccatgagaatgaactgctgaacaaacagagtgttcctgctcattttgtcgccttgaatgggagcaaactgaacattaaccttaagatgggagtggagtggacaagctgtgccgaggttgtctcccaagaaaaaaccatgttccccaacttgacagatgtcagggaggtggtgacagaccagttcctatgcagtgggacccaggaggatgagagtccctgcaagggtgtgaccaccactccatggtctttggcccggccccagggatcctgctctctggagggggtagagatcaaaggcggctccttccgacttctccaagagggccaggcactggagtacgtgtgtccttctggcttctacccgtaccctgtgcagacacgtacctgcagatctacggggtcctggagcaccctgaagactcaagaccaaaagactgtcaggaaggcagagtgcagagcaatccactgtccaagaccacacgacttcgagaacggggaatactggccccggtctccctactacaatgtgagtgatgagatctctttccactgctatgacggttacactctccggggctctgccaatcgcacctgccaagtgaatggccgatggagtgggcagacagcgatctgtgacaacggagcggggtactgctccaacccgggcatccccattggcacaaggaaggtgggcagccagtaccgccttgaagacagcgtcacctaccactgcagccgggggcttaccctgcgtggctcccagcggcgaacgtgtcaggaaggtggctcttggagcgggacggagccttcctgccaagactccttcatgtacgacacccctcaagaggtggccgaagctttcctgtcttccctgacagagaccatagaaggagtcgatgctgaggatgggcacggcccaggggaacaacagaagcggaagatcgtcctggacccttcaggctccatgaacatctacctggtgctagatggatcagacagcattggggccagcaacttcacaggagccaaaaagtgtctagtcaacttaattgagaaggtggcaagttatggtgtgaagccaagatatggtctagtgacatatgccacataccccaaaatttgggtcaaagtgtctgaagcagacagcagtaatgcagactgggtcacgaagcagctcaatgaaatcaattatgaagaccacaagttgaagtcagggactaacaccaagaaggccctccaggcagtgtacagcatgatgagctggccagatgacgtccctcctgaaggctggaaccgcacccgccatgtcatcatcctcatgactgatggattgcacaacatgggcggggacccaattactgtcattgatgagatccgggacttgctatacattggcaaggatcgcaaaaacccaagggaggattatctggatgtctatgtgtttggggtcgggcctttggtgaaccaagtgaacatcaatgctttggcttccaagaaagacaatgagcaacatgtgttcaaagtcaaggatatggaaaacctggaagatgttttctaccaaatgatcgatgaaagccagtctctgagtctctgtggcatggtttgggaacacaggaagggtaccgattaccacaagcaaccatggcaggccaagatctcagtcattcgcccttcaaagggacacgagagctgtatgggggctgtggtgtctgagtactttgtgctgacagcagcacattgtttcactgtggatgacaaggaacactcaatcaaggtcagcgtaggaggggagaagcgggacctggagatagaagtagtcctatttcaccccaactacaacattaatgggaaaaaagaagcaggaattcctgaattttatgactatgacgttgccctgatcaagctcaagaataagctgaaatatggccagactatcaggcccatttgtctcccctgcaccgagggaacaactcgagctttgaggcttcctccaactaccacttgccagcaacaaaaggaagagctgctccctgcacaggatatcaaagctctgtttgtgtctgaggaggagaaaaagctgactcggaaggaggtctacatcaagaatggggataagaaaggcagctgtgagagagatgctcaatatgccccaggctatgacaaagtcaaggacatctcagaggtggtcacccctcggttcctttgtactggaggagtgagtccctatgctgaccccaatacttgcagaggtgattctggcggccccttgatagttcacaagagaagtcgtttcattcaagttggtgtaatcagctggggagtagtggatgtctgcaaaaaccagaagcggcaaaagcaggtacctgctcacgcccgagactttcacatcaacctctttcaagtgctgccctggctgaaggagaaactccaagatgaggatttgggttttctataaggggtttcctgctggaca

SEQ ID NO: 6672 - DNA, 1155 bp, Homo sapiens
  source 1..1155: mol_type = unassigned DNA
gtgtctcagccacagcggcttcaccatgcacagctgggagcgcctggcagttctggtcctcctaggagcggccgcctgcgcggcgccgccccgtggtcggatcctgggcggcagagaggccgaggcgcacgcgcggccctacatggcgtcggtgcagctgaacggcgcgcacctgtgcggcggcgtcctggtggcggagcagtgggtgctgagcgcggcgcactgcctggaggacgcggccgacgggaaggtgcaggttctcctgggcgcgcactccctgtcgcagccggagccctccaagcgcctgtacgacgtgctccgcgcagtgccccacccggacagccagcccgacaccatcgaccacgacctcctgctgctacagctgtcggagaaggccacactgggccctgctgtgcgccccctgccctggcagcgcgtggaccgcgacgtggcaccgggaactctctgcgacgtggccggctggggcatagtcaaccacgcgggccgccgcccggacagcctgcagcacgtgctcttgccagtgctggaccgcgccacctgcaaccggcgcacgcaccacgacggcgccatcaccgagcgcttgatgtgcgcggagagcaatcgccgggacagctgcaagggtgactccgggggcccgctggtgtgcgggggcgtgctcgagggcgtggtcacctcgggctcgcgcgtttgcggcaaccgcaagaagcccgggatctacacccgcgtggcgagctatgcggcctggatcgacagcgtcctggcctagggtgccggggcctgaaggtcagggtcacccaagcaacaaagtcccgagcaatgaagtcatccactcctgcatctggttggtctttattgagcacctactatatgcagaaggggaggccgaggtgggaggatcattggatctcaggagttcgagatcagcatgggccacgtagcgcgactccatctctacaaataaataaaaaattagctgggcaattggcgggcatggaggtgggtgcttgtagttccagctactcaggaggctgaggtgggaggatgacttgaacgcaggaggctgaggctgcagtgagttgtgattgcaccactgccctccagcctgggcaacagagtgaaaccttgtctctctct

SEQ ID NO: 6673 - DNA, 1271 bp, Homo sapiens
  source 1..1271: mol_type = unassigned DNA
atgctcataactgttaatgaaagcagattcaaagcaacaccaccaccactgaagtatttttagttatataagattggaactaccaagcatgtggctcctggtcagtgtaattctaatctcacggatatcctctgttgggggagaagcaacattttgtgattttccaaaaataaaccatggaattctatatgatgaagaaaaatataagccattttcccaggttcctacaggggaagttttctattactcctgtgaatataattttgtgtctccttcaaaatcattttggactcgcataacatgcacagaagaaggatggtcaccaacaccaaagtgtctcagactgtgtttctttccttttgtggaaaatggtcattctgaatcttcaggacaaacacatctggaaggtgatactgtgcaaattatttgcaacacaggatacagacttcaaaacaatgagaacaacatttcatgtgtagaacggggctggtccacccctcccaaatgcaggtccactgacacttcctgtgtgaatccgcccacagtacaaaatgctcatatactgtcgagacagatgagtaaatatccatctggtgagagagtacgttatgaatgtaggagcccttatgaaatgtttggggatgaagaagtgatgtgtttaaatggaaactggacagaaccacctcaatgcaaagattctacgggaaaatgtgggccccctccacctattgacaatggggacattacttcattcccgttgtcagtatatgctccagcttcatcagttgagtaccaatgccagaacttgtatcaacttgagggtaacaagcgaataacatgtagaaatggacaatggtcagaaccaccaaaatgcttacatccgtgtgtaatatcccgagaaattatggaaaattataacatagcattaaggtggacagccaaacagaagctttatttgagaacaggtgaatcagctgaatttgtgtgtaaacggggatatcgtctttcatcacgttctcacacattgcgaacaacatgttgggatgggaaactggagtatccaacttgtgcaaaaagatagaatcaatcataaaatgcacacctttattcagaactttagtattaaatcagttcttaatttcatttttaagtattgttttactcctttttattcatacgtaaaattttggattaatttgtgaaaatgtaattataagctgagaccggtggctctcttcttaaaagcaccatattaaaacttggaaaactaa

SEQ ID NO: 6674 - DNA, 1062 bp, Homo sapiens
  source 1..1062: mol_type = unassigned DNA
cagttagtacactgaaattcaaagtcatgctcataactgttaatgaaagcagattcaaagcaacaccaccaccactgaagtatttttagttatataagattggaactaccaagcatgtggctcctggtcagtgtaattctaatctcacggatatcctctgttgggggagaagcaatgttctgtgattttccaaaaataaaccatggaattctatatgatgaagaaaaatataagccattttcccaagttcctacaggggaagttttctattactcctgtgaatataattttgtgtctccttcaaaatccttttggactcgcataacgtgcgcagaagaaggatggtcaccaacaccaaagtgtctcagactgtgtttctttccttttgtggaaaatggtcattctgaatcttcaggacaaacacatctggaaggtgatactgtacaaattatttgcaacacaggatacagacttcaaaacaatgagaacaacatttcatgtgtagaacggggctggtccactcctcccaaatgcaggtccactatttctgcagaaaaatgtgggccccctccacctattgacaatggagacattacttcattcctgttgtcagtatatgctccaggttcatcagttgagtaccagtgccagaacttgtatcaacttgagggtaacaatcaaataacatgtagaaacggacaatggtcagaaccaccaaaatgcttagatccatgtgtaatatcacaagaaattatggaaaaatataacataaaattaaagtggacaaaccaacaaaagctttattcaagaacaggtgacatagttgaatttgtttgtaaatctggatatcatccaacaaaatctcattcatttcgagcaatgtgtcagaatgggaaactggtatatcccagttgtgaagaaaaatagaatcaatggcattactattagtaaaatgcacacctttttctgaatttactattatatttgttttcaatttcatttttcaagtactgttttactcatttttattcataaataaagttttgtgttgatttgtgaaaa

SEQ ID NO: 6675 - DNA, 1036 bp, Homo sapiens
  source 1..1036: mol_type = unassigned DNA
tgttaatgaaagcagattcaaagcaacaccaccaccactgaagtatttttagttatataagattggaactaccaagcatgtggctcctggtcagtgtaattctaatctcacggatatcctctgttgggggagaagcaatgttctgtgattttccaaaaataaaccatggaattctatatgatgaagaaaaatataagccattttcccaagttcctacaggggaagttttctattactcctgtgaatataattttgtgtctccttcaaaatccttttggactcgcataacgtgcgcagaagaaggatggtcaccaacaccaaagtgtctcagactgtgtttctttccttttgtggaaaatggtcattctgaatcttcaggacaaacacatctggaaggtgatactgtacaaattatttgcaacacaggatacagacttcaaaacaatgagaacaacatttcatgtgtagaacggggctggtccactcctcccaaatgcaggtccactatttctgcagaaaaatgtgggccccctccacctattgacaatggagacattacttcattcctgttgtcagtatatgctccaggttcatcagttgagtaccagtgccagaacttgtatcaacttgagggtaacaatcaaataacatgtagaaacggacaatggtcagaaccaccaaaatgcttagatccatgtgtaatatcacaagaaattatggaaaaatataacataaaattaaagtggacaaaccaacaaaagctttattcaagaacaggtgacatagttgaatttgtttgtaaatctggatatcatccaacaaaatctcattcatttcgagcaatgtgtcagaatgggaaactggtatatcccagttgtgaagaaaaatagaatcaatggcattactattagtaaaatgcacacctttttctgaatttactattatatttgttttcaatttcatttttcaagtactgttttactcatttttattcataaataaagttttgtgttgatttgtgaaaatgcaattacaa

SEQ ID NO: 6676 - DNA, 1645 bp, Homo sapiens
  source 1..1645: mol_type = unassigned DNA
gaaccacacttggtaactaataatgaaagatttcaaaccccaaacagtgcaactgaaacttttgtattagcatactactgagaatatctaacatgttgttactaatcaatgtcattctgaccttgtgggtttcctgtgctaatggacaagtgaaaccttgtgattttccagacattaaacatggaggtctatttcatgagaatatgcgtagaccatactttccagtagctgtaggaaaatattactcctattactgtgatgaacattttgagactccttcaggaagttactgggattacattcattgcacacaaaatgggtggtcaccagcagtaccatgtctcagaaaatgttattttccttatttggaaaatggatataatcaaaattatggaagaaagtttgtacagggtaactctacagaagttgcctgccatcctggctacggtcttccaaaagcgcagaccacagttacatgtacggagaaaggctggtctcctactcccagatgcatccgtgtcagaacatgctcaaaatcagatatagaaattgaaaatggattcatttccgaatcttcctctatttatattttaaataaagaaatacaatataaatgtaaaccaggatatgcaacagcagatggaaattcttcaggatcaattacatgtttgcaaaatggatggtcagcacaaccaatttgcattaattcttcagaaaagtgtgggcctcctccacctattagcaatggtgataccacctcctttctactaaaagtgtatgtgccacagtcaagagtcgagtaccaatgccagccctactatgaacttcagggttctaattatgtaacatgtagtaatggagagtggtcggaaccaccaagatgcatacatccatgtataataactgaagaaaacatgaataaaaataacataaagttaaaaggaagaagtgacagaaaatattatgcaaaaacaggggataccattgaatttatgtgtaaattgggatataatgcaaatacatcaattctatcatttcaagcagtgtgtcgggaagggatagtggaataccccagatgcgaataaggcagcattgttaccctaaatgtatgtccaacttccacttttccacttctcactcttatggtctcaaagcttgcaaagatagcttctgatattgttgtaatttctactttatttcaaagaaaattaatataatagtttcaatttgcaacttaatatattctcaaaaatatattaaaacaaactaaattattgcttatgcttgtactaaaataataaaaactactcttatattggacttcttatcaatgaattagtaagtatagagacagacagctgaatggctttctgcatattgtatagtatacctagacatagaaacaaaatgactttagattttatttggggaagtaataataccataaaattagatattaaaattgtaagtgaagataaacacactatagtattcccttattgtagccatggtcctctagatgcagttaaccaaatagggtcatttttattaaaagtagtgtttcctggcaaacactgacattacatcattatcatgatttaaaggaaatagtactagagaaggtgaattattatcattttcctgt

SEQ ID NO: 6677 - DNA, 1462 bp, Homo sapiens
  source 1..1462: mol_type = unassigned DNA
aatgaaagatttcaaaccccaaacagtgcaactgaaacttttgtattagcatactactgagaatatctaacatgttgttactaatcaatgtcattctgaccttgtgggtttcctgtgctaatggacaagtgaaaccttgtgattttccagacattaaacatggaggtctatttcatgagaatatgcgtagaccatactttccagtagctgtaggaaaatattactcctattactgtgatgaacattttgagactccttcaggaagttactgggattacattcattgcacacaaaatgggtggtcaccagcagtaccatgtctcagaaaatgttattttccttatttggaaaatggatataatcaaaattatggaagaaagtttgtacagggtaactctacagaagttgcctgccatcctggctacggtcttccaaaagcgcagaccacagttacatgtacggagaaaggctggtctcctactcccagatgcatccgtgtcagaacatgctcaaaatcagatatagaaattgaaaatggattcatttccgaatcttcctctatttatattttaaataaagaaatacaatataaatgtaaaccaggatatgcaacagcagatggaaattcttcagatatggttttttgcatttcttattaagttttgcttcagatttttttttgtcttttctcctgttaattgccttcactctctttctgttctgtacttttctttgtatataaggattttttgaaaagattgtatatccctgttaacaaattgaaatctctattcactttaatagatttttacccccagttagcatatggttagtgagaagttgcagggtaagaagaaaacaatgttccctttcccaacacttttcctgattatagagaaaaaagcatgaacttgtataatgatctagtcctgtacagaatgagaaatattaattgctagactgagaatgttttggtggctaaagctaggaataactttttaagactgaagaatgatataagctatcaaatctaactcagttttcaaataacaggtttgcagagactggagaataaaaagtaaaaaattgttttattaattccagtgactaattctacttcatcaacatacatcataaataaaatttcaaaaataattgctgatatggtttggctgtgtcccacccaattttcaccttgaattatataatcaccatgcatcaaaggtagggccaggtggagataatggaatcatgggagcagtttccccataccccactcatggtagtaaatacatctcatgagatctaatggttttataaatgaaagttcccctggacaagttctcttgcctgccaccatgtaagatgtacctttgctactcattcaccttctgtcatgatggtgaggccttcccagcaatgtggaactgtgagtccattaaacctctttcctttataaatt

SEQ ID NO: 6678 - DNA, 1043 bp, Homo sapiens
  source 1..1043: mol_type = unassigned DNA
aatgaaagatttcaaaccccaaacagtgcaactgaaacttttgtattagcatactactgagaatatctaacatgttgttactaatcaatgtcattctgaccttgtgggtttcctgtgctaatggacaagtgaaaccttgtgattttccagacattaaacatggaggtctatttcatgagaatatgcgtagaccatactttccagtagctgtaggaaaatattactcctattactgtgatgaacattttgagactccttcaggaagttactgggattacattcattgcacacaaaatgggtggtcaccagcagtaccatgtctcagaaaatgttattttccttatttggaaaatggatataatcaaaattatggaagaaagtttgtacagggtaactctacagaagttgcctgccatcctggctacggtcttccaaaagcgcagaccacagttacatgtacggagaaaggctggtctcctactcccagatgcatccgtgtcaattcttcagaaaagtgtgggcctcctccacctattagcaatggtgataccacctcctttctactaaaagtgtatgtgccacagtcaagagtcgagtaccaatgccagccctactatgaacttcagggttctaattatgtaacatgtagtaatggagagtggtcggaaccaccaagatgcatacatccatgtataataactgaagaaaacatgaataaaaataacataaagttaaaaggaagaagtgacagaaaatattatgcaaaaacaggggataccattgaatttatgtgtaaattgggatataatgcaaatacatcaattctatcatttcaagcagtgtgtcgggaagggatagtggaataccccagatgcgaataaggcagcattgttaccctaaatgtatgtccaacttccacttttccacttctcactcttatggtctcaaagcttgcaaagatagcttctgatattgttgtaatttctactttatttcaaagaaaattaatataatagtttcaatttgcaacttaatatattctc

SEQ ID NO: 6679 - DNA, 1292 bp, Homo sapiens
  source 1..1292: mol_type = unassigned DNA
tgaaagatttcaaaccccaaacagtgcaactgaaacttttgcattactatactactgagaatatctaacatgttgttactaatcaatgtcattctgaccttgtgggtttcctgtgctaatggacaagaagtgaaaccttgtgattttccagaaattcaacatggaggtctatattataagagtttgcgtagactatactttccagcagctgcaggacaatcttattcctattactgtgatcaaaattttgtgactccttcaggaagttactgggattacattcattgcacacaagatggttggtcaccaacggtcccatgcctcagaacatgctcaaaatcagatatagaaattgaaaatggattcatttctgaatcttcctctatttatattttaaataaagaaatacaatataaatgtaaaccaggatatgcaacagcagatggaaattcttcaggttcaattacatgtttgcaaaatggatggtcagcacaaccaatttgcattaaattttgtgatatgcctgtttttgagaattccagagccaagagtaatggcatgcggtttaagctccatgacacattggactacgaatgctacgatggatatgaaatcagttatggaaacaccacaggttccatagtgtgtggtgaagatgggtggtcccatttcccaacatgttataattcttcagaaaagtgtgggcctcctccacctattagcaatggtgataccacctcctttctactaaaagtgtatgtgccacagtcaagagtcgagtaccaatgccagtcctactatgaacttcagggttctaattatgtaacatgtagtaatggagagtggtcggaaccaccaagatgcatacatccatgtataataactgaagaaaacatgaataaaaataacatacagttaaaaggaaaaagtgacataaaatattatgcaaaaacaggggataccattgaatttatgtgtaaattgggatataatgcgaatacatcagttctatcatttcaagcagtgtgtagggaaggcatagtggaataccccagatgcgaataaggcagcattgttaccctaaatgtatgtccaacttccacttctcactcttatggtctcaaagcttgcaaagatagcttctgatattgttgtaatttctactttatttcaaagaaaattaatataatagtttcaatttgcaacttaatatgttctcaaaaatatgttaaaacaaactaaattattgcttatgcttgtactaaaataataaaaactacccttatattgga

SEQ ID NO: 6680 - DNA, 2178 bp, Homo sapiens
  source 1..2178: mol_type = unassigned DNA
aagtgaccttaaagccctagctttgtggtagtgcacttaaattcagaatcacacttggtaactaataatgaaagatttcaaaccccaaacagtgcaactgaaacttttgcattactatactactgagaatatctaacatgttgttactaatcaatgtcattctgaccttgtgggtttcctgtgctaatggacaagtgaaaccttgtgattttccagaaattcaacatggaggtctatattataagagtttgcgtagactatactttccagcagctgcaggacaatcttattcctattactgtgatcaaaattttgtgactccttcaggaagttactgggattacattcattgcacacaagatggttggtcaccaacggtcccatgcctcagaacatgctcaaaatcagatgtagaaattgaaaatggattcatttctgaatcttcctctatttatattttaaatgaagaaacacaatataattgtaaaccaggatatgcaacagcagagggaaattcttcaggatcaattacatgtttgcaaaatggatggtcaacacaaccaatttgcattaaattttgtgatatgcctgtttttgagaattccagagccaagagtaatggcatgtggtttaagctccatgacacattggactatgaatgctatgatggatatgaaagcagttatggaaacaccacagattccatagtgtgtggtgaagatggctggtcccatttgccaacatgctataattcttcagaaaactgtgggcctcctccacctattagcaatggagataccacgtccttcccgcaaaaagtgtatctgccatggtcaagagtcgagtaccagtgccagtcctactatgaacttcagggttctaaatatgtaacatgtagtaatggagactggtcagaaccaccaagatgcatatcaatgaaaccttgtgagtttccagaaattcaacatggacatctatattatgagaatacgcgtagaccatactttccagtagctacaggacaatcttactcctattactgtgaccaaaattttgtgactccttcaggaagttactgggattacattcactgcacacaagatgggtggttgccaacagtcccatgcctcagaacatgctcaaaatcagatatagaaattgaaaatggattcatttctgaatcttcctctatttatattttaaataaagaaatacaatataaatgtaaaccaggatatgcaacagcagatggaaattcttcaggttcaattacatgtttgcaaaatggatggtcagcacaaccaatttgcattaaattttgtgatatgcctgtttttgagaattccagagccaagagtaatggcatgcggtttaagctccatgacacattggactacgaatgctacgatggatatgaaatcagttatggaaacaccacaggttccatagtgtgtggtgaagatgggtggtcccatttcccaacatgttataattcttcagaaaagtgtgggcctcctccacctattagcaatggtgataccacctcctttctactaaaagtgtatgtgccacagtcaagagtcgagtaccaatgccagtcctactatgaacttcagggttctaattatgtaacatgtagtaatggagagtggtcggaaccaccaagatgcatacatccatgtataataactgaagaaaacatgaataaaaataacatacagttaaaaggaaaaagtgacataaaatattatgcaaaaacaggggataccattgaatttatgtgtaaattgggatataatgcgaatacatcagttctatcatttcaagcagtgtgtagggaaggcatagtggaataccccagatgcgaataaggcagcattgttaccctaaatgtatgtccaacttccacttctcactcttatggtctcaaagcttgcaaagatagcttctgatattgttgtaatttctactttatttcaaagaaaattaatataatagtttcaatttgcaacttaatatgttctcaaaaatatgttaaaacaaactaaattattgcttatgcttgtactaaaataataaaaactacccttatattggacttcctatcaatgaattagtaagtatagaaacagataactgaatggctttctgcatattgtacagtatacctagacatag

SEQ ID NO: 6681 - DNA, 1292 bp, Homo sapiens
  source 1..1292: mol_type = unassigned DNA
tgaaagatttcaaaccccaaacagtgcaactgaaacttttgcattactatactactgagaatatctaacatgttgttactaatcaatgtcattctgaccttgtgggtttcctgtgctaatggacaagcaatgaaaccttgtgagtttccagaaattcaacatggacatctatattatgagaatacgcgtagaccatactttccagtagctacaggacaatcttactcctattactgtgaccaaaattttgtgactccttcaggaagttactgggattacattcactgcacacaagatgggtggttgccaacagtcccatgcctcagaacatgctcaaaatcagatatagaaattgaaaatggattcatttctgaatcttcctctatttatattttaaataaagaaatacaatataaatgtaaaccaggatatgcaacagcagatggaaattcttcaggttcaattacatgtttgcaaaatggatggtcagcacaaccaatttgcattaaattttgtgatatgcctgtttttgagaattccagagccaagagtaatggcatgcggtttaagctccatgacacattggactacgaatgctacgatggatatgaaatcagttatggaaacaccacaggttccatagtgtgtggtgaagatgggtggtcccatttcccaacatgttataattcttcagaaaagtgtgggcctcctccacctattagcaatggtgataccacctcctttctactaaaagtgtatgtgccacagtcaagagtcgagtaccaatgccagtcctactatgaacttcagggttctaattatgtaacatgtagtaatggagagtggtcggaaccaccaagatgcatacatccatgtataataactgaagaaaacatgaataaaaataacatacagttaaaaggaaaaagtgacataaaatattatgcaaaaacaggggataccattgaatttatgtgtaaattgggatataatgcgaatacatcagttctatcatttcaagcagtgtgtagggaaggcatagtggaataccccagatgcgaataaggcagcattgttaccctaaatgtatgtccaacttccacttctcactcttatggtctcaaagcttgcaaagatagcttctgatattgttgtaatttctactttatttcaaagaaaattaatataatagtttcaatttgcaacttaatatgttctcaaaaatatgttaaaacaaactaaattattgcttatgcttgtactaaaataataaaaactacccttatattgga

SEQ ID NO: 6682 - DNA, 1066 bp, Homo sapiens
  source 1..1066: mol_type = unassigned DNA
cagtgcaactgaaacttttgcattactatactactgagaatatctaacatgttgttactaatcaatgtcattctgaccttgtgggtttcctgtgctaatggacaagaagtgaaaccttgtgattttccagaaattcaacatggaggtctatattataagagtttgcgtagactatactttccagcagctgcaggacaatcttactcctattactgtgaccaaaattttgtgactccttcaggaagttactgggattacattcactgcacacaagatgggtggttgccaacagtcccatgcctcagaacatgctcaaaatcagatatagaaattgaaaatggattcatttctgaatcttcctctatttatattttaaataaagaaatacaatataaatgtaaaccaggatatgcaacagcagatggaaattcttcaggttcaattacatgtttgcaaaatggatggtcagcacaaccaatttgcattaaattttgtgatatgcctgtttttgagaattccagagccaagagtaatggcatgcggtttaagctccatgacacattggactacgaatgctacgatggatatgaaatcagttatggaaacaccacaggttccatagtgtgtggtgaagatgggtggtcccatttcccaacatgttataattcttcagaaaagtgtgggcctcctccacctattagcaatggtgataccacctcctttctactaaaagtgtatgtgccacagtcaagagtcgagtaccaatgccagtcctactatgaacttcagggttctaattatgtaacatgtagtaatggagagtggtcggaaccaccaagatgcatacatccatgtataataactgaagaaaacatgaataaaaataacatacagttaaaaggaaaaagtgacataaaatattatgcaaaaacaggggataccattgaatttatgtgtaaattgggatataatgcgaatacatcagttctatcatttcaagcagtgtgtagggaaggcatagtggaataccccagatgcgaataaggcagcattgttaccctaaatg

SEQ ID NO: 6683 - DNA, 2157 bp, Homo sapiens
  source 1..2157: mol_type = unassigned DNA
tctttaatgggaaggccattttttggtttcagttacggtaaatctctctggatttcagccaaattctttcagagttcaaaagtacaaagctctttaggaggtttgttcttttgaaacattttttcagaggttaaaaattaaatttcaaaagaatacctggagtggaaaagagttctcagcagagacaaagaccccgaacacctccaacatgaagcttcttcatgttttcctgttatttctgtgcttccacttaaggttttgcaaggtcacttatacatctcaagaggatctggtggagaaaaagtgcttagcaaaaaaatatactcacctctcctgcgataaagtcttctgccagccatggcagagatgcattgagggcacctgtgtttgtaaactaccgtatcagtgcccaaagaatggcactgcagtgtgtgcaactaacaggagaagcttcccaacatactgtcaacaaaagagtttggaatgtcttcatccagggacaaagtttttaaataacggaacatgcacagccgaaggaaagtttagtgtttccttgaagcatggaaatacagattcagagggaatagttgaagtaaaacttgtggaccaagataagacaatgttcatatgcaaaagcagctggagcatgagggaagccaacgtggcctgccttgaccttgggtttcaacaaggtgctgatactcaaagaaggtttaagttgtctgatctctctataaattccactgaatgtctacatgtgcattgccgaggattagagaccagtttggctgaatgtacttttactaagagaagaactatgggttaccaggatttcgctgatgtggtttgttatacacagaaagcagattctccaatggatgacttctttcagtgtgtgaatgggaaatacatttctcagatgaaagcctgtgatggtatcaatgattgtggagaccaaagtgatgaactgtgttgtaaagcatgccaaggcaaaggcttccattgcaaatcgggtgtttgcattccaagccagtatcaatgcaatggtgaggtggactgcattacaggggaagatgaagttggctgtgcaggctttgcatctgtgactcaagaagaaacagaaattttgactgctgacatggatgcagaaagaagacggataaaatcattattacctaaactatcttgtggagttaaaaacagaatgcacattcgaaggaaacgaattgtgggaggaaagcgagcacaactgggagacctcccatggcaggtggcaattaaggatgccagtggaatcacctgtgggggaatttatattggtggctgttggattctgactgctgcacattgtctcagagccagtaaaactcatcgttaccaaatatggacaacagtagtagactggatacaccccgaccttaaacgtatagtaattgaatacgtggatagaattattttccatgaaaactacaatgcaggcacttaccaaaatgacatcgctttgattgaaatgaaaaaagacggaaacaaaaaagattgtgagctgcctcgttccatccctgcctgtgtcccctggtctccttacctattccaacctaatgatacatgcatcgtttctggctggggacgagaaaaagataacgaaagagtcttttcacttcagtggggtgaagttaaactaataagcaactgctctaagttttacggaaatcgtttctatgaaaaagaaatggaatgtgcaggtacatatgatggttccatcgatgcctgtaaaggggactctggaggccccttagtctgtatggatgccaacaatgtgacttatgtctggggtgttgtgagttggggggaaaactgtggaaaaccagagttcccaggtgtttacaccaaagtggccaattattttgactggattagctaccatgtaggaaggccttttatttctcagtacaatgtataaaattgtgatctctctcttcattctattctttttctctcaagagttccatttaatggaaataaaacggtataattaataattctctaggggggaaaaatgaagcaaatctcactggatatttttaaaggtctccacagagtttatgccatattggaattttgttgtataattctcaaataaatattttggtgaagcat

SEQ ID NO: 6684 - DNA, 2053 bp, Homo sapiens
  source 1..2053: mol_type = unassigned DNA
ggttaaaaattaaatttcaaaagaatacctggagtggaaaagagttctcagcagagacaaagaccccgaacacctccaacatgaagcttcttcatgttttcctgttatttctgtgcttccacttaaggttttgcaaggtcacttatacatctcaagaggatctggtggagaaaaagtgcttagcaaaaaaatatactcacctctcctgcgataaagtcttctgccagccatggcagagatgcattgagggcacctgtgtttgtaaactaccgtatcagtgcccaaagaatggcactgcagtgtgtgcaactaacaggagaagcttcccaacatactgtcaacaaaagagtttggaatgtcttcatccagggacaaagtttttaaataacggaacatgcacagccgaaggaaagtttagtgtttccttgaagcatggaaatacagattcagagggaatagttgaagtaaaacttgtggaccaagataagacaatgttcatatgcaaaagcagctggagcatgagggaagccaacgtggcctgccttgaccttgggtttcaacaaggtgctgatactcaaagaaggtttaagttgtctgatctctctataaattccactgaatgtctacatgtgcattgccgaggattagagaccagtttggctgaatgtacttttactaagagaagaactatgggttaccaggatttcgctgatgtggtttgttatacacagaaagcagattctccaatggatgacttctttcagtgtgtgaatgggaaatacatttctcagatgaaagcctgtgatggtatcaatgattgtggagaccaaagtgatgaactgtgttgtaaagcatgccaaggcaaaggcttccattgcaaatcgggtgtttgcattccaagccagtatcaatgcaatggtgaggtggactgcattacaggggaagatgaagttggctgtgcagcagctagacatcctacaattcaaggctttgcatctgtgactcaagaagaaacagaaattttgactgctgacatggatgcagaaagaagacggataaaatcattattacctaaactatcttgtggagttaaaaacagaatgcacattcgaaggaaacgaattgtgggaggaaagcgagcacaactgggagacctcccatggcaggtggcaattaaggatgccagtggaatcacctgtgggggaatttatattggtggctgttggattctgactgctgcacattgtctcagagccagtaaaactcatcgttaccaaatatggacaacagtagtagactggatacaccccgaccttaaacgtatagtaattgaatacgtggatagaattattttccatgaaaactacaatgcaggcacttaccaaaatgacatcgctttgattgaaatgaaaaaagacggaaacaaaaaagattgtgagctgcctcgttccatccctgcctgtgtcccctggtctccttacctattccaacctaatgatacatgcatcgtttctggctggggacgagaaaaagataacgaaagagtcttttcacttcagtggggtgaagttaaactaataagcaactgctctaagttttacggaaatcgtttctatgaaaaagaaatggaatgtgcaggtacatatgatggttccatcgatgcctgtaaaggggactctggaggccccttagtctgtatggatgccaacaatgtgacttatgtctggggtgttgtgagttggggggaaaactgtggaaaaccagagttcccaggtgtttacaccaaagtggccaattattttgactggattagctaccatgtaggaaggccttttatttctcagtacaatgtataaaattgtgatctctctcttcattctattctttttctctcaagagttccatttaatggaaataaaacggtataattaataattctctaggggggaaaaatgaagcaaatctcactggatatttttaaaggtctccacagagtttatgccatattggaattttgttgtataattctcaaataaatattttggtgaagcat

SEQ ID NO: 6685 - DNA, 1914 bp, Homo sapiens
  source 1..1914: mol_type = unassigned DNA
cgaacacctccaacatgaagcttcttcatgttttcctgttatttctgtgcttccacttaaggttttgcaaggtcacttatacatctcaagaggatctggtggagaaaaagtgcttagcaaaaaaatatactcacctctcctgcgataaagtcttctgccagccatggcagagatgcattgagggcacctgtgtttgtaaactaccgtatcagtgcccaaagaatggcactgcagtgtgtgcaactaacaggagaagcttcccaacatactgtcaacaaaagagtttggaatgtcttcatccagggacaaagtttttaaataacggaacatgcacagccgaaggaaagtttagtgtttccttgaagcatggaaatacagattcagagggaatagttgaagtaaaacttgtggaccaagataagacaatgttcatatgcaaaagcagctggagcatgagggaagccaacgtggcctgccttgaccttgggtttcaacaaggtgctgatactcaaagaaggtttaagttgtctgatctctctataaattccactgaatgtctacatgtgcattgccgaggattagagaccagtttggctgaatgtacttttactaagagaagaactatgggttaccaggatttcgctgatgtggtttgttatacacagaaagcagattctccaatggatgacttctttcagtgtgtgaatgggaaatacatttctcagatgaaagcctgtgatggtatcaatgattgtggagaccaaagtgatgaactgtgttgtaaagcatgccaaggcaaaggcttccattgcaaatcgggtgtttgcattccaagccagtatcaatgcaatggtgaggtggactgcattacaggggaagatgaagttggctgtgcagaagaaacagaaattttgactgctgacatggatgcagaaagaagacggataaaatcattattacctaaactatcttgtggagttaaaaacagaatgcacattcgaaggaaacgaattgtgggaggaaagcgagcacaactgggagacctcccatggcaggtggcaattaaggatgccagtggaatcacctgtgggggaatttatattggtggctgttggattctgactgctgcacattgtctcagagccagtaaaactcatcgttaccaaatatggacaacagtagtagactggatacaccccgaccttaaacgtatagtaattgaatacgtggatagaattattttccatgaaaactacaatgcaggcacttaccaaaatgacatcgctttgattgaaatgaaaaaagacggaaacaaaaaagattgtgagctgcctcgttccatccctgcctgtgtcccctggtctccttacctattccaacctaatgatacatgcatcgtttctggctggggacgagaaaaagataacgaaagagtcttttcacttcagtggggtgaagttaaactaataagcaactgctctaagttttacggaaatcgtttctatgaaaaagaaatggaatgtgcaggtacatatgatggttccatcgatgcctgtaaaggggactctggaggccccttagtctgtatggatgccaacaatgtgacttatgtctggggtgttgtgagttggggggaaaactgtggaaaaccagagttcccaggtgtttacaccaaagtggccaattattttgactggattagctaccatgtaggaaggccttttatttctcagtacaatgtataaaattgtgatctctctcttcattctattctttttctctcaagagttccatttaatggaaataaaacggtataattaataattctctaggggggaaaaatgaagcaaatctcactggatatttttaaaggtctccacagagtttatgccatattggaattttgttgtataa

SEQ ID NO: 6686 - DNA, 963 bp, Homo sapiens
  source 1..963: mol_type = unassigned DNA
caggtcacttatacatctcaagaggatctggtggagaaaaagtgcttagcaaaaaaatatactcacctctcctgcgataaagtcttctgccagccatggcagagatgcattgagggcacctgtgtttgtaaactaccgtatcagtgcccaaagaatggcactgcagtgtgtgcaactaacaggagaagcttcccaacatactgtcaacaaaagagtttggaatgtcttcatccagggacaaagtttttaaataacggaacatgcacagccgaaggaaagtttagtgtttccttgaagcatggaaatacagattcagagggaatagttgaagtaaaacttgtggaccaagataagacaatgttcatatgcaaaagcagctggagcatgagggaagccaacgtggcctgccttgaccttgggtttcaacaaggtgctgatactcaaagaaggtttaagttgtctgatctctctataaattccactgaatgtctacatgtgcattgccgaggattagagaccagtttggctgaatgtacttttactaagagaagaactatgggttaccaggatttcgctgatgtggtttgttatacacagaaagcagattctccaatggatgacttctttcagtgtgtgaatgggaaatacatttctcagatgaaagcctgtgatggtatcaatgattgtggagaccaaagtgatgaactgtgttgtaaagcatgccaaggcaaaggcttccattgcaaatcgggtgtttgcattccaagccagtatcaatgcaatggtgaggtggactgcattacaggggaagatgaagttggctgtgcagcatttgcagaactatgcatagaagaaacagaaattttgactgctgacatggatgcagaaagaagacggataaaatcattattacctaaactatcttgtggagttaaaaacagaatgcacattcgaaggaaacga

SEQ ID NO: 6687 - DNA, 1218 bp, Homo sapiens
  source 1..1218: mol_type = unassigned DNA
aaatttcaaaagaatacctggagtggaaaagagttctcagcagagacaaagaccccgaacacctccaacatgaagcttcttcatgttttcctgttatttctgtgcttccacttaaggttttgcaaggtcacttatacatctcaagaggatctggtggagaaaaagtgcttagcaaaaaaatatactcacctctcctgcgataaagtcttctgccagccatggcagagatgcattgagggcacctgtgtttgtaaactaccgtatcagtgcccaaagaatggcactgcagtgtgtgcaactaacaggagaagcttcccaacatactgtcaacaaaagagtttggaatgtcttcatccagggacaaagtttttaaataacggaacatgcacagccgaaggaaagtttagtgtttccttgaagcatggaaatacagattcagagggaatagttgaagtaaaacttgtggaccaagataagacaatgttcatatgcaaaagcagctggagcatgagggaagccaacgtggcctgccttgaccttgggtttcaacaaggtgctgatactcaaagaaggtttaagttgtctgatctctctataaattccactgaatgtctacatgtgcattgccgaggattagagaccagtttggctgaatgtacttttactaagagaagaactatgggttaccaggatttcgctgatgtggtttgttatacacagaaagcagattctccaatggatgacttctttcagtgtgtgaatgggaaatacatttctcagatgaaagcctgtgatggtatcaatgattgtggagaccaaagtgatgaactgtgttgtaaagcatgccaaggcaaaggcttccattgcaaatcgggtgtttgcattccaagccagtatcaatgcaatggtgaggtggactgcattacaggggaagatgaagttggctgtgcaggctttgcatctgtgactcaagaagaaacagaaattttgactgctgacatggatgcagaaagaagacggataaaatcattattacctaaactatcttgtggagttaaaaacagaatgcacattcgaaggaaacgaattgtgggaggaaagcgagcacaactgggaaaaatgaagcaaatctcactggatatttttaaaggtctccacagagtttatgccatattggaattttgttgtataattctcaaataaatattttggtgaagc

SEQ ID NO: 6688 - DNA, 2181 bp, Homo sapiens
  source 1..2181: mol_type = unassigned DNA
gtcacgctcggacgcgggcggggggcggggagcgcctgcgagtgacgcgccctcctcgcggtgcccttcagccgccgccgcagctcaccgggcgccacatggacccagccggcccgagcgcgccccgccgctgaccgcccgcgccccgggaaggaagaacactcgctcccggccatacttgcgtgtgagttctgacccctggaggagccactgtggaagcagagcaatcgccatggagtttgtgatgaagcaggctctaggaggggccaccaaggacatggggaagatgctggggggtgacgaggagaaggacccagacgccgccaagaaggaggaggagcggcaggaggcgctgcgccaggcggaggaggagcgcaaggccaagtacgccaagatggaggcggagcgcgaggccgtgcgccagggcatccgagacaagtacggcatcaagaagaaggaggagcgcgaggccgaggcccaggccgccatggaggccaactccgaggggagcttgacgcggcccaagaaggccatcccgccgggctgcggggacgaggtggaggaggaggacgagagcatcctggacaccgtcatcaagtacctgcccgggccgctgcaggacatgctcaagaagtagccgcgcgcgggacagcggccccgcggagcccccgcccctccccctacagatcctccgcggaggcccctgagggacgagcagagcgcagcccccacgccgatataagccatagccccaggcccgccctgcccgcgcccgccgcctccctcacccggcaaggggcgcgcgcccccaggacccccccagtccgccccgtgctcctctgcccgcgggtggctggagccccatcgcctgggacgcccctttctcttgctgtttaccgcccacccagcagcgcccgaggccagggccgccgaagggcagccccgcgaccacccctgtgcgcgcgttcgcggcggtgggcgcctgtcgggcccgcactcaggagcacagccatagcagacggggggctgcgggcggggcgagggcggcggggcctgggtccccctcctgcacgcggactccggggttcggatcgctccgccgtgagtatttgcgtccgcacgcggccgctctccgccccccggcctggccccctcgcgcccctgtccatccgtctctgtccgcgtcctttcctctcctctctggaaggttttgcttcttacgaacgccacggccgtgttcacttctaaactaaaggaaacaaagcaataggtttgggggacgcccagcccccacccccgtcaccccgctcttcccaagtcctcgccccccgcccggcctcctagcctctccgcccacgcggctgctgcttctccctggggaggacccctgccctcggccattgaacactgcaccctccacaggagccgcagaggcccgaggcaccggacgctggagaccctgcgcccctgcccagcacctcctccgtgggcagctcctcgggtggggcctgcggggttccctgcgcgcagctggcgcgtgtgtggcctaatccacctggtggccctgcggggcggcatccgagcccctgtttctcctccattcatgtttaatttgcatcacaatttgttgaatctcaggtaaatgaggtctttgcatttaatgagttttatcttgacaggcgccgcctcgcccccgggccctttcgtccacatcaaaaatgcatcaagtctccacgtgtttcgggccagggcgtggcttggcattgaccttcatgaccttacatagctttagagaagccataacgttagactgcaatactaacgaccgacgcccctccgggcagagaccaccgcgcccctctgcgccccagcgacgcggcccgcggggacgtcgctgtccgtcctgctcgccctgtgccctctcactgacttctcccgggtcgtgtcttttaaaaactcctgttttcacaccttacaaagccagctctgagcagacagggcgtcctctcgtagaacctgcgcaccccgttcccagcgcatggcgccccgggccgcgagcttagcttagaccgtggtgtcctctgtccgtctgtcctgcgcctgcgcctcctcctgcatgtcggggcccctgcgtgtgttctctccggatggaatcacagccaataaacaccagtgatttca

SEQ ID NO: 6689 - DNA, 5023 bp, Homo sapiens
  source 1..5023: mol_type = unassigned DNA
ggggttggcaacagagcaggtaggtagacctgcatttggttgctggtcacagaaatggagagtgagagatatttctaagtcaggatgccctagtggcagacccccaagtcctcgaacttcagggcagaactgcctgggtgggaactctcccatgtctccttgatttcactgccacctctgctggcgtcctctctcatctccgccgccagcccccgcctcctttctcgggaagcttgggtctccctgggagcgggtctgcccttagggggaggcctctgggctctgtgccctgcagctcggcaggcattcgaggcggacagaaacggggcttggcgccccccgcgtgcacgtgtgctagcccaggcaggagggagcgcctcggcggaggagtcaaggaagagggggagggagaaacgcgccagaacctcggcccgggcgccctcgtcggccgcggaggagctgcagcctccaacaggaaggtgtggtccctgccatgctatctgctctgctcagcgactgaaggtgcccgcatcccagctctgccaggaagcaaaggttgtcacatcttcccaagccaggccagccaggagcgctgcatgcaaattctgccgtgggctaaggcacgctaaccagagccggcggcatggacttcgtcatgaagcaggcccttggaggggccacaaaggacatggggaagatgctggggggagaggaggagaaggaccccgacgcgcagaaaaaggaggaggagcggcaggaggcgctgcggcagcaggaggaggagcgtaaggccaagcacgcgcgcatggaggcggagcgggagaaggtccggcagcagatccgagataagtatgggctgaagaagaaggaggagaaggaagcagaggagaaagcagccctggagcagccctgcgaggggagcctgacccggcccaagaaggccatccctgcgggctgcggggacgaggaggaggaggaagaggagagcatcctggacacggtgctcaaatacctgcccgggccgctgcaggacatgttcaagaagtaaccaggcctcctgccccagcctactccacctgttactacttctttttggttctttcttttctttttattaggttaagtctcaattctgaaggggaaaacctcagttggcctctgcccctcttccctggccaggggcttctccccctcagctctccctcacacctcccttcatcccagggtatccacctgcaccccactcccaagtagcttgaaaaagggaggacagtctttccccagcaggggtcaggggggcccctcaggaagcctaaggtcgtgctagtgtggtgacccccatacattcctccctgctccccactgccaggaggaccactgtccccagccagccaaagtaatgacacattccagccctgcccagcatgctgacctttggcctctaaccctcagtgggcccccaggtcagggcaggggcactgagtggcctggctctgaggaagggagtcaggggaagcctgtcccgggaaggcccaggctgagaggccctggctctggccaggctgggatctgggtgggaggctggggctcttcttcttccatctccttggtgacacccagcccaggggcacccccttccccagcccccacctggagagacatggcccctgccaagctggtcccttcaaatggatcctttgtggactttagctcatttgtggaggaaccccaggtagggacgccccttgttcctcacccccaccccacttaggtcctgggcccccactgccaggctgggcccagcttgctcagtcaaggggctgccaggcccccagaaaacacttggagccatcgggtagcgatggtctatgccatggggaacacctccattggtgtggccaagctgcccccattcctatccacccctctccccaccccgtcctgtccatgcgcttccagggccccacggtccccaggaggacgcttcctggccaaagccccaagcctttggtgagaagccaattcccacttgacagaaggcgtccatccattcatctcattggccaaggacaaactctcctctgggacgtctgggactggcatttgtcccccactcaaattatcaaagctttctgctcagtcagttgtgtggggatggtgagggaagaggggtcacatgagggaggaaactgtatccatgcatgcatgataatgcgtggcagagactgcaacagggattgtgtgttcagagatcatatgcatatgtgtagggctggagcgtgtgtgtgtcttgagattgtgtgtgttgcagtcatcatatctatgtgttacagattgtgtatgttagccttgtgtatgtgtgcttgattgaggtggtgtatttgggttgaaattgtgtcatatgtgtgtgctatccatctcgtgtttagaggctgtatatgttagcttgtgtaagaatgtgttttcaaaacagtgtgtgtattgggagtgatgggtatgtgttaggtatgtgatgggttgtagaagcgtgtgtttgagagaattcagagacatttgaaggctgctgtgtgcatgtttgggggtctgaaaagacagttgtgtgcatggatgtgtgcgtggggagaaagaacgtgggtaagatgtcccttcccagccctgagaccactggtcacagttggccacctccaacgggagaccttgtccttggcctagagtcctcccacccttggggggctcctgcctgaggtcctcagaatcccactgcaatggacccaggcagcgccccaggaagccatgctgggcccccgccagggcctatcccaaaagcaggggccagggagggggcgacttgcctgcccctgaagcccttgttcccattggccccagtttgcattctgcaggttttccattttagtgggttctgcttttatttcagagacagacatgtgtcttctctgtccgtttccaataggtaaagccatatcagttagactgcaatactttaaacacgagacaaaacaatccatatgtttagggaaccagaaaagtcccctggtctgtcccttctttggggagcagggcctcgacagctccagctcccttgacctaccttcctccccgcaccccgcccccaccttgtgcccctgtgtccagccccccagggggcctgtgtctgtgtctgtgcctgtgtctgtgatggggagccgcctcgcacccctgttgtctgcttgtctctttgtgtctgttatcctgggcaggatggtcattctcaaaaaccctggggtcctgggccagagacaggcagggcccagtccaggggccccaggcctccccagtcccagtgtgcgagccccacttggacacaagtgttcagagaggtccccctctgccacttgacagggaccttcaaacctcgacagtgatgcaaggacacagagagtaccagataggtagcagagaccaaggcgcagggtgcttcagatgagcaagagaacccagtcgaaccagataccccaggtgggccggagggaccccagaccttcagagggctgccctggtgttctccacagtgcagtccctctgtattcccagagtgggatcggggctttcagccccaccctgatgcctgccctccaggatggctggtttagtctgggtccatgtcccagacccctctattctgctccaggacagcaggacttcaggtcttcctgggggtggatataggagaaaatttctgcctggcacacacctggctccaaccactgccaagtgatcactcttaggcccaggggaacacaatgactatcattactgatgcagacctggctgtggagagcagctaatgtgtggcccagagagcctgtctgtgtggagcacgtagtgcacagaatacgtgagagttgctctggcaggggcagaatcctcacaggatcgcctgggaggtgaggtgtgtgtgacccactggatgggagggcaatgagtgtgcacatacaaatggggcagtgtgcatgcaacacacttaggggaggagtggccccagaattcagcacgcacacaacacacaagggagagaacccccagatgagaaaataggaaggagcaatcatttgtagatgggtgaaaaaagaatgaggttcaagggagcgtgcaccaggtgaggtgagcgtgtgtgctctcagggaagggcccaggatcccatgcctgggaggagctgccagagagaagcaaaaaggcggctgtggatcgccctgggctgggcaccagtgacaggtcaggatctccaaacatggacgtcctcccctccaaatccagaagctcccagaaggtgtccttaactgcaaagctgtgcagggtactcctccagatggaatcaggaagtcgagacaccatcccaggtgtgtgtaagagagagagagagaacagggaggatacagaagtattgcagcccagatcccctatcagggggacagctggtgggcaaagcagccaccccacagccttgtggctagagtacagtggggtagaccctccagccccaatagccctagtacccagctggcagggttgcccacccctgctgtccacctgctccatcctctagggttccacaggcccctgaccgcacagggaggctggggccagcctggtctcccaggcctgaggacatgcctcccaccaaatgtcccctgctccagtcccactcctgtcaccccacgctctgcactggggagaaaacgggaggtgctcgtgctggccctgggtgggagcggggagtcctggtgagaccccggtgagatggaccatcctgcccccgtgggggatcccctttcccacatccgtgctgtgtcattgttgctctgcttcctttcaatgtgtcagtgcctggggggaggggaggagcaccccctcagcccccctgaacctgaccaaaagccatggctgttgctcccccctttgtatgatgcaaatgctgaaatgtacaaaatcaaccatgacaacaaagaaaaagaccttgtacagc

SEQ ID NO: 6690 - DNA, 826 bp, Homo sapiens
  source 1..826: mol_type = unassigned DNA
catctggaaggggagcggtagaacgtcagggcccggctgaggggcgtgattggagggcgccttcggcagccgcccgcggcagaagccgcggctccagctcgcctggcggaattgcacgcggcggcgggagctggaatagcagaaggaaccacctcgtggagtcgggccggagccctgcagtggctcagacggttgcagggaccgccaggttgtcacatcttcccaagccaggccagccaggagcgctgcatgcaaattctgccgtgggctaaggcacgctaaccagagccggcggcatggacttcgtcatgaagcaggcccttggaggggccacaaaggacatggggaagatgctggggggagaggaggagaaggaccccgacgcgcagaaaaaggaggaggagcggcaggaggcgctgcggcagcaggaggaggagcgtaaggccaagcacgcgcgcatggaggcggagcgggagaaggtccggcagcagatccgagataagtatgggctgaagaagaaggaggagaaggaagcagaggagaaagcagccctggagcagccctgcgaggggagcctgacccggcccaagaaggccatccctgcgggctgcggggacgaggaggaggaggaagaggagagcatcctggacacggtgctcaaatacctgcccgggccgctgcaggacatgttcaagaagtaaccaggcctcctgccccagcctactccacctgttactacttctttttggttctttcttttctttttattaggttaagtctcaattctgaaggggaaaacctcagttggcctctgcccctcttccct

SEQ ID NO: 6691 - DNA, 1455 bp, Homo sapiens
  source 1..1455: mol_type = unassigned DNA
gcggcggcgggagctggaatagcagaaggaaccacctcgtggagtcgggccggagccctgcagtggctcagacggttgcagggaccgccaggttgtcacatcttcccaagccaggccagccaggagcgctgcatgcaaattctgccgtgggctaaggcacgctaaccagagccggcggcatggacttcgtcatgaagcaggcccttggaggggccacaaaggacatggggaagatgctggggggagaggaggagaaggaccccgacgcgcagaaaaaggaggaggagcggcaggaggcgctgcggcagcaggaggaggagcgtaaggccaagcacgcgcgcatggaggcggagcgggagaaggtccggcagcagatccgagataagtatgggctgaagaagaaggaggagaaggaagcagaggagaaagcagccctgcggggacgaggaggaggaggaagaggagagcatcctggacacggtgctcaaatacctgcccgggccgctgcaggacatgttcaagaagtaaccaggcctcctgccccagcctactccacctgttactacttctttttggttctttcttttctttttattaggttaagtctcaattctgaaggggaaaacctcagttggcctctgcccctcttccctggccaggggcttctccccctcagctctccctcacacctcccttcatcccagggtatccacctgcaccccactcccaagtagcttgaaaaagggaggacagtctttccccagcaggggtcaggggggcccctcaggaagcctaaggtcgtgctagtgtggtgacccccatacattcctccctgctccccactgccaggaggaccactgtccccagccagccaaagtaatgacacattccagccctgcccagcatgctgacctttggcctctaaccctcagtgggcccccaggtcagggcaggggcactgagtggcctggctctgaggaagggagtcaggggaagcctgtcccgggaaggcccaggctgagaggccctggctctggccaggctgggatctgggtgggaggctggggctcttcttcttccatctccttggtgacacccagcccaggggcacccccttccccagcccccacctggagagacatggcccctgccaagctggtcccttcaaatggatcctttgtggactttagctcatttgtggaggaaccccaggtagggacgccccttgttcctcacccccaccccacttaggtcctgggcccccactgccaggctgggcccagcttgctcagtcaaggggctgccaggcccccagaaaacacttggagccatcgggtagcgatggtctatgccatggggaacacctccattggtgtggccaagctgcccccattcctatccacccctctccccaccccgtcctgtccatgcgcttccagggccccacggtcccca

SEQ ID NO: 6692 - DNA, 532 bp, Homo sapiens
  source 1..532: mol_type = unassigned DNA
agacttgaatcataaaaacagaaaaacggccataaggacaaccactgcaggttacccgagtcagcctgtcagatggcggggcccagtcccgaaaacctctaggggctcagatggtcgagcctgagtcggtgcttgggctgggacgggctcggagggagtcggagaggggaaggaagctgaaggcgcgccctgggtccccggcgcactgaaggttgtcacatcttcccaagccaggccagccaggagcgctgcatgcaaattctgccgtgggctaaggcacgctaaccagagccggcggcatggacttcgtcatgaagcaggcccttggaggggccacaaaggacatggggaagatgctggggggagaggaggagaaggaccccgacgcgcagaaaaaggaggaggagcggcaggaggcgctgcggcagcaggaggaggagcgtaaggccaagcacgcgcgcatggaggcggagcgggagaaggtccggcagcagatccgagataagtatgggctgaagaagaaggaggagaa

SEQ ID NO: 6693 - DNA, 557 bp, Homo sapiens
  source 1..557: mol_type = unassigned DNA
agctggaggcggggagagccttgatcaaagtcaggcaggggagcacagcggcttcctgacgctggacccaggtggggacagagcggccctgtgaagtcaaagagaatgttgctttgttcagctctcactgggaaaggttgtcacatcttcccaagccaggccagccaggagcgctgcatgcaaattctgccgtgggctaaggcacgctaaccagagccggcggcatggacttcgtcatgaagcaggcccttggaggggccacaaaggacatggggaagatgctggggggagaggaggagaaggaccccgacgcgcagaaaaaggaggaggagcggcaggaggcgctgcggcagcaggaggaggagcgtaaggccaagcacgcgcgcatggaggcggagcgggagaaggtccggcagcagatccgagataagtatgggctgaagaagaaggaggagaaggaagcagaggagaaagcagccctggagcagccctgcgaggggagcctgacccggcccaagaaggccatccctgcgggctgcggggacgaggaggaggag

SEQ ID NO: 6694 - DNA, 970 bp, Homo sapiens
  source 1..970: mol_type = unassigned DNA
agtggctcagacggttgcagggaccgccaggtcggtgctggccgagggccgggagggcggagctgggctgtgggcaacagggtcccggctctcgcctcgaggccttggggcagctcgggaagctggggagcacggctttcggggggacagctccccaaggctgcctgggcaccggatggggactgagaggcggtaaaggggacactcccgggtgcgctctccgtggtgctgaaaggacagctccttgcgaggggccgcgagcaggcagctagctgcgaactaagaggaagcgtgggccctagccggagactccgggcagagcccgaacggccggggtcccggagccaggaccgccccggctgcggcggagactcaagtctgaacccagagaacaactttgagctcgcgggagtgggggacgtcgatctaagctacttctggctgtgcttaacccgaagcccgccggagcacgcttcgccccggaggagggagtcgcccccaggggtacagtgcgcactcccggagttgtcacatcttcccaagccaggccagccaggagcgctgcatgcaaattctgccgtgggctaaggcacgctaaccagagccggcggcatggacttcgtcatgaagcaggcccttggaggggccacaaaggacatggggaagatgctggggggagaggaggagaaggaccccgacgcgcagaaaaaggaggaggagcggcaggaggcgctgcggcagcaggaggaggagcgtaaggccaagcacgcgcgcatggaggcggagcgggagaaggtccggcagcagatccgagataagtatgggctgaagaagaaggaggagaaggaagcagaggagaaagcagccctggagcagccctgcgaggggagcctgacccggcccaagaaggccatccctgcgggctgcggggacgaggaggaggaggaagaggagagcatcctggacacgg

SEQ ID NO: 6695 - DNA, 567 bp, Homo sapiens
  source 1..567: mol_type = unassigned DNA
aatctccgccggagccggggaaaggtggcattgccatttctctcttagagaggaggaaactggggactcgagcaggttagggccttgctgaaggtcccatggcaaataaggaaatgacggtggcgttggaaaccagatctgcctgactccaagttccaggctctttccaatgctcctggcttcaatcaaatctgaacaatagggtcaagatgaaggctttaaaatagggaccaaaccgctttcaaaaagctatttggcagcacctacgtgtctgcccagtaaatcgctctcttccatctcctttctcctccagcagggcattgggtcttgacctcagagcgatgggtgcctggtgtctgaaccagggttgtcacatcttcccaagccaggccagccaggagcgctgcatgcaaattctgccgtgggctaaggcacgctaaccagagccggcggcatggacttcgtcatgaagcaggcccttggaggggccacaaaggacatggggaagatgctggggggagaggaggagaaggaccccgacgcgcagaaaaaggaggaggagcggca

SEQ ID NO: 6696 - DNA, 576 bp, Homo sapiens
  source 1..576: mol_type = unassigned DNA
aatctccgccggagccggggaaaggtggcattgccatttctctcttagagaggaggaaactggggactcgagcaggttgtcacatcttcccaagccaggccagccaggagcgctgcatgcaaattctgccgtgggctaaggcacgctaaccagagccggcggcatggacttcgtcatgaagcaggcccttggaggggccacaaaggacatggggaagatgctggggggagaggaggagaaggaccccgacgcgcagaaaaaggaggaggagcggcaggaggcgctgcggcagcaggaggaggagcgtaaggccaagcacgcgcgcatggaggcggagcgggagaaggtccggcagcagatccgagataagtatgggctgaagaagaaggaggagaaggaagcagaggagaaagcagccctggagcagccctgcgaggggagcctgacccggcccaagaaggccatccctgcgggctgcggggacgaggaggaggaggaagaggagagcatcctggacacggtgctcaaatacctgcccgggccgctgcaggacatgttcaagaagtaaccaggcct

SEQ ID NO: 6697 - DNA, 469 bp, Homo sapiens
  source 1..469: mol_type = unassigned DNA
cgggcgccctcgtcggccgcggaggagctgcagcctccaacagaagggaaaacggacacctgtggaggggaagaaacgtgtccaagatcattcacacagagcgtcagctctggggtcagaacccagctcccaaggctttccgtgtccagaccacctccctcacctggttggccagcctccacctgatgagccgggcaggctgcaagtggcaagttccctgggaaggtgtggtccctgccatgctatctgctctgctcagcgactgaaggtgcccgcatcccagctctgccaggaagcaaagttacagatgagaaaactgaagctcagagagtgaaaggacttgcctaaagacacacagctggttgtcacatcttcccaagccaggccagccaggagcgctgcatgcaaattctgccgtgggctaaggcacgctaaccagagccggcggcatggacttcgtcatgaagca

SEQ ID NO: 6698 - DNA, 3035 bp, Homo sapiens
  source 1..3035: mol_type = unassigned DNA
ggcgtaggtagatcgccgggggctgacgagtgcaccatggccaccgcggcaacctcacccgcgctgaagcggctggatctgcgcgaccctgcggctcttttcgagacgcatggagcggaggagatccgcgggctggagcgccaggttcgggccgagatcgagcacaagaaggaggagctgcggcagatggtgggcgaacggtaccgcgacctgatcgaggcggccgacaccatcggccagatgcgccgctgcgccgtggggctagtggacgccgtgaaggccaccgaccagtactgcgcccgcctccgccaggccggctcggccgcgccccggccaccgcgggcccagcagccacagcagccatcccaggagaagttctacagcatggctgcccagatcaagctactcttagaaattccggagaagatctggagctcgatggaagcctctcagtgtctccacgccacacagctctacctgctctgctgccacctccacagcctgctccagctggattcttctagttcccgatacagtcccgtcctctcccggtttcctatactcatccggcaggtggcagccgccagccacttccggtcaactattctgcatgaaagcaagatgttgctcaaatgccaaggtgtgtctgaccaagctgtggccgaggccctgtgctctataatgctcttagaagagagttctcctcgccaagccctcacagacttcctgctggccagaaaggcaactattcagaaacttctcaaccagccacaccatggtgctggtatcaaggctcagatttgctcattagtggagttgctggccaccactctgaagcaagctcatgcccttttctacactttgccagaaggactgctgccagatccagccctgccatgtggcttgctcttctctactctggagaccatcacaggccagcatcctgccggaaagggcactggtgtcctgcaggaagagatgaaactctgcagctggtttaaacacctgccagcatccatcgtcgagttccagccaacactccgaacccttgcacatcccatcagtcaggaatacctgaaagacacgctgcagaaatggatccacatgtgtaatgaagacattaaaaatgggatcaccaacctgctcatgtacgtgaagagcatgaagggtctcgcgggaatccgggacgccatgtgggagttacttaccaatgagtccaccaatcacagctgggatgtgctatgtcggcggcttctggagaagccgctcttgttctgggaagatatgatgcagcaactgttccttgaccgattacagactctgacaaaagaaggctttgactccatctccagtagctccaaggagctcttggtttcagctttgcaggaacttgaaagcagcaccagcaactccccttcaaataagcacatccactttgagtacaacatgtcgctcttcctctggtctgagagtcctaatgacctgccttccgatgcggcctgggtcagcgtggcaaaccggggtcagtttgccagtagcggcctctccatgaaagcacaagccatcagcccttgtgtacagaacttctgttctgccctggattctaagctgaaggttaaactagatgacctcctggcttacctcccctctgatgactcatcactgcccaaggacgtttctcccacacaggccaagagttctgcctttgacagatacgcagatgcggggaccgtgcaggagatgctgcggactcagtccgtggcatgcatcaagcacatcgtggactgcatccgggcagagctacagagcattgaagagggtgtgcaagggcaacaggatgccctcaacagtgccaagctgcactcagttcttttcatggccagactctgccagtccctgggagagctgtgcccccatctgaagcagtgcatcctgggaaaatcagagagctcagagaaaccagcaagggagtttagggctctgagaaaacagggaaaggtgaaaactcaggaaatcattcctacacaggccaagtggcaagaggttaaagaagtactcctccagcagagcgtgatgggctaccaggtctggagcagtgcagttgtgaaagttttgattcatggattcacccagtcattacttctagatgatgctggctcagttctggccacagccaccagctgggatgagctagaaattcaggaggaggcagagtctggcagcagtgtcacatccaagatccgactccctgcacagccgtcctggtatgtacagtccttcctgtttagtttatgccaggaaattaatcgggttggaggccatgccttgccaaaggtgacattacaggagatgctgaaaagctgtatggttcaagtagtagctgcctatgagaaactctccgaagaaaaacagattaagaaagaaggtgcatttccagtcacccagaaccgggcgctgcagctgctttatgatctgcgttacctcaacattgttctgacagccaagggtgacgaggtgaagagtggccggagcaagccagactccagaattgagaaagtgactgaccacctggaagccctcattgatccatttgacctggacgttttcacgccacacctcaacagcaaccttcatcgcctggtgcagcgaacttctgttctgtttggattggtgactggtacagagaatcagctcgccccccggagcagtacgttcaactcccaagaaccccataacatcctgccactggcatccagtcagatcaggtttggacttctcccactgagcatgacaagcactcgaaaggctaaatcaaccagaaacatcgaaacaaaagctcaggttgtccccccggcacgctccacagctggtgacccgacagttcctggctccttgttcagacagcttgtcagtgaagaagacaacacgtctgcaccttcattattcaaacttggctggctctctagtatgactaagtaacatggcaacacatctgtctctccctaaataaatactaccacattatttcttctaaa

SEQ ID NO: 6699 - DNA, 3369 bp, Homo sapiens
  source 1..3369: mol_type = unassigned DNA
gcggctgcgcctgcgccaacgccgtcagtccgcggggcccgatcccgacacctaactccacagagaagctctgctcctaagggaaagggaagacttcagccacagtttcgcagccaacctggcgacctcacctctctggcgacctcacttcccagccggctccgtttaagaaaaccccgcgcaggaccgcgcccgcccccgccccctcgcgcccgccccctcgggtaacaaacatggcccccggcggggcggaagcgcttccgcccccaacgaagatggcggagggggcgggactaaaagggcgtaggtagatcgccgggggctgacgagtgcaccatggccaccgcggcaacctcacccgcgctgaagcggctggatctgcgcgaccctgcggctcttttcgagacgcatggagcggaggagatccgcgggctggagcgccaggttcgggccgagatcgagcacaagaaggaggagctgcggcagatggtgggcgaacggtaccgcgacctgatcgaggcggccgacaccatcggccagatgcgccgctgcgccgtggggctagtggacgccgtgaaggccaccgaccagtactgcgcccgcctccgccaggccggctcggccgcgccccggccaccgcgggcccagcagccacagcagccatcccaggagaagttctacagcatggctgcccagatcaagctactcttagaaattccggagaagatctggagctcgatggaagcctctcagtgtctccacgccacacagctctacctgctctgctgccacctccacagcctgctccagctggattcttctagttcccgatacagtcccgtcctctcccggtttcctatactcatccggcaggtggcagccgccagccacttccggtcaactattctgcatgaaagcaagatgttgctcaaatgccaaggtgtgtctgaccaagctgtggccgaggccctgtgctctataatgctcttagaagagagttctcctcgccaagccctcacagacttcctgctggccagaaaggcaactattcagaaacttctcaaccagccacaccatggtgctggtatcaaggctcagatttgctcattagtggagttgctggccaccactctgaagcaagctcatgcccttttctacactttgccagaaggactgctgccagatccagccctgccatgtggcttgctcttctctactctggagaccatcacaggccagcatcctgccggaaagggcactggtgtcctgcaggaagagatgaaactctgcagctggtttaaacacctgccagcatccatcgtcgagttccagccaacactccgaacccttgcacatcccatcagtcaggaatacctgaaagacacgctgcagaaatggatccacatgtgtaatgaagacattaaaaatgggatcaccaacctgctcatgtacgtgaagagcatgaagggtctcgcgggaatccgggacgccatgtgggagttacttaccaatgagtccaccaatcacagctgggatgtgctatgtcggcggcttctggagaagccgctcttgttctgggaagatatgatgcagcaactgttccttgaccgattacagactctgacaaaagaaggctttgactccatctccagtagctccaaggagctcttggtttcagctttgcaggaacttgaaagcagcaccagcaactccccttcaaataagcacatccactttgagtacaacatgtcgctcttcctctggtctgagagtcctaatgacctgccttccgatgcggcctgggtcagcgtggcaaaccggggtcagtttgccagtagcggcctctccatgaaagcacaagccatcagcccttgtgtacagaacttctgttctgccctggattctaagctgaaggttaaactagatgacctcctggcttacctcccctctgatgactcatcactgcccaaggacgtttctcccacacaggccaagagttctgcctttgacagatacgcagatgcggggaccgtgcaggagatgctgcggactcagtccgtggcatgcatcaagcacatcgtggactgcatccgggcagagctacagagcattgaagagggtgtgcaagggcaacaggatgccctcaacagtgccaagctgcactcagttcttttcatggccagactctgccagtccctgggagagctgtgcccccatctgaagcagtgcatcctgggaaaatcagagagctcagagaaaccagcaagggagtttagggctctgagaaaacagggaaaggtgaaaactcaggaaatcattcctacacaggccaagtggcaagaggttaaagaagtactcctccagcagagcgtgatgggctaccaggtctggagcagtgcagttgtgaaagttttgattcatggattcacccagtcattacttctagatgatgctggctcagttctggccacagccaccagctgggatgagctagaaattcaggaggaggcagagtctggcagcagtgtcacatccaagatccgactccctgcacagccgtcctggtatgtacagtccttcctgtttagtttatgccaggaaattaatcgggttggaggccatgccttgccaaaggtgacattacaggagatgctgaaaagctgtatggttcaagtagtagctgcctatgagaaactctccgaagaaaaacagattaagaaagaaggtgcatttccagtcacccagaaccgggcgctgcagctgctttatgatctgcgttacctcaacattgttctgacagccaagggtgacgaggtgaagagtggccggagcaagccagactccagaattgagaaagtgactgaccacctggaagccctcattgatccatttgacctggacgttttcacgccacacctcaacagcaaccttcatcgcctggtgcagcgaacttctgttctgtttggattggtgactggtacagagaatcagctcgccccccggagcagtacgttcaactcccaagaaccccataacatcctgccactggcatccagtcagatcaggtttggacttctcccactgagcatgacaagcactcgaaaggctaaatcaaccagaaacatcgaaacaaaagctcagtacgatgccaactgttaagcctgcaggaatcctcctgggttgtccccccggcacgctccacagctggtgacccgacagttcctggctccttgttcagacagcttgtcagtgaagaagacaacacgtctgcaccttcattattcaaacttggctggctctctagtatgactaagtaacatggcaacacatctgtctctccctaaataaatactaccacattatttcttc

SEQ ID NO: 6700 - DNA, 2843 bp, Homo sapiens
  source 1..2843: mol_type = unassigned DNA
ctcgcttggatcttggcactgagaggcggtggccggcgggatggagaaaagtaggatgaacctgcccaaggggccggacacgctctgcttcgacaaggacgagttcatgaaggaagatttcgatgtcgatcattttgtgtctgactgtaggaagcgggtccagctggaagaactgagagatgacctggagctctactataaacttcttaaaacagccatggtcgaactcatcaacaaggattatgcagattttgtcaatctttcaacaaacttggttggcatggacaaagccctcaaccagctttctgtgcctttgggacaattacgagaagaggttctgagccttagatcgtctgtcagtgaaggaattcgggcagttgatgaacgaatgtctaaacaagaggacattaggaaaaaaaagatgtgtgtattgaggcttatacaagttattcggtcagttgagaaaattgaaaaaatcttaaactctcaaagttctaaagaaacctctgcactagaagcaagcagcccccttttgactggacaaattttggagagaattgccacagaatttaatcagttacagtttcatgctgttcaaagcaaaggcatgcctcttttggacaaagtaagaccgcgtatagctggcattacagccatgttacagcagtcactggaaggtctcctattagaaggccttcagacgtctgacgtcgatataatacggcactgcttgcggacttacgccacgattgacaagacacgggacgcggaggccttagttggccaagtactagtgaaaccatacatagacgaggtgattatagagcagtttgttgaatctcatcccaatggccttcaggtcatgtataataaactcctggagtttgttcctcaccattgccgccttcttcgagaagtcacaggaggtgccatctccagtgaaaaaggcaatactgttcctggatatgactttttggtgaattctgtttggccacaaatagtacaaggattagaagaaaagttaccctcgctttttaatcctgggaatcccgatgcatttcatgagaaatataccataagtatggattttgtcagaagattggaacggcagtgtggatcacaggctagtgtaaagagattaagagcccatcctgcctatcacagcttcaataagaagtggaacttgcctgtttattttcaaataagatttagagaaatagcgggatccttagaagcagcacttacagatgtcctggaagatgccccagctgaaagtccgtattgccttttggcttctcatagaacttggagcagccttaggaggtgttggtcagatgagatgttcttgccattactggtgcatcgcctgtggagactcactctgcagattttggcacgatactctgtgtttgtcaatgagctttcactcaggcccatttctaatgaaagtcccaaggagatcaagaaacctttggtaactggtagcaaagaaccttccatcacccaaggaaacactgaagaccaaggaagtggtccttcggaaacaaagcctgtggtttccatttcccgcactcagctcgtgtatgtggttgcagacctggacaagcttcaggagcagcttccagaactcttggaaataatcaagccaaaacttgaaatgattggctttaagaatttttcttctatctcagccctggaggactcccagagctctttttcagcctgtgtgccctccttgagtagcaagatcatccaggatttaagtgactcttgcttcggtttcctaaaaagcgccctggaggttcccaggctttaccgaagaaccaataaggaggtcccaaccacagcttcctcctatgtggacagtgctctgaagcccttattccagcttcagagcggacacaaggataagctcaaacaagcaataattcagcagtggctagaaggcactctcagtgaaagcactcataagtactatgaaaccgtgtcagatgtattaaactctgtgaagaagatggaagagagcctgaaaaggctgaaacaagccagaaaaaccactcccgccaaccccgtcggtcccagtggtggcatgagcgacgacgacaaaatcaggctgcagttggccctagatgttgagtacttgggagagcagatacaaaagttgggactacaagcaagtgacataaaaagcttctcagctctcgcagagcttgttgctgctgccaaggaccaggcaacagcagagcagccttaagcatcttggaagatcccgaggttagattcttaagcaagagaagagttggacttccaggctgaaggggagaaagtgactctgttctcttagcaaccgtctgtagcaaagaagtgcttccagcatcactccagcaacacgcccatgcgtcttctctcagcgtatttgggtcttctttgcccaaaagaacacaaaagcctttttccattgtatggaagatagtttttaagacatttgaaactttctactatagtttacagaacaaattattttatttttattgtaaatcttagtgtggaagagctgatttctaaaatatgattaaagtaaatatatacctatgaatatcaagagtcgtctccctgagcctgtagttggaagtgacgactgtaatggaatgatgtcttgtatagaaatgcccttctctgaaataaagagaactcctgggctttctaaagaggctgcgggaagccatcctccactcccactgtgtgtgagagcagtgcttctgatcctgctgtcaccccgacctctggcaggagccggcgccagtaggaaagacctccttcctaaataaaagaagtgtctccca

SEQ ID NO: 6701 - DNA, 2921 bp, Homo sapiens
  source 1..2921: mol_type = unassigned DNA
agcggacccccctgtgccgtggaaactggcggtggccgcggccgccgagtcggtctgcgcagcctcctgcgttttctcgcttggatcttggcactgagaggcggtggccggcgggatggagaaaagtaggatgaacctgcccaaggggccggacacgctctgcttcgacaaggacgagttcatgaaggaagatttcgatgtcgatcattttgtgtctgactgtaggaagcgggtccagctggaagaactgagagatgacctggagctctactataaacttcttaaaacagccatggtcgaactcatcaacaaggattatgcagattttgtcaatctttcaacaaacttggttggcatggacaaagccctcaaccagctttctgtgcctttgggacaattacgagaagaggttctgagccttagatcgtctgtcagtgaaggaattcgggcagttgatgaacgaatgtctaaacaagaggacattaggaaaaaaaagatgtgtgtattgaggcttatacaagttattcggtcagttgagaaaattgaaaaaatcttaaactctcaaagttctaaagaaacctctgcactagaagcaagcagcccccttttgactggacaaattttggagagaattgccacagaatttaatcagttacagtttcatgctgttcaaagcaaaggcatgcctcttttggacaaagtaagaccgcgtatagctggcattacagccatgttacagcagtcactggaaggtctcctattagaaggccttcagacgtctgacgtcgatataatacggcactgcttgcggacttacgccacgattgacaagacacgggacgcggaggccttagttggccaagtactagtgaaaccatacatagacgaggtgattatagagcagtttgttgaatctcatcccaatggccttcaggtcatgtataataaactcctggagtttgttcctcaccattgccgccttcttcgagaagtcacaggaggtgccatctccagtgaaaaaggcaatactgttcctggatatgactttttggtgaattctgtttggccacaaatagtacaaggattagaagaaaagttaccctcgctttttaatcctgggaatcccgatgcatttcatgagaaatataccataagtatggattttgtcagaagattggaacggcagtgtggatcacaggctagtgtaaagagattaagagcccatcctgcctatcacagcttcaataagaagtggaacttgcctgtttattttcaaataagatttagagaaatagcgggatccttagaagcagcacttacagatgtcctggaagatgccccagctgaaagtccgtattgccttttggcttctcatagaacttggagcagccttaggaggtgttggtcagatgagatgttcttgccattactggtgcatcgcctgtggagactcactctgcagattttggcacgatactctgtgtttgtcaatgagctttcactcaggcccatttctaatgaaagtcccaaggagatcaagaaacctttggtaactggtagcaaagaaccttccatcacccaaggaaacactgaagaccaaggaagtggtccttcggaaacaaagcctgtggtttccatttcccgcactcagctcgtgtatgtggttgcagacctggacaagcttcaggagcagcttccagaactcttggaaataatcaagccaaaacttgaaatgattggctttaagaatttttcttctatctcagcagccctggaggactcccagagctctttttcagcctgtgtgccctccttgagtagcaagatcatccaggatttaagtgactcttgcttcggtttcctaaaaagcgccctggaggttcccaggctttaccgaagaaccaataaggaggtcccaaccacagcttcctcctatgtggacagtgctctgaagcccttattccagcttcagagcggacacaaggataagctcaaacaagcaataattcagcagtggctagaaggcactctcagtgaaagcactcataagtactatgaaaccgtgtcagatgtattaaactctgtgaagaagatggaagagagcctgaaaaggctgaaacaagccagaaaaaccactcccgccaaccccgtcggtcccagtggtggcatgagcgacgacgacaaaatcaggctgcagttggccctagatgttgagtacttgggagagcagatacaaaagttgggactacaagcaagtgacataaaaagcttctcagctctcgcagagcttgttgctgctgccaaggaccaggcaacagcagagcagccttaagcatcttggaagatcccgaggttagattcttaagcaagagaagagttggacttccaggctgaaggggagaaagtgactctgttctcttagcaaccgtctgtagcaaagaagtgcttccagcatcactccagcaacacgcccatgcgtcttctctcagcgtatttgggtcttctttgcccaaaagaacacaaaagcctttttccattgtatggaagatagtttttaagacatttgaaactttctactatagtttacagaacaaattattttatttttattgtaaatcttagtgtggaagagctgatttctaaaatatgattaaagtaaatatatacctatgaatatcaagagtcgtctccctgagcctgtagttggaagtgacgactgtaatggaatgatgtcttgtatagaaatgcccttctctgaaataaagagaactcctgggctttctaaagaggctgcgggaagccatcctccactcccactgtgtgtgagagcagtgcttctgatcctgctgtcaccccgacctctggcaggagccggcgccagtaggaaagacctccttcctaaataaaagaagtgtctccca

SEQ ID NO: 6702 - DNA, 2963 bp, Homo sapiens
  source 1..2963: mol_type = unassigned DNA
gcacttcgcaatgagtcttttggcgtcaggtttggcgggtgcagcctggagaaagcacttctgtaaaatcgtgcgtgttacatggaaaggcctgaaagttctgggcaagtggttttgagctgcatgtcaaagccactgttacccgttcctgttaccatgcagtgcagtcagattgccagtccccttgtcggaaagaagcttgtggaccggggccttggagctcattaagtgaagatttcgatgtcgatcattttgtgtctgactgtaggaagcgggtccagctggaagaactgagagatgacctggagctctactataaacttcttaaaacagccatggtcgaactcatcaacaaggattatgcagattttgtcaatctttcaacaaacttggttggcatggacaaagccctcaaccagctttctgtgcctttgggacaattacgagaagaggttctgagccttagatcgtctgtcagtgaaggaattcgggcagttgatgaacgaatgtctaaacaagaggacattaggaaaaaaaagatgtgtgtattgaggcttatacaagttattcggtcagttgagaaaattgaaaaaatcttaaactctcaaagttctaaagaaacctctgcactagaagcaagcagcccccttttgactggacaaattttggagagaattgccacagaatttaatcagttacagtttcatgctgttcaaagcaaaggcatgcctcttttggacaaagtaagaccgcgtatagctggcattacagccatgttacagcagtcactggaaggtctcctattagaaggccttcagacgtctgacgtcgatataatacggcactgcttgcggacttacgccacgattgacaagacacgggacgcggaggccttagttggccaagtactagtgaaaccatacatagacgaggtgattatagagcagtttgttgaatctcatcccaatggccttcaggtcatgtataataaactcctggagtttgttcctcaccattgccgccttcttcgagaagtcacaggaggtgccatctccagtgaaaaaggcaatactgttcctggatatgactttttggtgaattctgtttggccacaaatagtacaaggattagaagaaaagttaccctcgctttttaatcctgggaatcccgatgcatttcatgagaaatataccataagtatggattttgtcagaagattggaacggcagtgtggatcacaggctagtgtaaagagattaagagcccatcctgcctatcacagcttcaataagaagtggaacttgcctgtttattttcaaataagatttagagaaatagcgggatccttagaagcagcacttacagatgtcctggaagatgccccagctgaaagtccgtattgccttttggcttctcatagaacttggagcagccttaggaggtgttggtcagatgagatgttcttgccattactggtgcatcgcctgtggagactcactctgcagattttggcacgatactctgtgtttgtcaatgagctttcactcaggcccatttctaatgaaagtcccaaggagatcaagaaacctttggtaactggtagcaaagaaccttccatcacccaaggaaacactgaagaccaaggaagtggtccttcggaaacaaagcctgtggtttccatttcccgcactcagctcgtgtatgtggttgcagacctggacaagcttcaggagcagcttccagaactcttggaaataatcaagccaaaacttgaaatgattggctttaagaatttttcttctatctcagcagccctggaggactcccagagctctttttcagcctgtgtgccctccttgagtagcaagatcatccaggatttaagtgactcttgcttcggtttcctaaaaagcgccctggaggttcccaggctttaccgaagaaccaataaggaggtcccaaccacagcttcctcctatgtggacagtgctctgaagcccttattccagcttcagagcggacacaaggataagctcaaacaagcaataattcagcagtggctagaaggcactctcagtgaaagcactcataagtactatgaaaccgtgtcagatgtattaaactctgtgaagaagatggaagagagcctgaaaaggctgaaacaagccagaaaaaccactcccgccaaccccgtcggtcccagtggtggcatgagcgacgacgacaaaatcaggctgcagttggccctagatgttgagtacttgggagagcagatacaaaagttgggactacaagcaagtgacataaaaagcttctcagctctcgcagagcttgttgctgctgccaaggaccaggcaacagcagagcagccttaagcatcttggaagatcccgaggttagattcttaagcaagagaagagttggacttccaggctgaaggggagaaagtgactctgttctcttagcaaccgtctgtagcaaagaagtgcttccagcatcactccagcaacacgcccatgcgtcttctctcagcgtatttgggtcttctttgcccaaaagaacacaaaagcctttttccattgtatggaagatagtttttaagacatttgaaactttctactatagtttacagaacaaattattttatttttattgtaaatcttagtgtggaagagctgatttctaaaatatgattaaagtaaatatatacctatgaatatcaagagtcgtctccctgagcctgtagttggaagtgacgactgtaatggaatgatgtcttgtatagaaatgcccttctctgaaataaagagaactcctgggctttctaaagaggctgcgggaagccatcctccactcccactgtgtgtgagagcagtgcttctgatcctgctgtcaccccgacctctggcaggagccggcgccagtaggaaagacctccttcctaaataaaagaagtgtctccc

SEQ ID NO: 6703 - DNA, 2784 bp, Homo sapiens
  source 1..2784: mol_type = unassigned DNA
gtgccgtggaaactggcggtggccgcggccgccgagtcggtctgcgcagcctcctgcgttttctcgcttggatcttggcactgagaggcggtggccggcgggatggagaaaagtaggatgaacctgcccaaggggccggacacgctctgcttcgacaaggacgagttcatgaaggaagatttcgatgtcgatcattttgtgtctgactgtaggaagcgggtccagctggaagaactgagagatgacctggagctctactataaacttcttaaaacagccatggtcgaactcatcaacaaggattatgcagattttgtcaatctttcaacaaacttggttggcatggacaaagccctcaaccagctttctgtgcctttgggacaattacgagaagaggttctgataatgtctgctgtgagttgggactccccatgtctaagccattggagacagggactccatccggatgaacagtagagaagggagttttggcatcattttcaacagaaaagtgtgctaccctgtcctgtccctgctggtccaccccacagtctgtgtcaggcaccccgacttccatgctgtcttaggattgatgaactgtcataaacttcgttgattgcaccattattacctgtagccttagatcgtctgtcagtgaaggaattcgggcagttgatgaacgaatgtctaaacaagaggacattaggaaaaaaaagatgtgtgtattgaggcttatacaagttattcggtcagttgagaaaattgaaaaaatcttaaactctcaaagttctaaagaaacctctgcactagaagcaagcagcccccttttgactggacaaattttggagagaattgccacagaatttaatcagttacagtttcatgctgttcaaagcaaaggcatgcctcttttggacaaagtaagaccgcgtatagctggcattacagccatgttacagcagtcactggaaggtctcctattagaaggccttcagacgtctgacgtcgatataatacggcactgcttgcggacttacgccacgattgacaagacacgggacgcggaggccttagttggccaagtactagtgaaaccatacatagacgaggtgattatagagcagtttgttgaatctcatcccaatggccttcaggtcatgtataataaactcctggagtttgttcctcaccattgccgccttcttcgagaagtcacaggaggtgccatctccagtgaaaaaggcaatactgttcctggatatgactttttggtgaattctgtttggccacaaatagtacaaggattagaagaaaagttaccctcgctttttaatcctgggaatcccgatgcatttcatgagaaatataccataagtatggattttgtcagaagattggaacggcagtgtggatcacaggctagtgtaaagagattaagagcccatcctgcctatcacagcttcaataagaagtggaacttgcctgtttattttcaaataagatttagagaaatagcgggatccttagaagcagcacttacagatgtcctggaagatgccccagctgaaagtccgtattgccttttggcttctcatagaacttggagcagccttaggaggtgttggtcagatgagatgttcttgccattactggtgcatcgcctgtggagactcactctgcagattttggcacgatactctgtgtttgtcaatgagctttcactcaggcccatttctaatgaaagtcccaaggagatcaagaaacctttggtaactggtagcaaagaaccttccatcacccaaggaaacactgaagaccaaggaagtggtccttcggaaacaaagcctgtggtttccatttcccgcactcagctcgtgtatgtggttgcagacctggacaagcttcaggagcagcttccagaactcttggaaataatcaagccaaaacttgaaatgattggctttaagaatttttcttctatctcagcagccctggaggactcccagagctctttttcagcctgtgtgccctccttgagtagcaagatcatccaggatttaagtgactcttgcttcggtttcctaaaaagcgccctggaggttcccaggctttaccgaagaaccaataaggaggtcccaaccacagcttcctcctatgtggacagtgctctgaagcccttattccagcttcagagcggacacaaggataagctcaaacaagcaataattcagcagtggctagaaggcactctcagtgaaagcactcataagtactatgaaaccgtgtcagatgtattaaactctgtgaagaagatggaagagagcctgaaaaggctgaaacaagccagaaaaaccactcccgccaaccccgtcggtcccagtggtggcatgagcgacgacgacaaaatcaggctgcagttggccctagatgttgagtacttgggagagcagatacaaaagttgggactacaagcaagtgacataaaaagcttctcagctctcgcagagcttgttgctgctgccaaggaccaggcaacagcagagcagccttaagcatcttggaagatcccgaggttagattcttaagcaagagaagagttggacttccaggctgaaggggagaaagtgactctgttctcttagcaaccgtctgtagcaaagaagtgcttccagcatcactccagcaacacgcccatgcgtcttctctcagcgtatttgggtcttctttgcccaaaagaacacaaaagcctttttccattgtatggaagatagtttttaagacatt

SEQ ID NO: 6704 - DNA, 1400 bp, Homo sapiens
  source 1..1400: mol_type = unassigned DNA
agaacatgagcactgccatttaaagagcaccagacttagagtgcctgggtctcagatgggctttgccatggaagacacggaagacatatcacagaaccactttgggcatttatgtatctttaaatggggacattggaagaaagatcttaaatataccataagtatggattttgtcagaagattggaacggcagtgtggatcacaggctagtgtaaagagattaagagcccatcctgcctatcacagcttcaataagaagtggaacttgcctgtttattttcaaataagatttagagaaatagcgggatccttagaagcagcacttacagatgtcctggaagatgccccagctgaaagtccgtattgccttttggcttctcatagaacttggagcagccttaggaggtgttggtcagatgagatgttcttgccattactggtgcatcgcctgtggagactcactctgcagattttggcacgatactctgtgtttgtcaatgagctttcactcaggcccatttctaatgaaagtcccaaggagatcaagaaacctttggtaactggtagcaaagaaccttccatcacccaaggaaacactgaagaccaaggaagtggtccttcggaaacaaagcctgtggtttccatttcccgcactcagctcgtgtatgtggttgcagacctggacaagcttcaggagcagcttccagaactcttggaaataatcaagccaaaacttgaaatgattggctttaagaatttttcttctatctcagcagccctggaggactcccagagctctttttcagcctgtgtgccctccttgagtagcaagatcatccaggatttaagtgactcttgcttcggtttcctaaaaagcgccctggaggttcccaggctttaccgaagaaccaataaggaggtcccaaccacagcttcctcctatgtggacagtgctctgaagcccttattccagcttcagagcggacacaaggataagctcaaacaagcaataattcagcagtggctagaaggcactctcagtgaaagcactcataagtactatgaaaccgtgtcagatgtattaaactctgtgaagaagatggaagagagcctgaaaaggctgaaacaagccagaaaaaccactcccgccaaccccgtcggtcccagtggtggcatgagcgacgacgacaaaatcaggctgcagttggccctagatgttgagtacttgggagagcagatacaaaagttgggactacaagcaagtgacataaaaagcttctcagctctcgcagagcttgttgctgctgccaaggaccaggcaacagcagagcagccttaagcatcttggaagatcccgaggttagattcttaagcaagagaagagttggacttccaggctg

SEQ ID NO: 6705 - DNA, 4498 bp, Homo sapiens
  source 1..4498: mol_type = unassigned DNA
gccccgccgccggtgcagtgttggaagctccggttctcccggaagtggcccaggtctctctgtcggggtcccctccatctcgctgctgctgaaggccgcgagggcggcggcgatggcggaggcggcgctgttgctgctgcctgaggcggcggcggagcgggacgctagggaaaagctggctctctgggatcggagaccggacacgacggcgccgctgaccgacaggcagacggactcggtattggagctgaaggcggcggcagagaacttgccggtgccagctgagcttccaattgaagacttgtgcagtttaacatcccagtcactgcccattgaactgacttcagtagtgcctgaatctacagaagacattctcttgaagggcttcacttccttaggaatggaagaagaaagaattgaaaccgcacagcagtttttctcatggtttgcaaagctgcaaactcagatggatcaagatgaaggaactaaatatagacagatgagggattacttgtctgggtttcaggagcagtgtgatgctatattgaatgatgtaaacagtgctcttcagcatctggagtctttgcagaaacagtatctttttgtgtccaataagacaggaaccctacatgaagcctgtgaacagctcctaaaagaacagtcggaacttgttgatctggctgaaaacattcaacaaaagctttcctattttaacgaattggaaactattaacacaaaattgaattcccctacattgtcggtgaatagtgacggatttatacctatgctggccaagttagatgattgtataacatatatctcatctcatcctaattttaaagattatcccatatatttgctgaagtttaaacagtgtctttctaaagctttgcacctcatgaagacatatactgtgaacacactacagaccctcacaagtcagttactgaaaagggatccttcatctgtacctaatgcagacaatgccttcacattattttatgtgaaatttcgagctgctgcccccaaagtcagaactcttattgaacaaatagaactgcggtctgaaaaaatacctgaataccaacaactgctaaatgatatccaccagtgttaccttgatcagcgggagctccttttgggccctagtattgcttgcactgttgcagagttaaccagccaaaataatagagatcactgtgccttggttcgtagtggctgtgccttcatggttcatgtctgccaggatgaacaccaactttacaatgaatttttcacaaaaccaacatcaaaattagatgagcttttggagaaactgtgtgtgtcattgtatgatgtcttcaggccattgatcattcatgttattcacttagagactctgtcggaactttgtgggattcttaaaaatgaggtgcttgaagatcatgtgcagaacaatgctgagcaactgggggcatttgcagctggagtcaagcagatgttagaagatgtacaggagcggctcgtctaccgaacccacatctatattcagacggacatcacgggctataaaccagctcctggagatctggcatatcccgataagttagtcatgatggagcagattgcacagagtttgaaagatgaacagaagaaggtaccttcagaagcttcattttcagatgttcacttagaagaaggagagtctaacagtctgacaaaatctggttcaacagaatccctcaatcctagaccacagaccacaatttctccagcagatcttcatggaatgtggtatcctacggttcgaagaactcttgtctgtctctccaaattatacagatgcatagatagggcagtgttccaaggattatcacaggaagcattgtctgcctgcattcagtccttacttggagcgtcagagtctatcagcaaaaacaagactcagattgatggacaacttttcttaattaagcaccttttgatacttcgtgaacaaattgctccatttcacactgaattcaccattaaggaaatttccctggacctcaagaaaactagagatgcagcatttaaaatcctgaaccctatgactgtcccaagattttttaggctgaatagcaacaatgccttgatagagttcttgttggagggtactcctgagataagagaacattatcttgactctaaaaaagacgtagaccgtcatctgaaatcggcctgtgagcagtttattcagcagcagaccaagctgtttgtagaacagctggaggagttcatgacaaaggtttcagcgttaaaaacaatggccagtcagggaggccccaagtatactctctcacagcagccttgggcacaaccagcaaaggtcaatgaccttgcggcaactgcatataagacaataaaaacaaagctgcctgtgacattgagaagtatgtccttgtacctatccaataaagataccgagttcatcttgtttaaacctgtgaggaataatattcagcaagtcttccagaagttccacgctctgttaaaggaagagttcagccctgaagacatccagatcattgcctgtccatctatggaacagctgagccttctgctgttggtttctaaataagcaggccagccgggctgtgcacctaaatgtctgtctgggaggagcaggctgagaagtcttgcagtctgcaggacaccgaggaatcgtatgtgggaacgtccccgagaaccacacgagcgtgctgctcagtgctgactgcagaatgaaatagaagcaaagtgttacaggatcagtgttttcttttctaaaacatcaaaatgccaaagattaatctgtgattggtgataactgcctcgtttaaatggtcacaagaaatgtgaagagagagctagggcagacatgcagtgaaatggttctttgttaaaaatgtgcaataaaaatagattacaataagtagtgcaaagaactttacagaaatcaagcgaattagaaggcctgtaagagtaaggtttgctaaaacgtgaaacactgtaacacttttaaccactgagcattccacagtgaaatgttatttctatgctcttatttaatgtaatgtttctcctgtcatttttgaagttgagtttggagtagattggttgcttctgagaacacattctgccttcctgggaagtcggggtgtcatcctttcctctgtttgatgtgaggtagtttaaagatacaaggactttgtgtgaagctccagcatctgtgccccttgaattgcttaggtgcagacagttctaaagcaaggagctgcagcattctcatcatagatacgtgcagtatctttaatgagtatcttcatggtatgatagtgtgtgtttgtgagtgcgaagtaccaattaaggtgtcttaaatttggcgcatagaggagagaaggaaacctgaggagtagtgttcctcctgaatgaaggttcaggtcaccagccttctgtacactgcctttggttttagcagttctttgaaaagcaaacactttcatgtcctgtctattcattcagctggctgtgctgtgctgtggaccagctgtgtggatctctagcccagctacagcagaatacattttaccagcaaacctaaggatgacaaacactatccacatctgaaaactaccacaccatatcagggatcataaattatgcatatctatgaattttccaacaaattcctacttcctgattggattggttttgccgctgatgttaaggcagccagcttcttagttcaaaaagaattctgagtttttcaaacactagtctagaggtggacattgtcaggggttctggaatgggaccaggggaccttttggtgcagtgggtgcctgtaactcattagacgtactgaggcagcacttctgcagggtgcataccctgattgttgtcatttgtaacaggtcacttccttttcactcagtttaaattggtgatggacgttgcttgattgagcttattactctctattttgagaaggtagaaggtaagagggcccatattcattctttgccatgaaatgaatgaattaggaagattgtatttacttaactgttttttaaatacatgtttaatgaaataaactgtaaaatatccagttttgtgtattatatgtacatttgatttttaatagcctttccaaagaaatgagggcatgattattgtacagtaagtacgtgactgatttaatttgatttacagagcggagtgtgttcttataaaaatatttaatgacattggttcttgtcttttgatcttttatttctgaaacactcaaacaccttacaaagtgctgagtaggtaatagtgacccaacttgtttgctaaatgattatttgtttaaatctgtacagttttaagtgttcacttatacaaagagtgtatatactttcaaataatttaaaatgctttatattatttggctagaaattgctgtttttaataaatgtgaattttttaaaaataaagatttttgcttcctaccttg

SEQ ID NO: 6706 - DNA, 2833 bp, Homo sapiens
  source 1..2833: mol_type = unassigned DNA
ctcgcgggaccggaagtgccgaatggggaccaagatggcggaccttgattcgcctccgaagctgtcaggggtgcagcagccgtctgagggggtgggaggtggccgctgctccgaaatctccgctgagctcattcgctccctgacagagctgcaggagctggaggctgtatacgaacggctctgcggcgaggagaaagtggtggagagagagctggatgctcttttggaacagcaaaacaccattgaaagtaagatggtcactctccaccgaatgggtcctaatctgcagctgattgagggagatgcaaagcagctggctggaatgatcacctttacctgcaacctggctgagaatgtgtccagcaaagttcgtcagcttgacctggccaagaaccgcctctatcaggccattcagagagctgatgacatcttggacctgaagttctgcatggatggagttcagactgctttgaggagtgaagattatgagcaggctgcagcacatactcatcgctacttgtgcctggacaagtcggtcattgagctcagccgacagggcaaagaggggagcatgattgatgccaacctgaaattgctgcaggaagctgagcaacgtctcaaagccattgtggcagagaagtttgccattgccaccaaggaaggtgatctgccccaggtggagcgcttcttcaagatcttcccactgctgggtttgcatgaggagggattaagaaagttctcggagtacctttgcaagcaggtggccagtaaagctgaggagaatctgctcatggtgctggggacagacatgagtgatcggagagctgcagtcatctttgcagatacacttactcttctgtttgaagggattgcccgcattgtggagacccaccagccaatagtggagacctattatgggccagggagactctataccctgatcaaatatctgcaggtggaatgtgacagacaggtggagaaggtggtagacaagttcatcaagcaaagggactaccaccagcagttccggcatgttcagaacaacctgatgagaaattctacaacagaaaaaatcgaaccaagagaactggaccccatcctgactgaggtcaccctgatgaatgcccgcagtgagctatacttacgcttcctcaagaagaggattagctctgattttgaggtgggagactccatggcctcagaggaagtaaagcaagagcaccagaagtgtctggacaaactcctcaataactgccttttgagctgtaccatgcaggagctaattggcttatatgttaccatggaggagtacttcatgagggagactgtcaataaggctgtggctctggacacctatgagaagggccagctgacatccagcatggtggatgatgtcttctacattgttaagaagtgcattgggcgggctctgtccagctccagcattgactgtctctgtgccatgatcaacctcgccaccacagagctggagtctgacttcagggatgttctgtgtaataagctgcggatgggctttcctgccaccaccttccaggacatccagcgcggggtgacaagtgccgtgaacatcatgcacagcagcctccagcaaggcaaatttgacacaaaaggcatcgagagtactgacgaggcgaagatgtccttcctggtgactctgaacaacgtggaagtctgcagtgaaaacatctccactctgaagaagacactggagagtgactgcaccaagctcttcagccagggcattggaggggagcaggcccaggccaagtttgacagctgcctttctgacttggccgccgtgtccaacaaattccgagacctcttgcaggaagggctgacggagctcaacagcacagccatcaagccacaggtgcagccttggatcaacagctttttctccgtctcccacaacatcgaggaggaagaattcaatgactatgaggccaacgacccttgggtacaacagttcatccttaacctggagcagcaaatggcagagttcaaggccagcctgtccccggtcatctacgacagcctaaccggcctcatgactagccttgttgccgtcgagttggagaaagtggtgctgaaatccacctttaaccggctgggtggtctgcagtttgacaaggagctgaggtcgctcattgcctaccttaccacggtgaccacctggaccatccgagacaagtttgcccggctctcccagatggccaccatcctcaatctggagcgggtgaccgagatcctcgattactggggacccaattccggcccattgacgtggcgcctcacccctgctgaagtgcgccaggtgctggccctgcggatagacttccgcagtgaagatatcaagaggctgcgcctgtagctgcctggatgagcacacctggctcatcacacttgcaggcctgttccctaaggggccccagccaaggagctgagcgaggctgtctggcttgggggagatctgacagcccagacctttctacggctggcagcagagaaacaaagtctggacccactccatgctctgccctcagacctggccaggtgatgctctgggggcagcatctccccaccgagagaagcgggctcctaatgaggtgggaaagccacggcaggcagcgagcagcccaggccagctttctgcatggatggtcagtctcttgccctcaaacactacagcaaacaagctacccctgccagtcctagacaacttgggtacatctggggacctagcagttaggcttgactttgaggagaggctgtgatgtttatgatccctgaataaagctactccttggagaga

SEQ ID NO: 6707 - DNA, 2734 bp, Homo sapiens
  source 1..2734: mol_type = unassigned DNA
aagatggcggaccttgattcgcctccgaagctgtcaggggtgcagcagccgtctgagggggtgggaggtggccgctgctccgaaatctccgctgagctcattcgctccctgacagagctgcaggagctggaggctgtatacgaacggctctgcggcgaggagaaagtggtggagagagagctggatgctcttttggaacagcaaaacaccattgaaagtaagatggtcactctccaccgaatgggtcctaatctgcagctgattgagggagatgcaaagcagctggctggaatgatcacctttacctgcaacctggctgagaatgtgtccagcaaagttcgtcagcttgacctggccaagaaccgcctctatcaggccattcagagagctgatgacatcttggacctgaagttctgcatggatggagttcagactgctttgaggagtgaagattatgagcaggctgcagcacatactcatcgctacttgtgcctggacaagtcggtcattgagctcagccgacagggcaaagaggggagcatgattgatgccaacctgaaattgctgcaggaagctgagcaacgtctcaaagccattgtggcagagaagtttgccattgccaccaaggaaggtgatctgccccaggtggagcgcttcttcaagatcttcccactgctgggtttgcatgaggagggattaagaaagttctcggagtacctttgcaagcaggtggccagtaaagctgaggagaatctgctcatggtgctggggacagacatgagtgatcggagagctgcagtcatctttgcagatacacttactcttctgtttgaagggattgcccgcattgtggagacccaccagccaatagtggagacctattatgggccagggagactctataccctgatcaaatatctgcaggtggaatgtgacagacaggtggagaaggtggtagacaagttcatcaagcaaagggactaccaccagcagttccggcatgttcagaacaacctgatgagaaattctacaacagaaaaaatcgaaccaagagaactggaccccatcctgactgaggtcaccctgatgaatgcccgcagtgagctatacttacgcttcctcaagaagaggattagctctgattttgaggtgggagactccatggcctcagaggaagtaaagcaagagcaccagaagtgtctggacaaactcctcaataactgccttttgagctgtaccatgcaggagctaattggcttatatgttaccatggaggagtacttcatgagggagactgtcaataaggctgtggctctggacacctatgagaagggccagctgacatccagcatggtggatgatgtcttctacattgttaagaagtgcattgggcgggctctgtccagctccagcattgactgtctctgtgccatgatcaacctcgccaccacagagctggagtctgacttcagggatgttctgtgtaataagctgcggatgggctttcctgccaccaccttccaggacatccagcgcggggtgacaagtgccgtgaacatcatgcacagcagcctccagcaaggcaaatttgacacaaaaggcatcgagagtactgacgaggcgaagatgtccttcctgagtgactgcaccaagctcttcagccagggcattggaggggagcaggcccaggccaagtttgacagctgcctttctgacttggccgccgtgtccaacaaattccgagacctcttgcaggaagggctgacggagctcaacagcacagccatcaagccacaggtgcagccttggatcaacagctttttctccgtctcccacaacatcgaggaggaagaattcaatgactatgaggccaacgacccttgggtacaacagttcatccttaacctggagcagcaaatggcagagttcaaggccagcctgtccccggtcatctacgacagcctaaccggcctcatgactagccttgttgccgtcgagttggagaaagtggtgctgaaatccacctttaaccggctgggtggtctgcagtttgacaaggagctgaggtcgctcattgcctaccttaccacggtgaccacctggaccatccgagacaagtttgcccggctctcccagatggccaccatcctcaatctggagcgggtgaccgagatcctcgattactggggacccaattccggcccattgacgtggcgcctcacccctgctgaagtgcgccaggtgctggccctgcggatagacttccgcagtgaagatatcaagaggctgcgcctgtagctgcctggatgagcacacctggctcatcacacttgcaggcctgttccctaaggggccccagccaaggagctgagcgaggctgtctggcttgggggagatctgacagcccagacctttctacggctggcagcagagaaacaaagtctggacccactccatgctctgccctcagacctggccaggtgatgctctgggggcagcatctccccaccgagagaagcgggctcctaatgaggtgggaaagccacggcaggcagcgagcagcccaggccagctttctgcatggatggtcagtctcttgccctcaaacactacagcaaacaagctacccctgccagtcctagacaacttgggtacatctggggacctagcagttaggcttgactttgaggagaggctgtgatgtttatgatccctgaataaagctactccttgg

SEQ ID NO: 6708 - DNA, 1017 bp, Homo sapiens
  source 1..1017: mol_type = unassigned DNA
aagatggcggaccttgattcgcctccgaagctgtcaggggtgcagcagccgtctgagggggtgggaggtggccgctgctccgaaatctccgctgagctcattcgctccctgacagagctgcaggagctggaggctgtatacgaacggctctgcggcgaggagaaagtggtggagagagagctggatgctcttttggaacagcaaaacaccattgaaagtaagatggtcactctccaccgaatgggtcctaatctgcagctgattgagggagatgcaaagcagctggctggaatgatcacctttacctgcaacctggctgagaatgtgtccagcaaagttcgtcagcttgacctggccaagaaccgcctctatcaggccattcagagagctgatgacatcttggacctgaagttctgcatggatggagttcagactgctttgaggagtgaagattatgagcaggctgcagcacatactcatcgctacttgtgcctggacaagtcggtcattgagctcagccgacagggcaaagaggggagcatgattgatgccaacctgaaattgctgcaggaagctgagcaacgtctcaaagccattgtggcagagaagtttgccattgccaccaaggaaggtgatctgccccaggtggagcgcttcttcaagatcttcccactgctgggtttgcatgaggagggattaagaaagttctcggagtacctttgcaagcaggtggccagtaaagctgaggagaatctgctcatggtgctggggacagacatgagtgatcggagagctgcagtcatctttgcagatacacttactcttctgtttgaagggattgcccgcattgtggagacccaccagccaatagtggagacctattatgggccagggagactctataccctgatcaaatatctgcaggtggaatgtgacagacaggtggagaaggtggtagacaagttcatcaagcaaagggactaccaccagcagaactttgttttttccttcttttga

SEQ ID NO: 6709 - DNA, 2225 bp, Homo sapiens
  source 1..2225: mol_type = unassigned DNA
aagtgccgaatggggaccaagatggcggaccttgattcgcctccgaagctgtcaggggtgcagcagccgtctgagggggtgggaggtggccgctgctccgaaatctccgctgagctcattcgctccctgacagagctgcaggagctggaggctgtatacgaacggctctgcggcgaggagaaagtggtggagagagagctggatgctcttttggaacagcaaaacaccattgaaagtaagatggtcactctccaccgaatgggtcctaatctgcagctgattgagggagatgcaaagcagctggctggaatgatcacctttacctgcaacctggctgagaatgtgtccagcaaagttcgtcagcttgacctggccaagacacttactcttctgtttgaagggattgcccgcattgtggagacccaccagccaatagtggagacctattatgggccagggagactctataccctgatcaaatatctgcaggtggaatgtgacagacaggtggagaaggtggtagacaagttcatcaagcaaagggactaccaccagcagttccggcatgttcagaacaacctgatgagaaattctacaacagaaaaaatcgaaccaagagaactggaccccatcctgactgaggtcaccctgatgaatgcccgcagtgagctatacttacgcttcctcaagaagaggattagctctgattttgaggtgggagactccatggcctcagaggaagtaaagcaagagcaccagaagtgtctggacaaactcctcaataactgccttttgagctgtaccatgcaggagctaattggcttatatgttaccatggaggagtacttcatgagggagactgtcaataaggctgtggctctggacacctatgagaagggccagctgacatccagcatggtggatgatgtcttctacattgttaagaagtgcattgggcgggctctgtccagctccagcattgactgtctctgtgccatgatcaacctcgccaccacagagctggagtctgacttcagggatgttctgtgtaataagctgcggatgggctttcctgccaccaccttccaggacatccagcgcggggtgacaagtgccgtgaacatcatgcacagcagcctccagcaaggcaaatttgacacaaaaggcatcgagagtactgacgaggcgaagatgtccttcctggtgactctgaacaacgtggaagtctgcagtgaaaacatctccactctgaagaagacactggagagtgactgcaccaagctcttcagccagggcattggaggggagcaggcccaggccaagtttgacagctgcctttctgacttggccgccgtgtccaacaaattccgagacctcttgcaggaagggctgacggagctcaacagcacagccatcaagccacaggtgcagccttggatcaacagctttttctccgtctcccacaacatcgaggaggaagaattcaatgactatgaggccaacgacccttgggtacaacagttcatccttaacctggagcagcaaatggcagagttcaaggccagcctgtccccggtcatctacgacagcctaaccggcctcatgactagccttgttgccgtcgagttggagaaagtggtgctgaaatccacctttaaccggctgggtggtctgcagtttgacaaggagctgaggtcgctcattgcctaccttaccacggtgaccacctggaccatccgagacaagtttgcccggctctcccagatggccaccatcctcaatctggagcgggtgaccgagatcctcgattactggggacccaattccggcccattgacgtggcgcctcacccctgctgaagtgcgccaggtgctggccctgcggatagacttccgcagtgaagatatcaagaggctgcgcctgtagctgcctggatgagcacacctggctcatcacacttgcaggcctgttccctaaggggccccagccaaggagctgagcgaggctgtctggcttgggggagatctgacagcccagacctttctacggctggcagcagagaaacaaagtctggacccactccatgctctgccctcagacctggccaggtgatgctctgggggcagcatctccccaccgagagaagcgggctcctaatgaggtgggaaagccacggcaggcagcgagcagcccaggccagctttctgcatggatggtcagtctct

SEQ ID NO: 6710 - DNA, 4060 bp, Homo sapiens
  source 1..4060: mol_type = unassigned DNA
attggtccttttatggttcagacttccttcttcatcgactctccctaattctcttcactgttcatccccagcaacttttcttcccaagcatttcctgcgggcttttattaccccaggagtgccaatcaaggcgtggaacagataaagctgtgtagcaactaacgcgtgactcttgtgagtgtggagggcaaacgaagctccctgaaacctccgctctgctctcctgccttacgccgcgcggcccctgttctgaggtttaatacttgcttcacagataagcgctgcggccacgttccggtgcccaccttctccttggctagggcacgacgccagcccagggggcgcggccctgagctgctgcgagagacagctgaaagcgccggcccgacggccttggctccctcggtgcgctgggcgcagagcactcggaccctgggcgcccactgctcgagtacctgcgcggctcctagccaggcttagcccaggcgcgggctgagagtcagttcgccaggtgggcctggagccatgggctgggtgggcgggcggcgccgggattctgcgtcaccacctgggcggagccgttctgctgctgacgacatcaacccggcacctgccaacatggaaggtggcggcggcagcgtcgctgtagctggcctcggagctcgaggctctggagcggctgcagctacagtccgggaacttctgcaggacgggtgttatagtgactttttaaacgaagactttgatgtaaagacttatacttctcaatctattcatcaagctgtaattgctgaacaactagcaaaacttgcccaaggaatcagtcagttggacagagaactacacttacaggttgttgcaagacatgaagatttactggcacaagcaactgggattgagtcgttggaaggtgttcttcagatgatgcagacgagaattggggctttacagggagctgttgataggataaaagcaaaaattgttgaaccatacaataagatagttgcccggactgcacaactagcaagacttcaggttgcctgtgatttgcttcggaggattattcgtatcttgaatctcagtaagagactccaaggacaactgcaagggggaagtagagagataacaaaagctgctcagagtctcaatgaacttgattatctttctcaaggaatagatctttctggaatagaagtgatagaaaatgatctactttttattgcaagagcccgacttgaagtggaaaatcaagctaagcgcctactagagcagggtttggagactcagaatccaactcaagtcggaacagctcttcaggttttctataatcttggaactttgaaggatactattaccagtgttgtggatggatattgtgctactttagaagaaaatatcaacagtgcattagacataaaagttttgactcagccttcccagtcagctgtgagagggggacctggacgatctaccatgccaaccccaggaaatactgcagctttgcgtgcctcattctggaccaatatggagaaacttatggatcatatttatgctgtttgtggacaggtacaacatctacaaaaagtattggccaagaagagagatcctgtttctcacatttgtttcattgaagaaatagttaaggatggacaaccggaaattttctacacattttggaattcagttactcaggcactttcttctcaatttcatatggcaacaaactcttcgatgtttttgaagcaggcatttgaaggagaataccctaaattattacgtctttataatgacttatggaagcgtcttcaacaatacagtcagcatatccaagggaattttaatgcaagtggaactacagacctctatgttgacctacaacacatggaagatgatgcacaagatatattcataccaaaaaagccagattatgatccagaaaaggctttgaaagactcactacaaccctatgaggctgcttatctatcaaaatccttatctcgactcttcgatcctatcaacttggtttttcccccgggtggtcgtaatcctccttcctctgatgaacttgatggtattattaaaactatagcaagtgaactaaatgttgctgctgttgatacaaacctcacattagctgtgtcaaaaaatgtggcaaagaccatccagttatacagtgtaaaatcagagcagcttctctccacacaaggagatgcaagtcaggtgattgggcctcttactgaaggacagagaagaaatgtggcagtagtgaattcattgtataagttgcaccaatcagtaacaaaggttgtttccagtcagagctcattcccactggcagctgagcaaactataatttcagctctaaaggctattcatgctcttatggaaaatgctgtgcaacccttactcacttctgtgggagatgctatagaggccataatcatcaccatgcatcaagaagacttttctgggtcattatccagctcaggaaaacctgatgttccttgttctctgtacatgaaggagctacaaggtttcattgccagagttatgagtgactattttaaacactttgaatgcttggattttgtctttgacaacactgaggctattgcccaaagagctgttgaactttttatccgccatgccagtctcataagacctcttggtgaaggtgggaaaatgcgacttgctgctgattttgcacagatggagttggctgtgggtccattctgtagacgagtatctgatttaggaaagtcctatcggatgctgagatcattcagacctctgctcttccaggcaagtgaacatgtagccagtagtcctgcattgggggatgtgattccgttcagcatcattattcagtttttgttcacgagagcacccgctgaactgaaatctcctttccagagggcagagtggtcccacacacgcttctctcagtggctggatgaccatccatctgaaaaggacaggctcctcctcatcaggggagccctggaagcttatgttcaatcagtgagaagtagagaaggcaaagaatttgcaccagtttatcccataatggttcagctgcttcaaaaggctatgtctgctcttcagtaatgacatgaaatctttgttcatctccactttgtgctaacccattcatagttggcagttaaacacatactccaaaagactgctactatctactattttaagaatgtaattgattgttcggtatttcctatcgacgtttatttacctctttagcacttatactttagcataaaaaatgttgagttatcaccacctttcaattccatggacctgatttttccagaaagatgttttcctctttcagatttttgtacaaggctaaaatgtctttcccatccataaccaagtcctcctatgggtacataaacccaaagtccccacttcttttaaagggatatgatcaagttataacatgtaccctgcttcccccaaccctgccttcttcactaaataagcatgtagctcagtggtttccaaatttggctgcacattcataccaatcaccaggggatttttttaaaatcctgatgcccaacttgcactccacattaattaacatgtctaggagtgggagcctgacagacaccactattaaaaaaaaaaaaaatccccaaaatgattccaatagacaacaaagttgaggaaccactggcacatcccaagctaagatacaaggttaaatggcctttttaagtatgtcatactggatctttaaataaagcaaggcttttgttacactttgtcatgttattaaaagcagacctttgggctgtttaaccgtgtaacaaaaatgccacgtgaaaaataaaaatttttattgtatagcaattctctataaatagtagataatctaagtccttattttctgatggctcttgttccactattaacattgtttttaatttttaaaatcctatcagcagcctcctaattagcagtgttaggaatttgccttatgttttccatctcatctcctgaacctgttattctgagaactcataaataaaattcagcc

SEQ ID NO: 6711 - DNA, 4343 bp, Homo sapiens
  source 1..4343: mol_type = unassigned DNA
gcttagcccaggcgcgggctgagagtcagttcgccaggtgggcctggagccatgggctgggtgggcgggcggcgccgggattctgcgtcaccacctgggcggagccgttctgctgctgacgacatcaacccggcacctgccaacatggaaggtggcggcggcagcgtcgctgtagctggcctcggagctcgaggctctggagcggctgcagctacagtccgggaacttctgcaggacgggtgttatagtgactttttaaacgaagactttgatgtaaagacttatacttctcaatctattcatcaagctgtaattgctgaacaactagcaaaacttgcccaaggaatcagtcagttggacagagaactacacttacaggttgttgcaagacatgaagatttactggcacaagcaactgggattgagtcgttggaaggtgttcttcagatgatgcagacgagaattggggctttacagggagctgttgataggataaaagcaaaaattgttgaaccatacaataagatagttgcccggactgcacaactagcaagacttcaggttgcctgtgatttgcttcggaggattattcgtatcttgaatctcagtaagagactccaaggacaactgcaagggggaagtagagagataacaaaagctgctcagagtctcaatgaacttgattatctttctcaaggaatagatctttctggaatagaagtgatagaaaatgatctactttttattgcaagagcccgacttgaagtggaaaatcaagctaagcgcctactagagcagggtttggagactcagaatccaactcaagtcggaacagctcttcaggttttctataatcttggaactttgaaggatactattaccagtgttgtggatggatattgtgctactttagaagaaaatatcaacagtgcattagacataaaagttttgactcagccttcccagtcagctgtgagagggggacctggacgatctaccatgccaaccccaggaaatactgcagctttgcgtgcctcattctggaccaatatggagaaacttatggatcatatttatgctgtttgtggacaggtacaacatctacaaaaagtattggccaagaagagagatcctgtttctcacatttgtttcattgaagaaatagttaaggatggacaaccggaaattttctacacattttggaattcagttactcaggcactttcttctcaatttcatatggcaacaaactcttcgatgtttttgaagcaggcatttgaaggagaataccctaaattattacgtctttataatgacttatggaagcgtcttcaacaatacagtcagcatatccaagggaattttaatgcaagtggaactacagacctctatgttgacctacaacacatggaagatgatgcacaagatatattcataccaaaaaagccagattatgatccagaaaaggctttgaaagactcactacaaccctatgaggctgcttatctatcaaaatccttatctcgactcttcgatcctatcaacttggtttttcccccgggtggtcgtaatcctccttcctctgatgaacttgatggtattattaaaactatagcaagtgaactaaatgttgctgctgttgatacaaacctcacattagctgtgtcaaaaaatgtggcaaagaccatccagttatacagtgtaaaatcagagcagcttctctccacacaaggagatgcaagtcaggtgattgggcctcttactgaaggacagagaagaaatgtggcagtagtgaattcattgtataagttgcaccaatcagtaacaaaggctattcatgctcttatggaaaatgctgtgcaacccttactcacttctgtgggagatgctatagaggccataatcatcaccatgcatcaagaagacttttctgggtcattatccagctcaggaaaacctgatgttccttgttctctgtacatgaaggagctacaaggtttcattgccagagttatgagtgactattttaaacactttgaatgcttggattttgtctttgacaacactgaggctattgcccaaagagctgttgaactttttatccgccatgccagtctcataagacctcttggtgaaggtgggaaaatgcgacttgctgctgattttgcacagatggagttggctgtgggtccattctgtagacgagtatctgatttaggaaagtcctatcggatgctgagatcattcagacctctgctcttccaggcaagtgaacatgtagccagtagtcctgcattgggggatgtgattccgttcagcatcattattcagtttttgttcacgagagcacccgctgaactgaaatctcctttccagagggcagagtggtcccacacacgcttctctcagtggctggatgaccatccatctgaaaaggacaggctcctcctcatcaggggagccctggaagcttatgttcaatcagtgagaagtagagaaggcaaagaatttgcaccagtttatcccataatggttcagctgcttcaaaaggctatgtctgctcttcagtaatgacatgaaatctttgttcatctccactttgtgctaacccattcatagttggcagttaaacacatactccaaaagactgctactatctactattttaagaatgtaattgattgttcggtatttcctatcgacgtttatttacctctttagcacttatactttagcataaaaaatgttgagttatcaccacctttcaattccatggacctgatttttccagaaagatgttttcctctttcagatttttgtacaaggctaaaatgtctttcccatccataaccaagtcctcctatgggtacataaacccaaagtccccacttcttttaaagggatatgatcaagttataacatgtaccctgcttcccccaaccctgccttcttcactaaataagcatgtagctcagtggtttccaaatttggctgcacattcataccaatcaccaggggatttttttaaaatcctgatgcccaacttgcactccacattaattaacatgtctaggagtgggagcctgacagacaccactattaaaaaaaaaaaaaatccccaaaatgattccaatagacaacaaagttgaggaaccactggcacatcccaagctaagatacaaggttaaatggcctttttaagtatgtcatactggatctttaaataaagcaaggcttttgttacactttgtcatgttattaaaagcagacctttgggctgtttaaccgtgtaacaaaaatgccacgtgaaaaataaaaatttttattgtatagcaattctctataaatagtagataatctaagtccttattttctgatggctcttgttccactattaacattgtttttaatttttaaaatcctatcagcagcctcctaattagcagtgttaggaatttgccttatgttttccatctcatctcctgaacctgttattctgagaactcataaataaaattcagccaagattaatcaatcaatcaatcaatcagtagacgtcagagataagcaacttttttttccatttatttgaaataatatacaagaatatagtgtgcaaaatttaggggcaacatcatgaagaagtgtgatgaactgaaatcaattttacagctgtgattcctaaccagaaacaccacttggtaagtaacatgaaaagccatgattgtagctcagagcaaaagcagctgtattgccaatgtatttgctctaattttagacagttggaggaaaattaaagtgcaagtgttgcactgcagtaagtgcaaagtctgcccccaccataaagattatgatgacaaaatatatttaagatacatggctgaggagatacagaacacgaagttaaaaaatacaatggtgttgactgtttgttaatagcaccattacagtgactatatcccaatgctattaactaactttaccttggcctgggctaggtctccattggaaataataacggatggctgctgccacctggtgcatcaactcagcatgccatggtaactgcagcaggtggctcttaggctgggacaccaacaccagccacctgccccatgttctggtagcctcttggcactgaccagactaggagcgcctatgtttggcacagatgctgagccatgtggtggttactagaggaaaggccgactcccagcttctgcttcatttcatcatgtgtacaatacagattaataagcagtaaggagccaatgtataaacagcagttacatattttttaaattcccctttcgtacaatttaaaataaaacatgtatacactt

SEQ ID NO: 6712 - DNA, 5418 bp, Homo sapiens
  source 1..5418: mol_type = unassigned DNA
ggtttaatacttgcttcacagataagcgctgcggccacgttccggtgcccaccttctccttggctagggcacgacgccagcccagggggcgcggccctgagctgctgcgagagacagctgaaagcgccggcccgacggccttggctccctcggtgcgctgggcgcagagcactcggaccctgggcgcccactgctcgagtacctgcgcggctcctagccaggcttagcccaggcgcgggctgagagtcagttcgccaggtgggcctggagccatgggctgggtgggcgggcggcgccgggattctgcgtcaccacctgggcggagccgttctgctgctgacgacatcaacccggcacctgccaacatggaaggtggcggcggcagcgtcgctgtagctggcctcggagctcgaggctctggagcggctgcagctacagtccgggaacttctgcaggacgggtgttatagtgactttttaaacgaagactttgatgtaaagacttatacttctcaatctattcatcaagctgtaattgctgaacaactagcaaaacttgcccaaggaatcagtcagttggacagagaactacacttacaggttgttgcaagacatgaagatttactggcacaagcaactgggattgagtcgttggaaggtgttcttcagatgatgcagacgagaattggggctttacagggagctgttgataggataaaagcaaaaattgttgaaccatacaataagatagttgcccggactgcacaactagcaagacttcaggttgcctgtgatttgcttcggaggattattcgtatcttgaatctcagtaagagactccaaggacaactgcaagggggaagtagagagataacaaaagctgctcagagtctcaatgaacttgattatctttctcaaggaatagatctttctggaatagaagtgatagaaaatgatctactttttattgcaagagcccgacttgaagtggaaaatcaagctaagcgcctactagagcagggtttggagactcagaatccaactcaagtcggaacagctcttcaggttttctataatcttggaactttgaaggatactattaccagtgttgtggatggatattgtgctactttagaagaaaatatcaacagtgcattagacataaaagttttgactcagccttcccagtcagctgtgagagggggacctggacgatctaccatgccaaccccaggaaatactgcagctttgcgtgcctcattctggaccaatatggagaaacttatggatcatatttatgctgtttgtggacaggtacaacatctacaaaaagtattggccaagaagagagatcctgtttctcacatttgtttcattgaagaaatagttaaggatggacaaccggaaattttctacacattttggaattcagttactcaggcactttcttctcaatttcatatggcaacaaactcttcgatgtttttgaagcaggcatttgaaggagaataccctaaattattacgtctttataatgacttatggaagcgtcttcaacaatacagtcagcatatccaagggaattttaatgcaagtggaactacagacctctatgttgacctacaacacatggaagatgatgcacaagatatattcataccaaaaaagccagattatgatccagaaaaggctttgaaagactcactacaaccctatgaggctgcttatctatcaaaatccttatctcgactcttcgatcctatcaacttggtttttcccccgggtggtcgtaatcctccttcctctgatgaacttgatggtattattaaaactatagcaagtgaactaaatgttgctgctgttgatacaaacctcacattagctgtgtcaaaaaatgtggcaaagaccatccagttatacagtgtaaaatcagagcagcttctctccacacaaggagatgcaagtcaggtgattgggcctcttactgaaggacagagaagaaatgtggcagtagtgaattcattgtataagttgcaccaatcagtaacaaaggttgtttccagtcagagctcattcccactggcagctgagcaaactataatttcagctctaaaggctattcatgctcttatggaaaatgctgtgcaacccttactcacttctgtgggagatgctatagaggccataatcatcaccatgcatcaagaagacttttctgggtcattatccagctcaggaaaacctgatgttccttgttctctgtacatgaaggagctacaaggtttcattgccagagttatgagtgactattttaaacactttgaatgcttggattttgtctttgacaacactgaggctattgcccaaagagctgttgaactttttatccgccatgccagtctcataagacctcttggtgaaggtgggaaaatgcgacttgctgctgattttgcacagatggagttggctgtgggtccattctgtagacgagtatctgatttaggaaagtcctatcggatgctgagatcattcagacctctgctcttccaggcaagtgaacatgtagccagtagtcctgcattgggggatgtgattccgttcagcatcattattcagtttttgttcacgagagcacccgctgaactgaaatctcctttccagagggcagagtggtcccacacacgcttctctcagtggctggatgaccatccatctgaaaaggacaggctcctcctcatcaggtaaagccaggtgctctgggggcacccatctggtctggaagcccaaggagggtggggatgcaagagaggatgaaggagcagtgcctgggggcatggacatgtgactgcaccttccagtggcgggccacctcactgcctaggcacgggtgctggagcaaccagcagttggaaatgttggccacaacatcttttgctttctttcattccaaaccttcatatccctgatgtgcaatcctgtgtcccatgcaaccctaaggaccatgcatttgtacctttgaaaatcatcatttgctatgaaaagttttgccctagctccgcatcttttacttcatttttatgtgctgcagttactgaattggtggaacacagatgtgagtgaatttttaaaaatacccaagtgcgaaacagttctgaggaggaaacaagaacaacccagcagccacttggataccatggccctccagtagtgccccatgaatgcattcacatacatacgcatgtgctcttgcccacacgtgcacacacccccatgtaccccaaccatgcccagggtggggtgctttaactgtcatacatggcttattaagcaacactcttccctgcaactgctctcaccatcaccagagacctctcagccaccaaacattcccatttttaccttaccactctgtagctttagctacagttgaccgccatttccttctgtaaactcataaactgggactcagcacatttttattgatgctgagctcacattttatcagcatggtaggccctgggccaggaaccgaggatacgaagtaagccgagatatggccctgtcctctcagagcttgcattacaccacagccatctgtttctgttctaacttctctggccatttttttttgtgtgtcatttgctgaattatcttcttctagccattccttaaatgctatcatttcccatattttcttcttctcatcctgcctctgccttggttcccaggtgagcttgtccagacccatgcctctagtgccccttctatacttaagagccctcaggtctgtgactgcctctggatggggccttggcccagtaaacttgctatcatatgtcaccacccacagaaatctcaaccccagaatggtcaaaataattctaatcttttctctcaaaccttctcattctcttatactccctgtcttggttgggaggtcacaatcacctaactagccaagccggaaaacctttacatcatcattcaactcctctgtcatccttattcctcaaacccactctgttgcgtctctaaaatagctcttgaagtcattctcaactctcccaggggatcccaattctgttggtctgggcccactgcacccagtgatcctttgttagcctgtgtcaggtgatgagttgagttccctaaagccagagtggggctgacatgatgaggtggttctaaaccacatgtgcacacaagaatcatttacatagcttggaaaattcctagtgcccaggtctctcacccttgcctacctcagaatctccagggtaggcctgctatcaggatttctctatagctccccaagaaggtccagggtgcagccaagggcgtgaacccctgccatagtgggtcatatttcagttaggatgaaagactgctgaggaagctatgacaggtcagtaagaaccatcagcctgtcagctttgtttccagaagtgaccctgagccctcaagcttggtacccacatcccacatgagccactggccctctgggcgtatgtgtggataaagattagctcggaccctgctctttttccttgcttatctgttactcagctatgaacatctgacacagaaatgggagaggttaccagccccggtgaatgttcctggtaaaatctgccctcgggaaaggctttggatttgggtgaggagtttgggcctgggctaacacagggatttgcaatgtctgtgtggattatttttcccgagtcccaaagattcactcagctgcaacacactcagtcgtcttaaaaagaggattcagttaattgaacacgttcatttttctcatcttaacaagttggtcatttttgtcgtcttaacaagttggaatgagttcatccaaaacagttgtcctgctgtgtgtacatcacaaatctgttttcttttgcttctctttaaaaatgtctcctgagtgatttcatcagcagtgctgttgctaagcctatatttagcaactgaaaatcatgctcagaaatactgtcatgcttttttaaaaaggcatatccatccctccacacatggctgattccagaaccttcatgcccttagcaaaaaattgagctgtccttcagggtttcaaaaaaagtactgtactcctgctgcaccccaggctcttggcaaggaggggacttttgtcctagagaatgttctttcttatgtattattgcaaaacaattttgttcttgcatactgaagcatcactggatgaatttctttcccctgtagacaaaccgagggtgagtattgctctttaaatgtcagtaaatttgttttagcttctggggcaaaccttgttgtatactcattctgttcctcccagcataatatgttaggttgtcataaaatagggcaaattgaggatagtgtaactactgctgctgaataaatgggaaatagtgaacca

SEQ ID NO: 6713 - DNA, 3609 bp, Homo sapiens
  source 1..3609: mol_type = unassigned DNA
gatgcgcatgcgcggccgatttgcacatgcgcaatactcgcgctgcctccgtggtccctgcctggctgaggtggcagcagggggcgggacgcgcagcgctatggcagagggcagcggggaagtggtcgcagtgtctgcgaccggggctgccaacggcctcaacaatggggcaggcgggacctcggcgacgacctgcaacccgctgtcgcgcaagctgcataagatcctggagacgcggctggacaacgacaaggagatgttagaagctctcaaggcactttcaaccttttttgttgaaaatagtctgcggactcgaagaaatttacgtggagatattgaacgtaaaagtttagccatcaatgaagaatttgtaagcattttcaaggaagtgaaggaggaacttgaaagcataagcgaagatgttcaagcaatgagcaactgttgtcaagatatgacaagtcgcctacaggcagcaaaggaacagactcaagatttaatagtaaaaaccactaagcttcaatctgaaagccaaaaattagagataagagctcaagttgcagatgccttcttatccaagttccaactgacttctgatgaaatgagtcttctccgaggtacaagagaaggacccattactgaggattttttcaaggcactgggaagagtaaaacagattcataatgatgtcaaagttctcttgcgtacaaatcaacaaacggcaggtttagaaattatggaacagatggccttacttcaagaaacggcttatgaaagactttaccgatgggctcaaagtgaatgcagaacattgacacaagaatcatgtgacgtatctccagtattgacacaggcaatggaagccctgcaggacagacctgtcttatataaatataccttagatgaatttggaacagccagaagaagtacagttgttcgtggatttattgatgcgctcacaagagggggccccggaggtacacctagaccaattgaaatgcattctcatgaccctttgaggtatgtaggagatatgttggcttggctccatcaagctactgcttctgaaaaggaacaccttgaagctctcttaaagcatgtaactacacaaggtgttgaagaaaatattcaagaagttgttgggcatatcactgaaggtgtgtgcaggcctctaaaggttcgaattgagcaagtaatagttgctgaacctggggcagttttattatataaaatttctaatctcctcaaattttatcaccatacaatcagtggtattgttggaaatagtgcaactgcattattgactaccattgaagaaatgcatttgctaagcaaaaaaatattcttcaatagcttgagtcttcatgcaagtaaattaatggacaaggttgaactcccaccacctgatcttggaccaagttctgcactaaatcagacactcatgttgctgcgtgaagttttagcatctcacgattcttcagttgtaccattagatgctcgtcaagctgattttgtgcaggttttatcatgtgtcttggatcctctcctacagatgtgtactgtatcagccagcaatttaggcacagctgacatggccactttcatggtcaattcactatatatgatgaagacaacattagctctatttgaattcactgacagacgtctggaaatgctacagtttcagatcgaagcacatttggacacacttataaatgagcaagcctcttatgttttaactagggtaggcttgagttacatctataacactgtacagcaacataaacctgaacagggctctttagctaatatgcccaacctagattctgtgacactgaaggctgcaatggttcagtttgatcgttatctgtcagccccagacaacctattgataccacagctgaactttcttctaagtgccacagtgaaagagcagatcgtaaaacaatctacagaattagtctgcagagcctatggtgaagtgtatgcagccgtgatgaatccaatcaatgaatacaaagatccagagaacattcttcaccgatcgccgcagcaagtgcagacgcttctttcctgattatcttatttcattgtgttagcaaaatatgacctccctaaaacactgaaggttattttttattctttgaatttttactctataatttgatagttacagttttctttgtatcataagattgtaagtcccgataatttttttttttttggtctcagtaacagggaagtaagtaacatgttgacctgagctagtattgctgtgtatctactctaaatgagatgatctatttttttgctagccatctctccagctctgcagttttcactgtattcaggaagcataaagtagtatgaaaggtttgaagaatttttttttacaagactagttctaaattaacagcttataaaaaatttgtctaaatttaataattagtataaggatatgacctaataaatgtctccttacctaaagattcatttgctttcttttaatatgagtaggcatacttagtagcttttctgaacctagcctatgtctctgtccccaaaatagctgcccttaaagagttgttagcagagagaaaaataacagtgaatgtgctcctggtgtatatggcagtgaatctcctttctgttctactttagcatactatatatatttgactgtgtacattcttatgcaattttaagtatacactcagcaataattagaaaaaaaggagagagaaaagtgatttaaacagggtggattccactctgtgggagccttcgatggaactcaaggtggagctcagcctttccaatgagctctaagcatgtagatagcctgagctgtgtctaagcctggtgtttaaagatgggtatttgtcatacaatatgggtcctaaatccaaccaactacacattttatctggtgttcaaaccaaagaaacaatgatctactcaaacattggagaaaaaaactgccagaggaggagttgccaattggcagtgtgtcttatctccatgttgtaactggactctgactttagaccattacctattaggaagattaaaaatgactgtatttttaaaggaataaatcccagtgtgcctgatttgacattcttgtcagcaaaaaaaaacttaatttctagtaaatctataaaaatgggtaagtccctaaattacaaatgagaaaattgaagcacaaggaaaaaaataactagtttgaaatattttgaaaagtaataacataaaactagtatttgtagaagattatgtgttgtatataacaaattagtatttatagaatatgacctatttatctgaagtttataattgtttatacctaatacagttctttttggagtaagaatgattatataatcgttatccatttgggtataaatctgtatttttagttttttccctttgattagtatgtgttacatataaagacagaaaataaagtataaatcaagagcttaaattgtatataatttatttctacagagaaagaagattgataccttgctatgagtgaattcctttgttttatagggaaaatttattgtgctttttacctggttttttcaaataaaatattaaaatatt

SEQ ID NO: 6714 - DNA, 5257 bp, Homo sapiens
  source 1..5257: mol_type = unassigned DNA
gatgcgcatgcgcggccgatttgcacatgcgcaatactcgcgctgcctccgtggtccctgcctggctgaggtggcagcagggggcgggacgcgcagcgctatggcagagggcagcggggaagtggtcgcagtgtctgcgaccggggctgccaacggcctcaacaatggggcaggcgggacctcggcgacgacctgcaacccgctgtcgcgcaagctgcataagatcctggagacgcggctggacaacgacaaggagatgttagaagctctcaaggcactttcaaccttttttgttgaaaatagtctgcggactcgaagaaatttacgtggagatattgaacgtaaaagtttagccatcaatgaagaatttgtaagcattttcaaggaagtgaaggaggaacttgaaagcataagcgaagatgttcaagcaatgagcaactgttgtcaagatatgacaagtcgcctacaggcagcaaaggaacagactcaagatttaatagtaaaaaccactaagcttcaatctgaaagccaaaaattagagataagagctcaagttgcagatgccttcttatccaagttccaactgacttctgatgaaatgagtcttctccgaggtacaagagaaggacccattactgaggattttttcaaggcactgggaagagtaaaacagattcataatgatgtcaaagttctcttgcgtacaaatcaacaaacggcaggtttagaaattatggaacagatggccttacttcaagaaacggcttatgaaagactttaccgatgggctcaaagtgaatgcagaacattgacacaagaatcatgtgacgtatctccagtattgacacaggcaatggaagccctgcaggacagacctgtcttatataaatataccttagatgaatttggaacagccagaagaagtacagttgttcgtggatttattgatgcgctcacaagagggggccccggaggtacacctagaccaattgaaatgcattctcatgaccctttgaggtatgtaggagatatgttggcttggctccatcaagctactgcttctgaaaaggaacaccttgaagctctcttaaagcatgtaactacacaaggtgttgaagaaaatattcaagaagttgttgggcatatcactgaaggtgtgtgcaggcctctaaaggttcgaattgagcaagtaatagttgctgaacctggggcagttttattatataaaatttctaatctcctcaaattttatcaccatacaatcagtggtattgttggaaatagtgcaactgcattattgactaccattgaagaaatgcatttgctaagcaaaaaaatattcttcaatagcttgagtcttcatgcaagtaaattaatggacaaggttgaactcccaccacctgatcttggaccaagttctgcactaaatcagacactcatgttgctgcgtgaagttttagcatctcacgattcttcagttgtaccattagatgctcgtcaagctgattttgtgcaggttttatcatgtgtcttggatcctctcctacagatgtgtactgtatcagccagcaatttaggcacagctgacatggccactttcatggtcaattcactatatatgatgaagacaacattagctctatttgaattcactgacagacgtctggaaatgctacagtttcagatcgaagcacatttggacacacttataaatgagcaagcctcttatgttttaactagggtaggcttgagttacatctataacactgtacagcaacataaacctgaacagggctctttagctaatatgcccaacctagattctgtgacactgaaggctgcaatggttcagtttgatcgttatctgtcagccccagacaacctattgataccacagctgaactttcttctaagtgccacagtgaagcgtccacccaacggcccatgatcatcttgtaaccagtgcaggaccttgtgcttctggagccattccagttgtgggaggtgatgtctcggaaaactctgccttggggactggctatagaaatgtggccagatggctttgtcatcttcccctgtctactctgtgactcttcatctggtggaaatgctgtgagggatgaaccaaatggaaactcagatttactcttcagaataatgcggatcataatacgcacacacacagcatgtagagttgctgtgtggcttaaataagtaaatgtatgcaaagcactaaaatggtgtctgtctaagtgtaaacaccaattgtgttggctattatcactattgttgttcttatctcaaatatgtgttactttctaaataactttagtgttcatagattgttaaaagacaagatgacctgaagaaaagtaagccctaaaaatccattattaacttttttctccaccactcttttcttctaaacttcactattctttgtgttttcacaaaagttgcttacttcacctggcagagatagcattacgcaggggatgattaaaatatactcacttgtacttgttggttttaaattttattatttatgaataggtaatagcatgtacactgtaaaaatctcaaaaggcaaaaaaggatatacagtaaacattaagttcctcttaccctggaccttagccatcaagttctcttccccataggcaatccctgttgcctaatttccaattcccctgcatactttaaagatcatctgtgcatctgcactcagaccactcacacgtctaaaacaaatgatagcacactacacacaaagttctgttcctttttatgctcaatgatatgttttgcatcatatttcactgccgtataaataatgctgcctcgatttttaaaataactgaacagtaatacacagtatgaatttactccaatttataatccaatccttagttaatggatattttgattttgttgttaagaatcatgcagcaatgatgtacctgttagacatgagttattaatttctcttcgaagaatcaatatgtcactacgttcaattctttgccttctacttttaaacttcacttcctcataaagcaaccttttgcgatcatctgctccaccctgactcattccaatcacctgctccaccctgactcattctgatcacctgctctgcccagactcattcccatcacctgctccaccctgacttattccaattacctgctccaccctgtctcattctccaccctgactcattccataaccatttttcccaccaaaccagtcaccccctcaccctctttaaattagctaatcggaattagtttagcttgtgtggtctaacctagccaatagatgaatgacacagcagcaggagccacgttcgtcagggataagaacaccttccccttccttgtccaggggtgtactcaccattgctccatctgtgagggcgcacccttctatagaagtaaattgccttgctgagaagaaaaaaagaaaattttatatttgagtgctatttattttgtggcaccaaaactatttataacatacctgatctttattttaaatttttgtttatttaaatattaaatatattatccacctggtattaatttgtttaaataaatgtgaggtagggttccattgctattttttaaccaggtaggttatattgactaaccttcactttgaaagtgatttgaaatacacttttcatttattaaattctcccttgtgtttaggcagtaaggcataatatttgagagtgtgggctctgcagtccagctatctgggtttgaagtttatctcctttatttgcgagtggtacaaacttgaacaaattatgtaatttgtttttctcaattccctcatgcactaagtgaggataaaaatagcaataacaccatgagattgctgataacaaaatgcaaggtaaaaattgtgtaaggcttaaaattgtgtagcctggtatacaagaggctctaaataacataagctattattgcttttctacttattattatttctggcttttgtagtctttttcccattgttgatctttctactattcacaaagcatgagtctagtatctgtagatttataaactaattaatgtaacttttcaatatgttttaatatctcatagatactgttcttcctcattacttttctattttataaatttctatttcatctgcttcataaattttgcattctcataaactaagaatcatctcctgtagttaaaaaatattgtttgtatttttgttgggagtagagtgaattaaaatatattgacttaaggagaactgacatctttataatattgaatcttcctgtttgagattggactttatgtccatattttaaagtctttgtttatgaccctaagtataattttaacgtttttatattaggcttatttctagatactttttgttaatatatcatctaactggttgttcttcatatatataatgactatgaattttttctcagtcttttttctgaattctcacatcatttgtgttatatttttaagttgattctcttgagtttttcaggtaaacaattatatcacctataaaaataatgttgccaccttaaattaagaaaatgtttttctattgtctaattgcatggactgttgcctcaggaacagtataagattgcttacaaaagccttgctttcttgttccagattttaaaaacaaggctttcaatgacaatctcgctagcaagaagctggtatacttacatacatacatacaaacagacagacacccactttctatatgtatatctagatagatttagatagacatatatgtgtgattcctgttaagatgaatctatttttggtatttaagattttaaaaatctagaatgggtattattatattgtattgaagctcttaagcatctatggaaatgaaagtatgattcttctctttcgactaattaatatgtgatccatagtattttagtaacagatttcctaatatcgaatgatctaggcattgattctagcagattatgtctatgggtattttatttaagattttgcatcagtattaataaatgaccatggtctatgggtttgcttttttgtgtgctatgtttgcagagtgtttgtagtttacaagagatttttgcaaacttctatttatgacaatatggtagattatatatctgaaaaaaaaaccttctcattacagaacatatacaaaactgctgaataaaacgaggcaaccaacattttaaatatatggttaataaggtttt

SEQ ID NO: 6715 - DNA, 3427 bp, Homo sapiens
  source 1..3427: mol_type = unassigned DNA
gtggtccctgcctggctgaggtggcagcagggggcgggacgcgcagcgctatggcagagggcagcggggaagtggtcgcagtgtctgcgaccggggctgccaacggcctcaacaatggggcaggcgggacctcggcgacgacctgcaacccgctgtcgcgcaagctgcataagatcctggagacgcggctggacaacgacaaggagatgttagaagctctcaaggcactttcaaccttttttgttgaaaatagtctgcggactcgaagaaatttacgtggagatattgaacgtaaaagtttagccatcaatgaagaatttgtaagcattttcaaggaagtgaaggaggaacttgaaagcataagcgaagatgttcaagcaatgagcaactgttgtcaagatatgacaagtcgcctacaggcagcaaaggaacagactcaagatttaatagtaaaaaccactaagcttcaatctgaaagccaaaaattagagataagagctcaagttgcagatgccttcttatccaagttccaactgacttctgatgaaatgagtcttctccgaggtacaagagaaggacccattactgaggattttttcaaggcactgggaagagtaaaacagattcataatgatgtcaaagttctcttgcgtacaaatcaacaaacggcaggtttagaaattatggaacagatggccttacttcaagaaacggcttatgaaagactttaccgatgggctcaaagtgaatgcagaacattgacacaagaatcatgtgacgtatctccagtattgacacaggcaatggaagccctgcaggacagacctgtcttatataaatataccttagatgaatttggaacagccagaagaagtacagttgttcgtggatttattgatgcgctcacaagagggggccccggaggtacacctagaccaattgaaatgcattctcatgaccctttgaggtatgtaggagatatgttggcttggctccatcaagctactgcttctgaaaaggaacaccttgaagctctcttaaagcatgtaactacacaaggtgttgaagaaaatattcaagaagttgttgggcatatcactgaaggtgtgtgcaggcctctaaaggttcgaattgagcaagtaatagttgctgaacctggggcagttttattatataaaatttctaatctcctcaaattttatcaccatacaatcagtggtattgttggaaatagtgcaactgcattattgactaccattgaagaaatgcatttgctaagcaaaaaaatattcttcaatagcttgagtcttcatgcaagtaaattaatggacaaggttgaactcccaccacctgatcttggaccaagttctgcactaaatcagacactcatgttgctgcgtgaagttttagcatctcacgattcttcagttgtaccattagatgctcgtcaagctgattttgtgcaggttttatcatgtgtcttggatcctctcctacagatgtgtactgtatcagccagcaatttaggcacagctgacatggccactttcatggtcaattcactatatatgatgaagacaacattagctctatttgaattcactgacagacgtctggaaatgctacagtttcagatcgaagcacatttggacacacttataaatgagcaagcctcttatgttttaactagggtaggcttgagttacatctataacactgtacagcaacataaacctgaacagggctctttagctaatatgcccaacctagattctgtgacactgaaggctgcaatggttcagtttgatcgttatctgtcagccccagacaacctattgataccacagctgaactttcttctaagtgccacagtgaaagagcagatcgtaaaacaatctacagaattagtctgcagagcctatggtgaagtgtatgcagccgtgatgaatccaatcaatgaatacaaagatccagagaacattcttcaccgatcgccgcagcaagtgcagacgcttctttcctgattatcttatttcattgtgttagcaaaatatgacctccctaaaacactgaaggttattttttattctttgaatttttactctataatttgatagttacagttttctttgtatcataagattgtaagtcccgataatttttttttttttggtctcagtaacagggaagtaagtaacatgttgacctgagctagtattgctgtgtatctactctaaatgagatgatctatttttttgctagccatctctccagctctgcagttttcactgtattcaggaagcataaagtagtatgaaaggtttgaagaatttttttttacaagactagttctaaattaacagcttataaaaaatttgtctaaatttaataattagtataaggatatgacctaataaatgtctccttacctaaagattcatttgctttcttttaatatgagtaggcatacttagtagcttttctgaacctagcctatgtctctgtccccaaaatagctgcccttaaagagttgttagcagagagaaaaataacagtgaatgtgctcctggtgtatatggcagtgaatctcctttctgttctactttagcatactatatatatttgactgtgtacattcttatgcaattttaagtatacactcagcaataattagaaaaaaaggagagagaaaagtgatttaaacagggtggattccactctgtgggagccttcgatggaactcaaggtggagctcagcctttccaatgagctctaagcatgtagatagcctgagctgtgtctaagcctggtgtttaaagatgggtatttgtcatacaatatgggtcctaaatccaaccaactacacattttatctggtgttcaaaccaaagaaacaatgatctactcaaacattggagaaaaaaactgccagaggaggagttgccaattggcagtgtgtcttatctccatgttgtaactggactctgactttagaccattacctattaggaagattaaaaatgactgtatttttaaaggaataaatcccagtgtgcctgatttgacattcttgtcagcaaaaaaaaacttaatttctagtaaatctataaaaatgggtaagtccctaaattacaaatgagaaaattgaagcacaaggaaaaaaataactagtttgaaatattttgaaaagtaataacataaaactagtatttgtagaagattatgtgttgtatataacaaattagtatttatagaatatgacctatttatctgaagtttataattgtttatacctaatacagttctttttggagtaagaatgattatataatcgttatccatttgggtataaatctgtatttttagttttttccctttgattagtatgtgttacatataaagacagaaaataaagtataaatcaaga

SEQ ID NO: 6716 - DNA, 2926 bp, Homo sapiens
  source 1..2926: mol_type = unassigned DNA
tcccagccgcaaactgagtgcgctgagcggggaagcgcaaaggggcaagttacccgtcctggcgtttctggggttcgcctcggaggctagcctcggtgctctcgcaggctcgctcgcttctgcatccccgttgccgcccggagccaactcttaagttctggacgccaggcctgaggcagttccgccatggacttctccaagttcctggcagacgacttcgacgtgaaggagtggatcaatgcggccttcagggccggctccaaggaggcggcgtccgggaaggcggatggccacgcagccaccctggtgatgaagctgcagctgttcatccaagaggtgaaccacgccgtggaggaaacaagtcaccaagctctccagaacatgcccaaagtgctccgtgatgttgaagccctaaaacaggaggcatctttcctgaaagaacagatgattcttgtcaaggaggacattaaaaaatttgaacaggacacatctcaatccatgcaggtgttggtagaaattgaccaagtgaagtccagaatgcaacttgctgccgaatctcttcaggaagcagataagtggagcacgttgagcgccgatattgaggagacatttaagactcaggacatagctgtgatttctgccaagctaacaggtatgcagaacagcttaatgatgcttgttgatacaccagactactcagaaaagtgtgtgcacttggaggcactgaagaacaggctggaggccctagccagtccacagattgtagcggcattcacctctcaggctgtagatcagtccaaagtgtttgtgaaggtgtttactgaaattgaccggatgccccagctcctggcctactactacaagtgtcacaaggtgcagcttttagcagcctggcaagagctgtgtcaaagtgacctatccctggaccggcagcttaccggactctatgatgccttgcttggtgcttggcacacacaaatccagtgggctacacaggttttccagaagccccacgaggtggtaatggtgctgctgattcagaccctgggggccctcatgccctcgctgccctcctgcctcagcaacggcgtggagagggcagggcccgagcaggagctcaccaggctgctggagttctacgacgccaccgcccacttcgccaagggcttggagatggcactgctcccccacctacatgaacacaatctggtaaaagtcacggagctggtggatgctgtgtatgatccatacaaaccctaccagctgaagtatggcgacatggaagagagcaacctcctcatccagatgagtgctgtgcctctggagcatggggaagtgattgactgtgtgcaggagctgagccactccgtgaacaagctgtttggtctggcgtctgcagccgttgacagatgcgtcagattcaccaatggcctggggacctgcggcctgttgtcagccctgaaatccctctttgccaagtatgtgtctgatttcaccagcactctccagtccatacgaaagaagtgcaaactggaccacattcctcccaactccctcttccaggaagattggacggcttttcagaactccattaggataatagccacctgtggagagcttttgcggcattgtggggacttcgagcagcagctagccaacaggattttgtccacagctgggaagtatctatctgattcctgcagcccccggagcctggctggttttcaggagagcatcttgacagacaagaagaactctgccaagaacccatggcaagaatataattacctccagaaagataaccctgctgaatatgccagtttaatggaaatactttatacccttaaggaaaaagggtcaagcaaccacaacctgctggctgcacctcgagcagcgctgactcggcttaaccagcaggcccaccagctggctttcgattccgtgttcctgcgcatcaaacaacagctgttgcttatttcgaagatggacagctggaatacggctggcatcggagaaaccctcacagatgaactgcccgcctttagtctcacccctctcgagtacatcagcaacatcgggcagtacatcatgtccctccccctgaatcttgagccatttgtgactcaggaggactctgccttagagttggcattgcacgctggaaagctgccatttcctcctgagcagggggatgaattgcccgagctggacaacatggctgacaactggctgggctcgatcgccagagccacaatgcagacctactgtgatgcgatcctacagatccctgagctgagcccacactctgccaagcagctggccactgacatcgactatctgatcaacgtgatggatgccctgggcctgcagccgtcccgcaccctccagcacatcgtgacgctactgaagaccaggcctgaggactatagacaggtcagcaaaggcctgccccgtcgcctggccaccaccgtggccaccatgcggagtgtgaattactgaccccaccacacaccggaccaccaagagagccagggctgctgtttcgcgactcaccagcacagatttgctcagaaactctgcccaagattgggcagaagttactttaaaaagacttggttcagctggtcacggtggctcacgcctgtaatcccagcactttgggaggccaagccagatggatcatgaagccaggagttcgagaccagcctgaccaacatggtgaaaccccatctctactaaaaatacaaaaattaacagcagagcgagactctgtctcaaaaaaaaaaaaaaaaaagacttggttcatttgtataatcaaaaagagttgtaaattaaagatgtattatttatcagagaagactttttagataatttttttaaaggatcagatcttgaaaatggaataaataactactgtgaaatgcaa

SEQ ID NO: 6717 - DNA, 4190 bp, Homo sapiens
  source 1..4190: mol_type = unassigned DNA
aagttcggagtcagcgccccttgtggtccggaagggaagtgacgttgttgctgggaagatggcgaccgcggcgactatcccatcggtagccacggccacagcagcggctctcggcgaggtggaggatgaagggctcctggcgtcgctgttccgggaccgcttccccgaggcccagtggcgcgagcggcccgatgtgggccgctacctccgggagttgagcggctcggggctggagcggctgcggcgcgagcccgagcgcctggcggaggagcgggcgcagctgctgcagcagacgcgcgacttggccttcgctaactacaagaccttcatccgcggcgccgagtgcaccgagcgcatccaccgcctgtttggcgacgtggaggcgtcgctcggccgcctgctcgaccgtttgcccagcttccagcagagctgcaggaactttgtgaaggaagccgaggagatcagctccaaccgccggatgaatagcctgaccctaaaccggcacacagaaattttggaaatactggagattcctcagctcatggacacctgtgtccggaacagttattatgaagaggccctggagcttgcagcctacgtacgccgactggagaggaaatactcttccatccctgtcatccagggcatcgtgaacgaagtgcgccagtccatgcagctgatgctgagccagctgatccagcaactgaggaccaacatccagcttcctgcctgcctccgtgtcattggctacctgcggcgcatggacgtcttcactgaggctgagttgagggtgaagtttcttcaggcccgagatgcttggctccggtccatcctgactgccattcctaatgatgatccctatttccatattacaaaaaccatcgaggcctcccgtgtccatctctttgatatcatcacccagtaccgtgccatcttctcagacgaggacccactgctgccccctgccatgggtgagcacactgtgaatgagagtgccatcttccatggctgggtgctacagaaggtctcacaattcctgcaggtgctggagaccgacctttaccggggcataggcggccacctggactctctgctgggccagtgcatgtactttgggctgtccttcagccgggtgggagctgatttccggggtcagttggctcctgttttccagcgggtggccatcagcactttccagaaagcaattcaggaaacagtggagaaattccaggaagaaatgaactcctacatgctcatctcggctccagccatcctgggcaccagtaacatgcctgctgctgtgccagccacccagccggggacgctgcagccacccatggtgctcctagatttcccacccctcgcctgctttctcaacaatattctggttgccttcaatgatctgcgcctctgctgccctgtggccctggcgcaggatgtgactggggccttggaagatgcccttgccaaggtaactaaaataatcctggccttccatcgcgctgaagaggctgccttcagcagcggggagcaagagctctttgtccagttctgcactgtcttcctggaagaccttgttccgtatttaaatcgctgtctccaagtcctttttccaccagctcagatagcacagactttaggcattcctcccactcagctctccaagtacggtaacctagggcatgtgaacatcggcgccattcaggagcccctcgcctttatcctgccaaagagagagacgcttttcaccctggatgaccaggcgctggggcccgagctcacagctccagcaccagagcctcccgccgaggagccacgcctggagcccgcgggcccagcctgcccggagggagggcgagcggagacgcaggccgaaccgcccagcgtggggccctagccggcgtcccctgcctccagaacgcgggctggaccccaatggagaacaggtggtgtggcaggcgagcgggtgggcagcccgcatcatccagcacgagatggaccacctgcagggctgcctgtttattgacaaaatggacagcaggacgttcacaaacgtctattggatgaaggtgaatgactaaagctttgctactggggctgaggattccggataccaagacgcaaacactttcactttgagctgggcaaatcttacttggcatcaacttggatggctcgcatatgacaggaaactggattgccaaggcatggcagactgagctggaggaagatgtcagaaatgtttgccctgaaatcagttacggacaaaatgttggctacaacttgaggagaaaaatcacccccaaaggagtggacatttcctaacaattctgtatggaggaaggtggggtaattgcattcgtctgcagtagacacgagttcctcggacctgtataatctcccaaagccaaggtttggtaataatgtagtccccaaatacctgaaagctgtctttaaaaatgcaggtaagcatgtgactggccatttgtgccgagttcttatttttacggagggcttgtggccttagacgccagtttgcttatggaaatgaaagagaatagtccctgttcaaggatgtgtttcatgacagcacgagtgtaaatgagtgcccacacattttaacagccttgggcaggattttgctgctgagatccctagagcagctggttcttggctcattcttggggtagaggccgtggatcagggctgggggcaggggtgacaattgagaagtgcactgagccctttcctgttaacaattgggcatagaaagcaggattagtacttcctggttatacacttattttgtaaaaatagaattaatatcacagcaaccaatgtgtaggtttaagaaagtggccaggtgcagtggttcacgcctgtaatcccagcactttgggagggcggggcgggtggatcacgaggtcaggagctcaagaccagcctggccaagatggtgaaaccctgtctctactaaagatacaaaaattagccgggcgtggtggcgagcacctgtaatcccagctactcgtgaagccaaggcagagaattacttgaacccaggaggcggaggttacagtgagctgagatcacgccactgcactccatccagcctgggcgacagagcgagactcaaaagtatgattctggctgtagagttttctttttttctctgtctcaaaaaaaaaaagtgtcagctttgtcttgtcaagaggtgaaggaacttgttttattcttttattttttttttaagatagagacgggggtcttactatgttgcccaggctggcctcaaattcctggtctcaggcaatcctcctgcctcggcctcccaaagtgctgggatcagttgtgagccacactacccagccaaactccagttttagttaaactgtttcacctcatttttatgctgagttttgtaaagtaggtattcttgctgaacagagtcctgaaaatcaaactatacaagtagtaggaagtccattaagctgtttagaggaaaaagtgttataaatggcagttaaatgaacccaggaaagacccatcctcctttgtggctttctctgaggccccatgaggccaagcagaagcaaactggctctaggtgcagccagactttgaaaaggaatcccggccaggcttggtggctcatgcctgtaatcccagcactttgggaggtcaaggcaggcagatcacctgaggtcaggagttcaagaccagcctggccaacatggcgaaacactgtttctactaaaaatatgaaaattagctgggtgtgctggtaggcgcctgtaatcacagctacttgggaggctgaggcgggagaatcgctcaaacctgggaggcagaggttgcagtgggctgagatctcgccactgtactccagcctgggcgacagaccaaggctctgtctcaaaaaaaaaaaaaaaaaaaaaaaaagggaatcccaaccagatactggtgcaaggtcagagatgcagccaatggggagatttgtagaaagctcatagatgctaaaaacatgggtctttaggaaaattagaattcagctgagcctcctttcatttggacaatgttcagaagctcttacagggggctatggcaatcttttgatgcttcttatagctttctgaggttaacgcttttgtggtgggcatcggtagcaataaaatgcaaactttattgca

SEQ ID NO: 6718 - DNA, 4814 bp, Homo sapiens
  source 1..4814: mol_type = unassigned DNA
ccaccttggccgggattaccctccgagttccaggccatgacaaatgacatcactcccggcccaggcttaaaatctccccatgtgaggggatgtgtttccttcagcctctgctgtctggccgctctgtctaggtcctgggccacgggagagccccgtccctcctttctgaaggccccctgacttgggcctcagtgtccccgaagatcatgatggcgtatatgaacccggggccccactattctgtcaacgccttggccctaagtggccccagtgtggatctgatgcaccaggctgtgccctacccaagcgcccccaggaagcagcggcgggagcgcaccaccttcacccggagccaactggaggagctggaggcactgtttgccaagacccagtacccagacgtctatgcccgtgaggaggtggctctgaagatcaatctgcctgagtccagggttcaggtttggttcaagaaccggagggctaaatgcaggcagcagcgacagcagcagaaacagcagcagcagcccccagggggccaggccaaggcccggcctgccaagaggaaggcgggcacgtccccaagaccctccacagatgtgtgtccagaccctctgggcatctcagattcctacagtccccctctgcccggcccctcaggctccccaaccacggcagtggccactgtgtccatctggagcccagcctcagagtcccctttgcctgaggcgcagcgggctgggctggtggcctcagggccgtctctgacctccgccccctatgccatgacctacgccccggcctccgctttctgctcttccccctccgcctatgggtctccgagctcctatttcagcggcctagacccctacctttctcccatggtgccccagctagggggcccggctcttagccccctctctggcccctccgtgggaccttccctggcccagtcccccacctccctatcaggccagagctatggcgcctacagccccgtggatagcttggaattcaaggaccccacgggcacctggaaattcacctacaatcccatggaccctctggactacaaggatcagagtgcctggaagtttcagatcttgtagaggacgcagtctccatctctctccatcgggcctcgggaccctttctcttctgaatctgcttccctgcagtttagatcccgggatggcattcctgagaaagcaacccgaaccagctgtccttctgacagctcggtgttcagcttacagagaccacccctttcctccacagggagaggctcctccctctcctgggacagctcacaggtcctagtgattctctcaaccctaacaccgtctggcacgattgtgaccgctgaagtacaccacgagctccaggcttcagaaagtggtgctgagaacttgctccaagaagaagtcaaaccaaacttgcagttgatttggggtcatgtttaggtcagaatcaccgtgcccttgaacaagcaggtaggggggcttgataacttaactttccacgtggacagaatttttttttttgttttgtttttgttttgcagacacagtctagctctgtcgcccaggctggagtgcagtggcacgatctcagctcactgcaagctctacctcccgggttcacgccattctcctgcctcagcctcccgagtagctgggactacagatgcccaccaccaggcccggctaattttttttgtatttttagtagagacggggtttcaccgtgttagccaggatggtctcgatctcctgacctcgtgatccgcccgcctcggcctcccaaagtgctaggattacaggcgtgagccaccgcgcccggcccttttttttttttttttttttaattgagacggagtctcactcttttgcttaggctggagtgcagtggtgtgatctcagctcactgactgcaacctccacctcccgggttgaagcgttgctcctgcctcaatctcccaattagctgggattacaggtgtgctccatcatgcccggctaatttttctattattagtagagacagggttttaccatgttggccaggctggtctggaacccctgacctcaagtgatccgcctgcctcggcctcccaaagtgctgggattacaggcatgagccattgtgcctggccctacacgtggacacttctttagcatatggttagggacctttctagaaattccaaagacagactttaagaagccccgtcgggaaaccttaggccaatgatgtggttacattaaaaataaattatctgggaatttcacagacttcacaaatgtcaggcttacatggtaggtttaggggaccgtttgagagacaaagatctacattcatatatgtagctatacatatatgtactttttcttcttagtttctttttaaagacattttatcactcattcgctcattagcacattgggaatgtgtgtatttggtagggaaatgaaaggcaccttgcctgttccatctctactccttttttcttttgttttaggattttctaaaggtgagacactggtggaactggggtagctgcttgggacgtaccacctatagttgtggctatttcacagagaagcagcagctagacagactcccatctgtaaataaacaagagataggaagagggggaaatagatttggaggaggcagccctacatttcaaacatacattcccttttttagatttttttttttttttttttggttttcagttttgatggtgggattggaaaatagagcttggcttgaggacattttcctggggtggcaccattatttcttgaaatagaatcttacttatggtgacactggcaagcacttgtgagaacctgaagacggattgaggtcatttgatgctcagaagttgggtgctgggtccctgccttctcagtccgagttctcctttcatttttgggtggggaggcgggttccaagagcccttcattggtggagttcacaaggcaaggtgtaaaaaaaaaagtagggcaggaagacagtggtgtgctggcagaggtctaacaatgggctctccaaggaagaggaaaaggttggttgtggagtgtttgtcagtttccgtggtgtaaatactcccaccacggctgacttcaagctagcaaccggaggtcactgaactaagagttgggaagagatagggcacaatatatgcttacgagttggtacacaccgtcagcagcagccagggtcaggagaaaggcgagatgtgaagagaggccgggaggtatcagatgacgtttccagcactagaccagaagaggtgcacacagcctagaccccctgaggggtacaccctgatctctagagcccacaaagaggtttttattcaacataaaacgtgttcatctctcataggcctgagtcatgctgggttctgggacattaagcccaggagtgggccgggtgcggtggctcacgcctgtaatcccagcactttgggaggccgaggcgggtggatcacctgaggtcaggagttcgagaccagcctggccaacatggtgaaaccctgtctctactaataatacaaaaattagccgggcatggtggcacgcgcctgtaatcccagctactcgggaggctgaggcaggagaattgctggaacccgggaggcggaggttgaagagagcagagattgtgccactgtgctctagcctgggtcacaagagcgaaactccgtctcaataataacaacaacaaaaataacccaggagtggctcaagagtccagtgtgggatgaaaatataaacagaggaagacaacatatgtcactggggaggctgggggagctagacaaaattcacacgggaggggcagggatgagacaatattgtgccctgggtctgtgcaaacgttgggaccagaatccactataagtttcattcttcggagacacggaagctctgcactggaggccgggactcaggcgtggaagagaatcttctccttattcaccggggaggctgtgtcttgtgcaaacaagtcatagaaacttgatgggagttggggagggactgaaggatgcatgcaaggttctgggaaggagtgagaagtagtgaaggccaaggggcccccatcacaggccgatggggtaagacttcgagagagcctgatcctggggtcttctgagactccaccaggagccggagagggcagggagccaaatccagctaggaggttacagattgcttttcctgggctgggctcctgagtgttggttcttccagctgtgcacaggggatttcaaacgttctacgtcctaaagccaggaagagtgacaaggcaggtggggacagaaggaagaagccaggagcctccctgagaaggtgtcaccttatctgtcctcctcttccccacacactggcctctgggtcccccttctctgtccacccacagagtgaaaccaattaaaatgttggatctcatttaaagtctgggtgattctttagtttccgtgttttctccaggaggggcaggtagaaacaggaactactctgttccttctgtctgtggggcctgggtccctccatgtgtttcctgtctcatcaccctcctttccttgacatctctctaaagccaatttatgaaggatcaggggctgggtgcagtggctcacgcatgtaatccagtgctctgagaagctgaggagggaagattgattaaggccaggagtttgagaccagcccaggcaacatagcgagatctctgtctctacaaaaaattaaaaaaatcaaccgggtgtggtgatgtgtgcctgtggtcccagctactcggga

SEQ ID NO: 6719 - DNA, 981 bp, Homo sapiens
  source 1..981: mol_type = unassigned DNA
atgatggcgtatatgaacccggggccccactattctgtcaacgccttggccctaagtggccccagtgtggatctgatgcaccaggctgtgccctacccaagccctcccctggccctggaccctccaaggagacagcggcaggagcgcacggtctacactgaaagccagcagaaagtgctagaattttactttcagaaggaccagtacccgaactacgaccagcgactgaatctggcggagatgctcagcctcagggagcaacagctgcaggtgtggttcaagaatcgccgcgccaaactagctcgggagcggcggctccagcagcagccccagcgcgtccctgggcagagaggccgaggagcccgcgctgcgcccctagtccctgtagccgctgcctccttccctgggggtcctgagttcccgcagggcaggggttcctggatctcccctcagccgggcccctggggagtcctcccagcagcagaaccgaagatctacagcctcccccggacctggggtggccctgagtgtggaacacaggagggcctcaaggctgtcccggctccaggccctggcccaatcccagcccctatcccaggcccagcccagatcccaggcccagtcccaggcccagccccgaatttaggcccaatgtcaggcccactgtcagtctcgatccccggtccaataccagcccccatctcttgcccaggcccaatcccagacccagtcctaggccgaaccctgatgccaggcccaggatcactcccaaccccagccccaggcgccttgtggcctcagagcccctatgcctccaacttgtcgccagacacccagttataccctgacttcaccaagctgctcccgctcctagaccggttcgaggaatcctcactctccaccacgacgtctcagtacaaagaggaggatggcttcgtggacaaaaatcactcagtccccaggtcattactggatttatag

SEQ ID NO: 6720 - DNA, 2275 bp, Homo sapiens
  source 1..2275: mol_type = unassigned DNA
taaaatctccccatgtgaggggatgtgtttccttcagcctctgctgtctggccgctctgtctaggtcctgggccacgggagagccccgtccctcctttctgaaggccccctgacttgggcctcagtgtccccgaagatcatgatggcgtatatgaacccggggccccactattctgtcaacgccttggccctaagtggccccagtgtggatctgatgcaccaggctgtgccctacccaagcgcccccaggaagcagcggcgggagcgcaccaccttcacccggagccaactggaggagctggaggcactgtttgccaagacccagtacccagacgtctatgcccgtgaggaggtggctctgaagatcaatctgcctgagtccagggttcaggtttggttcaagaaccggagggctaaatgcaggcagcagcgacagcagcagaaacagcagcagcagcccccagggggccaggccaaggcccggcctgccaagaggaaggcgggcacgtccccaagaccctccacagatgtgtgtccagaccctctgggcatctcagattcctacagtccccctctgcccggcccctcaggctccccaaccacggcagtggccactgtgtccatctggagcccagcctcagagtcccctttgcctgaggcgcagcgggctgggctggtggcctcagggccgtctctgacctccgccccctatgccatgacctacgccccggcctccgctttctgctcttccccctccgcctatgggtctccgagctcctatttcagcggcctagacccctacctttctcccatggtgccccagctagggggcccggctcttagccccctctctggcccctccgtgggaccttccctggcccagtcccccacctccctatcaggccagagctatggcgcctacagccccgtggatagcttggaattcaaggaccccacgggcacctggaaattcacctacaatcccatggaccctctggactacaaggatcagagtgcctggaagtttcagatcttgtagaggacgcagtctccatctctctccatcgggcctcgggaccctttctcttctgaatctgcttccctgcagtttagatcccgggatggcattcctgagaaagcaacccgaaccagctgtccttctgacagctcggtgttcagcttacagagaccacccctttcctccacagggagaggctcctccctctcctgggacagctcacaggtcctagtgattctctcaaccctaacaccgtctggcacgattgtgaccgctgaagtacaccacgagctccaggcttcagaaagtggtgctgagaacttgctccaagaagaagtcaaaccaaacttgcagttgatttggggtcatgtttaggtcagaatcaccgtgcccttgaacaagcaggtaggggggcttgataacttaactttccacgtggacagaatttttttttttgttttgtttttgttttgcagacacagtctagcctgggtcacaagagcgaaactccgtctcaataataacaacaacaaaaataacccaggagtggctcaagagtccagtgtgggatgaaaatataaacagaggaagacaacatatgtcactggggaggctgggggagctagacaaaattcacacgggaggggcagggatgagacaatattgtgccctgggtctgtgcaaacgttgggaccagaatccactataagtttcattcttcggagacacggaagctctgcactggaggccgggactcaggcgtggaagagaatcttctccttattcaccggggaggctgtgtcttgtgcaaacaagtcatagaaacttgatgggagttggggagggactgaaggatgcatgcaaggttctgggaaggagtgagaagtagtgaaggccaaggggcccccatcacaggccgatggggtaagacttcgagagagcctgatcctggggtcttctgagactccaccaggagccggagagggcagggagccaaatccagctaggaggttacagattgcttttcctgggctgggctcctgagtgttggttcttccagctgtgcacaggggatttcaaacgttctacgtcctaaagccaggaagagtgacaaggcaggtggggacagaaggaagaagccaggagcctccctgagaaggtgtcaccttatctgtcctcctcttccccacacactggcctctgggtcccccttctctgtccacccacagagtgaaaccaattaaaatgttggatctc

SEQ ID NO: 6721 - DNA, 2276 bp, Homo sapiens
  source 1..2276: mol_type = unassigned DNA
taaaatctccccatgtgaggggatgtgtttccttcagcctctgctgtctggccgctctgtctaggtcctgggccacgggagagccccgtccctcctttctgaaggccccctgacttgggcctcagtgtccccgaagatcatgatggcgtatatgaacccggggccccactattctgtcaacgccttggccctaagtggccccagtgtggatctgatgcaccaggctgtgccctacccaagcgcccccaggaagcagcggcgggagcgcaccaccttcacccggagccaactggaggagctggaggcactgtttgccaagacccagtacccagacgtctatgcccgtgaggaggtggctctgaagatcaatctgcctgagtccagggttcaggtttggttcaagaaccggagggctaaatgcaggcagcagcgacagcagcagaaacagcagcagcagcccccagggggccaggccaaggcccggcctgccaagaggaaggcgggcacgtccccaagaccctccacagatgtgtgtccagaccctctgggcatctcagattcctacagtccccctctgcccggcccctcaggctccccaaccacggcagtggccactgtgtccatctggagcccagcctcagagtcccctttgcctgaggcgcagcgggctgggctggtggcctcagggccgtctctgacctccgccccctatgccatgacctacgccccggcctccgctttctgctcttccccctccgcctatgggtctccgagctcctatttcagcggcctagacccctacctttctcccatggtgccccagctagggggcccggctcttagccccctctctggcccctccgtgggaccttccctggcccagtcccccacctccctatcaggccagagctatggcgcctacagccccgtggatagcttggaattcaaggaccccacgggcacctggaaattcacctacaatcccatggaccctctggactacaaggatcagagtgcctggaagtttcagatcttgtagaggacgcagtctccatctctctccatcgggcctcgggaccctttctcttctgaatctgcttccctgcagtttagatcccgggatggcattcctgagaaagcaacccgaaccagctgtccttctgacagctcggtgttcagcttacagagaccacccctttcctccacagggagaggctcctccctctcctgggacagctcacaggtcctagtgattctctcaaccctaacaccgtctggcacgattgtgaccgctgaagtacaccacgagctccaggcttcagaaagtggtgctgagaacttgctccaagaagaagtcaaaccaaacttgcagttgatttggggtcatgtttaggtcagaatcaccgtgcccttgaacaagcaggtaggggggcttgataacttaactttccacgtggacagaatttttttttttgttttgtttttattgtgccactgtgctctagcctgggtcacaagagcgaaactccgtctcaataataacaacaacaaaaataacccaggagtggctcaagagtccagtgtgggatgaaaatataaacagaggaagacaacatatgtcactggggaggctgggggagctagacaaaattcacacgggaggggcagggatgagacaatattgtgccctgggtctgtgcaaacgttgggaccagaatccactataagtttcattcttcggagacacggaagctctgcactggaggccgggactcaggcgtggaagagaatcttctccttattcaccggggaggctgtgtcttgtgcaaacaagtcatagaaacttgatgggagttggggagggactgaaggatgcatgcaaggttctgggaaggagtgagaagtagtgaaggccaaggggcccccatcacaggccgatggggtaagacttcgagagagcctgatcctggggtcttctgagactccaccaggagccggagagggcagggagccaaatccagctaggaggttacagattgcttttcctgggctgggctcctgagtgttggttcttccagctgtgcacaggggatttcaaacgttctacgtcctaaagccaggaagagtgacaaggcaggtggggacagaaggaagaagccaggagcctccctgagaaggtgtcaccttatctgtcctcctcttccccacacactggcctctgggtcccccttctctgtccacccacagagtgaaaccaattaaaatgttggatctca

SEQ ID NO: 6722 - DNA, 2241 bp, Homo sapiens
  source 1..2241: mol_type = unassigned DNA
ggccgctctgtctaggtcctgggccacgggagagccccgtccctcctttctgaaggccccctgacttgggcctcagtgtccccgaagatcatgatggcgtatatgaacccggggccccactattctgtcaacgccttggccctaagtggccccagtgtggatctgatgcaccaggctgtgccctacccaagcgcccccaggaagcagcggcgggagcgcaccaccttcacccggagccaactggaggagctggaggcactgtttgccaagacccagtacccagacgtctatgcccgtgaggaggtggctctgaagatcaatctgcctgagtccagggttcaggtttggttcaagaaccggagggctaaatgcaggcagcagcgacagcagcagaaacagcagcagcagcccccagggggccaggccaaggcccggcctgccaagaggaaggcgggcacgtccccaagaccctccacagatgtgtgtccagaccctctgggcatctcagattcctacagtccccctctgcccggcccctcaggctccccaaccacggcagtggccactgtgtccatctggagcccagcctcagagtcccctttgcctgaggcgcagcgggctgggctggtggcctcagggccgtctctgacctccgccccctatgccatgacctacgccccggcctccgctttctgctcttccccctccgcctatgggtctccgagctcctatttcagcggcctagacccctacctttctcccatggtgccccagctagggggcccggctcttagccccctctctggcccctccgtgggaccttccctggcccagtcccccacctccctatcaggccagagctatggcgcctacagccccgtggatagcttggaattcaaggaccccacgggcacctggaaattcacctacaatcccatggaccctctggactacaaggatcagagtgcctggaagtttcagatcttgtagaggacgcagtctccatctctctccatcgggcctcgggaccctttctcttctgaatctgcttccctgcagtttagatcccgggatggcattcctgagaaagcaacccgaaccagctgtccttctgacagctcggtgttcagcttacagagaccacccctttcctccacagggagaggctcctccctctcctgggacagctcacaggtcctagtgattctctcaaccctaacaccgtctggcacgattgtgaccgctgaagtacaccacgagctccaggcttcagaaagtggtgctgagaacttgctccaagaagaagtcaaaccaaacttgcagttgatttggggtcatgtttaggtcagaatcaccgtgcccttgaacaagcaggtaggggggcttgataacttaactttccacgtggacagaatttttttttttgttttgtttttgttttgcagacacaattgtgccactgtgctctagcctgggtcacaagagcgaaactccgtctcaataataacaacaacaaaaataacccaggagtggctcaagagtccagtgtgggatgaaaatataaacagaggaagacaacatatgtcactggggaggctgggggagctagacaaaattcacacgggaggggcagggatgagacaatattgtgccctgggtctgtgcaaacgttgggaccagaatccactataagtttcattcttcggagacacggaagctctgcactggaggccgggactcaggcgtggaagagaatcttctccttattcaccggggaggctgtgtcttgtgcaaacaagtcatagaaacttgatgggagttggggagggactgaaggatgcatgcaaggttctgggaaggagtgagaagtagtgaaggccaaggggcccccatcacaggccgatggggtaagacttcgagagagcctgatcctggggtcttctgagactccaccaggagccggagagggcagggagccaaatccagctaggaggttacagattgcttttcctgggctgggctcctgagtgttggttcttccagctgtgcacaggggatttcaaacgttctacgtcctaaagccaggaagagtgacaaggcaggtggggacagaaggaagaagccaggagcctccctgagaaggtgtcaccttatctgtcctcctcttccccacacactggcctctgggtcccccttctctgtccacccacagagtgaaaccaattaaaatgttggatctca

SEQ ID NO: 6723 - DNA, 4722 bp, Homo sapiens
  source 1..4722: mol_type = unassigned DNA
ccgggtccctccccatcccgcgacccaacggtcgttccccgccgccggccccgcccctccctggccgcccgcggcgcgccggcgcctgcgcagtcgccccagagcgccccgaccgggatggcggccgttttggagtcgctgctgcgagaagaggtgtcggtcgcagccgtcgtgcggtggatcgcgcgcagcacccagggttcggaggataacgctggggaggcggccgcgctgagctcactccgggccctgcggaaagaattcgtaccgttcctgttgaacttcctgagggagcagagcagccgcgtcctcccgcaggggcccccgacccccgccaagaccccgggcgcctcggcagccttgccagggaggccgggaggcccgccgcggggtagccgcggggcgcgcagccagcttttccctccgaccgaggcccagagcaccgctgccgaggcccctctggcccgccgcgggggcaggaggcggggcccggggccggcccgcgagcgtggaggccgcggcctggaggagggggtcagcggggagagcctgcccggagccgggggccggaggcttaggggctctggcagccccagccgccccagcctcacgctgtctgatccgccaaacctcagcaacctggaggagttccctcccgtaggctcggttccccccggccctacagagactcagctctcatgcaggagatgggtaccacgaaggctctggggagtcagtcattcgagctcggcgctccgcagtggagcgccaggatgcaggacgaagccttctcgcaggatcaacccaactccggtgagcgaagagcggtcactctccaagcccaagacctgcttcacctcacccccaatcagctgtgtccccagctctaagcagctgcagcagtcacctacccccacctgtcccaccccagaattggggtcgcccctccccagccggacaggaagcctcacagatgaacctgcagaccctgccagagtgtcttcccgccagcgcctggagcttgtagcccttgtttactcctcgtgcattgctgagaacctggtaccaaacctcttcttggagcttttcttcgtctttcagctcctcactgcccggaggatggtgactgccaaggacagcgaccctgaactaagtccagctgtcctagattccctggaaagtccactgttccaaagcatccacgattgtgtcttctttgcagtgcaggttttggagtgtcactttcaggttctttccaacctggacaaagggaccttgaagctgctggctgagaatgagcggctgctgtgcttctcaccagctctgcaaggccgccttcgagctgcctatgagggcagtgttgccaaggtctctctggtgatgcctccctctactcaagctgtctcctttcagccagagactgacaatcgtgccaacttctccagtgaccgagcctttcatacttttaagaaacagagggatgtgttttatgaggtgctgcgagagtgggaagatcaccatgaggagcctggctgggattttgagaagggcttgggcagcagaatcagggccatgatgggtcagctctccgcagcctgcagccacagccactttgttcggcttttccaaaaacaactactccagatgtgtcagagccctggtggtgctgggggcaccgtcttgggcgaggccccagatgtgttgagtatgctgggagctgacaagctggggcggttgtggcgcctacaggaacggcttatggctcctcagagcagtggggggccctgcccaccccccaccttcccaggctgtcaaggcttctttagggacttcatccttagtgccagcagcttccagtttaaccagcatctcatggacagtctgagcttgaagatccaggagctcaatggtcttgccctgccccagcatgagcccaatgatgaagacggggagtcagacgtagactggcagggtgagcggaagcaatttgctgtggtgcttcttagcctgagacttttggctaaattcctgggctttgtggctttcctgccataccgggggcctgaacctcccccgaccggtgagcttcaggactccattctggccctcaggagccaggtccctccggtcctggatgtgcggactctgctgcagcgagggctgcaggcccgccgggcggtgctcaccgtgccctggctggtggagtttctctcctttgctgaccatgttgttcccttgctggaatattaccgggacatcttcactctcctgctgcgcctgcaccggagcttggtgttgtcgcaggagagtgaggggaagatgtgtttcctgaacaagctgctgctacttgctgtcctgggctggcttttccagattcccacagtccctgaggacttgttctttctggaagagggtccctcatatgcctttgaggtggacacagtagccccagagcatggcttggacaatgcgcctgtggtggaccagcagctgctctacacctgctgcccctacatcggagagctccggaaactgctcgcttcgtgggtgtcaggcagtagtggacggagtgggggcttcatgaggaaaatcacccccaccactaccaccagcctgggagcccagccttcccagaccagccaggggctgcaggcacagctcgcccaggcctttttccacaaccagccgccctccttgcgccggaccgtagagttcgtggcagaaagaattggatcaaactgtgtcaaacatatcaaggctacactggtggcagatctggtgcgccaggcagagtcacttctccaagagcagctggtgacacagggagaggaagggggagacccagcccagctgttggagatcttgtgttcccagctgtgccctcacggggcccaggcattggccctggggcgggagttctgtcaaaggaagagccctggggctgtgcgggcgctgcttccagaggagaccccggcagccgttctgagcagtgcagagaacattgctgtggggcttgcaacagagaaagcctgtgcttggctgtcagccaacatcacagcactgatcaggagggaggtgaaagcagcagtgagtcgcacacttcgagcccagggtcctgaacctgctgcccggggggagcggaggggctgctcccgcgcctgtgagcaccatgctcccctcccctcccacctcatctccgagataaaagacgtgctctccttggccgtggggccacgggaccctgacgagggagtctccccagagcatctggaacagctcctaggccagctgggccagacgctgcggtgccgccagttcctgtgcccacctgctgagcagcatctggcaaagtgctctgtggagttagcttccctcctcgttgcagatcaaattcctatcctagggcccccggcacagtacaggctggagagagggcaggctcgaaggcttctgcacatgctgctttccttgtggaaggaagactttcaggggccggttccgctgcagctgctgctgagcccaagaaatgtggggcttctggcagacacaaggccaagggagtgggacttgctgctattcttgctacgggagctggtggagaagggtctgatgggacggatggagatagaggcctgcctgggcagcctccaccaggcccagtggccaggggactttgctgaagaattagcaacactgtctaatctgtttctagccgagccccacctgccagaaccccagctaagagcctgtgagttggtgcagccaaaccggggcactgtgctggcccagagctagggctgagaagtggccctgccttgggcattgcaccagaaccctggacccccgcctcacgaggaggcccaagtgcccaatgcagaccctcactggttggggtgtagctgggtctacagtcagacttcctgctctaagggtgtcactgcctggcatcccaccacgcgaatcctagaggaaggagagttggcctgatttgggattatggcagaaaagtccagagatgccagtcctggagtagaagaggtggtgtttgtttatctcttggatactaaatgaaatgaggtgtgtgggcttgtcaacacagaattcaagcctcatttgctatcccagcatctcttaaaactttgtagtcttggaattcatgacagaggcaaatgactcctgcttaacttatgaagaaagttaaaacatgaatcttgggagtctacattttcttatcaccaggagctggactgccatctccttataaatgcctaacacaggccgggtctggtggctcatgcctgtaatcccagcactttgagaggcctgaggtcggcggactgcctgaggtcaggaattcaagaccagcctggccaacatggcaaaaccccatctctactaaaaataaaaaaattattagctgggcatggtggtgtgtgcctgtaatcccagctactcaggaggatgaggcaggagacctgcttgaacctggaggtggaggttgcagtgagccgaggtcgcaccactgcactccagtctgggtaacagagcgagactttctagaaaaagcctaacaaacagataaggtaggactcaaccaactgaaacctgactttccccctgtaccttcagcccctgtgcaggtagtaacctcttgagacctctccctgaccagggaccaagcacagggcatttagagctttttagaataaactggttttcttt

SEQ ID NO: 6724 - DNA, 4728 bp, Homo sapiens
  source 1..4728: mol_type = unassigned DNA
ccgggtccctccccatcccgcgacccaacggtcgttccccgccgccggccccgcccctccctggccgcccgcggcgcgccggcgcctgcgcagtcgccccagagcgccccgaccgggatggcggccgttttggagtcgctgctgcgagaagaggtgtcggtcgcagccgtcgtgcggtggatcgcgcgcagcacccagggttcggaggataacgctggggaggcggccgcgctgagctcactccgggccctgcggaaagaattcgtaccgttcctgttgaacttcctgagggagcagagcagccgcgtcctcccgcaggggcccccgacccccgccaagaccccgggcgcctcggcagccttgccagggaggccgggaggcccgccgcggggtagccgcggggcgcgcagccagcttttccctccgaccgaggcccagagcaccgctgccgaggcccctctggcccgccgcgggggcaggaggcggggcccggggccggcccgcgagcgtggaggccgcggcctggaggagggggtcagcggggagagcctgcccggagccgggggccggaggcttaggggctctggcagccccagccgccccagcctcacgctgtctgatccgccaaacctcagcaacctggaggagttccctcccgtaggctcggttccccccggccctacagggacgaagccttctcgcaggatcaacccaactccggtgagcgaagagcggtcactctccaagcccaagacctgcttcacctcacccccaatcagctgtgtccccagttcccaaccctcagccctggacactagcccttggggccttggccttcccccagggtgcagaagtctgcaagaggagcgagagatgctcaggaaggagcgctctaagcagctgcagcagtcacctacccccacctgtcccaccccagaattggggtcgcccctccccagccggacaggaagcctcacagatgaacctgcagaccctgccagagtgtcttcccgccagcgcctggagcttgtagcccttgtttactcctcgtgcattgctgagaacctggtaccaaacctcttcttggagcttttcttcgtctttcagctcctcactgcccggaggatggtgactgccaaggacagcgaccctgaactaagtccagctgtcctagattccctggaaagtccactgttccaaagcatccacgattgtgtcttctttgcagtgcaggttttggagtgtcactttcaggttctttccaacctggacaaagggaccttgaagctgctggctgagaatgagcggctgctgtgcttctcaccagctctgcaaggccgccttcgagctgcctatgagggcagtgttgccaaggtctctctggtgatgcctccctctactcaagctgtctcctttcagccagagactgacaatcgtgccaacttctccagtgaccgagcctttcatacttttaagaaacagagggatgtgttttatgaggtgctgcgagagtgggaagatcaccatgaggagcctggctgggattttgagaagggcttgggcagcagaatcagggccatgatgggtcagctctccgcagcctgcagccacagccactttgttcggcttttccaaaaacaactactccagatgtgtcagagccctggtggtgctgggggcaccgtcttgggcgaggccccagatgtgttgagtatgctgggagctgacaagctggggcggttgtggcgcctacaggaacggcttatggctcctcagagcagtggggggccctgcccaccccccaccttcccaggctgtcaaggcttctttagggacttcatccttagtgccagcagcttccagtttaaccagcatctcatggacagtctgagcttgaagatccaggagctcaatggtcttgccctgccccagcatgagcccaatgatgaagacggggagtcagacgtagactggcagggtgagcggaagcaatttgctgtggtgcttcttagcctgagacttttggctaaattcctgggctttgtggctttcctgccataccgggggcctgaacctcccccgaccggtgagcttcaggactccattctggccctcaggagccaggtccctccggtcctggatgtgcggactctgctgcagcgagggctgcaggcccgccgggcggtgctcaccgtgccctggctggtggagtttctctcctttgctgaccatgttgttcccttgctggaatattaccgggacatcttcactctcctgctgcgcctgcaccggagcttggtgttgtcgcaggagagtgaggggaagatgtgtttcctgaacaagctgctgctacttgctgtcctgggctggcttttccagattcccacagtccctgaggacttgttctttctggaagagggtccctcatatgcctttgaggtggacacagtagccccagagcatggcttggacaatgcgcctgtggtggaccagcagctgctctacacctgctgcccctacatcggagagctccggaaactgctcgcttcgtgggtgtcaggcagtagtggacggagtgggggcttcatgaggaaaatcacccccaccactaccaccagcctgggagcccagccttcccagaccagccaggggctgcaggcacagctcgcccaggcctttttccacaaccagccgccctccttgcgccggaccgtagagttcgtggcagaaagaattggatcaaactgtgtcaaacatatcaaggctacactggtggcagatctggtgcgccaggcagagtcacttctccaagagcagctggtgacacagggagaggaagggggagacccagcccagctgttggagatcttgtgttcccagctgtgccctcacggggcccaggcattggccctggggcgggagttctgtcaaaggaagagccctggggctgtgcgggcgctgcttccagaggagaccccggcagccgttctgagcagtgcagagaacattgctgtggggcttgcaacagagaaagcctgtgcttggctgtcagccaacatcacagcactgatcaggagggaggtgaaagcagcagtgagtcgcacacttcgagcccagggtcctgaacctgctgcccggggggagcggaggggctgctcccgcgcctgtgagcaccatgctcccctcccctcccacctcatctccgagataaaagacgtgctctccttggccgtggggccacgggaccctgacgagggagtctccccagagcatctggaacagctcctaggccagctgggccagacgctgcggtgccgccagttcctgtgcccacctgctgagcagcatctggcaaagtgctctgtggagttagcttccctcctcgttgcagatcaaattcctatcctagggcccccggcacagtacaggctggagagagggcaggctcgaaggcttctgcacatgctgctttccttgtggaaggaagactttcaggggccggttccgctgcagctgctgctgagcccaagaaatgtggggcttctggcagacacaaggccaagggagtgggacttgctgctattcttgctacgggagctggtggagaagggtctgatgggacggatggagatagaggcctgcctgggcagcctccaccaggcccagtggccaggggactttgctgaagaattagcaacactgtctaatctgtttctagccgagccccacctgccagaaccccagctaagagcctgtgagttggtgcagccaaaccggggcactgtgctggcccagagctagggctgagaagtggccctgccttgggcattgcaccagaaccctggacccccgcctcacgaggaggcccaagtgcccaatgcagaccctcactggttggggtgtagctgggtctacagtcagacttcctgctctaagggtgtcactgcctggcatcccaccacgcgaatcctagaggaaggagagttggcctgatttgggattatggcagaaaagtccagagatgccagtcctggagtagaagaggtggtgtttgtttatctcttggatactaaatgaaatgaggtgtgtgggcttgtcaacacagaattcaagcctcatttgctatcccagcatctcttaaaactttgtagtcttggaattcatgacagaggcaaatgactcctgcttaacttatgaagaaagttaaaacatgaatcttgggagtctacattttcttatcaccaggagctggactgccatctccttataaatgcctaacacaggccgggtctggtggctcatgcctgtaatcccagcactttgagaggcctgaggtcggcggactgcctgaggtcaggaattcaagaccagcctggccaacatggcaaaaccccatctctactaaaaataaaaaaattattagctgggcatggtggtgtgtgcctgtaatcccagctactcaggaggatgaggcaggagacctgcttgaacctggaggtggaggttgcagtgagccgaggtcgcaccactgcactccagtctgggtaacagagcgagactttctagaaaaagcctaacaaacagataaggtaggactcaaccaactgaaacctgactttccccctgtaccttcagcccctgtgcaggtagtaacctcttgagacctctccctgaccagggaccaagcacagggcatttagagctttttagaataaactggttttcttt

SEQ ID NO: 6725 - DNA, 4478 bp, Homo sapiens
  source 1..4478: mol_type = unassigned DNA
gtgctcggggcttcactcccgcgcgtgaggcgagcgggcaagttggctgagggcgtgcggcagaggctgcttccctcggcgacgcgacccctcagcaactcaagctatgaactgaagctccctagggacggagaccggagcggagcggcggaggcagcagcagcagcagcagcagcagcagcagcagcagccgccgccgccgccgccttagcgggaactgagcagacccggcgcggagccacgactcctgcacgtttacctccctgtcgccgttcctgccggcggttggctaaaagacgttacagccgcgagacccgacacacaaaagccgctttctccgcgccgcccgcccagggaggctgcggccagcaagggaccccacctgagagcagctcgggctgctgagttcgttttgtgtctgagctctgcgctctgcacggaaccgaccccgtacccatggctctgataatggaaccggtgagcaaatggtctccgagtcaagtagtggactggatgaaaggtcttgatgactgtttgcagcagtatattaagaactttgagagggagaagatcagtggggaccagctgctgcgcattacacatcaggagctagaagatctgggggtcagccgcattggccatcaggaactgatcttggaagcagttgaccttctgtgtgcattgaattatggcttggaaacagaaaatctaaaaaccctttctcacaagttgaatgcatctgccaaaaatctgcagaattttataacaggaaggagaaggagtggccattatgatgggaggaccagccgaaaattgccaaacgactttctgacctcagttgtggatctgattggagcagccaagagtctgcttgcctggttggacaggtcaccatttgctgctgtgacagactattcagttacaagaaataatgtcatacaactctgcctggagttaacaacaattgtgcaacaggattgtactgtatatgaaacagagaataaaattcttcacgtgtgtaaaactctttctggagtctgtgaccacatcatatccctgtcgtcagatcctctggtttcacagtctgctcacctggaagtgattcaactggcaaacattaaaccaagcgaagggctgggtatgtatattaaatctacatatgatggcctccatgtaattactggaaccacagaaaattcacctgcagatcggtgcaagaaaatccatgctggcgatgaagtgattcaagttaatcatcagactgtggtggggtggcagttgaaaaatttggtgaatgcactacgagaggacccgagtggtgttatcttaactttgaaaaagcgacctcagagcatgcttacctcagcaccagctttactgaaaaatatgagatggaagccccttgctctgcagcctcttatacctagaagtcccacaagcagcgttgccacgccttccagcaccatcagtacacccaccaaaagagacagttctgccctccaggatctctacattccccctcctcctgcagaaccatatattcccagggatgaaaaaggaaaccttccttgtgaagacctcagaggacatatggtgggcaagccagtgcataagggatctgaatcaccaaattcatttctggatcaggaatatcgaaagagatttaatattgtcgaagaagatactgtcttatattgctatgaatatgaaaaaggaagatcaagtagtcaaggaagacgagaaagcaccccaacttatggcaagctacgacctatatctatgccagtggaatataattgggtgggggactatgaagatccaaataagatgaagagagatagtagaagagaaaactctctacttcggtatatgagcaatgaaaagattgctcaagaagaatacatgtttcagagaaacagcaaaaaggacacagggaagaagtcaaaaaagaagggtgataagagtaatagcccaactcactattcattgctacctagtttacaaatggatgcactgagacaagacatcatgggcactcctgtgccagagaccacactataccatacatttcagcagtcctcactgcagcacaaatcaaagaagaaaaacaaaggtcctatagcaggcaagagcaaaagacgaatttcttgcaaagatcttggccgtggtgactgtgagggctggctttggaaaaagaaagatgcgaagagttacttttcacagaaatggaaaaaatattggtttgtcctaaaggatgcatccctttattggtatattaatgaggaggatgaaaaagcagaaggattcattagcctgcctgaatttaaaattgatagagccagtgaatgccgcaaaaaatatgcattcaaagcctgtcatcctaaaatcaaaagcttttattttgctgctgaacatcttgatgatatgaacaggtggcttaacagaattaatatgctgactgcaggatatgcagaaagagagaggattaagcaggaacaagattactggagtgagagtgacaaggaagaagcagatactccatcaacaccaaaacaagatagccctccacccccatatgatacatacccacgacctccctcgatgagttgcgccagtccttatgtggaagcaaaacatagccgactttcctccacggagacttctcagtctcagtcttctcatgaggagtttcgccaggaagtaactgggagcagtgcagtgtctcccattcgcaagacagccagtcagcgccgctcctggcaggatttaattgagacgccactgacaagttcaggcttacactatcttcagactctgcccctggaggattctgtcttctctgactccgcggccatctccccagagcacaggcggcagtctaccctgccaactcagaaatgccacctgcaggatcactatgggccataccccttagctgagagtgagaggatgcaagtgctaaatggaaatgggggcaagcctcgaagttttactctgcctcgagatagcgggttcaaccattgctgtctgaatgctccagttagtgcctgtgacccacaggatgacgtgcaacccccagaggtggaggaagaggaggaggaggaggaggaggaaggggaggcagcaggggaaaacataggagaaaaaagctaatacactgcgagagttggtagaacctctccatgccaaatcggatccacttctgttggcactcaacccattggactcacagattgataagctaatgtttagagaatttagatcggagagagtcggtacggcgcagactcaacatcaacctcttgcaagcaactaaaatggcctcgtccttgctgtttataacagaaaacagacttgtaaaaagcttagatcatcaagtgttttggattgggggcctcccaaagggatataagaggggcaggccactcttaagaagaatgcgagctttctacattgggactagcataagatcaaagccaatcaagatggagcacagtaacagaaaactgcggtttctgtgggagaacagaaggggaaagggtcttaactgggaaagggctctgtgtggtaacacctcagttgtgttctcctgacaccaggaaaagagagggatcagcttcaataactagaaaattctggctgtttaatggactctttggtggcctctttaaggcaaagcagagaaagcaaattatgtattaagtgtattttgcatttttaaaacttgacgtgctgtattgtactaaattaagtgtaatctattaaggcaaggtatacacaatttgctttgaaacttactatgtttattctattataaagtgtattcaggtgcaacacagagactgctttcggtgacattaatgaagaaaatttctcatgccaggctttattatagaatcttcagctaaaatcctaactttctccttatttcttggcacttgtatacaagtggtgttgcctcttagggcaggcatgagctattcttttctgtaaaatattttgaatctataggctgtgggtttcatttttgaaaagtattttgtctggatgtctttcaaactagcttcagatattatttaatactatgtaactgggtcccctatggctcaatcaatattgcttatttttcttctgtagtggatgtgaaatttcctttagttggataagatacactgtaataattttaatgctaattaatgatatttcatactgtgcaatgaacagataatttaacactgtattttgaaatgtttttttcttcctgtcaccgcagtgtgtggtattgcataatgtgaatacctgtaaaaatataaattacttaaaaataaaaatatgaccaattggtatcagatcttttcagatagctaaataatttgctaagtatgcctgatagtaaatatctttctaaaaagaagtaatcagtgcttctttctcacaaatggaatttgtgtctgtgaataaaatcacattgatctgcc

SEQ ID NO: 6726 - DNA, 5315 bp, Homo sapiens
  source 1..5315: mol_type = unassigned DNA
gagctctgcgctctgcacggaaccgaccccgtacccatggctctgataatggaaccggtgagcaaatggtctccgagtcaagtagtggactggatgaaaggtcttgatgactgtttgcagcagtatattaagaactttgagagggagaagatcagtggggaccagctgctgcgcattacacatcaggagctagaagatctgggggtcagccgcattggccatcaggaactgatcttggaagcagttgaccttctgtgtgcattgaattatggcttggaaacagaaaatctaaaaaccctttctcacaagttgaatgcatctgccaaaaatctgcagaattttataacaggaaggagaaggagtggccattatgatgggaggaccagccgaaaattgccaaacgactttctgacctcagttgtggatctgattggagcagccaagagtctgcttgcctggttggacaggtcaccatttgctgctgtgacagactattcagttacaagaaataatgtcatacaactctgcctggagttaacaacaattgtgcaacaggattgtactgtatatgaaacagagaataaaattcttcacgtgtgtaaaactctttctggagtctgtgaccacatcatatccctgtcgtcagatcctctggtttcacagtctgctcacctggaagtgattcaactggcaaacattaaaccaagcgaagggctgggtatgtatattaaatctacatatgatggcctccatgtaattactggaaccacagaaaattcacctgcagatcggtgcaagaaaatccatgctggcgatgaagtgattcaagttaatcatcagactgtggtggggtggcagttgaaaaatttggtgaatgcactacgagaggacccgagtggtgttatcttaactttgaaaaagcgacctcagagcatgcttacctcagcaccagctttactgaaaaatatgagatggaagccccttgctctgcagcctcttatacctagaagtcccacaagcagcgttgccacgccttccagcaccatcagtacacccaccaaaagagacagttctgccctccaggatctctacattccccctcctcctgcagaaccatatattcccagggatgaaaaaggaaaccttccttgtgaagacctcagaggacatatggtgggcaagccagtgcataagggatctgaatcaccaaattcatttctggatcaggaatatcgaaagagatttaatattgtcgaagaagatactgtcttatattgctatgaatatgaaaaaggaagatcaagtagtcaaggaagacgagaaagcaccccaacttatggcaagctacgacctatatctatgccagtggaatataattgggtgggggactatgaagatccaaataagatgaagagagatagtagaagagaaaactctctacttcggtatatgagcaatgaaaagattgctcaagaagaatacatgtttcagagaaacagcaaaaaggacacagggaagaagtcaaaaaagaagggtgataagagtaatagcccaactcactattcattgctacctagtttacaaatggatgcactgagacaagacatcatgggcactcctgtgccagagaccacactataccatacatttcagcagtcctcactgcagcacaaatcaaagaagaaaaacaaaggtcctatagcaggcaagagcaaaagacgaatttcttgcaaagatcttggccgtggtgactgtgagggctggctttggaaaaagaaagatgcgaagagttacttttcacagaaatggaaaaaatattggtttgtcctaaaggatgcatccctttattggtatattaatgaggaggatgaaaaagcagaaggattcattagcctgcctgaatttaaaattgatagagccagtgaatgccgcaaaaaatatgcattcaaagcctgtcatcctaaaatcaaaagcttttattttgctgctgaacatcttgatgatatgaacaggtggcttaacagaattaatatgctgactgcaggatatgcagaaagagagaggattaagcaggaacaagattactggagtgagagtgacaaggaagaagcagatactccatcaacaccaaaacaagatagccctccacccccatatgatacatacccacgacctccctcgatgagttgcgccagtccttatgtggaagcaaaacatagccgactttcctccacggagacttctcagtctcagtcttctcatgaggagtttcgccaggaagtaactgggagcagtgcagtgtctcccattcgcaagacagccagtcagcgccgctcctggcaggatttaattgagacgccactgacaagttcaggcttacactatcttcagactctgcccctggaggattctgtcttctctgactccgcggccatctccccagagcacaggcggcagtctaccctgccaactcagaaatgccacctgcaggatcactatgggccataccccttagctgagagtgagaggatgcaagtgctaaatggaaatgggggcaagcctcgaagttttactctgcctcgagatagcgggttcaaccattgctgtctgaatgctccagttagtgcctgtgacccacaggatgacgtgcaacccccagaggtggaggaagaggaggaggaggaggaggaggaaggggaggcagcaggggaaaacataggagaaaaaagtgaaagcagagaagaaaagttaggagactcattgcaagatttatacagggcactggagcaggccagtctgtcaccactaggagaacatcgtatttcaaccaagatggaatacaagctatcatttataaaaagatgtaatgatcctgtaatgaatgaaaaactacaccggctgagaattctcaaaagcactttaaaggccagagaaggggaagtagccattatcgataaagtcctagacaatccagacttgacatctaaagaattccaacaatggaagcagatgtacctcgaccttttcttggatatctgtcaaaataccacctcaaatgacccactgagtatttcttctgaagtagatgtaatcacttcctctctagcacacactcattcatacattgaaacgcatgtctaaatgtattctgccttcagaccatctagtacctgctggtactctgaacaagtatataaggtagtttttatatcaatgtgtggaacacttgacaagctatactttaatgttaccaaactatatgaaacaaaccatatatggtcacaataccactatctttaatgagcatttgtatattttatatgcaacagtgctcagcttatgtttaccatgtgcaaaatcaactgtctttaatgacttaaaattaacttttgcaaacaattctaaatacaggtggtcttcaagtagtaaaaccacaaaaggcagttttctatctatggtcatcttttctccctttaagttaattttatataaacaagacttcaaaagtaaatcacattttttcaggtgcagacatccttgtgggtgggaaagaatttaaaccttttttatatttattaaaatgttctaagaattttcttaaacattgcacaaagtttaatgctgtagttttatttttgtgaaatgtagatgcgcatacaagagctaagcaaaatagaagagcatcgacataagaaaagttcaggtatctaatattcgtcttaatagtctattaacttgtgaaagctaagttaatggaaatattattccaaatctatgagaacacttggtgtatcagggcaaagctttgtaagatgtttttgtaactaagaccaaaattgaagatagagctgctttattttcttggtttaaatcttcctttatttttgtagtgatgagatgctgattgtgtacagaagaatttgagaggggatttttaaaaactgacttaacacacccagaaaggcagctaacagctatatatatatataaatttcagcccaaactcatgtttttaaactccaactcttaaaagacaacaaggtataaactgaaatgaatcaactttccacttagtttccaattttcccctagtccactaattaaacttaggtaattatacttcaggtagggaagtacaatatgtttagtttcaggctgatgtgtgttataaaaaacaacactgaaaaataaaaatgtacttcccttctaaggagcaagcaggtgatggtcattcaaagagatgtcacattgaattatgagagaaacaatttagaggtttttttcctggcttcatgaattgttctatagagtggatgaagtctaaggaaaagtcctcttcatatatttccatttataagcgtcttgtttttgaaagtgatcacagcatgaaaatgactgtgctgctttttagtgtctggctgcataatgtacaagtcacaatttgctgtttttttcaggaggagaaagggaacctcctttactattctatatcctaaaatctacttctaatcagctttatactgttgcctgtacagctcagtgaatgtactttcatctttaagagttcagatatatgccagtgaatatttttgctgtagaggagaaagtaaaaactccacagcggggatctttttctttgcttttgaaaccaccattgaatcactatcgttttgcagactttgcacaactgtacaggagagtggcctttctacagcacattttcagtaatcctatatttagtcaaaatggatgagaaatcatgtattaatgtttgtatggaattttgggtccagtgtaatatttttatcatttaaaaagaactctatttgtaaaaacatttatttactgcatggatattgacgcacattaaatttgtgggattttgtatatgtaaaaaaaaaaaaaaaaaaaaaacaaaaaacctcttgtcctaaaatgaagtgtgcttgttaacaggtgtttagacttattgatgtttactagaccaaatgtgtatgttcacttaaaaatatatgtacctgatggatgtgtcatgtttacagtggccaggttgtggcctgtaaacagcaagcagttgacgggaagactagctctgttgctactaagcagcttttacttttgtaaagtcagctctgttgttttaaatggtaaaaattaaactaatgaatttgacaagactcgtggctagcctagcatgaaagagaccttttaacactatataatatctgtacattttattgcattcgtttcaaatctaggagagaggcagcactgtaaactgaagtcaaataaattcagctcttaatgaatcctta

SEQ ID NO: 6727 - DNA, 5668 bp, Homo sapiens
  source 1..5668: mol_type = unassigned DNA
gtcatttccgccgggcagctagtcgtgctcggggcttcactcccgcgcgtgaggcgagcgggcaagttggctgagggcgtgcggcagaggctgcttccctcggcgacgcgacccctcagcaactcaagctatgaactgaagctccctagggacggagaccggagcggagcggcggaggcagcagcagcagcagcagcagcagcagcagcagcagccgccgccgccgccgccttagcgggaactgagcagacccggcgcggagccacgactcctgcacgtttacctccctgtcgccgttcctgccggcggttggctaaaagacgttacagccgcgagacccgacacacaaaagccgctttctccgcgccgcccgcccagggaggctgcggccagcaagggaccccacctgagagcagctcgggctgctgagttcgttttgtgtctgagctctgcgctctgcacggaaccgaccccgtacccatggctctgataatggaaccggtgagcaaatggtctccgagtcaagtagtggactggatgaaaggtcttgatgactgtttgcagcagtatattaagaactttgagagggagaagatcagtggggaccagctgctgcgcattacacatcaggagctagaagatctgggggtcagccgcattggccatcaggaactgatcttggaagcagttgaccttctgtgtgcattgaattatggcttggaaacagaaaatctaaaaaccctttctcacaagttgaatgcatctgccaaaaatctgcagaattttataacaggaaggagaaggagtggccattatgatgggaggaccagccgaaaattgccaaacgactttctgacctcagttgtggatctgattggagcagccaagagtctgcttgcctggttggacaggtcaccatttgctgctgtgacagactattcagttacaagaaataatgtcatacaactctgcctggagttaacaacaattgtgcaacaggattgtactgtatatgaaacagagaataaaattcttcacgtgtgtaaaactctttctggagtctgtgaccacatcatatccctgtcgtcagatcctctggtttcacagtctgctcacctggaagtgattcaactggcaaacattaaaccaagcgaagggctgggtatgtatattaaatctacatatgatggcctccatgtaattactggaaccacagaaaattcacctgcagatcggtgcaagaaaatccatgctggcgatgaagtgattcaagttaatcatcagactgtggtggggtggcagttgaaaaatttggtgaatgcactacgagaggacccgagtggtgttatcttaactttgaaaaagcgacctcagagcatgcttacctcagcaccagctttactgaaaaatatgagatggaagccccttgctctgcagcctcttatacctagaagtcccacaagcagcgttgccacgccttccagcaccatcagtacacccaccaaaagagacagttctgccctccaggatctctacattccccctcctcctgcagaaccatatattcccagggatgaaaaaggaaaccttccttgtgaagacctcagaggacatatggtgggcaagccagtgcataagggatctgaatcaccaaattcatttctggatcaggaatatcgaaagagatttaatattgtcgaagaagatactgtcttatattgctatgaatatgaaaaaggaagatcaagtagtcaaggaagacgagaaagcaccccaacttatgaaaactctctacttcggtatatgagcaatgaaaagattgctcaagaagaatacatgtttcagagaaacagcaaaaaggacacagggaagaagtcaaaaaagaagggtgataagagtaatagcccaactcactattcattgctacctagtttacaaatggatgcactgagacaagacatcatgggcactcctgtgccagagaccacactataccatacatttcagcagtcctcactgcagcacaaatcaaagaagaaaaacaaaggtcctatagcaggcaagagcaaaagacgaatttcttgcaaagatcttggccgtggtgactgtgagggctggctttggaaaaagaaagatgcgaagagttacttttcacagaaatggaaaaaatattggtttgtcctaaaggatgcatccctttattggtatattaatgaggaggatgaaaaagcagaaggattcattagcctgcctgaatttaaaattgatagagccagtgaatgccgcaaaaaatatgcattcaaagcctgtcatcctaaaatcaaaagcttttattttgctgctgaacatcttgatgatatgaacaggtggcttaacagaattaatatgctgactgcaggatatgcagaaagagagaggattaagcaggaacaagattactggagtgagagtgacaaggaagaagcagatactccatcaacaccaaaacaagatagccctccacccccatatgatacatacccacgacctccctcgatgagttgcgccagtccttatgtggaagcaaaacatagccgactttcctccacggagacttctcagtctcagtcttctcatgaggagtttcgccaggaagtaactgggagcagtgcagtgtctcccattcgcaagacagccagtcagcgccgctcctggcaggatttaattgagacgccactgacaagttcaggcttacactatcttcagactctgcccctggaggattctgtcttctctgactccgcggccatctccccagagcacaggcggcagtctaccctgccaactcagaaatgccacctgcaggatcactatgggccataccccttagctgagagtgagaggatgcaagtgctaaatggaaatgggggcaagcctcgaagttttactctgcctcgagatagcgggttcaaccattgctgtctgaatgctccagttagtgcctgtgacccacaggatgacgtgcaacccccagaggtggaggaagaggaggaggaggaggaggaggaaggggaggcagcaggggaaaacataggagaaaaaagtgaaagcagagaagaaaagttaggagactcattgcaagatttatacagggcactggagcaggccagtctgtcaccactaggagaacatcgtatttcaaccaagatggaatacaagctatcatttataaaaagatgtaatgatcctgtaatgaatgaaaaactacaccggctgagaattctcaaaagcactttaaaggccagagaaggggaagtagccattatcgataaagtcctagacaatccagacttgacatctaaagaattccaacaatggaagcagatgtacctcgaccttttcttggatatctgtcaaaataccacctcaaatgacccactgagtatttcttctgaagtagatgtaatcacttcctctctagcacacactcattcatacattgaaacgcatgtctaaatgtattctgccttcagaccatctagtacctgctggtactctgaacaagtatataaggtagtttttatatcaatgtgtggaacacttgacaagctatactttaatgttaccaaactatatgaaacaaaccatatatggtcacaataccactatctttaatgagcatttgtatattttatatgcaacagtgctcagcttatgtttaccatgtgcaaaatcaactgtctttaatgacttaaaattaacttttgcaaacaattctaaatacaggtggtcttcaagtagtaaaaccacaaaaggcagttttctatctatggtcatcttttctccctttaagttaattttatataaacaagacttcaaaagtaaatcacattttttcaggtgcagacatccttgtgggtgggaaagaatttaaaccttttttatatttattaaaatgttctaagaattttcttaaacattgcacaaagtttaatgctgtagttttatttttgtgaaatgtagatgcgcatacaagagctaagcaaaatagaagagcatcgacataagaaaagttcaggtatctaatattcgtcttaatagtctattaacttgtgaaagctaagttaatggaaatattattccaaatctatgagaacacttggtgtatcagggcaaagctttgtaagatgtttttgtaactaagaccaaaattgaagatagagctgctttattttcttggtttaaatcttcctttatttttgtagtgatgagatgctgattgtgtacagaagaatttgagaggggatttttaaaaactgacttaacacacccagaaaggcagctaacagctatatatatatataaatttcagcccaaactcatgtttttaaactccaactcttaaaagacaacaaggtataaactgaaatgaatcaactttccacttagtttccaattttcccctagtccactaattaaacttaggtaattatacttcaggtagggaagtacaatatgtttagtttcaggctgatgtgtgttataaaaaacaacactgaaaaataaaaatgtacttcccttctaaggagcaagcaggtgatggtcattcaaagagatgtcacattgaattatgagagaaacaatttagaggtttttttcctggcttcatgaattgttctatagagtggatgaagtctaaggaaaagtcctcttcatatatttccatttataagcgtcttgtttttgaaagtgatcacagcatgaaaatgactgtgctgctttttagtgtctggctgcataatgtacaagtcacaatttgctgtttttttcaggaggagaaagggaacctcctttactattctatatcctaaaatctacttctaatcagctttatactgttgcctgtacagctcagtgaatgtactttcatctttaagagttcagatatatgccagtgaatatttttgctgtagaggagaaagtaaaaactccacagcggggatctttttctttgcttttgaaaccaccattgaatcactatcgttttgcagactttgcacaactgtacaggagagtggcctttctacagcacattttcagtaatcctatatttagtcaaaatggatgagaaatcatgtattaatgtttgtatggaattttgggtccagtgtaatatttttatcatttaaaaagaactctatttgtaaaaacatttatttactgcatggatattgacgcacattaaatttgtgggattttgtatatgtaaaaaaaaaaaaaaaaaaaaaacaaaaaacctcttgtcctaaaatgaagtgtgcttgttaacaggtgtttagacttattgatgtttactagaccaaatgtgtatgttcacttaaaaatatatgtacctgatggatgtgtcatgtttacagtggccaggttgtggcctgtaaacagcaagcagttgacgggaagactagctctgttgctactaagcagcttttacttttgtaaagtcagctctgttgttttaaatggtaaaaattaaactaatgaatttgacaagactcgtggctagcctagcatgaaagagaccttttaacactatataatatctgtacattttattgcattcgtttcaaatctaggagagaggcagcactgtaaactgaagtcaaataaattcagctcttaatgaatcctt

SEQ ID NO: 6728 - DNA, 4355 bp, Homo sapiens
  source 1..4355: mol_type = unassigned DNA
gtcatttccgccgggcagctagtcgtgctcggggcttcactcccgcgcgtgaggcgagcgggcaagttggctgagggcgtgcggcagaggctgcttccctcggcgacgcgacccctcagcaactcaagctatgaactgaagctccctagggacggagaccggagcggagcggcggaggcagcagcagcagcagcagcagcagcagcagcagcagccgccgccgccgccgccttagcgggaactgagcagacccggcgcggagccacgactcctgcacgtttacctccctgtcgccgttcctgccggcggttggctaaaagacgttacagccgcgagacccgacacacaaaagccgctttctccgcgccgcccgcccagggaggctgcggccagcaagggaccccacctgagagcagctcgggctgctgagttcgttttgtgtctgagctctgcgctctgcacggaaccgaccccgtacccatggctctgataatggaaccggtgagcaaatggtctccgagtcaagtagtggactggatgaaaggtcttgatgactgtttgcagcagtatattaagaactttgagagggagaagatcagtggggaccagctgctgcgcattacacatcaggagctagaagatctgggggtcagccgcattggccatcaggaactgatcttggaagcagttgaccttctgtgtgcattgaattatggcttggaaacagaaaatctaaaaaccctttctcacaagttgaatgcatctgccaaaaatctgcagaattttataacaggaaggagaaggagtggccattatgatgggaggaccagccgaaaattgccaaacgactttctgacctcagttgtggatctgattggagcagccaagagtctgcttgcctggttggacaggtcaccatttgctgctgtgacagactattcagttacaagaaataatgtcatacaactctgcctggagttaacaacaattgtgcaacaggattgtactgtatatgaaacagagaataaaattcttcacgtgtgtaaaactctttctggagtctgtgaccacatcatatccctgtcgtcagatcctctggtttcacagtctgctcacctggaagtgattcaactggcaaacattaaaccaagcgaagggctgggtatgtatattaaatctacatatgatggcctccatgtaattactggaaccacagaaaattcacctgcagatcggtgcaagaaaatccatgctggcgatgaagtgattcaagttaatcatcagactgtgcctcttatacctagaagtcccacaagcagcgttgccacgccttccagcaccatcagtacacccaccaaaagagacagttctgccctccaggatctctacattccccctcctcctgcagaaccatatattcccagggatgaaaaaggaaaccttccttgtgaagacctcagaggacatatggtgggcaagccagtgcataagggatctgaatcaccaaattcatttctggatcaggaatatcgaaagagatttaatattgtcgaagaagatactgtcttatattgctatgaatatgaaaaaggaagatcaagtagtcaaggaagacgagaaagcaccccaacttatggcaagctacgacctatatctatgccagtggaatataattgggtgggggactatgaagatccaaataagatgaagagagatagtagaagagaaaactctctacttcggtatatgagcaatgaaaagattgctcaagaagaatacatgtttcagagaaacagcaaaaaggacacagggaagaagtcaaaaaagaagggtgataagagtaatagcccaactcactattcattgctacctagtttacaaatggatgcactgagacaagacatcatgggcactcctgtgccagagaccacactataccatacatttcagcagtcctcactgcagcacaaatcaaagaagaaaaacaaaggtcctatagcaggcaagagcaaaagacgaatttcttgcaaagatcttggccgtggtgactgtgagggctggctttggaaaaagaaagatgcgaagagttacttttcacagaaatggaaaaaatattggtttgtcctaaaggatgcatccctttattggtatattaatgaggaggatgaaaaagcagaaggattcattagcctgcctgaatttaaaattgatagagccagtgaatgccgcaaaaaatatgcattcaaagcctgtcatcctaaaatcaaaagcttttattttgctgctgaacatcttgatgatatgaacaggtggcttaacagaattaatatgctgactgcaggatatgcagaaagagagaggattaagcaggaacaagattactggagtgagagtgacaaggaagaagcagatactccatcaacaccaaaacaagatagccctccacccccatatgatacatacccacgacctccctcgatgagttgcgccagtccttatgtggaagcaaaacatagccgactttcctccacggagacttctcagtctcagtcttctcatgaggagtttcgccaggaagtaactgggagcagtgcagtgtctcccattcgcaagacagccagtcagcgccgctcctggcaggatttaattgagacgccactgacaagttcaggcttacactatcttcagactctgcccctggaggattctgtcttctctgactccgcggccatctccccagagcacaggcggcagtctaccctgccaactcagaaatgccacctgcaggatcactatgggccataccccttagctgagagtgagaggatgcaagtgctaaatggaaatgggggcaagcctcgaagttttactctgcctcgagatagcgggttcaaccattgctgtctgaatgctccagttagtgcctgtgacccacaggatgacgtgcaacccccagaggtggaggaagaggaggaggaggaggaggaggaaggggaggcagcaggggaaaacataggagaaaaaagctaatacactgcgagagttggtagaacctctccatgccaaatcggatccacttctgttggcactcaacccattggactcacagattgataagctaatgtttagagaatttagatcggagagagtcggtacggcgcagactcaacatcaacctcttgcaagcaactaaaatggcctcgtccttgctgtttataacagaaaacagacttgtaaaaagcttagatcatcaagtgttttggattgggggcctcccaaagggatataagaggggcaggccactcttaagaagaatgcgagctttctacattgggactagcataagatcaaagccaatcaagatggagcacagtaacagaaaactgcggtttctgtgggagaacagaaggggaaagggtcttaactgggaaagggctctgtgtggtaacacctcagttgtgttctcctgacaccaggaaaagagagggatcagcttcaataactagaaaattctggctgtttaatggactctttggtggcctctttaaggcaaagcagagaaagcaaattatgtattaagtgtattttgcatttttaaaacttgacgtgctgtattgtactaaattaagtgtaatctattaaggcaaggtatacacaatttgctttgaaacttactatgtttattctattataaagtgtattcaggtgcaacacagagactgctttcggtgacattaatgaagaaaatttctcatgccaggctttattatagaatcttcagctaaaatcctaactttctccttatttcttggcacttgtatacaagtggtgttgcctcttagggcaggcatgagctattcttttctgtaaaatattttgaatctataggctgtgggtttcatttttgaaaagtattttgtctggatgtctttcaaactagcttcagatattatttaatactatgtaactgggtcccctatggctcaatcaatattgcttatttttcttctgtagtggatgtgaaatttcctttagttggataagatacactgtaataattttaatgctaattaatgatatttcatactgtgcaatgaacagataatttaacactgtattttgaaatgtttttttcttcctgtcaccgcagtgtgtggtattgcataatgtgaatacctgtaaaaatataaattacttaaaaataaaaatatgaccaattggtatcagatcttttcagatagctaaataatttgctaagtatgcctgatagtaaatatctttctaaaaagaagtaatcagtgcttctttctcacaaatggaatttgtgtctgtgaataaaatcacattgatctgcc

SEQ ID NO: 6729 - DNA, 645 bp, Homo sapiens
  source 1..645: mol_type = unassigned DNA
ggggcggaaaggcgagaggtgtctcctccaccggagccaggggagacccgagcaagctccgtgacagcacgtcggccgccatgtcgccgagtggggctggaaacagacccggcgcccagcggtagccctccttgcgcctccgattcccagacatggaaggtctttaatgtaactttaaatggttcaccaaaggatgctctaatggatgacagcgatactcctacatattatctgcaaatagaaccacaagatggatgtcatcctggtgacagcgtggaaaggagtgtgacctgtctgccttctgcatcagatgaaaatgaaaatcagcttgacggggacgggcatgagcatctgaccagcagtgacagtgcgatgggaaagccccaagtgtctgagcaggacagtctcaataataatgaaagctgcacattgagctgcgaggtggctgcaggtgagaacttgcaaaacaccctttgtgaagcctccagagatgaacaggccttcttgggaaaggacaaaaaaattcctggaaaaagaagtccaagaagcaaaaaagggactgctaagaagataccaccagatagcagaatcctatttccaggaggaggactatgagaaagcaatgaaattcattcagctagaacg

SEQ ID NO: 6730 - DNA, 2422 bp, Homo sapiens
  source 1..2422: mol_type = unassigned DNA
cgcgggccgccagcctccagccggccagccgcgaggggtgcgcagagggaggcggggcggaaaggcgagaggtgtctcctccaccggagccaggggagacccgagcaagctccgtgacagcacgtcggccgccatgtcgccgagtggggctggaaacagacccggcgcccagcggtagccctccttgcgcctccgattcccaggtgaggagaggaggagcgggatgcaggggacccgccggctcgcggccgggatggaaagcctttcggaagcctctcgctcctccccctgcgctgtcctcctccagccgcgcagcctctgccctccggacatggaaggtctttaatgtaactttaaatggttcaccaaaggatgctctaatggatgacagcgatactcctacatattatctgcaaatagaaccacaagatggatgtcatcctggtgacagcgtggaaaggagtgtgacctgtctgccttctgcatcagatgaaaatgaaaatcagcttgacggggacgggcatgagcatctgaccagcagtgacagtgcgatgggaaagccccaagtgtctgagcaggacagtctcaataataatgaaagctgcacattgagctgcgaggtggctgcaggtgagaacttgcaaaacaccctttgtgaagcctccagagatgaacaggccttcttgggaaaggacaaaaaaattcctggaaaaagaagtccaagaagcaaaaaagggactgctaagaagataccaccaggacttttttcaggagatattgcacctttaatgcaagaaaaagtactaagcgcagtcacatatgctgttgatgatgaagaagctgctgaagtaaatgctaatgagcagccagaggcgccaaagcttgttctgcagtctctgttttcacttatacgaggtgaagttgagcagttggattcaagagcacttcccctttgccttcatcagatagcagaatcctatttccaggaggaggactatgagaaagcaatgaaattcattcagctagaacgattgtatcatgagcaattgctcgcaaatctttctgccattcaagaacagtgggaaacaaaatggaaaactgtgcaaccacatacagttacggctctaaggaattcagaaaagggatttaatggtgaagattttgaacggcttacgaaaatttgtgcaacacatcaagatcctcttttatccaaacataagatagcagctgtggagaagtcccaggaaaggaaatgctccacgcagttactagtgtctgaagatccaaaggaaggaggagctaccaccaaagagtcagagagtaaaacttgtctcggcacagagtcaagtaaagaaagccaacatacagtggagcccctggggagcagtccctgctgtcatcagatggacgtgcaaacagattccccaagcctttcggtaactgcaggaaaggaccacatggaggagctgctctgcagcgctgaagccacgttagcgctccacacccagtcctccgagacagcagggagcccgtctgggccagactcttctgaggatgcttgtgaggatgacagtcgcttgcagctggctcaaacagaggcctgccaggatgtggccagaatagagggcattgctgaagaccctaaggtgtttctttccagcaagtcaaagacagagccgttgatttcaccaggctgtgaccgtatacctcctgcattgatttctgagggtaaatattcacaggctcagaggaaagaactccgtttgccacttcgggatgcttctgaggcgttgcccacagaccaacttgagaacaatgaattaaatgagctgcagcagcctgatcttacagacagtgatggaaaatcaccacaggcgcaggctgactcagacggttctgagaatgtgctctgtggaaataatcaaatatctgacttaggcatactgcttccagaggtgtgtatggccccagaggaaaagggagataaagacgaccaactcaacaaagaaacagaagactatttgaacagccttttagaaggatgtttaaaagatactgaagattccctttcctatgaagataaccaagacgacgactccgatctccttcaagatctctctcctgaagaagcatcctatagtctccaggagaatctgccttctgatgagagctgtctttctcttgatgatcttgccaaaaggatagagattgcagaggtaaatcagagatgaagtacaattaaaagtaaaatggcatttaaaaaacatatatatgtattaaatattgccttgtttttgtaagttttcccttgtctcaaacatgagggaaaattctagttaacgtaagcttttaattattagtagtttttacatttgtatgtattgaataaaatgacttttaatcattgcaatgttcatactac

SEQ ID NO: 6731 - DNA, 5126 bp, Homo sapiens
  source 1..5126: mol_type = unassigned DNA
tctatgctccgcggtcgcgggccgccagcctccagccggccagccgcgaggggtgcgcagagggaggcggggcggaaaggcgagaggtgtctcctccaccggagccaggggagacccgagcaagctccgtgacagcacgtcggccgccatgtcgccgagtggggctggaaacagacccggcgcccagcggtagccctccttgcgcctccgattcccagacatggaaggtctttaatgtaactttaaatggttcaccaaaggatgctctaatggatgacagcgatactcctacatattatctgcaaatagaaccacaagatggatgtcatcctggtgacagcgtggaaaggagtgtgacctgtctgccttctgcatcagatgaaaatgaaaatcagcttgacggggacgggcatgagcatctgaccagcagtgacagtgcgatgggaaagccccaagtgtctgagcaggacagtctcaataataatgaaagctgcacattgagctgcgaggtggctgcaggtgagaacttgcaaaacaccctttgtgaagcctccagagatgaacaggccttcttgggaaaggacaaaaaaattcctggaaaaagaagtccaagaagcaaaaaagggactgctaagaagataccaccaggacttttttcaggagatattgcacctttaatgcaagaaaaagtactaagcgcagtcacatatgctgttgatgatgaagaagctgctgaagtaaatgctaatgagcagccagaggcgccaaagcttgttctgcagtctctgttttcacttatacgaggtgaagttgagcagttggattcaagagcacttcccctttgccttcatcagatagcagaatcctatttccaggaggaggactatgagaaagcaatgaaattcattcagctagaacgattgtatcatgagcaattgctcgcaaatctttctgccattcaagaacagtgggaaacaaaatggaaaactgtgcaaccacatacagttacggctctaaggaattcagaaaagggatttaatggtgaagattttgaacggcttacgaaaatttgtgcaacacatcaagatcctcttttatccaaacataagatagcagctgtggagaagtcccaggaaaggaaatgctccacgcagttactagtgtctgaagatccaaaggaaggaggagctaccaccaaagagtcagagagtaaaacttgtctcggcacagagtcaagtaaagaaagccaacatacagtggagcccctggggagcagtccctgctgtcatcagatggacgtgcaaacagattccccaagcctttcggtaactgcaggaaaggaccacatggaggagctgctctgcagcgctgaagccacgttagcgctccacacccagtcctccgagacagcagggagcccgtctgggccagactcttctgaggatgcttgtgaggatgacagtcgcttgcagctggctcaaacagaggcctgccaggatgtggccagaatagagggcattgctgaagaccctaaggtgtttctttccagcaagtcaaagacagagccgttgatttcaccaggctgtgaccgtatacctcctgcattgatttctgagggtaaatattcacaggctcagaggaaagaactccgtttgccacttcgggatgcttctgaggcgttgcccacagaccaacttgagaacaatgaattaaatgagctgcagcagcctgatcttacagacagtgatggaaaatcaccacaggcgcaggctgactcagacggttctgagaatgtgctctgtggaaataatcaaatatctgacttaggcatactgcttccagaggtgtgtatggccccagaggaaaagggagataaagacgaccaactcaacaaagaaacagaagactatttgaacagccttttagaaggatgtttaaaagatactgaagattccctttcctatgaagataaccaagacgacgactccgatctccttcaagatctctctcctgaagaagcatcctatagtctccaggagaatctgccttctgatgagagctgtctttctcttgatgatcttgccaaaaggatagagattgcagaggttgttcctactgaaggattggtctccatattaaagaagaggaatgatactgtaggagatcatcctgcccaaatgcaacacaaaccatctaagcgaagagtgagattccaagaaatagacgatagcttggatcaagatgaagttggaggtggctcctgtattttgctggtcttgctgtgcatagcaacggttttcctcagtgttggaggaactgcattatactgcactttcggtgacatggagtcacctgtttgtactgactttgcagacaacatggacttctattacactaagttacttcagggagtggcagaactgaagcactggatctacctctcctagcagcattccagacacagacatgctggcagtgagagtgaaaggcgggagactttctaaacagtttttctttcaggaattctgtagcattcccccttccctctgttaggaaccaaggacatcagaaatagcaactttaagtggcaagccggaggaactctgttagaataatccacacagtgaggcaaatatcaatctaagcattgtggatggaaggaatggtctttggagagagcatatccatctcctcctcactgcctcctaatgtcatgaggtacactgagcagaattaaacagggtagtcttaaccacactatttttagctaccttgtcaagctaatggttaaagaacacttttggtttacacttgttgggtcatagaagttgctttccgccatcacgcaataagtttgtgtgtaatcagaaggagttaccttatggtttcagtgtcattctttagttaacttgggagctgtgtaatttaggctttgcgtattatttcacttctgttctccacttatgaagtgattgtgtgtttgcgtgtgtgtgcgtgcgcatgtgcttccggcagttaacataagcaaatacccaacatcacaaagatgatctttcttcttttaacttgatgatgatgtgcaggcacaaatctttggagaaggcttaactgtggaatagatgaattctagaactcttgaccctgcaatgagaaactgtgacagatctgtgtcaattaacttgattagccagaaattaatcacaggcctagagaccaaagaaaaagctcccctgagtctcaggcaacagttttgtcacggatgcaaagcttcctgaaatcatgaatgctggactcagtttggcaaacgcttacacctattatgttctgagattctgagaaccagaatgcaaacttaagtaagatacagttcccactgtaggtgttttaatcctggtcttatatagaataaaccagtactttgctgagtgaaatcaccatatagaattcagtattaacagatcatgcattcagatgcttgaatgtgcattcttgttgtgggcttgatttagatcctattgcggggtcattacgcaaaaattcaatcataccttccatagacaaatgtctgatttttgtttaaatctgtccgttaggtggcctttccttatctgaggtgtagtggtctaacatttaggaagccttgctttgactttatcgggcagcattaaaaaaaaaacaacaaagaaaaaccaaacatgaattatagtttttaacaagtgatctttatttcctgtcttctgttaggatcatttgaaagaaaaagggagaacttactttctagttgttactggctggcacagtacctccctttgtgtttctgcttatttatttagattatgtgaatcttaaagggctttttatatcagttgaaagtgtgttactgcgcatgcatttggtgattccagtgctagatatttaattactgtgtatttagtgttttgattttctataatttcagttccgcgtgtttttacacttgttcattttaaattgatgtttcattttcacttataatactgtttgacttgtctctatcatgtcaccataaactgtaatattttcaagggttatagatcaaagatatttatttagaaatgtacaagataatgaaatttagattccttatacttaaggctgattttattagaagattattttaatgttctattataaattttaagaatttgtattcaaattgtatgtaaaatatgtaaaatgttgacggtactatattaagtggttctataaaagctattcacaagttctactgtgatggacatcctcatcatagacaaacctcctctgttttatcctcaatttctagttacagaaatttggtgatgcttatttttgccaattttatgtcaaaataagttaaaacttccctcctgttcacctcttgggtctctatcctgtgtaacctctggtgtagtatttgcccataggcaaccagagccacttcctctgaacccaacatctcctggggaccttcgcagcaagaggaaagcactgagacaatagcttgctaagcaggggcccagtggtgtctcagagaaaccatgggtgtcctcgccacttcccagggagggtgaggtgagctcgggaacataacgatgttttgacttacaataggcatgaaatcgcaactagaaaaattagggcagtttttaaaaatgtcatagttatctattgcatgaactggagtaattccacctggtggtgaaaggattgttatttcacacatgaaaaattcatccagttttactaaaatgtaattttttctgtcatttgaaagtactgacaactatttgtaactaatcttccttaagaactgtatttgagggtatcaaatcaagcttgtaatttaaaatctgtaccaacaaagtgtctcagagagtttatttgaaccattgggtgctgagaaaaaactgctttaaagtgaaactttgatttcagaagttgatctggccctacaagtagacagtcatctactttgggaagactaataggtccttaggtaacggctcttctgctttaaaatacctcccccatctgctgacagtagctgaagattattctaaacattcattcttttagatttaaaaataaaaatcttctggaggatt

SEQ ID NO: 6732 - DNA, 3393 bp, Homo sapiens
  source 1..3393: mol_type = unassigned DNA
caggtgtttaaaattatccaactgccatagagctaaattcttttttggaaaattgaaccgaacttctactgaatacaagatgaaaatgtggttgctggtcagtcatcttgtgataatatctattactacctgtttagcagagtttacatggtatagaagatatggtcatggagtttctgaggaagacaaaggatttggaccaatttttgaagagcagccaatcaataccatttatccagaggaatcactggaaggaaaagtctcactcaactgtagggcacgagccagccctttcccggtttacaaatggagaatgaataatggggacgttgatctcacaagtgatcgatacagtatggtaggaggaaaccttgttatcaacaaccctgacaaacagaaagatgctggaatatactactgtttagcatctaataactacgggatggtcagaagcactgaagcaaccctgagctttggatatcttgatcctttcccacctgaggaacgtcctgaggtcagagtaaaagaagggaaaggaatggtgcttctctgtgaccccccataccattttccagatgatcttagctatcgctggcttctaaatgaatttcctgtatttatcacaatggataaacggcgatttgtgtctcagacaaatggcaatctctacattgcaaatgttgaggcttccgacaaaggcaattattcctgctttgtttccagtccttctattacaaagagcgtgttcagcaaattcatcccactcattccaatacctgaacgaacaacaaaaccatatcctgctgatattgtagttcagttcaaggatgtatatgcattgatgggccaaaatgtgaccttagaatgttttgcacttggaaatcctgttccggatatccgatggcggaaggttctagaaccaatgccaagcactgctgagattagcacctctggggctgttcttaagatcttcaatattcagctagaagatgaaggcatctatgaatgtgaggctgagaacattagaggaaaggataaacatcaagcaagaatttatgttcaagcattccctgagtgggtagaacacatcaatgacacagaggtggacataggcagtgatctctactggccttgtgtggccacaggaaagcccatccctacaatccgatggttgaaaaatggatatgcgtatcataaaggggaattaagactgtatgatgtgacttttgaaaatgccggaatgtatcagtgcatagctgaaaacacatatggagccatttatgcaaatgctgagttgaagatcttggcgttggctccaacttttgaaatgaatcctatgaagaaaaagatcctggctgctaaaggtggaagggtgataattgaatgcaaacctaaagctgcaccgaaaccaaagttttcatggagtaaagggacagagtggcttgtcaatagcagcagaatactcatttgggaagatggtagcttggaaatcaacaacattacaaggaatgatggaggtatctatacatgctttgcagaaaataacagagggaaagctaatagcactggaacccttgttatcacagatcctacgcgaattatattggccccaattaatgccgatatcacagttggagaaaacgccaccatgcagtgtgctgcgtcctttgatcctgccttggatctcacatttgtttggtccttcaatggctatgtgatcgattttaacaaagagaatattcactaccagaggaattttatgctggattccaatggggaattactaatccgaaatgcgcagctgaaacatgctggaagatacacatgcactgcccagacaattgtggacaattcttcagcttcagctgaccttgtagtgagaggccctccaggccctccaggtggtctgagaatagaagacattagagccacttctgtggcacttacttggagccgtggttcagacaatcatagtcctatttctaaatacactatccagaccaagactattctttcagatgactggaaagatgcaaagacagatcccccaattattgaaggaaatatggaggcagcaagagcagtggacttaatcccatggatggagtatgaattccgcgtggtagcaaccaatacactgggtagaggagagcccagtataccatctaacagaattaaaacagacggtgctgcaccaaatgtggctccttcagatgtaggaggtggaggtggaagaaacagagagctgaccataacatgggcgcctttgtcaagagaataccactatggcaacaattttggttacatagtggcatttaagccatttgatggagaagaatggaaaaaagtcacagttactaatcctgatactggccgatatgtccataaagatgaaaccatgagcccttccactgcatttcaagttaaagtcaaggccttcaacaacaaaggagatggaccttacagcctagtagcagtcattaattcagcacaagacgctcccagtgaagccccaacagaagtaggtgtaaaagtcttatcatcttctgagatatctgttcattgggaacatgttttagaaaaaatagtggaaagctatcagattcggtattgggctgcccatgacaaagaagaagctgcaaacagagttcaagtcaccagccaagagtactcggccaggctcgagaaccttctgccagacacccagtattttatagaagtcggggcctgcaatagtgcagggtgtggacctccaagtgacatgattgaggctttcaccaagaaagcacctcctagccagcctccaaggatcatcagttcagtaaggtctggttcacgctatataatcacctgggatcatgtcgttgcactatcaaatgaatctacagtgacgggatataaggtactctacagacctgatggccagcatgatggcaagctgtattcaactcacaaacactccatagaagtcccaatccccagagatggagaatacgttgtggaggttcgcgcgcacagtgatggaggagatggagtggtgtctcaagtcaaaatttcaggtgcacccaccctatccccaagtcttctcggcttactgctgcctgcctttggcatccttgtctacttggaattctgaatgtgttgtgacagctgctgttcccatcccagctcagaagacacccttcaaccctgggatgaccacaattccttccaatttctgcggctccatcctaagccaaataaattatactttaacaaactattcaactgatttacaacacacatgatgactgaggcattcgggaaccccttcatccaaaagaataaacttttaaatggatataaatgatttttaactcgttccaatatgccttataaaccacttaacctgat

SEQ ID NO: 6733 - DNA, 3328 bp, Homo sapiens
  source 1..3328: mol_type = unassigned DNA
gtttaaaattatccaactgccatagagctaaattcttttttggaaaattgaaccgaacttctactgaatacaagatgaaaatgtggttgctggtcagtcatcttgtgataatatctattactacctgtttagcagtttctgaggaagacaaaggatttggaccaatttttgaagagcagccaatcaataccatttatccagaggaatcactggaaggaaaagtctcactcaactgtagggcacgagccagccctttcccggtttacaaatggagaatgaataatggggacgttgatctcacaagtgatcgatacagtatggtaggaggaaaccttgttatcaacaaccctgacaaacagaaagatgctggaatatactactgtttagcatctaataactacgggatggtcagaagcactgaagcaaccctgagctttggatatcttgatcctttcccacctgaggaacgtcctgaggtcagagtaaaagaagggaaaggaatggtgcttctctgtgaccccccataccattttccagatgatcttagctatcgctggcttctaaatgaatttcctgtatttatcacaatggataaacggcgatttgtgtctcagacaaatggcaatctctacattgcaaatgttgaggcttccgacaaaggcaattattcctgctttgtttccagtccttctattacaaagagcgtgttcagcaaattcatcccactcattccaatacctgaacgaacaacaaaaccatatcctgctgatattgtagttcagttcaaggatgtatatgcattgatgggccaaaatgtgaccttagaatgttttgcacttggaaatcctgttccggatatccgatggcggaaggttctagaaccaatgccaagcactgctgagattagcacctctggggctgttcttaagatcttcaatattcagctagaagatgaaggcatctatgaatgtgaggctgagaacattagaggaaaggataaacatcaagcaagaatttatgttcaagcattccctgagtgggtagaacacatcaatgacacagaggtggacataggcagtgatctctactggccttgtgtggccacaggaaagcccatccctacaatccgatggttgaaaaatggatatgcgtatcataaaggggaattaagactgtatgatgtgacttttgaaaatgccggaatgtatcagtgcatagctgaaaacacatatggagccatttatgcaaatgctgagttgaagatcttggcgttggctccaacttttgaaatgaatcctatgaagaaaaagatcctggctgctaaaggtggaagggtgataattgaatgcaaacctaaagctgcaccgaaaccaaagttttcatggagtaaagggacagagtggcttgtcaatagcagcagaatactcatttgggaagatggtagcttggaaatcaacaacattacaaggaatgatggaggtatctatacatgctttgcagaaaataacagagggaaagctaatagcactggaacccttgttatcacagatcctacgcgaattatattggccccaattaatgccgatatcacagttggagaaaacgccaccatgcagtgtgctgcgtcctttgatcctgccttggatctcacatttgtttggtccttcaatggctatgtgatcgattttaacaaagagaatattcactaccagaggaattttatgctggattccaatggggaattactaatccgaaatgcgcagctgaaacatgctggaagatacacatgcactgcccagacaattgtggacaattcttcagcttcagctgaccttgtagtgagaggccctccaggccctccaggtggtctgagaatagaagacattagagccacttctgtggcacttacttggagccgtggttcagacaatcatagtcctatttctaaatacactatccagaccaagactattctttcagatgactggaaagatgcaaagacagatcccccaattattgaaggaaatatggaggcagcaagagcagtggacttaatcccatggatggagtatgaattccgcgtggtagcaaccaatacactgggtagaggagagcccagtataccatctaacagaattaaaacagacggtgctgcaccaaatgtggctccttcagatgtaggaggtggaggtggaagaaacagagagctgaccataacatgggcgcctttgtcaagagaataccactatggcaacaattttggttacatagtggcatttaagccatttgatggagaagaatggaaaaaagtcacagttactaatcctgatactggccgatatgtccataaagatgaaaccatgagcccttccactgcatttcaagttaaagtcaaggccttcaacaacaaaggagatggaccttacagcctagtagcagtcattaattcagcacaagacgctcccagtgaagccccaacagaagtaggtgtaaaagtcttatcatcttctgagatatctgttcattgggaacatgttttagaaaaaatagtggaaagctatcagattcggtattgggctgcccatgacaaagaagaagctgcaaacagagttcaagtcaccagccaagagtactcggccaggctcgagaaccttctgccagacacccagtattttatagaagtcggggcctgcaatagtgcagggtgtggacctccaagtgacatgattgaggctttcaccaagaaagcacctcctagccagcctccaaggatcatcagttcagtaaggtctggttcacgctatataatcacctgggatcatgtcgttgcactatcaaatgaatctacagtgacgggatataaggtactctacagacctgatggccagcatgatggcaagctgtattcaactcacaaacactccatagaagtcccaatccccagagatggagaatacgttgtggaggttcgcgcgcacagtgatggaggagatggagtggtgtctcaagtcaaaatttcaggtgcacccaccctatccccaagtcttctcggcttactgctgcctgcctttggcatccttgtctacttggaattctgaatgtgttgtgacagctgctgttcccatcccagctcagaagacacccttcaaccctgggatgaccacaattccttccaatttctgcggctccatcctaagccaaataaattatactttaacaaactattcaactgatttacaacacacatgatgactgaggcattcgggaaccccttcatccaaaagaataaacttttaaatggatataaatgatttttaactcgttccaa

SEQ ID NO: 6734 - DNA, 1963 bp, Homo sapiens
  source 1..1963: mol_type = unassigned DNA
caggtgtttaaaattatccaactgccatagagctaaattcttttttggaaaattgaaccgaacttctactgaatacaagatgaaaatgtggttgctggtcagtcatcttgtgataatatctattactacctgtttagcagagtttacatggtatagaagatatggtcatggagtttctgaggaagacaaaggatttggaccaatttttgaagagcagccaatcaataccatttatccagaggaatcactggaaggaaaagtctcactcaactgtagggcacgagccagccctttcccggtttacaaatggagaatgaataatggggacgttgatctcacaagtgatcgatacagtatggtaggaggaaaccttgttatcaacaaccctgacaaacagaaagatgctggaatatactactgtttagcatctaataactacgggatggtcagaagcactgaagcaaccctgagctttggatatcttgatcctttcccacctgaggaacgtcctgaggtcagagtaaaagaagggaaaggaatggtgcttctctgtgaccccccataccattttccagatgatcttagctatcgctggcttctaaatgaatttcctgtatttatcacaatggataaacggcgatttgtgtctcagacaaatggcaatctctacattgcaaatgttgaggcttccgacaaaggcaattattcctgctttgtttccagtccttctattacaaagagcgtgttcagcaaattcatcccactcattccaatacctgaacgaacaacaaaaccatatcctgctgatattgtagttcagttcaaggatgtatatgcattgatgggccaaaatgtgaccttagaatgttttgcacttggaaatcctgttccggatatccgatggcggaaggttctagaaccaatgccaagcactgctgagattagcacctctggggctgttcttaagatcttcaatattcagctagaagatgaaggcatctatgaatgtgaggctgagaacattagaggaaaggataaacatcaagcaagaatttatgttcaagcattccctgagtgggtagaacacatcaatgacacagaggtggacataggcagtgatctctactggccttgtgtggccacaggaaagcccatccctacaatccgatggttgaaaaatggatatgcgtatcataaaggggaattaagactgtatgatgtgacttttgaaaatgccggaatgtatcagtgcatagctgaaaacacatatggagccatttatgcaaatgctgagttgaagatcttggcgttggctccaacttttgaaatgaatcctatgaagaaaaagatcctggctgctaaaggtggaagggtgataattgaatgcaaacctaaagctgcaccgaaaccaaagttttcatggagtaaagggacagagtggcttgtcaatagcagcagaatactcatttgggaagatggtagcttggaaatcaacaacattacaaggaatgatggaggtatctatacatgctttgcagaaaataacagagggaaagctaatagcactggaacccttgttatcacagatcctacgcgaattatattggccccaattaatgccgatatcacagttggagaaaacgccaccatgcagtgtgctgcgtcctttgatcctgccttggatctcacatttgtttggtccttcaatggctatgtgatcgattttaacaaagagaatattcactaccagaggaattttatgctggattccaatggggaattactaatccgaaatgcgcagctgaaacatgctggaagatacacatgcactgcccagacaattgtggacaattcttcagcttcagctgaccttgtagtgagaggtaaaaacagaaaaggtggagagaaaaacatggtggattcctttctccccgtctgtgcaagcctgcctccaacctggtga

SEQ ID NO: 6735 - DNA, 3033 bp, Homo sapiens
  source 1..3033: mol_type = unassigned DNA
cttctgctgtcaagtagccagggtgggctccgccgaggcgaggaggggcgccggtggggagatgcgctcccaggtgtttgcagcggaagtgggaaacctgtagggtatggtccagctgtgccgcaccgaggcgagcaggagcagggaacaggtgtttaaaattatccaactgccatagagctaaattcttttttggaaaattgaaccgaacttctactgaatacaagatgaaaatgtggttgctggtcagtcatcttgtgataatatctattactacctgtttagcagagtttacatggtatagaagatatggtcatggagtttctgaggaagacaaaggatttggaccaatttttgaagagcagccaatcaataccatttatccagaggaatcactggaaggaaaagtctcactcaactgtagggcacgagccagccctttcccggtttacaaatggagaatgaataatggggacgttgatctcacaagtgatcgatacagtatggtaggaggaaaccttgttatcaacaaccctgacaaacagaaagatgctggaatatactactgtttagcatctaataactacgggatggtcagaagcactgaagcaaccctgagctttggatatcttgatcctttcccacctgaggaacgtcctgaggtcagagtaaaagaagggaaaggaatggtgcttctctgtgaccccccataccattttccagatgatcttagctatcgctggcttctaaatgaatttcctgtatttatcacaatggataaacggcgatttgtgtctcagacaaatggcaatctctacattgcaaatgttgaggcttccgacaaaggcaattattcctgctttgtttccagtccttctattacaaagagcgtgttcagcaaattcatcccactcattccaatacctgaacgaacaacaaaaccatatcctgctgatattgtagttcagttcaaggatgtatatgcattgatgggccaaaatgtgaccttagaatgttttgcacttggaaatcctgttccggatatccgatggcggaaggttctagaaccaatgccaagcactgctgagattagcacctctggggctgttcttaagatcttcaatattcagctagaagatgaaggcatctatgaatgtgaggctgagaacattagaggaaaggataaacatcaagcaagaatttatgttcaagcattccctgagtgggtagaacacatcaatgacacagaggtggacataggcagtgatctctactggccttgtgtggccacaggaaagcccatccctacaatccgatggttgaaaaatggatatgcgtatcataaaggggaattaagactgtatgatgtgacttttgaaaatgccggaatgtatcagtgcatagctgaaaacacatatggagccatttatgcaaatgctgagttgaagatcttggcgttggctccaacttttgaaatgaatcctatgaagaaaaagatcctggctgctaaaggtggaagggtgataattgaatgcaaacctaaagctgcaccgaaaccaaagttttcatggagtaaagggacagagtggcttgtcaatagcagcagaatactcatttgggaagatggtagcttggaaatcaacaacattacaaggaatgatggaggtatctatacatgctttgcagaaaataacagagggaaagctaatagcactggaacccttgttatcacagatcctacgcgaattatattggccccaattaatgccgatatcacagttggagaaaacgccaccatgcagtgtgctgcgtcctttgatcctgccttggatctcacatttgtttggtccttcaatggctatgtgatcgattttaacaaagagaatattcactaccagaggaattttatgctggattccaatggggaattactaatccgaaatgcgcagctgaaacatgctggaagatacacatgcactgcccagacaattgtggacaattcttcagcttcagctgaccttgtagtgagaggtaaaaacagaaaaggtggagagaaaaacatggtggattcctttctccccgtctgtgcaagcctgcctccaacctggtgatcgttgacactcaccatttctgtgaaagacttttttttttttaacatattatactagatttgactaactcaatcttgtagcttctgcagttctccccacccccaacctagttcttagagtatgtttccccttttgaaacatgtaaacatactttgggcataaatattttttaaaatataactataatgcttcactaataccttaaaaatgcctagtgaactaactcagtacattatataatggccaagtgaaagttttgtgttttcatgtcctgtttttctttgaaattatatagcccagaaattagctcattatctgaaaaacgtatgaagaactgatgaattgtataatacaggagtattgccattgaatgtactgtttgatttattcaagcaggtaatgaacaatgttgtcaaactctctaatgagacatcataattaggacataagctaaaaggggcattactccggcagtctttttttcttaatcctagtaccatacatattctttggcatgaaagaatgaaaagcattagtaaacaactgaagtcctaccatggctctgtagggtttttggaacaattcctggaattggaaagtgaaaatggatagcatgtgggggaaaccctcatctgagtagcaagattttagtaaagatgactaagccattaacagcatgcattcatatttaattttattgactcctgccatcagcttttgtagatcgtttgggtggaaggttgtgatttttactgggaggacttgagtagaagtggatgattaaaattgaggagtatataattctttctgggactgcttaaatgttattgtttgaaaataccttcactttccccctttggtcaaagagatgtgcttaaaattcttattccttcacaataaataattttgattttcttagaca

SEQ ID NO: 6736 - DNA, 3125 bp, Homo sapiens
  source 1..3125: mol_type = unassigned DNA
gctttatttgaaagtattgctatgtagacagccggcttttctgtcatctaacctgctctccccaggttggctgaaggatgggagcggctgtgcctgcctgtgaggtcacagcatgaagtccttttaacttgctttctgctgcaggagagaggcgtattgtggtataactgttgctgtatttattcaaatggacaatttgcaatagatattatacccaggacgacagataagtcaacacataaggtgtttaaaattatccaactgccatagagctaaattcttttttggaaaattgaaccgaacttctactgaatacaagatgaaaatgtggttgctggtcagtcatcttgtgataatatctattactacctgtttagcagagtttacatggtatagaagatatggtcatggagtttctgaggaagacaaaggatttggaccaatttttgaagagcagccaatcaataccatttatccagaggaatcactggaaggaaaagtctcactcaactgtagggcacgagccagccctttcccggtttacaaatggagaatgaataatggggacgttgatctcacaagtgatcgatacagtatggtaggaggaaaccttgttatcaacaaccctgacaaacagaaagatgctggaatatactactgtttagcatctaataactacgggatggtcagaagcactgaagcaaccctgagctttggatatcttgatcctttcccacctgaggaacgtcctgaggtcagagtaaaagaagggaaaggaatggtgcttctctgtgaccccccataccattttccagatgatcttagctatcgctggcttctaaatgaatttcctgtatttatcacaatggataaacggcgatttgtgtctcagacaaatggcaatctctacattgcaaatgttgaggcttccgacaaaggcaattattcctgctttgtttccagtccttctattacaaagagcgtgttcagcaaattcatcccactcattccaatacctgaacgaacaacaaaaccatatcctgctgatattgtagttcagttcaaggatgtatatgcattgatgggccaaaatgtgaccttagaatgttttgcacttggaaatcctgttccggatatccgatggcggaaggttctagaaccaatgccaagcactgctgagattagcacctctggggctgttcttaagatcttcaatattcagctagaagatgaaggcatctatgaatgtgaggctgagaacattagaggaaaggataaacatcaagcaagaatttatgttcaagcattccctgagtgggtagaacacatcaatgacacagaggtggacataggcagtgatctctactggccttgtgtggccacaggaaagcccatccctacaatccgatggttgaaaaatggatatgcgtatcataaaggggaattaagactgtatgatgtgacttttgaaaatgccggaatgtatcagtgcatagctgaaaacacatatggagccatttatgcaaatgctgagttgaagatcttggcgttggctccaacttttgaaatgaatcctatgaagaaaaagatcctggctgctaaaggtggaagggtgataattgaatgcaaacctaaagctgcaccgaaaccaaagttttcatggagtaaagggacagagtggcttgtcaatagcagcagaatactcatttgggaagatggtagcttggaaatcaacaacattacaaggaatgatggaggtatctatacatgctttgcagaaaataacagagggaaagctaatagcactggaacccttgttatcacagatcctacgcgaattatattggccccaattaatgccgatatcacagttggagaaaacgccaccatgcagtgtgctgcgtcctttgatcctgccttggatctcacatttgtttggtccttcaatggctatgtgatcgattttaacaaagagaatattcactaccagaggaattttatgctggattccaatggggaattactaatccgaaatgcgcagctgaaacatgctggaagatacacatgcactgcccagacaattgtggacaattcttcagcttcagctgaccttgtagtgagaggtaaaaacagaaaaggtggagagaaaaacatggtggattcctttctccccgtctgtgcaagcctgcctccaacctggtgatcgttgacactcaccatttctgtgaaagacttttttttttttaacatattatactagatttgactaactcaatcttgtagcttctgcagttctccccacccccaacctagttcttagagtatgtttccccttttgaaacatgtaaacatactttgggcataaatattttttaaaatataactataatgcttcactaataccttaaaaatgcctagtgaactaactcagtacattatataatggccaagtgaaagttttgtgttttcatgtcctgtttttctttgaaattatatagcccagaaattagctcattatctgaaaaacgtatgaagaactgatgaattgtataatacaggagtattgccattgaatgtactgtttgatttattcaagcaggtaatgaacaatgttgtcaaactctctaatgagacatcataattaggacataagctaaaaggggcattactccggcagtctttttttcttaatcctagtaccatacatattctttggcatgaaagaatgaaaagcattagtaaacaactgaagtcctaccatggctctgtagggtttttggaacaattcctggaattggaaagtgaaaatggatagcatgtgggggaaaccctcatctgagtagcaagattttagtaaagatgactaagccattaacagcatgcattcatatttaattttattgactcctgccatcagcttttgtagatcgtttgggtggaaggttgtgatttttactgggaggacttgagtagaagtggatgattaaaattgaggagtatataattctttctgggactgcttaaatgttattgtttgaaaataccttcactttccccctttggtcaaagagatgtgcttaaaattcttattccttcacaataaataattttgattttcttagaca

SEQ ID NO: 6737 - DNA, 553 bp, Homo sapiens
  source 1..553: mol_type = unassigned DNA
agctgaactgaatttacacgaaaagggaaggaggaaaatggtttgtctttttttgcagagaattctatccaaattcacttgcatttaattacttcatattttggaaatgacattttcaaccatgtgacaaatctgcagcccctttgccatgattaaaggtctcctgaggccctgaccagaagcaaacgctagtgccaggcttcttgtacagcccgcaaaactgtgtttaaaattatccaactgccatagagctaaattcttttttggaaaattgaaccgaacttctactgaatacaagatgaaaatgtggttgctggtcagtcatcttgtgataatatctattactacctgtttagcagagtttacatggtatagaagatatggtcatggagtttctgaggaagacaaaggatttggaccaatttttgaagagcagccaatcaataccatttatccagaggaatcactggaaggaaaagtctcactcaactgtagggcacgagccagccctttcccggtttacaaatggagaatgaataatggggacgttgat

SEQ ID NO: 6738 - DNA, 5109 bp, Homo sapiens
  source 1..5109: mol_type = unassigned DNA
tccagctgtgccgcaccgaggcgagcaggagcagggaacaggtgtttaaaattatccaactgccatagagctaaattcttttttggaaaattgaaccgaacttctactgaatacaagatgaaaatgtggttgctggtcagtcatcttgtgataatatctattactacctgtttagcagagtttacatggtatagaagatatggtcatggagtttctgaggaagacaaaggatttggaccaatttttgaagagcagccaatcaataccatttatccagaggaatcactggaaggaaaagtctcactcaactgtagggcacgagccagccctttcccggtttacaaatggagaatgaataatggggacgttgatctcacaagtgatcgatacagtatggtaggaggaaaccttgttatcaacaaccctgacaaacagaaagatgctggaatatactactgtttagcatctaataactacgggatggtcagaagcactgaagcaaccctgagctttggatatcttgatcctttcccacctgaggaacgtcctgaggtcagagtaaaagaagggaaaggaatggtgcttctctgtgaccccccataccattttccagatgatcttagctatcgctggcttctaaatgaatttcctgtatttatcacaatggataaacggcgatttgtgtctcagacaaatggcaatctctacattgcaaatgttgaggcttccgacaaaggcaattattcctgctttgtttccagtccttctattacaaagagcgtgttcagcaaattcatcccactcattccaatacctgaacgaacaacaaaaccatatcctgctgatattgtagttcagttcaaggatgtatatgcattgatgggccaaaatgtgaccttagaatgttttgcacttggaaatcctgttccggatatccgatggcggaaggttctagaaccaatgccaagcactgctgagattagcacctctggggctgttcttaagatcttcaatattcagctagaagatgaaggcatctatgaatgtgaggctgagaacattagaggaaaggataaacatcaagcaagaatttatgttcaagcattccctgagtgggtagaacacatcaatgacacagaggtggacataggcagtgatctctactggccttgtgtggccacaggaaagcccatccctacaatccgatggttgaaaaatggatatgcgtatcataaaggggaattaagactgtatgatgtgacttttgaaaatgccggaatgtatcagtgcatagctgaaaacacatatggagccatttatgcaaatgctgagttgaagatcttggcgttggctccaacttttgaaatgaatcctatgaagaaaaagatcctggctgctaaaggtggaagggtgataattgaatgcaaacctaaagctgcaccgaaaccaaagttttcatggagtaaagggacagagtggcttgtcaatagcagcagaatactcatttgggaagatggtagcttggaaatcaacaacattacaaggaatgatggaggtatctatacatgctttgcagaaaataacagagggaaagctaatagcactggaacccttgttatcacagatcctacgcgaattatattggccccaattaatgccgatatcacagttggagaaaacgccaccatgcagtgtgctgcgtcctttgatcctgccttggatctcacatttgtttggtccttcaatggctatgtgatcgattttaacaaagagaatattcactaccagaggaattttatgctggattccaatggggaattactaatccgaaatgcgcagctgaaacatgctggaagatacacatgcactgcccagacaattgtggacaattcttcagcttcagctgaccttgtagtgagaggccctccaggccctccaggtggtctgagaatagaagacattagagccacttctgtggcacttacttggagccgtggttcagacaatcatagtcctatttctaaatacactatccagaccaagactattctttcagatgactggaaagatgcaaagacagatcccccaattattgaaggaaatatggaggcagcaagagcagtggacttaatcccatggatggagtatgaattccgcgtggtagcaaccaatacactgggtagaggagagcccagtataccatctaacagaattaaaacagacggtgctgcaccaaatgtggctccttcagatgtaggaggtggaggtggaagaaacagagagctgaccataacatgggcgcctttgtcaagagaataccactatggcaacaattttggttacatagtggcatttaagccatttgatggagaagaatggaaaaaagtcacagttactaatcctgatactggccgatatgtccataaagatgaaaccatgagcccttccactgcatttcaagttaaagtcaaggccttcaacaacaaaggagatggaccttacagcctagtagcagtcattaattcagcacaagacgctcccagtgaagccccaacagaagtaggtgtaaaagtcttatcatcttctgagatatctgttcattgggaacatgttttagaaaaaatagtggaaagctatcagattcggtattgggctgcccatgacaaagaagaagctgcaaacagagttcaagtcaccagccaagagtactcggccaggctcgagaaccttctgccagacacccagtattttatagaagtcggggcctgcaatagtgcagggtgtggacctccaagtgacatgattgaggctttcaccaagaaagcacctcctagccagcctccaaggatcatcagttcagtaaggtctggttcacgctatataatcacctgggatcatgtcgttgcactatcaaatgaatctacagtgacgggatataaggtactctacagacctgatggccagcatgatggcaagctgtattcaactcacaaacactccatagaagtcccaatccccagagatggagaatacgttgtggaggttcgcgcgcacagtgatggaggagatggagtggtgtctcaagtcaaaatttcaggtgcacccaccctatccccaagtcttctcggcttactgctgcctgcctttggcatccttgtctacttggaattctgaatgtgttgtgacagctgctgttcccatcccagctcagaagacacccttcaaccctgggatgaccacaattccttccaatttctgcggctccatcctaagccaaataaattatactttaacaaactattcaactgatttacaacacacatgatgactgaggcattcgggaaccccttcatccaaaagaataaacttttaaatggatataaatgatttttaactcgttccaatatgccttataaaccacttaacctgattctgtgacagttgcatgatttaacccaatgggacaagttacagtgttcaattcaatactataggctgtagagtgaaagtcaaatcaccatatacaggtgctttaaatttaataacaagttgtgaaatataatagagattgaaatgttggttgtatgtggtaaatgtaagagtaatacagtctcttgtactttcctcactgttttgggtactgcatattattgaatggcccctatcattcatgacatcttgagttttcttgaaaagacaatagagtgtaacaaatattttgtcagaaatcccattatcaaatcatgagttgaaagattttgactattgaaaaccaaattctagaacttactatcagtattcttattttcaaaggaaataattttctaaatatttgattttcagaatcagttttttaatagtaaagttaacataccatatagatttttttttacttttatattctactctgaagttattttatgcttttcttatcaatttcaaatctcaaaaatcacagctcttatctagagtatcataatattgctatatttgttcatatgtggagtgacaaattttgaaaagtagagtgcttccttttttattgagatgtgacagtctttacatggttaggaataagtgacagttaagtgaatatcacaattactagtatgttggtttttctgcttcattcctaagtattacgtttctttattgcagatgtcagatcaaaaagtcacctgtaggttgaaaaagctaccgtattccattttgtaaaaataacaataataataataataataattagttttaagctcatttcccacttcaatgcaatactgaaaactggctaaaaataccaaatcaatatactgctaatggtactttgaagagtatgcaaaactggaaggccaggaggaggcaaataatatgtctttccgatggtgtctcccaagtgttggtgctttgggtttttataagttgtgaaaaggaagatgcacatttcttcattctccatggtgtgcatggaaatgtgtttgagtgtggatgtaaaagaaatcgagtaataaagaattagctggcttgtgaaatagtgcagtgttggatgcttcaagaggtataatcctattttattagcacaaacttgctagctaattagagtttatctttttagaaaggacaccgtataggttcgtaaaaaatatttacaggaagcaaaatagatctattactactttaccgactttaccccctttctttaatttgtataatttttgtactatatatcgatgtgtaaatgtttagagtcttcattatgaaaatatcaataaatatttcattagtttacatttaactctggtataaaatgaaacttttaaaaataagtgaaatggatgatttcccagtggaagtatgtcaacagtcttaagatcattgccagatttcataaaatatttaagtatttgaaaaagaaacaaaatgtcttcatactttagggaaacgaataccctgtataccttctgtacaaatgtttgtgttttcattgttacactttggggttttacttttgcaatgtgacccatgttgggcatttttatataatcaacaactaaatcttttgccaaatgcatgcttgccttttattttctaatatatgataataacgagcaa

SEQ ID NO: 6739 - DNA, 555 bp, Homo sapiens
  source 1..555: mol_type = unassigned DNA
gggtgggctccgccgaggcgaggaggggcgccggtggggagatgcgctcccaggtgtttgcagcggaagtgggaaacctgtagggtatggtccagctgtgccgcaccgaggcgagcaggagcagggaacagtagagacggggtttcaccgtgttagccaagatggtctcgatctcctgacttcgtgatccgcccgcctcgacctcccaaagtgctgggattacaggcgtgagccaccgtgcccggccgcttcaagatttcttaatgaaggtagttgcatcgatgttcataggtgtttaaaattatccaactgccatagagctaaattcttttttggaaaattgaaccgaacttctactgaatacaagatgaaaatgtggttgctggtcagtcatcttgtgataatatctattactacctgtttagcagagtttacatggtatagaagatatggtcatggagtttctgaggaagacaaaggatttggaccaatttttgaagagcagccaatcaataccatttatccagaggaatcactggaaggaaaagtctcact

SEQ ID NO: 6740 - DNA, 463 bp, Homo sapiens
  source 1..463: mol_type = unassigned DNA
ctgaactgaatttacacgaaaagggaaggaggaaaatggtttgtctttttttgcagagaattctatccaaattcacttgcatttaattacttcatattttggaaatgacattttcaagtgtttaaaattatccaactgccatagagctaaattcttttttggaaaattgaaccgaacttctactgaatacaagatgaaaatgtggttgctggtcagtcatcttgtgataatatctattactacctgtttagcagagtttacatggtatagaagatatggtcatggagtttctgaggaagacaaaggatttggaccaatttttgaagagcagccaatcaataccatttatccagaggaatcactggaaggaaaagtctcactcaactgtagggcacgagccagccctttcccggtttacaaatggagaatgaataatggggacgttgatctcacaagtgatcga

SEQ ID NO: 6741 - DNA, 572 bp, Homo sapiens
  source 1..572: mol_type = unassigned DNA
aacttgctttctgctgcaggagagaggcgtattgtggtataactgttgctgtatttattcaaatggacaatttgcaatagatattatacccaggacgacagataagtcaacacataagtagagacggggtttcaccgtgttagccaagatggtctcgatctcctgacttcgtgatccgcccgcctcgacctcccaaagtgctgggattacaggcgtgagccaccgtgcccggccgcttcaagatttcttaatgaaggtagttgcatcgatgttcataggtgtttaaaattatccaactgccatagagctaaattcttttttggaaaattgaaccgaacttctactgaatacaagatgaaaatgtggttgctggtcagtcatcttgtgataatatctattactacctgtttagcagagtttacatggtatagaagatatggtcatggagtttctgaggaagacaaaggatttggaccaatttttgaagagcagccaatcaataccatttatccagaggaatcactggaaggaaaagtctcactcaactgtagggcacgagccagccctttccc

SEQ ID NO: 6742 - DNA, 8141 bp, Homo sapiens
  source 1..8141: mol_type = unassigned DNA
gctccgggcgcgctcacacacacgcgccctcacccgccaccgccgccgcggccgccgccgcacccggacagcgagcggctgaggccgccagggcccaaaggacagcggcccagacaggggctggcggcccggccggccccggctcaccgactcgggcagcatccacctgccccagccaacacccttctctcgccccaggtcctttctcagcctccagctgggctgtccccaagctgagctgaggctcttctcctccgatccccacctctgcccggacatccaccatggggacagccaccaggaggaagccacacctgctgctggtagctgctgtggcccttgtctcctcttcagcttggagttcagccctgggatcccaaaccaccttcgggcctgtctttgaagaccagcccctcagtgtgctattcccagaggagtccacggaggagcaggtgttgctggcatgccgcgcccgggccagccctccagccacctatcggtggaagatgaatggtaccgagatgaagctggagccaggttcccgtcaccagctggtggggggcaacctggtcatcatgaaccccaccaaggcacaggatgccggggtctaccagtgcctggcctccaacccagtgggcaccgttgtcagcagggaggccatcctccgcttcggctttctgcaggaattctccaaggaggagcgagacccagtgaaagctcatgaaggctggggggtgatgttgccctgtaacccacctgcccactacccaggcttgtcctaccgctggctcctcaacgagttccccaacttcatcccgacggacgggcgtcacttcgtgtcccagaccacagggaacctgtacattgcccgaaccaatgcctcagacctgggcaactactcctgtttggccaccagccacatggacttctccaccaagagcgtcttcagcaagtttgctcagctcaacctggctgctgaagatacccggctctttgcacccagcatcaaggcccggttcccagcagagacctatgcactggtggggcagcaggtcaccctggagtgcttcgcctttgggaaccctgtcccccggatcaagtggcgcaaagtggacggctccctgtccccgcagtggaccacagctgagcccaccctgcagatccccagcgtcagctttgaggatgagggcacctacgagtgtgaggcggagaactccaagggccgagacaccgtgcagggccgcatcatcgtgcaggctcagcctgagtggctaaaagtgatctcggacacagaggctgacattggctccaacctgcgttggggctgtgcagccgccggcaagccccggcctacagtgcgctggctgcggaacggggagcctctggcctcccagaaccgggtggaggtgttggctggggacctgcggttctccaagctgagcctggaagactcgggcatgtaccagtgtgtggcagagaataagcacggtaccatctacgccagcgccgagctagccgtgcaagcactcgcccctgacttcaggctgaatcccgtgaggcgtctgatccccgcggcccgcgggggagagatccttatcccctgccagccccgggcagctccaaaggccgtggtgctctggagcaaaggcacggagattttggtcaacagcagcagagtgactgtaactccagatggcaccttgatcataagaaacatcagccggtcagatgaaggcaaatacacctgctttgctgagaacttcatgggcaaagccaacagcactggaatcctatctgtgcgagatgcaaccaaaatcactctagccccctcaagtgccgacatcaacttgggtgacaacctgaccctacagtgccatgcctcccacgaccccaccatggacctcaccttcacctggaccctggacgacttccccatcgactttgataagcctggagggcactaccggagaactaatgtgaaggagaccattggggatctgaccatcctgaacgcccagctgcgccatggggggaagtacacgtgcatggcccagacggtggtggacagcgcgtccaaggaggccacagtcctggtccgaggtccgccaggtcccccaggaggtgtggtggtgagggacattggcgacaccaccatccagctcagctggagccgtggcttcgacaaccacagccccatcgctaagtacaccctgcaagctcgcactccacctgcagggaagtggaagcaggttcggaccaatcctgcaaacatcgagggcaatgccgagactgcacaggtgctgggcctcaccccctggatggactatgagttccgggtcatagccagcaacattctgggcactggggagcctagtgggccctccagcaaaatccggaccagggaagcagccccctcggtggcaccctcaggactcagcggaggaggtggagcccccggagagctcatcgtcaactggacgcccatgtcacgggagtaccagaacggagacggcttcggctacctgctgtccttccgcaggcagggcagcactcactggcagaccgcccgggtgcctggcgccgatgcccagtactttgtctacagcaacgagagcgtccggccctacacgccctttgaggtcaagatccgcagctacaaccgccgcggggatgggcccgagagcctcactgcactcgtgtactcagctgaggaagagcccagggtggcccctaccaaggtgtgggccaaaggggtctcatcctcagagatgaacgtgacctgggaacccgtgcagcaggacatgaatggtatcctcctggggtatgagatccgctactggaaagctggggacaaagaagcagctgcggaccgagtgaggacagcagggctggacaccagtgcccgagtcagcggcctgcatcccaacaccaagtaccatgtgaccgtgagggcctacaaccgggctggcactgggcctgccagcccttctgccaacgccacgaccatgaagccccctccgcggcgacctcctggcaacatctcctggactttctcaagctctagtcttagcattaagtgggaccctgtggtccctttccgaaatgagtctgcagtcaccggctataagatgctgtaccagaatgacttacacctgactcccacgctccacctcaccggcaagaactggatagaaatcccagtgcctgaagacattggccatgccctggtacaaattcggaccacagggcccggaggggatgggatccctgcagaagtccacatcgtgaggaatggaggcacaagcatgatggtggagaacatggcagtccgcccagcaccacaccctggcaccgtcatttcccactccgtggcgatgctgatcctcataggctccctggagctctgatcctggaacccctccctctgcgccgcagctggacgccacctccgacggacacagccagccccttcctgctgccaaggtggcctgacactgtgccagagagtggctggttttaaatacctactttaaacagtgccctttttgtaggaggtaggatattttatattctgccgcaggatagaacccacgcaaggattttctttaaattgagaggcaccaggcagtaacttccatgatgacactgacgcctatacctgagctctaggctgcctggagggaaggaacaggcccatgggaagaagggggttttaaaaacatgtcttcaactcagcagagatggccctctgggaccctatacggactccgccacttgagagcagtcctaggcccggcaggaacaccagacatgaacaggttgaagaactggagcgaagtgcacacctcaccatccttcagtctaaggaagaagggcaagccctgggaccaagagctctcccgccttctccctcgagcagcagcaaggaccctgacgctgtccccgataactccctaggggctcctgcctgcccaagcggctgagaaccagcgccccgatgcctgaggctgggagcctgagccccttcagctttgaggggggtgatactccaggctgtttggggtgggagccaaaaagagttgagaggccagggcccttggtggaaaggggcaccagccttggtctgagatagtcacaacccaggtgacgatgccctctcagccaacactgccaacctgaccctgtcatcccgattgacagcgccacttcaggtggctgggtgactaaagggcttgtcttggtggggtctcccacccctccaagacccattctgcacagtccctccagggtttgggcaggagatggccaatcatgcgcccacctctccagtgctgcctgcagtcagctcggcctccccgacctgcagccccagactctgctctcccagcactgactcactcctgcctgggaggggaatgcagcattcatgctgtgtgtcctggtattgggaggtttctgggaagggcagaggataaatgtggccctgcctgctcccaggtatacctaggaccacctggccagatccgctcccagacggccttggactgcttgcatttccccggagaaaaaggggttaataaatgggccatcctttcctgagctctgggtatactaccagtcacagaacgtcagagctggaagaagccttagagctcaacttcttcaagcccctcactttacagatgaggaaatggaggtggtccagagagggtctgggattcccaaggtcacacagcccagaagagatggggctgggttaagaactcgagtcttccacctttctgttcaaggctgtttgtctacccagaggaaggaggcactgctgaatggctatggcctggctaagaaggtgattagtcagtagggtgtgaaaattctacttcaaggggttcggattggtgatcatggggattggcatggctgggttcccgtccaaggtgtgggcagagcttctaccaaacttcaacatggagggctgacttgaagctccctgtccccctcactcttgccccaagaaaagaggccaaagcaagagcagattccctaggcaagagcagcagcacaactaggaaaccccaaagcccatgctccgacaggtggcccttcacagggggcagcgggacaggcatcttgaagggcatatgtcctcggaagctccgagcctgttttctgtagtttatagttagagctctattttgttatggttttttaaacttttaagtcctgctctattttcctgggcaggtttatgttgatgtttacccactacaattttttaaaaatataagctcacatgccttttccctgccacagccaaacccccactgcaccctacccacccacccctagcccaggtcagctttcctggagctggctaatgaaagcctcctcacctcttcccaacccttacaagcaagggtgctaggggctcagctatacgaccattctccctgacagggagtccaaacttggcctagcatccctcctggcccccctctggccacgacttggcctgtgcctggttctctatcagaaaggggatgctgaacaaaacctccttccaagttttatccaattcgttcctcattgcctcgggctgcgtcaggggaagcaggggacaggtgtccagttgctgggccgagggaggagctggtttggcataggacctaaccagtgaagctagaggctacagccactaaacttgcttcaggccaacgatagttactcacaagtaagtaccttaatgctaatgaggtccactaaaaaggggaggaaggcagacctcctgggagacccacgaagggtttttagccagggaaaactgagccccaggaaaacctaaccactgggcaggcagaatttgtttgagggatagaacgacaacaaaataaatgttcctgcagcctgagatttcaggtagagtactgactaaggtttaataagacaataggtgacctgaggacatgcaagcttgtaaaatgcaacagcctcctgctagagtgacttgtacatgagcttgcttgcagaagactagattagatgtttctcaggatcccctcctgcgcaggggttctctgattttcgtgttctctgcccagatgggctgggggagttgagagtgtgcttattttcactgcgatcatgagaccacagttctgggttatctcctctcatacatcaagccccagaggaggcggcaagaggaacagccacaaacaagtactttaccccacagcttagtggccagtaaacaccctggggactaggaaaaggaaccaactgtaggcacctctccagggcctagggagacaagtgtcctctcttctgcatacatttgggctccccttacagagccctttgccctggctctctggtccttgttgctctaacagtccagatgtacacccagcctcagggggaaggcagctctctccagacagagtctcagggcccagcaaggtcaggttatctgctttcattcagggcaacaaatgatacaaatggtgccagggagtggcaaggccatgggggtaggtgggggtgtctttttcttttcataaagtaacaacagacgagactgaggttaaacatcagaaaaaaacctctggaatgaccttcctcattccaggaggccctggaataaggaagaggcttctttctgagggagctttgaggaattttgacagctgttgacatgggatttgggaaaggtgaagctgtgactggaggggcaggagatggtccaagtgtccatccagagatgagactcttagaatcaaagtgttcagcccaggaagtcttggagatcccaccttctgtggccctgcaccttatgggaagccattaagggggctcatctaggaattctggttacagcccagtgctcatcccagcgtatgctgcctctttagggcagccccaagggccagccagcctgtactctgggcaagagcccaaaatggctaggaatgtttgactcccttaatctcttccccagctacagaggaatcttttctctgcctggtctcagaatgggactgccaactggctcattggtgggagacacagtatcctcaaacctgtggccactggcatgacagtggtgctctgtctccctgggtgacacccaccctaggcttcctcctggatgtgatggggattgccagagaggctcttagcataaaaggcattaggtgggcatttttctgtgtgcccccaaaaagctccatggaaacaggcacctggtagctgcggaacacccgtggacttgtgtatatggtcataggctttgggaagacaggacgtaaaggaaaatgagagaaacaaaatgggtcagatagctttggccacagccccaggcagcctttggggcctatgacacttagtgcccttagatgggatacatcttgcctcggccccaagactcctccaacttacccgtcccatccagggcctgcacagcttagagaggctcacagcttggcaaatgctagggcttcatcagaccactgacttgactcagtgtttgttaaaatggaaccactcccgttggcctactgtttctctcctgtacttcttgtaatgatagttatttattgactctggtagcaggcagttcttaaataaagatggtttctcaacctgttggggaagctggcacgagctgtgggtgttatcatcaggctaaagcatacctccttgtcctgttcttcactccagaggcttttatccaagaatttctttaccccccacacagtgaaatataagtaagttacaacatacagtctatattgcttcatccagtcccaggaggagggaaaaattaggccaagatcttaaggcaggtccaagcagagcacaggcaggcatttggctagaatcagttggctttacctaatacagtggcagtaaacaatgcttatgtgatggtactgcttcaaggtggcctgatttttaagacatctttgaggtgttgactcagtggtcccaaaggaaagtctccctgcagatatattaatgatacccaactggtgagaacgaggctgctgcctctactcttggttcacagcagccacaagggtgtgaattactagtcactttccagccacactttctcacacattcgataaccatttatcaaa

SEQ ID NO: 6743 - DNA, 4948 bp, Homo sapiens
  source 1..4948: mol_type = unassigned DNA
gagttactcttgcatttggcaattaaagatgatgtttccatggaaacagttgatcctgctttcattcattggctgcttaggaggtgagcttctcttacaaggccctgtatttatcaaagaacccagcaacagcattttccctgttggttcagaagataaaaaaataactttgcattgtgaagcaagaggcaatccatcacctcattacagatggcagctgaatggaagtgatattgatatgagtatggaacatcgttataagttgaatggaggaaatcttgtggttattaatcccaacagaaattgggatacaggaacttaccaatgttttgcaacaaattcacttggaacaattgtcagcagagaagccaaacttcagtttgcctatcttgaaaattttaaaaccaaaatgaggagtacagtgtctgtgcgtgaaggccagggagttgtgctgctctgcggccccccaccacactctggagaactgtcatatgcttggatcttcaatgaatacccatcgtttgttgaagaagatagtcggagatttgtctcccaggagacagggcacctctacatatctaaggtggagccgtctgatgtgggaaattacacatgtgtggtgacaagtatggtgacaaatgcccgagtgctgggctctccaactcctttggtgctacgttctgatggtgtgatgggtgaatatgaacctaaaatagaagttcagtttccagaaactcttccagcagctaaaggttcgactgtgaaattggaatgttttgcccttggaaatcccatacctcagattaattggagaagaagtgatgggctgccattttccagcaaaattaaattaaggaagttcagtggtgtgcttgaaatccccaacttccaacaggaagatgcaggttcctatgaatgcattgctgagaattcacgaggaaaaaatgttgccagagggcgtctcacttactatgcaaagccccattgggttcaactcataaaggatgtggaaatagccgtggaggacagtctttattgggaatgcagggcaagcggcaagcccaagccttcctaccgatggctgaaaaatggagcagccctggtgctagaggagagaacacagatagaaaatggtgcccttacaatatcaaacctaagtgtgactgattctggcatgttccaatgcatagcagaaaacaaacatggccttgtttattccagtgctgagctcaaagttgttgcttctgctccagatttttcaaagaatccaatgaagaagttggttcaggtgcaggtgggcagcctggtcagcttggattgtaaacccagagcctccccaagggcactctcttcctggaagaagggggatgtgagcgtgcaggagcatgaaagaatttctttgttaaacgatggaggactcaaaatagccaatgtgactaaagctgatgctggaacttacacctgcatggcagaaaaccagtttgggaaagcaaatggcacaacacatttggttgttacggaaccaacaagaataactttggcaccatctaacatggatgtttctgttggtgaaagcgtcatattgccctgccaggtacaacatgacccgctgttagacatcatctttacctggtatttcaatggggcccttgcagattttaagaaagatggatctcactttgagaaagttggtgggagttcatctggtgatttaatgatcagaaacattcagctgaaacacagtgggaaatatgtttgtatggtgcaaacgggggtggacagtgtttcatctgctgctgacctcatagtaagaggttcacctggaccaccagaaaatgtgaaggtagatgaaattacagacacaacagcccaactctcttggaaagaaggtaaagacaaccatagcccagttatatcctattctatccaggctcggacacctttctccgtgggttggcaaaccgtcacaacagtgcctgaggtcatcgatgggaagacgcacacagccactgtagttgagttaaacccatgggtggaatatgaatttcgggttgtagccagtaacaaaattggaggtggagaaccaagtttaccctcagaaaaagtaagaactgaagaggcagttccagaagtgcctccttctgaagtcaatggaggaggcggaagccggtctgaacttgtgataacctgggatccagtccctgaagaactacagaatggtgaaggttttgggtatgttgttgctttccgccctcttggggttaccacctggatccagacagtggtgacatcccctgacaccccaagatatgtctttaggaatgaaagcatcgtgccatattcaccatatgaagttaaagtgggtgtttataataacaaaggtgaaggaccatttagcccagtgacaacagtgttctctgcagaagaagagcctacagtggccccatctcaagtctctgcaaatagcctatcttcctcagaaattgaggtttcatggaacaccattccttggaagttgagcaatggacatttactgggctatgaggtgcggtactggaatgggggtggaaaggaggaatcatccagtaagatgaaagtggcaggaaatgagacatcagccagactacggggcctgaagagcaacctggcctattacacggctgtccgggcttacaacagtgccggcgctgggccttttagcgccacagttaatgtaaccaccaagaaaacgcctcccagtcagccaccaggaaatgttgtttggaatgccacagacactaaagtgttacttaattgggagcaagttaaagccatggagaatgagtcagaagtaacaggatataaagttttctataggactagcagtcaaaataacgtacaagtactgaacacaaataaaacttcagctgaacttgtgctgcccattaaagaggactacattattgaagtcaaggccacaacagatggaggggatgggaccagtagtgaacagatcaggattccacgaataaccagtatggatgcaagaggatccacttcagccatctcgaatgtccaccctatgtcaagttatatgcctatagtactgttcttaattgtatatgtcctgtggtgatattaactcctttttattatttattggaaagttatttggttaccaaaaaaagtgctttcatgaaatgcagtgattatgcatgtttttttcaactcttatttttaactttctacttcattataggtaaatatgaatataattaaaaaaacagtaaatccttttaggggaatctgaaatgccttaatattaacttgataaaccaaaggaatttacatattacatacttcagacttttgatataaatgttcttaaactatgagtttaagcactgcctatggataaagactcacacactctcacatgtacacacacacgcatgagaatttctttttacattgaaaaactctttcatttaattcaaatgctattttcccattataatagcattatttggaagacttaaccagtatcaatttgaaatgctgatttaagtccccaaggatgaaaaatacattttaaaaattattttgttggagaggagtggcatgtgattcaaaagagcattgttggaaaatgctactgtggggcttagaagaatgatgtttggtttggtatgctgctaactagttgtaagactttacaaatcactttgccatctgtacctctcaattattcctctataaaatatggagataataatacctatctgatcagactttgccccatgaattagtttttaaaagataaagactgaagtatgaaagtgcttttgtcaccccaaatgcaattgacccatgcaaaatattagcatgaatttatttaatcacataaaagtcatgaagaccagccagattttcaagcttcattctgtttcattcagttatattccaaaattcaaatgatcacattttattctttctcaaaaaaaaaaagtttttttaaattaaaaaaggaattgtttccttcacagctatgaataagctttcaggttttattaaaacctagaggaaaaaatcaggaatgacctgaatctcaacccaaatattaaacaaaatccacataatccctcatttcaatttccaattccattaagggaccctctctttttggatggcagagatggttttttaatgaaatcccaccatctatctgagtgagtctggcaggctttttagttcctgagttaaatttgtaatagaaccaaggcaatgctgctgactttgatatgtatgactcagtctttcaatatgtggttttcaaaaaattgttgaagacgtgacttcatagcaatatatagagaataaattaaaatcagcagattgagttttcaacattgcaaaatcagttttttacctctttcctaccaatttcacattttgcagaaacttgttcacatttccaacaatatcagaattagaaaacagttcagataacaagaaagattaaaaattagggaaattctgatatcaccataaagcactattttacatttagagattacatttaagataaagtcatcatacacaaaaacaataaatatttataactttctctataaggtccgcatatactgtatatattgaaacaatctgaatgactagtagatttcatatgaccattgttatttccactttctccaatacttgtattttatgctacatgtaatgaagttggacctttttattatttagtaattcctatatgttcctatacttttcattttcaagatgattgctctattgtttcatgttgtttctagcaatatatctccatgagatatgcactttgtttcatattgaaaagtataaaatttatctttcaattcctgtgtgtgtatcctatggttatctgtatgtattattttctattctaataaaatttataacaagcaaa

SEQ ID NO: 6744 - DNA, 2846 bp, Homo sapiens
  source 1..2846: mol_type = unassigned DNA
aatttgagcattactcaatacatgttacatagtgcctgacacctgattagcaaactataaatgcttagcccttgacttaaagagagctgagttatgcctggatcttcaatgaatacccttcctatcaggataatcgccgctttgtttctcaagagactgggaatctgtatattgccaaagtagaaaaatcagatgttgggaattatacctgtgtggttaccaataccgtgacaaaccacaaggtcctggggccacctacaccactaatattgagaaatgatggagtgatgggtgaatatgagcccaaaatagaagtgcagttcccagaaacagttccgactgcaaaaggagcaacggtgaagctggaatgctttgctttaggaaatccagtaccaactattatctggcgaagagctgatggaaagccaatagcaaggaaagccagaagacacaagtcaaatggaattcttgagatccctaattttcagcaggaggatgctggtttatatgaatgtgtagctgaaaattccagagggaaaaatgtagcaaggggacagctaactttctatgctcaacctaattggattcaaaaaataaatgatattcacgtggccatggaagaaaatgtcttttgggaatgtaaagcaaatggaaggcctaagcctacatacaagtggctaaaaaatggcgaacctctgctaactcgggatagaattcaaattgagcaaggaacactcaacataacaatagtgaacctctcagatgctggcatgtatcagtgtttggcagagaataaacatggagttatcttttccaacgcagagcttagtgttatagctgtaggtccagatttttcaagaacactcttgaaaagagtaactcttgtcaaagtgggaggtgaagttgtcattgagtgtaagccaaaagcgtctccaaaacctgtttacacctggaagaaaggaagggatatattaaaagaaaatgaaagaattaccatttctgaagatggaaacctcagaatcatcaacgttactaaatcagacgctgggagttatacctgtatagccactaaccattttggaactgctagcagtactggaaacttggtagtgaaagatccaacaagggtaatggtacccccttccagtatggatgtcactgttggagagagtattgttttaccgtgccaggtaacgcatgatcactcgctagacatcgtgtttacttggtcatttaatggacacctgatagactttgacagagatggggaccactttgaaagagttggagggcaggattcagctggtgatttgatgatccgaaacatccaactgaagcatgctgggaaatatgtctgcatggtccaaacaagtgtggacaggctatctgctgctgcagacctgattgtaagaggtcctccaggtcccccagaggctgtgacaatagacgaaatcacagataccactgctcagctctcctggagacccgggcctgacaaccacagccccatcaccatgtatgtcattcaagccaggactccattctccgtgggctggcaagcagtcagtacagtcccagaactcattgatgggaagacattcacagcgaccgtggtgggtttgaacccttgggttgaatatgaattccgcacagttgcagccaacgtgattgggattggggagcccagccgcccctcagagaaacggagaacagaagaagctctccccgaagtcacaccagcgaatgtcagtggtggcggaggcagcaaatctgaactggttataacctgggagacggtccctgaggaattacagaatggtcgaggctttggttatgtggtggccttccggccctacggtaaaatgatctggatgctgacagtgctggcctcagctgatgcctctagatacgtgttcaggaatgagagcgtgcaccccttctctccctttgaggttaaagtaggtgtcttcaacaacaaaggagaaggccctttcagtcccaccacggtggtgtattctgcagaagaagaacccaccaaaccaccagccagtatctttgccagaagtctttctgccacagatattgaagttttctgggcctccccactggagaagaatagaggacgaatacaaggttatgaggttaaatattggagacatgaagacaaagaagaaaatgctagaaaaatacgaacagttggaaatcagacatcaacaaaaatcacgaacttaaaaggcagtgtgctgtatcacttagctgtcaaggcatataattctgctgggacaggcccctctagtgcaacagtcaatgtgacaacccgaaagccaccaccaagtcaaccccccggaaacatcatatggaattcatcagactccaaaattatcctgaattgggatcaagtgaaggccctggataatgagtcggaagtaaaaggatacaaagtcttgtacagatggaacagacaaagcagcacatctgtcattgaaacaaataaaacatcggtggagctttctttgcctttcgatgaagattatataatagaaattaagccattcagcgacggaggagatggcagcagcagtgaacaaattcgaattccaaagatatcaaatgcctacgcgagaggatctggggcttccacttcgaatgcatgtacgctgtcagccatcagtacaataatgatttccctcacagctaggtccagtttatgacaaaagttatctgaaggacttgctgtttataatataagcaacatttagctagttgttttgaagacacccagtactaagtaatattgttgttcaagtacatcttattactggaataaaaatgttttttgcttcttt

SEQ ID NO: 6745 - DNA, 2322 bp, Homo sapiens
  source 1..2322: mol_type = unassigned DNA
gttctatgttcccagtgggaacataccagatggaggctttgatttgctcaacctaattggattcaaaaaataaatgatattcacgtggccatggaagaaaatgtcttttgggaatgtaaagcaaatggaaggcctaagcctacatacaagtggctaaaaaatggcgaacctctgctaactcgggatagaattcaaattgagcaaggaacactcaacataacaatagtgaacctctcagatgctggcatgtatcagtgtttggcagagaataaacatggagttatcttttccaacgcagagcttagtgttatagctgtaggtccagatttttcaagaacactcttgaaaagagtaactcttgtcaaagtgggaggtgaagttgtcattgagtgtaagccaaaagcgtctccaaaacctgtttacacctggaagaaaggaagggatatattaaaagaaaatgaaagaattaccatttctgaagatggaaacctcagaatcatcaacgttactaaatcagacgctgggagttatacctgtatagccactaaccattttggaactgctagcagtactggaaacttggtagtgaaagatccaacaagggtaatggtacccccttccagtatggatgtcactgttggagagagtattgttttaccgtgccaggtaacgcatgatcactcgctagacatcgtgtttacttggtcatttaatggacacctgatagactttgacagagatggggaccactttgaaagagttggagggcaggattcagctggtgatttgatgatccgaaacatccaactgaagcatgctgggaaatatgtctgcatggtccaaacaagtgtggacaggctatctgctgctgcagacctgattgtaagaggtcctccaggtcccccagaggctgtgacaatagacgaaatcacagataccactgctcagctctcctggagacccgggcctgacaaccacagccccatcaccatgtatgtcattcaagccaggactccattctccgtgggctggcaagcagtcagtacagtcccagaactcattgatgggaagacattcacagcgaccgtggtgggtttgaacccttgggttgaatatgaattccgcacagttgcagccaacgtgattgggattggggagcccagccgcccctcagagaaacggagaacagaagaagctctccccgaagtcacaccagcgaatgtcagtggtggcggaggcagcaaatctgaactggttataacctgggagacggtccctgaggaattacagaatggtcgaggctttggttatgtggtggccttccggccctacggtaaaatgatctggatgctgacagtgctggcctcagctgatgcctctagatacgtgttcaggaatgagagcgtgcaccccttctctccctttgaggttaaagtaggtgtcttcaacaacaaaggagaaggccctttcagtcccaccacggtggtgtattctgcagaagaagaacccaccaaaccaccagccagtatctttgccagaagtctttctgccacagatattgaagttttctgggcctccccactggagaagaatagaggacgaatacaaggttatgaggttaaatattggagacatgaagacaaagaagaaaatgctagaaaaatacgaacagttggaaatcagacatcaacaaaaatcacgaacttaaaaggcagtgtgctgtatcacttagctgtcaaggcatataattctgctgggacaggcccctctagtgcaacagtcaatgtgacaacccgaaagccaccaccaagtcaaccccccggaaacatcatatggaattcatcagactccaaaattatcctgaattgggatcaagtgaaggccctggataatgagtcggaagtaaaaggatacaaagtcttgtacagatggaacagacaaagcagcacatctgtcattgaaacaaataaaacatcggtggagctttctttgcctttcgatgaagattatataatagaaattaagccattcagcgacggaggagatggcagcagcagtgaacaaattcgaattccaaagatatcaaatgcctacgcgagaggatctggggcttccacttcgaatgcatgtacgctgtcagccatcagtacaataatgatttccctcacagctaggtccagtttatgacaaaagttatctgaaggacttgctgtttataatataagcaacatttagctagttgttttgaagacacccagtactaagtaatattgttgttcaagtacatcttattactggaataaaaatgttttttgcttcttt

SEQ ID NO: 6746 - DNA, 5198 bp, Homo sapiens
  source 1..5198: mol_type = unassigned DNA
gccattctcccgcctcagcctcccgagtagctgggactacaggcgccgccaccacgcctggctaatttttgtatttttagtagagacggggtttcaccgtgttagccaggatggtctcgatctcctgacctcgtgatccgcccgcctcggcctcccaaagtgctgggatgacaggcgtgagccaccgtgcccggcctggctctgtttttattagaaaaattctcaatcgtcgtcttttaagaatcattgacatagagtaactccacagcatgtgtcttcaagagcttccctaaaagattaaaggttatacaaaacttaaaagaagcagcaattctattcgcttgttattggacttgaaactccctttgacctcggaaactgaagatgaggttgccatgggaactgctggtactgcaatcattcattttgtgccttgcagatgattccacactgcatggcccgatttttattcaagaaccaagtcctgtaatgttccctttggattctgaggagaaaaaagtgaagctcaattgtgaagttaaaggaaatccaaaacctcatatcaggtggaagttaaatggaacagatgttgacactggtatggatttccgctacagtgttgttgaagggagcttgttgatcaataaccccaataaaacccaagatgctggaacgtaccagtgcacagcgacaaactcgtttggaacaattgttagcagagaagcaaagcttcagtttgcttatcttgacaactttaaaacaagaacaagaagcactgtgtctgtccgtcgaggtcaaggaatggtgctactgtgtggcccgccaccccattctggagagctgagttatgcctggatcttcaatgaatacccttcctatcaggataatcgccgctttgtttctcaagagactgggaatctgtatattgccaaagtagaaaaatcagatgttgggaattatacctgtgtggttaccaataccgtgacaaaccacaaggtcctggggccacctacaccactaatattgagaaatgatggagtgatgggtgaatatgagcccaaaatagaagtgcagttcccagaaacagttccgactgcaaaaggagcaacggtgaagctggaatgctttgctttaggaaatccagtaccaactattatctggcgaagagctgatggaaagccaatagcaaggaaagccagaagacacaagtcaaatggaattcttgagatccctaattttcagcaggaggatgctggtttatatgaatgtgtagctgaaaattccagagggaaaaatgtagcaaggggacagctaactttctatgctcaacctaattggattcaaaaaataaatgatattcacgtggccatggaagaaaatgtcttttgggaatgtaaagcaaatggaaggcctaagcctacatacaagtggctaaaaaatggcgaacctctgctaactcgggatagaattcaaattgagcaaggaacactcaacataacaatagtgaacctctcagatgctggcatgtatcagtgtttggcagagaataaacatggagttatcttttccaacgcagagcttagtgttatagctgtaggtccagatttttcaagaacactcttgaaaagagtaactcttgtcaaagtgggaggtgaagttgtcattgagtgtaagccaaaagcgtctccaaaacctgtttacacctggaagaaaggaagggatatattaaaagaaaatgaaagaattaccatttctgaagatggaaacctcagaatcatcaacgttactaaatcagacgctgggagttatacctgtatagccactaaccattttggaactgctagcagtactggaaacttggtagtgaaagatccaacaagggtaatggtacccccttccagtatggatgtcactgttggagagagtattgttttaccgtgccaggtaacgcatgatcactcgctagacatcgtgtttacttggtcatttaatggacacctgatagactttgacagagatggggaccactttgaaagagttggagggcaggattcagctggtgatttgatgatccgaaacatccaactgaagcatgctgggaaatatgtctgcatggtccaaacaagtgtggacaggctatctgctgctgcagacctgattgtaagaggtcctccaggtcccccagaggctgtgacaatagacgaaatcacagataccactgctcagctctcctggagacccgggcctgacaaccacagccccatcaccatgtatgtcattcaagccaggactccattctccgtgggctggcaagcagtcagtacagtcccagaactcattgatgggaagacattcacagcgaccgtggtgggtttgaacccttgggttgaatatgaattccgcacagttgcagccaacgtgattgggattggggagcccagccgcccctcagagaaacggagaacagaagaagctctccccgaagtcacaccagcgaatgtcagtggtggcggaggcagcaaatctgaactggttataacctgggagacggtccctgaggaattacagaatggtcgaggctttggttatgtggtggccttccggccctacggtaaaatgatctggatgctgacagtgctggcctcagctgatgcctctagatacgtgttcaggaatgagagcgtgcaccccttctctccctttgaggttaaagtaggtgtcttcaacaacaaaggagaaggccctttcagtcccaccacggtggtgtattctgcagaagaagaacccaccaaaccaccagccagtatctttgccagaagtctttctgccacagatattgaagttttctgggcctccccactggagaagaatagaggacgaatacaaggttatgaggttaaatattggagacatgaagacaaagaagaaaatgctagaaaaatacgaacagttggaaatcagacatcaacaaaaatcacgaacttaaaaggcagtgtgctgtatcacttagctgtcaaggcatataattctgctgggacaggcccctctagtgcaacagtcaatgtgacaacccgaaagccaccaccaagtcaaccccccggaaacatcatatggaattcatcagactccaaaattatcctgaattgggatcaagtgaaggccctggataatgagtcggaagtaaaaggatacaaagtcttgtacagatggaacagacaaagcagcacatctgtcattgaaacaaataaaacatcggtggagctttctttgcctttcgatgaagattatataatagaaattaagccattcagcgacggaggagatggcagcagcagtgaacaaattcgaattccaaagatatcaaatgcctacgcgagaggatctggggcttccacttcgaatgcatgtacgctgtcagccatcagtacaataatgatttccctcacagctaggtccagtttatgacaaaagttatctgaaggacttgctgtttataatataagcaacatttagctagttgttttgaagacacccagtactaagtaatattgttgttcaagtacatcttattactggaataaaaatgttttttgcttctttaggaatggcattatacagtacttcctcaaagcaaatctagctttgtctgaagtttctttggaaactctgcaatgcactgaagacatctgtaatatgatgttaccaaagcagtttacatatgtccttatatgcatattttttattatatatttagtgttttatagaattttttaaagttaacatataatgtagatattaattttttcctcggctgtaaaatgctatgggcaacacaatcatgcaattataatttgaaaatatttcctttaaagacagagtttgaaactcatcttggtaaataaattgcaaattactcgtacagttttacaaggatctcatggcagaacagcggaagacttggtccgtaactcaaggctgttgtatgcaaactactcttctagtggttaatgcacttgacatgtacagtatgtttcccatgccgttgtgattttgacatgtacagtatgttttcatgccgttgtgaattttgttgttcaacccaacttgagatggtttcaggaatggctgcaatctcaaaagctcaatgtactgcccaagaggcaccttgtgcaatattcccatccctgaatttagcattgtacaggaagattttcttttcactcaactgagttagcattgtctttgtggtagcattatcttagacattaaatttgaagtaacatatatcctgtagtaacatagacccaaagttactatagtcaaccaagtctttcaaaggataaaagatcattttattatctttaactgtatctattttgaatgtaaatttaaaaaaagtaattctctgtcaatggattcgtaatttctttacaaaatttcttatatataatatgtgtatctctgtaataatagagcccttcttttgaatcaaaattacatatggactttggaagattgctcctatttcaacaaatagttgctgcaagaatttttaatatgactctataaaagctctttagtacaattgtatggtttcttgatgattctgttttgcaataggtagcctagttgctttatatgctttaccttctaggtcttaaaatcacacattggaaaatgacaatatcaacaaaactgtattcttatgaaaagaactatttgttacaatgagaaaggttttgtgagtaaaccctactggacagtgacataaaaggcaatggaattttctataaacattttctcatgtaaacatgctgccaccttttcttctttctcagagaactcaaatttgctatagtttgtcatttttgcttacaaataatataacttttcaaccttctagttatatttatccaataaagtcataatcgggattccatttgtgtaaaaactagggtggtaaccggaaaaaaatattgtcagtatttcaagctgtgttcctttcttagtttgatatggttacttctatgttgaaataaaatttaaaatcacatgcaaaaaaaaaatcagcaaaataataaaatgaacgaaaaaaaatgacacccagggagttcccaaccccagtgtaaatgatatttaccagtgatctagcatatgtaatcttttttaaaggtattgttaataaatattctgtcatt

SEQ ID NO: 6747 - DNA, 5093 bp, Homo sapiens
  source 1..5093: mol_type = unassigned DNA
ctgtgccggcgccgcacccgaggctctcgccagcccggcgccccggtgctgagtgggtgaaaaagaacagtgtgtcatgaagacaggcacctggaggtgatttgggtggcattcatgagaaaattcacgttacccgaatcattgacatagagtaactccacagcatgtgtcttcaagagcttccctaaaagattaaaggttatacaaaacttaaaagaagcagcaattctattcgcttgttattggacttgaaactccctttgacctcggaaactgaagatgaggttgccatgggaactgctggtactgcaatcattcattttgtgccttgcagatgattccacactgcatggcccgatttttattcaagaaccaagtcctgtaatgttccctttggattctgaggagaaaaaagtgaagctcaattgtgaagttaaaggaaatccaaaacctcatatcaggtggaagttaaatggaacagatgttgacactggtatggatttccgctacagtgttgttgaagggagcttgttgatcaataaccccaataaaacccaagatgctggaacgtaccagtgcacagcgacaaactcgtttggaacaattgttagcagagaagcaaagcttcagtttgcttatcttgacaactttaaaacaagaacaagaagcactgtgtctgtccgtcgaggtcaaggaatggtgctactgtgtggcccgccaccccattctggagagctgagttatgcctggatcttcaatgaatacccttcctatcaggataatcgccgctttgtttctcaagagactgggaatctgtatattgccaaagtagaaaaatcagatgttgggaattatacctgtgtggttaccaataccgtgacaaaccacaaggtcctggggccacctacaccactaatattgagaaatgatggagtgatgggtgaatatgagcccaaaatagaagtgcagttcccagaaacagttccgactgcaaaaggagcaacggtgaagctggaatgctttgctttaggaaatccagtaccaactattatctggcgaagagctgatggaaagccaatagcaaggaaagccagaagacacaagtcaaatggaattcttgagatccctaattttcagcaggaggatgctggtttatatgaatgtgtagctgaaaattccagagggaaaaatgtagcaaggggacagctaactttctatgctcaacctaattggattcaaaaaataaatgatattcacgtggccatggaagaaaatgtcttttgggaatgtaaagcaaatggaaggcctaagcctacatacaagtggctaaaaaatggcgaacctctgctaactcgggatagaattcaaattgagcaaggaacactcaacataacaatagtgaacctctcagatgctggcatgtatcagtgtttggcagagaataaacatggagttatcttttccaacgcagagcttagtgttatagctgtaggtccagatttttcaagaacactcttgaaaagagtaactcttgtcaaagtgggaggtgaagttgtcattgagtgtaagccaaaagcgtctccaaaacctgtttacacctggaagaaaggaagggatatattaaaagaaaatgaaagaattaccatttctgaagatggaaacctcagaatcatcaacgttactaaatcagacgctgggagttatacctgtatagccactaaccattttggaactgctagcagtactggaaacttggtagtgaaagatccaacaagggtaatggtacccccttccagtatggatgtcactgttggagagagtattgttttaccgtgccaggtaacgcatgatcactcgctagacatcgtgtttacttggtcatttaatggacacctgatagactttgacagagatggggaccactttgaaagagttggagggcaggattcagctggtgatttgatgatccgaaacatccaactgaagcatgctgggaaatatgtctgcatggtccaaacaagtgtggacaggctatctgctgctgcagacctgattgtaagaggtcctccaggtcccccagaggctgtgacaatagacgaaatcacagataccactgctcagctctcctggagacccgggcctgacaaccacagccccatcaccatgtatgtcattcaagccaggactccattctccgtgggctggcaagcagtcagtacagtcccagaactcattgatgggaagacattcacagcgaccgtggtgggtttgaacccttgggttgaatatgaattccgcacagttgcagccaacgtgattgggattggggagcccagccgcccctcagagaaacggagaacagaagaagctctccccgaagtcacaccagcgaatgtcagtggtggcggaggcagcaaatctgaactggttataacctgggagacggtccctgaggaattacagaatggtcgaggctttggttatgtggtggccttccggccctacggtaaaatgatctggatgctgacagtgctggcctcagctgatgcctctagatacgtgttcaggaatgagagcgtgcaccccttctctccctttgaggttaaagtaggtgtcttcaacaacaaaggagaaggccctttcagtcccaccacggtggtgtattctgcagaagaagaacccaccaaaccaccagccagtatctttgccagaagtctttctgccacagatattgaagttttctgggcctccccactggagaagaatagaggacgaatacaaggttatgaggttaaatattggagacatgaagacaaagaagaaaatgctagaaaaatacgaacagttggaaatcagacatcaacaaaaatcacgaacttaaaaggcagtgtgctgtatcacttagctgtcaaggcatataattctgctgggacaggcccctctagtgcaacagtcaatgtgacaacccgaaagccaccaccaagtcaaccccccggaaacatcatatggaattcatcagactccaaaattatcctgaattgggatcaagtgaaggccctggataatgagtcggaagtaaaaggatacaaagtcttgtacagatggaacagacaaagcagcacatctgtcattgaaacaaataaaacatcggtggagctttctttgcctttcgatgaagattatataatagaaattaagccattcagcgacggaggagatggcagcagcagtgaacaaattcgaattccaaagatatcaaatgcctacgcgagaggatctggggcttccacttcgaatgcatgtacgctgtcagccatcagtacaataatgatttccctcacagctaggtccagtttatgacaaaagttatctgaaggacttgctgtttataatataagcaacatttagctagttgttttgaagacacccagtactaagtaatattgttgttcaagtacatcttattactggaataaaaatgttttttgcttctttaggaatggcattatacagtacttcctcaaagcaaatctagctttgtctgaagtttctttggaaactctgcaatgcactgaagacatctgtaatatgatgttaccaaagcagtttacatatgtccttatatgcatattttttattatatatttagtgttttatagaattttttaaagttaacatataatgtagatattaattttttcctcggctgtaaaatgctatgggcaacacaatcatgcaattataatttgaaaatatttcctttaaagacagagtttgaaactcatcttggtaaataaattgcaaattactcgtacagttttacaaggatctcatggcagaacagcggaagacttggtccgtaactcaaggctgttgtatgcaaactactcttctagtggttaatgcacttgacatgtacagtatgtttcccatgccgttgtgattttgacatgtacagtatgttttcatgccgttgtgaattttgttgttcaacccaacttgagatggtttcaggaatggctgcaatctcaaaagctcaatgtactgcccaagaggcaccttgtgcaatattcccatccctgaatttagcattgtacaggaagattttcttttcactcaactgagttagcattgtctttgtggtagcattatcttagacattaaatttgaagtaacatatatcctgtagtaacatagacccaaagttactatagtcaaccaagtctttcaaaggataaaagatcattttattatctttaactgtatctattttgaatgtaaatttaaaaaaagtaattctctgtcaatggattcgtaatttctttacaaaatttcttatatataatatgtgtatctctgtaataatagagcccttcttttgaatcaaaattacatatggactttggaagattgctcctatttcaacaaatagttgctgcaagaatttttaatatgactctataaaagctctttagtacaattgtatggtttcttgatgattctgttttgcaataggtagcctagttgctttatatgctttaccttctaggtcttaaaatcacacattggaaaatgacaatatcaacaaaactgtattcttatgaaaagaactatttgttacaatgagaaaggttttgtgagtaaaccctactggacagtgacataaaaggcaatggaattttctataaacattttctcatgtaaacatgctgccaccttttcttctttctcagagaactcaaatttgctatagtttgtcatttttgcttacaaataatataacttttcaaccttctagttatatttatccaataaagtcataatcgggattccatttgtgtaaaaactagggtggtaaccggaaaaaaatattgtcagtatttcaagctgtgttcctttcttagtttgatatggttacttctatgttgaaataaaatttaaaatcacatgcaaaaaaaaaatcagcaaaataataaaatgaacgaaaaaaaatgacacccagggagttcccaaccccagtgtaaatgatatttaccagtgatctagcatatgtaatcttttttaaaggtattgttaataaatattctgtcatt

SEQ ID NO: 6748 - DNA, 658 bp, Homo sapiens
  source 1..658: mol_type = unassigned DNA
agccgccgcgagcgccgggagggagggcagcgccgcgccagacggagcccggggttcgacgccaggattggctgcaagtagggagctttcgccgccgccccgggcccctcggactgtgccggcgccgcacccgaggctctcgccagcccggcgccccggtgctgaggaatcattgacatagagtaactccacagcatgtgtcttcaagagcttccctaaaagattaaaggttatacaaaacttaaaagaagcagcaattctattcgcttgttattggacttgaaactccctttgacctcggaaactgaagatgaggttgccatgggaactgctggtactgcaatcattcattttgtgccttgcagatgattccacactgcatggcccgatttttattcaagaaccaagtcctgtaatgttccctttggattctgaggagaaaaaagtgaagctcaattgtgaagttaaaggaaatccaaaacctcatatcaggtggaagttaaatggaacagatgttgacactggtatggatttccgctacagtgttgttgaagggagcttgttgatcaataaccccaataaaacccaagatgctggaacgtaccagtgcacagcgacaaactcgtttggaacaattgttagcagagaagcaaagctt

SEQ ID NO: 6749 - DNA, 4985 bp, Homo sapiens
  source 1..4985: mol_type = unassigned DNA
agtaaagataaacttgcagagaccacaaggagaaatattcccaaatctcattgtaatgtctcttctttcccacagattaaaggttatacaaaacttaaaagaagcagcaattctattcgcttgttattggacttgaaactccctttgacctcggaaactgaagatgaggttgccatgggaactgctggtactgcaatcattcattttgtgccttgcagatgattccacactgcatggcccgatttttattcaagaaccaagtcctgtaatgttccctttggattctgaggagaaaaaagtgaagctcaattgtgaagttaaaggaaatccaaaacctcatatcaggtggaagttaaatggaacagatgttgacactggtatggatttccgctacagtgttgttgaagggagcttgttgatcaataaccccaataaaacccaagatgctggaacgtaccagtgcacagcgacaaactcgtttggaacaattgttagcagagaagcaaagcttcagtttgcttatcttgacaactttaaaacaagaacaagaagcactgtgtctgtccgtcgaggtcaaggaatggtgctactgtgtggcccgccaccccattctggagagctgagttatgcctggatcttcaatgaatacccttcctatcaggataatcgccgctttgtttctcaagagactgggaatctgtatattgccaaagtagaaaaatcagatgttgggaattatacctgtgtggttaccaataccgtgacaaaccacaaggtcctggggccacctacaccactaatattgagaaatgatggagtgatgggtgaatatgagcccaaaatagaagtgcagttcccagaaacagttccgactgcaaaaggagcaacggtgaagctggaatgctttgctttaggaaatccagtaccaactattatctggcgaagagctgatggaaagccaatagcaaggaaagccagaagacacaagtcaaatggaattcttgagatccctaattttcagcaggaggatgctggtttatatgaatgtgtagctgaaaattccagagggaaaaatgtagcaaggggacagctaactttctatgctcaacctaattggattcaaaaaataaatgatattcacgtggccatggaagaaaatgtcttttgggaatgtaaagcaaatggaaggcctaagcctacatacaagtggctaaaaaatggcgaacctctgctaactcgggatagaattcaaattgagcaaggaacactcaacataacaatagtgaacctctcagatgctggcatgtatcagtgtttggcagagaataaacatggagttatcttttccaacgcagagcttagtgttatagctgtaggtccagatttttcaagaacactcttgaaaagagtaactcttgtcaaagtgggaggtgaagttgtcattgagtgtaagccaaaagcgtctccaaaacctgtttacacctggaagaaaggaagggatatattaaaagaaaatgaaagaattaccatttctgaagatggaaacctcagaatcatcaacgttactaaatcagacgctgggagttatacctgtatagccactaaccattttggaactgctagcagtactggaaacttggtagtgaaagatccaacaagggtaatggtacccccttccagtatggatgtcactgttggagagagtattgttttaccgtgccaggtaacgcatgatcactcgctagacatcgtgtttacttggtcatttaatggacacctgatagactttgacagagatggggaccactttgaaagagttggagggcaggattcagctggtgatttgatgatccgaaacatccaactgaagcatgctgggaaatatgtctgcatggtccaaacaagtgtggacaggctatctgctgctgcagacctgattgtaagaggtcctccaggtcccccagaggctgtgacaatagacgaaatcacagataccactgctcagctctcctggagacccgggcctgacaaccacagccccatcaccatgtatgtcattcaagccaggactccattctccgtgggctggcaagcagtcagtacagtcccagaactcattgatgggaagacattcacagcgaccgtggtgggtttgaacccttgggttgaatatgaattccgcacagttgcagccaacgtgattgggattggggagcccagccgcccctcagagaaacggagaacagaagaagctctccccgaagtcacaccagcgaatgtcagtggtggcggaggcagcaaatctgaactggttataacctgggagacggtccctgaggaattacagaatggtcgaggctttggttatgtggtggccttccggccctacggtaaaatgatctggatgctgacagtgctggcctcagctgatgcctctagatacgtgttcaggaatgagagcgtgcaccccttctctccctttgaggttaaagtaggtgtcttcaacaacaaaggagaaggccctttcagtcccaccacggtggtgtattctgcagaagaagaacccaccaaaccaccagccagtatctttgccagaagtctttctgccacagatattgaagttttctgggcctccccactggagaagaatagaggacgaatacaaggttatgaggttaaatattggagacatgaagacaaagaagaaaatgctagaaaaatacgaacagttggaaatcagacatcaacaaaaatcacgaacttaaaaggcagtgtgctgtatcacttagctgtcaaggcatataattctgctgggacaggcccctctagtgcaacagtcaatgtgacaacccgaaagccaccaccaagtcaaccccccggaaacatcatatggaattcatcagactccaaaattatcctgaattgggatcaagtgaaggccctggataatgagtcggaagtaaaaggatacaaagtcttgtacagatggaacagacaaagcagcacatctgtcattgaaacaaataaaacatcggtggagctttctttgcctttcgatgaagattatataatagaaattaagccattcagcgacggaggagatggcagcagcagtgaacaaattcgaattccaaagatatcaaatgcctacgcgagaggatctggggcttccacttcgaatgcatgtacgctgtcagccatcagtacaataatgatttccctcacagctaggtccagtttatgacaaaagttatctgaaggacttgctgtttataatataagcaacatttagctagttgttttgaagacacccagtactaagtaatattgttgttcaagtacatcttattactggaataaaaatgttttttgcttctttaggaatggcattatacagtacttcctcaaagcaaatctagctttgtctgaagtttctttggaaactctgcaatgcactgaagacatctgtaatatgatgttaccaaagcagtttacatatgtccttatatgcatattttttattatatatttagtgttttatagaattttttaaagttaacatataatgtagatattaattttttcctcggctgtaaaatgctatgggcaacacaatcatgcaattataatttgaaaatatttcctttaaagacagagtttgaaactcatcttggtaaataaattgcaaattactcgtacagttttacaaggatctcatggcagaacagcggaagacttggtccgtaactcaaggctgttgtatgcaaactactcttctagtggttaatgcacttgacatgtacagtatgtttcccatgccgttgtgattttgacatgtacagtatgttttcatgccgttgtgaattttgttgttcaacccaacttgagatggtttcaggaatggctgcaatctcaaaagctcaatgtactgcccaagaggcaccttgtgcaatattcccatccctgaatttagcattgtacaggaagattttcttttcactcaactgagttagcattgtctttgtggtagcattatcttagacattaaatttgaagtaacatatatcctgtagtaacatagacccaaagttactatagtcaaccaagtctttcaaaggataaaagatcattttattatctttaactgtatctattttgaatgtaaatttaaaaaaagtaattctctgtcaatggattcgtaatttctttacaaaatttcttatatataatatgtgtatctctgtaataatagagcccttcttttgaatcaaaattacatatggactttggaagattgctcctatttcaacaaatagttgctgcaagaatttttaatatgactctataaaagctctttagtacaattgtatggtttcttgatgattctgttttgcaataggtagcctagttgctttatatgctttaccttctaggtcttaaaatcacacattggaaaatgacaatatcaacaaaactgtattcttatgaaaagaactatttgttacaatgagaaaggttttgtgagtaaaccctactggacagtgacataaaaggcaatggaattttctataaacattttctcatgtaaacatgctgccaccttttcttctttctcagagaactcaaatttgctatagtttgtcatttttgcttacaaataatataacttttcaaccttctagttatatttatccaataaagtcataatcgggattccatttgtgtaaaaactagggtggtaaccggaaaaaaatattgtcagtatttcaagctgtgttcctttcttagtttgatatggttacttctatgttgaaataaaatttaaaatcacatgcaaaaaaaaaatcagcaaaataataaaatgaacgaaaaaaaatgacacccagggagttcccaaccccagtgtaaatgatatttaccagtgatctagcatatgtaatcttttttaaaggtattgttaataaatattctgtcatttgtaaaga

SEQ ID NO: 6750 - DNA, 2279 bp, Homo sapiens
  source 1..2279: mol_type = unassigned DNA
tagctcaacctaattggattcaaaaaataaatgatattcacgtggccatggaagaaaatgtcttttgggaatgtaaagcaaatggaaggcctaagcctacatacaagtggctaaaaaatggcgaacctctgctaactcgggatagaattcaaattgagcaaggaacactcaacataacaatagtgaacctctcagatgctggcatgtatcagtgtttggcagagaataaacatggagttatcttttccaacgcagagcttagtgttatagctgtaggtccagatttttcaagaacactcttgaaaagagtaactcttgtcaaagtgggaggtgaagttgtcattgagtgtaagccaaaagcgtctccaaaacctgtttacacctggaagaaaggaagggatatattaaaagaaaatgaaagaattaccatttctgaagatggaaacctcagaatcatcaacgttactaaatcagacgctgggagttatacctgtatagccactaaccattttggaactgctagcagtactggaaacttggtagtgaaagatccaacaagggtaatggtacccccttccagtatggatgtcactgttggagagagtattgttttaccgtgccaggtaacgcatgatcactcgctagacatcgtgtttacttggtcatttaatggacacctgatagactttgacagagatggggaccactttgaaagagttggagggcaggattcagctggtgatttgatgatccgaaacatccaactgaagcatgctgggaaatatgtctgcatggtccaaacaagtgtggacaggctatctgctgctgcagacctgattgtaagaggtcctccaggtcccccagaggctgtgacaatagacgaaatcacagataccactgctcagctctcctggagacccgggcctgacaaccacagccccatcaccatgtatgtcattcaagccaggactccattctccgtgggctggcaagcagtcagtacagtcccagaactcattgatgggaagacattcacagcgaccgtggtgggtttgaacccttgggttgaatatgaattccgcacagttgcagccaacgtgattgggattggggagcccagccgcccctcagagaaacggagaacagaagaagctctccccgaagtcacaccagcgaatgtcagtggtggcggaggcagcaaatctgaactggttataacctgggagacggtccctgaggaattacagaatggtcgaggctttggttatgtggtggccttccggccctacggtaaaatgatctggatgctgacagtgctggcctcagctgatgcctctagatacgtgttcaggaatgagagcgtgcaccccttctctccctttgaggttaaagtaggtgtcttcaacaacaaaggagaaggccctttcagtcccaccacggtggtgtattctgcagaagaagaacccaccaaaccaccagccagtatctttgccagaagtctttctgccacagatattgaagttttctgggcctccccactggagaagaatagaggacgaatacaaggttatgaggttaaatattggagacatgaagacaaagaagaaaatgctagaaaaatacgaacagttggaaatcagacatcaacaaaaatcacgaacttaaaaggcagtgtgctgtatcacttagctgtcaaggcatataattctgctgggacaggcccctctagtgcaacagtcaatgtgacaacccgaaagccaccaccaagtcaaccccccggaaacatcatatggaattcatcagactccaaaattatcctgaattgggatcaagtgaaggccctggataatgagtcggaagtaaaaggatacaaagtcttgtacagatggaacagacaaagcagcacatctgtcattgaaacaaataaaacatcggtggagctttctttgcctttcgatgaagattatataatagaaattaagccattcagcgacggaggagatggcagcagcagtgaacaaattcgaattccaaagatatcaaatgcctacgcgagaggatctggggcttccacttcgaatgcatgtacgctgtcagccatcagtacaataatgatttccctcacagctaggtccagtttatgacaaaagttatctgaaggacttgctgtttataatataagcaacatttagctagttgttttgaagacacccagtactaagtaatattgttgttcaagtacatcttattactggaataaaaatgttttttgcttcttt

SEQ ID NO: 6751 - DNA, 566 bp, Homo sapiens
  source 1..566: mol_type = unassigned DNA
aagtagggagctttcgccgccgccccgggcccctcggactgtgccggcgccgcacccgaggctctcgccagcccggcgccccggtgctgagtgggtgaaaaagaacagtgtgtcatgaagacaggcacctggaggtgatttgggtggcattcatgagaaaattcacgttacccacttcgctaactgatgaaacactgccagagcccacttggactgtttcgcaactttacttaagggaataaaagctctcatgctgaggaatcattgacatagagtaactccacagcatgtgtcttcaagagcttccctaaaagattaaaggttatacaaaacttaaaagaagcagcaattctattcgcttgttattggacttgaaactccctttgacctcggaaactgaagatgaggttgccatgggaactgctggtactgcaatcattcattttgtgccttgcagatgattccacactgcatggcccgatttttattcaagaaccaagtcctgtaatgttccctttggattctgaggagaaaaaagtgaagctcaattgtgaagttaaaggaaa

SEQ ID NO: 6752 - DNA, 3303 bp, Homo sapiens
  source 1..3303: mol_type = unassigned DNA
atggcttcctcttggaaactaatgctgtttctgtcagtcaccatgtgtctttcagagtattcaaaatctcttcctggtctctccacttcatatgctgctttgttaagaattaagaagagttcatcttcatctctctttggttccaaaaccagaccacgatacagcagcccttcattaggaacactgagtgcttcttcacccagctggctaggggcagctcagaattattattcccccatcaatctttatcattcctcagatgccttcaaacaagatgaaagtgtggactatgggccagtttttgtgcaagaaccagatgatattatttttccaactgattctgatgaaaagaaggtagcattgaattgtgaagttcgtggcaatccagttcccagttacagatggcttcgaaatggaacagaaatagatctggaaagtgattatcgctacagtttgatagatggcaccttcattataagcaatccaagtgaagcaaaggattctggtcattatcagtgtttagcaaccaacactgtggggagtattcttagtagagaagctacactgcagtttgcctatctgggaaattttagtggccggacaagaagtgcagtctctgtgagggaaggccagggtgtcgttctgatgtgctctcctccgccacattcaccagagatcatctatagctgggtatttaatgagttcccttcctttgtggcggaagacagccggcggttcatctcccaggagacaggcaacctttatatttctaaagtccaaacatcagatgttggcagctatatttgtctggtgaaaaacacagtgacgaatgctagagtccttagtcctccaacgccactcactctgcgtaatgatggtgtgatgggagaatatgagccgaaaattgaggtccattttcctttcacggttacagctgctaaaggaacaactgttaagatggaatgctttgcacttggcaaccccgttccaacaatcacatggatgaaggttaatggttatattcctagtaaggcacgtctgcggaaatctcaggcggtgctggaaataccgaatgtacagctggatgatgcaggcatttatgagtgcagagctgaaaactcacgtggaaaaaattcctttcgtggacaattacaagtatacacctacccacactgggtagaaaaactgaatgatactcagttagacagtgggagccctctccgatgggaatgtaaggctactggaaaacccagacccacgtatcgttggctgaagaatggagtacccctctcacctcagagtagggttgagatggttaatggagtattgatgatccacaatgtgaatcaatcagatgctggaatgtatcagtgtttggctgaaaataagtatggagccatttacgctagtgctgagctgaagattctagcttcagctcccacttttgcactgaatcaactgaagaaaacaataattgttaccaaagaccaagaagttgtcatagagtgcaaaccccaaggctctccaaaaccaaccatctcttggaagaaaggagacagagcagttagagaaaacaaaagaatagctattcttccagacgggagtctacggatcctaaatgcttccaaatcagacgagggaaagtacgtttgccgaggggaaaacgtctttggttctgctgaaattatagcttcgctatctgtaaaagaacctacaaggatagaacttactcctaaaagaacagaattgacagtgggagaaagcattgtccttaattgcaaagcaattcacgatgctagtttggatgtcactttctactggactctgaaaggacagcctattgatttcgaggaagagggtggacattttgaaagcatcagggcccaagcatcctctgcagatttaatgatcaggaacatccttctgatgcatgctgggagatatggctgcagggtacagaccacagcagacagtgtgtcagatgaggcagaacttcttgttaggggacccccaggcccacctgggatagtaattgttgaggaaataaccgaaagtacggccacactgtcctggagcccagcagctgacaaccacagcccaatctcctcctacaaccttcaagctcgcagcccattttccctgggctggcaaacagtaaagacagtcccagaaatcataacaggggacatggagtcagccatggctgtggacctaaatccctgggtggaatatgaatttcgagtggtagccaccaaccctattgggacaggagatccaagcaccccatctcgaatgatccgcacaaatgaagcagttccgaagacagcacccaccaatgtaagcggaagaagtggaagaaggcatgagttagtcattgcctgggagccagtatctgaagagtttcagaatggggaaggcttcggctatattgtggctttcagacccaatggaacacgtggctggaaggaaaaaatggtgacatcctctgaagcttccaaattcatttatcgagatgaaagtgtccctcctcttactccctttgaagtgaaagttggcgtttataacaataaaggagatgggccttttagtcaaattgtggtcatctgttcagctgaaggagaacccagtgctgctcccacagatgtcaaggcgacaagtgtgtctgtgtcagagattcttgttgcatggaaacacattaaagagagtctaggaagaccacagggatttgaggttggttactggaaagacatggaacaggaagatacagcagaaacagtcaaaactagagggaatgagtctttcgtcatcctaacaggattagaaggaaatacgttatatcacttcacagtgagggcttacaatggagctggatatgggccacctagcagtgaagtgagtgcaaccaccaagaaatcccctcctagtcaagcacctagcaacctcaggtgggagcagcaaggctctcaggtttctctgggctgggaacccgtcataccattagccaacgaatctgaagttgtgggttacaaggttttttataggcaagagggtcacagcaacagccaagttattgaaacacagaaacttcaagcagtagtaccactcccagatgctggagtctatattattgaagttcgagcatatagtgaaggaggagatggaacagctagttctcaaattagggtaccatcatattcaggtggaaaaatcacaagtgcacagtcgacccttcactctctctccacatcttcgtcatcagtcaccttgctcttggcattgatgattccttcaacttcctggtga

SEQ ID NO: 6753 - DNA, 3679 bp, Homo sapiens
  source 1..3679: mol_type = unassigned DNA
aaacagggcactctttaatgaagaaacaccagagctgttaaacacattgagacacagaagattctagtgactgaggatggcttcctcttggaaactaatgctgtttctgtcagtcaccatgtgtctttcagaaagtgtggactatgggccagtttttgtgcaagaaccagatgatattatttttccaactgattctgatgaaaagaaggtagcattgaattgtgaagttcgtggcaatccagttcccagttacagatggcttcgaaatggaacagaaatagatctggaaagtgattatcgctacagtttgatagatggcaccttcattataagcaatccaagtgaagcaaaggattctggtcattatcagtgtttagcaaccaacactgtggggagtattcttagtagagaagctacactgcagtttgcctatctgggaaattttagtggccggacaagaagtgcagtctctgtgagggaaggccagggtgtcgttctgatgtgctctcctccgccacattcaccagagatcatctatagctgggtatttaatgagttcccttcctttgtggcggaagacagccggcggttcatctcccaggagacaggcaacctttatatttctaaagtccaaacatcagatgttggcagctatatttgtctggtgaaaaacacagtgacgaatgctagagtccttagtcctccaacgccactcactctgcgtaatgatggtgtgatgggagaatatgagccgaaaattgaggtccattttcctttcacggttacagctgctaaaggaacaactgttaagatggaatgctttgcacttggcaaccccgttccaacaatcacatggatgaaggttaatggttatattcctagtaaggcacgtctgcggaaatctcaggcggtgctggaaataccgaatgtacagctggatgatgcaggcatttatgagtgcagagctgaaaactcacgtggaaaaaattcctttcgtggacaattacaagtatacacctacccacactgggtagaaaaactgaatgatactcagttagacagtgggagccctctccgatgggaatgtaaggctactggaaaacccagacccacgtatcgttggctgaagaatggagtacccctctcacctcagagtagggttgagatggttaatggagtattgatgatccacaatgtgaatcaatcagatgctggaatgtatcagtgtttggctgaaaataagtatggagccatttacgctagtgctgagctgaagattctagcttcagctcccacttttgcactgaatcaactgaagaaaacaataattgttaccaaagaccaagaagttgtcatagagtgcaaaccccaaggctctccaaaaccaaccatctcttggaagaaaggagacagagcagttagagaaaacaaaagaatagctattcttccagacgggagtctacggatcctaaatgcttccaaatcagacgagggaaagtacgtttgccgaggggaaaacgtctttggttctgctgaaattatagcttcgctatctgtaaaagaacctacaaggatagaacttactcctaaaagaacagaattgacagtgggagaaagcattgtccttaattgcaaagcaattcacgatgctagtttggatgtcactttctactggactctgaaaggacagcctattgatttcgaggaagagggtggacattttgaaagcatcagggcccaagcatcctctgcagatttaatgatcaggaacatccttctgatgcatgctgggagatatggctgcagggtacagaccacagcagacagtgtgtcagatgaggcagaacttcttgttaggggacccccaggcccacctgggatagtaattgttgaggaaataaccgaaagtacggccacactgtcctggagcccagcagctgacaaccacagcccaatctcctcctacaaccttcaagctcgcagcccattttccctgggctggcaaacagtaaagacagtcccagaaatcataacaggggacatggagtcagccatggctgtggacctaaatccctgggtggaatatgaatttcgagtggtagccaccaaccctattgggacaggagatccaagcaccccatctcgaatgatccgcacaaatgaagcagttccgaagacagcacccaccaatgtaagcggaagaagtggaagaaggcatgagttagtcattgcctgggagccagtatctgaagagtttcagaatggggaaggcttcggctatattgtggctttcagacccaatggaacacgtggctggaaggaaaaaatggtgacatcctctgaagcttccaaattcatttatcgagatgaaagtgtccctcctcttactccctttgaagtgaaagttggcgtttataacaataaaggagatgggccttttagtcaaattgtggtcatctgttcagctgaaggagaacccagtgctgctcccacagatgtcaaggcgacaagtgtgtctgtgtcagagattcttgttgcatggaaacacattaaagagagtctaggaagaccacagggatttgaggttggttactggaaagacatggaacaggaagatacagcagaaacagtcaaaactagagggaatgagtctttcgtcatcctaacaggattagaaggaaatacgttatatcacttcacagtgagggcttacaatggagctggatatgggccacctagcagtgaagtgagtgcaaccaccaagaaatcccctcctagtcaagcacctagcaacctcaggtgggagcagcaaggctctcaggtttctctgggctgggaacccgtcataccattagccaacgaatctgaagttgtgggttacaaggttttttataggcaagagggtcacagcaacagccaagttattgaaacacagaaacttcaagcagtagtaccactcccagatgctggagtctatattattgaagttcgagcatatagtgaaggaggagatggaacagctagttctcaaattagggtaccatcatattcaggtggaaaaatcacaagtgcacagtcgacccttcactctctctccacatcttcgtcatcagtcaccttgctcttggcattgatgattccttcaacttcctggtgaaaactgctgacttaatttgcttttgtttgctttagcttggtaacagcggtgaatagagtgtagtgtaagtggagaaccaggatcctgagatgagcttgagctttaaaaacttgggactatacatggtgaacttacaggaggttaggggggaaatattacttatccatcaggtttctctttggtttttgtaaacggagaggacagttcttagtccagtaaaaatatgcagattgtatgtaatgaatttttgtaaacaaaggtaatttctgtcaaatgtattctttacttttttaatatgttgggattttattttatatctgatgactccgagtgtgtgccatccatttgttaagtaactggcctttagcagatctgtttcaaaaacaaatacaaaaatgagaatgaaaagtttgcttaagactaagtccagtgtttttcattttccctttggctgaatatttcaattgacaaaccagcaggacatatgaaaaatgcttcagtgatgtggtccattataagata

SEQ ID NO: 6754 - DNA, 6258 bp, Homo sapiens
  source 1..6258: mol_type = unassigned DNA
gaactgtgctgatgggcaggaggatgggagacaggaattgagagtcacagaggaaggacagtggagtctggcatcttattggtgtctttaaaggattgccatttaatgccattcaagatctactaagcatcatttttgcatgactactgcaaaaggattactttacagataccagttcctttgtcaagagcatactttggaccctgttttcagaaagcagggcactctttaatgaagaaacaccagagctgttaaacacattgagacacagaagattctagtgactgaggatggcttcctcttggaaactaatgctgtttctgtcagtcaccatgtgtctttcagagtattcaaaatctcttcctggtctctccacttcatatgctgctttgttaagaattaagaagagttcatcttcatctctctttggttccaaaaccagaccacgatacagcagcccttcattaggaacactgagtgcttcttcacccagctggctaggggcagctcagaattattattcccccatcaatctttatcattcctcagatgccttcaaacaagatgaaagtgtggactatgggccagtttttgtgcaagaaccagatgatattatttttccaactgattctgatgaaaagaaggtagcattgaattgtgaagttcgtggcaatccagttcccagttacagatggcttcgaaatggaacagaaatagatctggaaagtgattatcgctacagtttgatagatggcaccttcattataagcaatccaagtgaagcaaaggattctggtcattatcagtgtttagcaaccaacactgtggggagtattcttagtagagaagctacactgcagtttgcctatctgggaaattttagtggccggacaagaagtgcagtctctgtgagggaaggccagggtgtcgttctgatgtgctctcctccgccacattcaccagagatcatctatagctgggtatttaatgagttcccttcctttgtggcggaagacagccggcggttcatctcccaggagacaggcaacctttatatttctaaagtccaaacatcagatgttggcagctatatttgtctggtgaaaaacacagtgacgaatgctagagtccttagtcctccaacgccactcactctgcgtaatgatggtgtgatgggagaatatgagccgaaaattgaggtccattttcctttcacggttacagctgctaaaggaacaactgttaagatggaatgctttgcacttggcaaccccgttccaacaatcacatggatgaaggttaatggttatattcctagtaaggcacgtctgcggaaatctcaggcggtgctggaaataccgaatgtacagctggatgatgcaggcatttatgagtgcagagctgaaaactcacgtggaaaaaattcctttcgtggacaattacaagtatacacctacccacactgggtagaaaaactgaatgatactcagttagacagtgggagccctctccgatgggaatgtaaggctactggaaaacccagacccacgtatcgttggctgaagaatggagtacccctctcacctcagagtagggttgagatggttaatggagtattgatgatccacaatgtgaatcaatcagatgctggaatgtatcagtgtttggctgaaaataagtatggagccatttacgctagtgctgagctgaagattctagcttcagctcccacttttgcactgaatcaactgaagaaaacaataattgttaccaaagaccaagaagttgtcatagagtgcaaaccccaaggctctccaaaaccaaccatctcttggaagaaaggagacagagcagttagagaaaacaaaagaatagctattcttccagacgggagtctacggatcctaaatgcttccaaatcagacgagggaaagtacgtttgccgaggggaaaacgtctttggttctgctgaaattatagcttcgctatctgtaaaagaacctacaaggatagaacttactcctaaaagaacagaattgacagtgggagaaagcattgtccttaattgcaaagcaattcacgatgctagtttggatgtcactttctactggactctgaaaggacagcctattgatttcgaggaagagggtggacattttgaaagcatcagggcccaagcatcctctgcagatttaatgatcaggaacatccttctgatgcatgctgggagatatggctgcagggtacagaccacagcagacagtgtgtcagatgaggcagaacttcttgttaggggacccccaggcccacctgggatagtaattgttgaggaaataaccgaaagtacggccacactgtcctggagcccagcagctgacaaccacagcccaatctcctcctacaaccttcaagctcgcagcccattttccctgggctggcaaacagtaaagacagtcccagaaatcataacaggggacatggagtcagccatggctgtggacctaaatccctgggtggaatatgaatttcgagtggtagccaccaaccctattgggacaggagatccaagcaccccatctcgaatgatccgcacaaatgaagcagttccgaagacagcacccaccaatgtaagcggaagaagtggaagaaggcatgagttagtcattgcctgggagccagtatctgaagagtttcagaatggggaaggcttcggctatattgtggctttcagacccaatggaacacgtggctggaaggaaaaaatggtgacatcctctgaagcttccaaattcatttatcgagatgaaagtgtccctcctcttactccctttgaagtgaaagttggcgtttataacaataaaggagatgggccttttagtcaaattgtggtcatctgttcagctgaaggagaacccagtgctgctcccacagatgtcaaggcgacaagtgtgtctgtgtcagagattcttgttgcatggaaacacattaaagagagtctaggaagaccacagggatttgaggttggttactggaaagacatggaacaggaagatacagcagaaacagtcaaaactagagggaatgagtctttcgtcatcctaacaggattagaaggaaatacgttatatcacttcacagtgagggcttacaatggagctggatatgggccacctagcagtgaagtgagtgcaaccaccaagaaatcccctcctagtcaagcacctagcaacctcaggtgggagcagcaaggctctcaggtttctctgggctgggaacccgtcataccattagccaacgaatctgaagttgtgggttacaaggttttttataggcaagagggtcacagcaacagccaagttattgaaacacagaaacttcaagcagtagtaccactcccagatgctggagtctatattattgaagttcgagcatatagtgaaggaggagatggaacagctagttctcaaattagggtaccatcatattcaggtggaaaaatcacaagtgcacagtcgacccttcactctctctccacatcttcgtcatcagtcaccttgctcttggcattgatgattccttcaacttcctggtgaaaactgctgacttaatttgcttttgtttgctttagcttggtaacagcggtgaatagagtgtagtgtaagtggagaaccaggatcctgagatgagcttgagctttaaaaacttgggactatacatggtgaacttacaggaggttaggggggaaatattacttatccatcaggtttctctttggtttttgtaaacggagaggacagttcttagtccagtaaaaatatgcagattgtatgtaatgaatttttgtaaacaaaggtaatttctgtcaaatgtattctttacttttttaatatgttgggattttattttatatctgatgactccgagtgtgtgccatccatttgttaagtaactggcctttagcagatctgtttcaaaaacaaatacaaaaatgagaatgaaaagtttgcttaagactaagtccagtgtttttcattttccctttggctgaatatttcaattgacaaaccagcaggacatatgaaaaatgcttcagtgatgtggtccattataagataagtacacaaaaattttcttgaaaaatattgtatgattgcatagtgaaatagcaagatttgtcaatatgctattctatatgcacccctagagcaagtcattagggtagggaataagccatttacattagtgcaagatagaaagcgagtccagatgaatttcagtgctatagtttttcataaagtactatgttatctagcagcaaatataataaatatttatttttaataacaaaagatggtttaacatcaccaaaaaatatgatcactaaaaactgcagacatgctggcatgggtgctaacttaaaaatgagatgaatatgggacagagcgtttccatttctttacctactgccaaaacagatgttgaattaggtccaaggttttcttctaattgcaaaattttgcaaaaattttaagggcaatgaaaatttgttgtgcaaataattatgcatagtctgtagattaaaatggttcaagtataacaaataagttttgatttttaaaaacagttccatgcatcacataccactgataaaatcaactagtaaaataaagacagtctttcttggataaattgaatttttaattaagctgtggaaacatggcatcagtacagggattcagctagtctagccagctatgcactgtttgattctgtggcttgggaagtaatccttatttgctatttcaaagagtcatcttgagcctgagagatcctagagagttgttggaaaatgagatgaaaattttctacttgatgatatcttaaagaagttctaacaagcacaagaatgtgccagagttggcatcatacccatgaagatgcgtgaaaggatagttattgcaaagtcatatgccagagaagagcctggagaaactatggttttataggcgatgttaacaagagaacaaaaattggttttataattttatataatttaaacttgttaactgtatttgcttcattaataacaagcaaaatgaaacaatatggagctcaaattgctagctctcaaggttaatccttgtagaatcagagaagtgattgaagtttctgttctgaacatcctgaaagaatagtttcagagccacagtaaaagtctgtatgtaggttacatattctctttggggaaatgatgtaagacaccctaaacaaacaagaaattagttaaaagactcactcaatgatattatagtaaatactacagatggtaagtatttaagcctgtaagtaagtaattatgaccaagtggcctttcttgaacgcctcctttaaagtgggagaggctggactttgcaaaaacagggatgctaattgtttagctggcaaaacatgagctctcccaagtatagtttacctttatgaattgtgcatctgaataaaagacagaaagaatatttttaatgcaaaataattttacgtatttcatgaatcaagccattttcttcattttccatggtggtgtacaccagatttagtgaaggactttaagaatcaacttcttacttacactctcagaaagcaaagcccagtaaaatattaaacaaataaaatggcaaatttaaattaaccaatatttttaattagctgatggatggtacgtatctgacagagtatttacacatatagaatgtctgatgtattcttacaggaatcagagatatggaatgtttttacttaacatacacagaatatgtattttgcatcataaacctatttaaaaaacaggttttcaatgtttatgtacttatgtgctgcatatctgttactttgtagaaaccagaagagcattcttatcaaggtacattatttttcagctacagtactgagttttttctgctatgggatagtaaccacagtcttaaatcactaaagagactgtatttttgtataatgtccattgaatatgaagaaagcaacagtccttataattagaaatttcatgaaagcaaaagttttgcatacccaaatgaaggtactgtggaccccatgtcaaactgttaaatatattgtgtacgatctgtatatatactatatataaggcatataccgtgtggaaggcacagtcaaataatagttctgtgtactgttcttgtaacattagatctttttaataaataattctctttttattgactttta

SEQ ID NO: 6755 - DNA, 3800 bp, Homo sapiens
  source 1..3800: mol_type = unassigned DNA
gaactgtgctgatgggcaggaggatgggagacaggaattgagagtcacagaggaaggacagtggagtctggcatcttattgggcactctttaatgaagaaacaccagagctgttaaacacattgagacacagaagattctagtgactgaggatggcttcctcttggaaactaatgctgtttctgtcagtcaccatgtgtctttcagagtattcaaaatctcttcctggtctctccacttcatatgctgctttgttaagaattaagaagagttcatcttcatctctctttggttccaaaaccagaccacgatacagcagcccttcattaggaacactgagtgcttcttcacccagctggctaggggcagctcagaattattattcccccatcaatctttatcattcctcagatgccttcaaacaagatgaaagtgtggactatgggccagtttttgtgcaagaaccagatgatattatttttccaactgattctgatgaaaagaaggtagcattgaattgtgaagttcgtggcaatccagttcccagttacagatggcttcgaaatggaacagaaatagatctggaaagtgattatcgctacagtttgatagatggcaccttcattataagcaatccaagtgaagcaaaggattctggtcattatcagtgtttagcaaccaacactgtggggagtattcttagtagagaagctacactgcagtttgcctatctgggaaattttagtggccggacaagaagtgcagtctctgtgagggaaggccagggtgtcgttctgatgtgctctcctccgccacattcaccagagatcatctatagctgggtatttaatgagttcccttcctttgtggcggaagacagccggcggttcatctcccaggagacaggcaacctttatatttctaaagtccaaacatcagatgttggcagctatatttgtctggtgaaaaacacagtgacgaatgctagagtccttagtcctccaacgccactcactctgcgtaatgatggtgtgatgggagaatatgagccgaaaattgaggtccattttcctttcacggttacagctgctaaaggaacaactgttaagatggaatgctttgcacttggcaaccccgttccaacaatcacatggatgaaggttaatggttatattcctagtaaggcacgtctgcggaaatctcaggcggtgctggaaataccgaatgtacagctggatgatgcaggcatttatgagtgcagagctgaaaactcacgtggaaaaaattcctttcgtggacaattacaagtatacacctacccacactgggtagaaaaactgaatgatactcagttagacagtgggagccctctccgatgggaatgtaaggctactggaaaacccagacccacgtatcgttggctgaagaatggagtacccctctcacctcagagtagggttgagatggttaatggagtattgatgatccacaatgtgaatcaatcagatgctggaatgtatcagtgtttggctgaaaataagtatggagccatttacgctagtgctgagctgaagattctagcttcagctcccacttttgcactgaatcaactgaagaaaacaataattgttaccaaagaccaagaagttgtcatagagtgcaaaccccaaggctctccaaaaccaaccatctcttggaagaaaggagacagagcagttagagaaaacaaaagaatagctattcttccagacgggagtctacggatcctaaatgcttccaaatcagacgagggaaagtacgtttgccgaggggaaaacgtctttggttctgctgaaattatagcttcgctatctgtaaaagaacctacaaggatagaacttactcctaaaagaacagaattgacagtgggagaaagcattgtccttaattgcaaagcaattcacgatgctagtttggatgtcactttctactggactctgaaaggacagcctattgatttcgaggaagagggtggacattttgaaagcatcagggcccaagcatcctctgcagatttaatgatcaggaacatccttctgatgcatgctgggagatatggctgcagggtacagaccacagcagacagtgtgtcagatgaggcagaacttcttgttaggggacccccaggcccacctgggatagtaattgttgaggaaataaccgaaagtacggccacactgtcctggagcccagcagctgacaaccacagcccaatctcctcctacaaccttcaagctcgcagcccattttccctgggctggcaaacagtaaagacagtcccagaaatcataacaggggacatggagtcagccatggctgtggacctaaatccctgggtggaatatgaatttcgagtggtagccaccaaccctattgggacaggagatccaagcaccccatctcgaatgatccgcacaaatgaagcagttccgaagacagcacccaccaatgtaagcggaagaagtggaagaaggcatgagttagtcattgcctgggagccagtatctgaagagtttcagaatggggaaggcttcggctatattgtggctttcagacccaatggaacacgtggctggaaggaaaaaatggtgacatcctctgaagcttccaaattcatttatcgagatgaaagtgtccctcctcttactccctttgaagtgaaagttggcgtttataacaataaaggagatgggccttttagtcaaattgtggtcatctgttcagctgaaggagaacccagtgctgctcccacagatgtcaaggcgacaagtgtgtctgtgtcagagattcttgttgcatggaaacacattaaagagagtctaggaagaccacagggatttgaggttggttactggaaagacatggaacaggaagatacagcagaaacagtcaaaactagagggaatgagtctttcgtcatcctaacaggattagaaggaaatacgttatatcacttcacagtgagggcttacaatggagctggatatgggccacctagcagtgaagtgagtgcaaccaccaagaaatcccctcctagtcaagcacctagcaacctcaggtgggagcagcaaggctctcaggtttctctgggctgggaacccgtcataccattagccaacgaatctgaagttgtgggttacaaggttttttataggcaagagggtcacagcaacagccaagttattgaaacacagaaacttcaagcagtagtaccactcccagatgctggagtctatattattgaagttcgagcatatagtgaaggaggagatggaacagctagttctcaaattagggtaccatcatattcaggtggaaaaatcacaagtgcacagtcgacccttcactctctctccacatcttcgtcatcagtcaccttgctcttggcattgatgattccttcaacttcctggtgaaaactgctgacttaatttgcttttgtttgctttagcttggtaacagcggtgaatagagtgtagtgtaagtggagaaccaggatcctgagatgagcttgagctttaaaaacttgggactatacatggtgaacttacaggaggttaggggggaaatattacttatccatcaggtttctctttggtttttgtaaacggagaggacagttcttagtccagtaaaaatatgcagattgtatgtaatgaatttttgtaaacaaaggtaatttctgtcaaatgtattctttacttttttaatatgttgggattttattttatatctgatgactccgagtgtgtgccatccatt

SEQ ID NO: 6756 - DNA, 4303 bp, Homo sapiens
  source 1..4303: mol_type = unassigned DNA
aattcgcctctgccacaggctgcaaaggacccgaggaaccgctctctctgaactgtgctgatgggcaggaggatgggagacaggaattgagagtcacagaggaaggacagtggagtctggcatcttattggtgtctttaaaggattgccatttaatgccattcaagatctactaagcatcatttttgcatgactactgcaaaaggattactttacagataccagttcctttgtcaagagcatactttggaccctgttttcagaaagcagggcactctttaatgaagaaacaccagagctgttaaacacattgagacacagaagattctagtgactgaggatggcttcctcttggaaactaatgctgtttctgtcagtcaccatgtgtctttcagagtattcaaaatctcttcctggtctctccacttcatatgctgctttgttaagaattaagaagagttcatcttcatctctctttggttccaaaaccagaccacgatacagcagcccttcattaggaacactgagtgcttcttcacccagctggctaggggcagctcagaattattattcccccatcaatctttatcattcctcagatgccttcaaacaagatgaaagtgtggactatgggccagtttttgtgcaagaaccagatgatattatttttccaactgattctgatgaaaagaaggtagcattgaattgtgaagttcgtggcaatccagttcccagttacagatggcttcgaaatggaacagaaatagatctggaaagtgattatcgctacagtttgatagatggcaccttcattataagcaatccaagtgaagcaaaggattctggtcattatcagtgtttagcaaccaacactgtggggagtattcttagtagagaagctacactgcagtttgcctatctgggaaattttagtggccggacaagaagtgcagtctctgtgagggaaggccagggtgtcgttctgatgtgctctcctccgccacattcaccagagatcatctatagctgggtatttaatgagttcccttcctttgtggcggaagacagccggcggttcatctcccaggagacaggcaacctttatatttctaaagtccaaacatcagatgttggcagctatatttgtctggtgaaaaacacagtgacgaatgctagagtccttagtcctccaacgccactcactctgcgtaatgatggtgtgatgggagaatatgagccgaaaattgaggtccattttcctttcacggttacagctgctaaaggaacaactgttaagatggaatgctttgcacttggcaaccccgttccaacaatcacatggatgaaggttaatggttatattcctagtaaggcacgtctgcggaaatctcaggcggtgctggaaataccgaatgtacagctggatgatgcaggcatttatgagtgcagagctgaaaactcacgtggaaaaaattcctttcgtggacaattacaagtatacacctacccacactgggtagaaaaactgaatgatactcagttagacagtgggagccctctccgatgggaatgtaaggctactggaaaacccagacccacgtatcgttggctgaagaatggagtacccctctcacctcagagtagggttgagatggttaatggagtattgatgatccacaatgtgaatcaatcagatgctggaatgtatcagtgtttggctgaaaataagtatggagccatttacgctagtgctgagctgaagattctagcttcagctcccacttttgcactgaatcaactgaagaaaacaataattgttaccaaagaccaagaagttgtcatagagtgcaaaccccaaggctctccaaaaccaaccatctcttggaagaaaggagacagagcagttagagaaaacaaaagaatagctattcttccagacgggagtctacggatcctaaatgcttccaaatcagacgagggaaagtacgtttgccgaggggaaaacgtctttggttctgctgaaattatagcttcgctatctgtaaaagaacctacaaggatagaacttactcctaaaagaacagaattgacagtgggagaaagcattgtccttaattgcaaagcaattcacgatgctagtttggatgtcactttctactggactctgaaaggacagcctattgatttcgaggaagagggtggacattttgaaagcatcagggcccaagcatcctctgcagatttaatgatcaggaacatccttctgatgcatgctgggagatatggctgcagggtacagaccacagcagacagtgtgtcagatgaggcagaacttcttgttaggggacccccaggcccacctgggatagtaattgttgaggaaataaccgaaagtacggccacactgtcctggagcccagcagctgacaaccacagcccaatctcctcctacaaccttcaagctcgcagcccattttccctgggctggcaaacagtaaagacagtcccagaaatcataacaggggacatggagtcagccatggctgtggacctaaatccctgggtggaatatgaatttcgagtggtagccaccaaccctattgggacaggagatccaagcaccccatctcgaatgatccgcacaaatgaagcagttccgaagacagcacccaccaatgtaagcggaagaagtggaagaaggcatgagttagtcattgcctgggagccagtatctgaagagtttcagaatggggaaggcttcggctatattgtggctttcagacccaatggaacacgtggctggaaggaaaaaatggtgacatcctctgaagcttccaaattcatttatcgagatgaaagtgtccctcctcttactccctttgaagtgaaagttggcgtttataacaataaaggagatgggccttttagtcaaattgtggtcatctgttcagctgaaggagaacccagtgctgctcccacagatgtcaaggcgacaagtgtgtctgtgtcagagattcttgttgcatggaaacacattaaagagagtctaggaagaccacagggatttgaggtatgaacagaatgattgaaaataagccttattgtttcttctgacatcacattctcctaaagagaggttttggtgacacctcagaatttcaacagaatttcttagaaattttgctctatgttaaagaaactaagaaatactattttactgggatgtgttatgttgctcattaactggtttatttttcagtacagtagcttccgtagcactatgcaaagatgtttttaaaagatgaaatagagttttagacaaaagcaggagctacaggtagatatttaattgtatccaatttactggtcattttaaaagtttttgtgtcttcctttctaataatttaatgtataaatacaagttttccttttgtactttattggtatctcttaccctcagtgctgaattatcaaattttgcttggaatttaatgatctgtattgtatctatgtattcagatagtttttttggtcccttaaatgttgctatttttaaacatagttattccagccttataatggtgaacatttcatatcaaatgaataacatcaatgaaattttagcctccgcagagaatagcagattgtgagtagtctgtgaacatgaatattttatgataacaaggtttggcttctcacacagctcttgttcttgttcttgccttgcttggccagtcatggagaggaattagggggataatgtctaaaagaaaaaaagaattagcatctgacccaagactttagttgcatttaaaaaaatttattcttacttttcctctgcttcagttcccattaagagaaaatcatcttgtgtcttgaacaatgatcaagtataggacttgtatactaacatggtttccaggctgaaacatatttttaattctatttgagttttcaaataatgcccaacaattatttgattaacatacagctggcattaaataatgatttctatgataaaaaaatttatacaatctttctaagagttacagcaagaacaatttatgggaaaccattacctacttatacaatatcatggacttatttctacaatcttgcttcaattaattatttggaatgataatttagtatctcattatgattgcatgtttaatgtgatgaatatttctgtttctcccaatccatgcttcagggaccatgtttgttcatcattaaatctcagcaaatgataatatatatatttggcccataactgaccacaataaatatgttgaatgaataaa

SEQ ID NO: 6757 - DNA, 3814 bp, Homo sapiens
  source 1..3814: mol_type = unassigned DNA
aagagagattttctgatgacccgacaggagtgactatctccagtcaaagaaagaggagggtgaatttaatctttcatggccctggaatggcagctgctctcagctctctctgattctgtgaaggttgatgaagatagagctggctttcaatgtagaaagaattttccttttgaatattccaaacgagagctttgcacatgtgcctcaagaactgattgtctggctccgacaggaatgcagcaggagaggagcgtatttcatgcttaagaccagagaagagccacgcaatactcagtggataaaaggcttgcagtcccagctgggaaaaagagtcccattatctcccagctgcatagacattccatacggcttggttctgcctggacgcacagcatgcctggctgagagcttgaaacagagttctgcagaaaaactgtaaagatcccgagacatttccctggtaagatctactcttgagatactgactggaagatagactgttttgttccacctgattgtatgggagaaatttttgaccttagaaagtggaaatgaggttgctatggaaactggtaattctgctgccactcataaactcttctgcaggtgatggtcttttaagccgtcctatttttactcaggagccacatgatgtcatttttcctttggatttatcaaaatctgaggtcatcctgaattgtgctgctaatggttacccttcgcctcattataggtggaagcaaaatggcacagacattgattttactatgagttatcactacaggttggatggaggcagtcttgcaatcaatagcccccacacagatcaagatattggcatgtaccagtgcctggccaccaatcttctggggacaattctgagtcggaaggcaaagctccaatttgcatatattgaagactttgaaactaaaacaagaagcacagtatctgtccgagaaggtcaaggtgtggtgcttctctgtggcccaccgccacattttggagatttatcttatgcatggaccttcaatgataaccccttatacgtccaagaggacaataggcgatttgtatctcaagagacgggaaacttgtacattgccaaagtggaaccatcagatgtgggcaactacacttgctttataactaacaaagaggcccagagaagtgttcaaggtccacccactccattagtgcagcgcactgatggtgtgatgggggaatatgaaccaaagattgaagtgcgttttcctgaaactatacaagctgcaaaggattcatctgtaaaactggaatgttttgcccttggaaatccagtccccgatattagttggagaaggttggacgggagcccgttgccagggaaagtcaagtacagcaaatcccaagctatccttgaaatcccgaacttccaacaagaagatgaaggcttttatgagtgcattgcaagcaaccttcgaggaagaaaccttgcaaagggtcaactcattttttatgctcctccagaatgggaacagaaaatccaaaatacacacctctctatctatgacaacttgctctgggaatgtaaagctagtggaaagccaaacccttggtatacatggttaaaaaatggtgaacgactcaacccagaggagagaattcaaatagaaaatgggacactcatcataacgatgctgaatgtgtcagattctggtgtgtaccaatgtgctgcagaaaacaaatatcagataatttatgcaaatgctgaattgagagttttagcctcagctccagatttctccaaaagtccagttaaaaaaaagtcttttgttcaagttggtggggatattgttatcggatgcaaaccaaatgcttttcccagggcagctatctcttggaaaagaggaacggagacccttagacaaagcaaaagaatatttctcttggaggatggcagcctcaagatatataatattaccaggtcagatgctggatcatatacatgcatagccacaaatcagtttggcactgcaaagaacactggcagcctcattgtaaaagagagaactgtcattaccgtcccaccttccaaaatggatgttacagttggcgagagtatagtgctaccatgccaggtgtcccatgacccctccattgaagtggtatttgtatggtttttcaatggagatgtcatagacttaaaaaaaggagtggctcattttgaaaggattggaggagaatctgttggggatttgatgataaggaatattcagttacatcattcaggaaaatatctctgcacagtacaaacaaccctagaaagtttatctgcagtagccgatatcattgttagaggtccaccaggtcctcctgaggatgtgcaagtggaagacatttccagtactacttctcaactaagttggagagcaggcccagataataacagtcccattcaaatatttactattcagactcggacaccattttctgtgggttggcaggctgttgctacagttccagaaattctcaatggtaagacatacaatgcaacagtggttggtttgagtccttgggtggaatatgaatttcgtgttgttgccggcaacagcattgggattggagaaccaagtgaaccatcagaattgttaagaactaaagcatcagtccctgttgtggcaccagtaaacatccatggaggtggaggaagtcggtctgaactcgtcattacgtgggagtcaattccagaagaactgcagaatggggagggatttggatatatcatcatgttccggccagtgggctcgacaacctggtccaaggagaaagtgtcatctgtggaatcatcaaggtttgtctacagaaatgaaagcatcatcccactgtctccctttgaagtcaaagtgggtgtgtataataatgaaggagaaggatccctgagtactgtgaccattgtctactctggggaagatgaacctcaactggccccaaggggaacttctctccagagtttttctgcttctgaaatggaggtttcatggaatgctattgcctggaatagaaacactggaagagtgctgggctatgaggtcttatactggacagatgactccaaagaatccatgataggtaaaattagagtcagtggaaatgtcacaaccaaaaacatcacggggctgaaagctaataccatctactttgcttccgtaagagcttacaacactgctgggacagggccctcaagccccccagtcaatgttaccaccaaaaagtctcctccaagccaaccaccagcaaacattgcctggaagctgacaaactctaaattatgcttgaactgggagcatgtaaaaaccatggaaaatgagtctgaagttttggggtacaagattctgtaccggcaaaacagacagagtaaaactcatattttggaaacaaacaatacatcagctgagcttctggttccatttgaagaagactacttaattgaaataagaacagtcagtgatggtggagatggaagcagcagtgaggaaattaggattccaaaaatgtcaagtttgagttccagaggaattcaattcttagaacctagcacccattttctttccattgtcattgtgatttttcactgttttgctattcagccacttatctgatgaataaaaccataaatctttgagagttttttgaaagcaaatcattctgtatatatgctctccagcctctgacacaagatgcgttcttaatacagacttgtttgcaaagaaaaaaaaaagtatattattaaaatcctgtaaatatctatggtatattaataaaacaattttaaaca

SEQ ID NO: 6758 - DNA, 4513 bp, Homo sapiens
  source 1..4513: mol_type = unassigned DNA
aatgcagtgaaaccagaggaagaaaaaaattacttcctttcctgttggaaacctaataagtagttagtctgacccagttttcaataagagagattttctgatgacccgacaggagtgactatctccagtcaaagaaagaggagggtgaatttaatctttcatggccctggaatggcagctgctctcagctctctctgattctgtgaaggttgatgaagatagagctggctttcaatgtagaaagaattttccttttgaatattccaaacgagagctttgcacatgtgcctcaagaactgattgtctggctccgacaggaatgcagcaggagaggagcgtatttcatgcttaagaccagagaagagccacgcaatactcagtggataaaaggcttgcagtcccagctgggaaaaagagtcccattatctcccagctgcatagacattccatacggcttggttctgcctggacgcacagcatgcctggctgagagcttgaaacagagttctgcagaaaaactgtaaagatcccgagacatttccctgactcttgagatactgactggaagatagactgttttgttccacctgattgtatgggagaaatttttgaccttagaaagtggaaatgaggttgctatggaaactggtaattctgctgccactcataaactcttctgcaggtgatggtcttttaagccgtcctatttttactcaggagccacatgatgtcatttttcctttggatttatcaaaatctgaggtcatcctgaattgtgctgctaatggttacccttcgcctcattataggtggaagcaaaatggcacagacattgattttactatgagttatcactacaggttggatggaggcagtcttgcaatcaatagcccccacacagatcaagatattggcatgtaccagtgcctggccaccaatcttctggggacaattctgagtcggaaggcaaagctccaatttgcatatattgaagactttgaaactaaaacaagaagcacagtatctgtccgagaaggtcaaggtgtggtgcttctctgtggcccaccgccacattttggagatttatcttatgcatggaccttcaatgataaccccttatacgtccaagaggacaataggcgatttgtatctcaagagacgggaaacttgtacattgccaaagtggaaccatcagatgtgggcaactacacttgctttataactaacaaagaggcccagagaagtgttcaaggtccacccactccattagtgcagcgcactgatggtgtgatgggggaatatgaaccaaagattgaagtgcgttttcctgaaactatacaagctgcaaaggattcatctgtaaaactggaatgttttgcccttggaaatccagtccccgatattagttggagaaggttggacgggagcccgttgccagggaaagtcaagtacagcaaatcccaagctatccttgaaatcccgaacttccaacaagaagatgaaggcttttatgagtgcattgcaagcaaccttcgaggaagaaaccttgcaaagggtcaactcattttttatgctcctccagaatgggaacagaaaatccaaaatacacacctctctatctatgacaacttgctctgggaatgtaaagctagtggaaagccaaacccttggtatacatggttaaaaaatggtgaacgactcaacccagaggagagaattcaaatagaaaatgggacactcatcataacgatgctgaatgtgtcagattctggtgtgtaccaatgtgctgcagaaaacaaatatcagataatttatgcaaatgctgaattgagagttttagcctcagctccagatttctccaaaagtccagttaaaaaaaagtcttttgttcaagttggtggggatattgttatcggatgcaaaccaaatgcttttcccagggcagctatctcttggaaaagaggaacggagacccttagacaaagcaaaagaatatttctcttggaggatggcagcctcaagatatataatattaccaggtcagatgctggatcatatacatgcatagccacaaatcagtttggcactgcaaagaacactggcagcctcattgtaaaagagagaactgtcattaccgtcccaccttccaaaatggatgttacagttggcgagagtatagtgctaccatgccaggtgtcccatgacccctccattgaagtggtatttgtatggtttttcaatggagatgtcatagacttaaaaaaaggagtggctcattttgaaaggattggaggagaatctgttggggatttgatgataaggaatattcagttacatcattcaggaaaatatctctgcacagtacaaacaaccctagaaagtttatctgcagtagccgatatcattgttagaggtccaccaggtcctcctgaggatgtgcaagtggaagacatttccagtactacttctcaactaagttggagagcaggcccagataataacagtcccattcaaatatttactattcagactcggacaccattttctgtgggttggcaggctgttgctacagttccagaaattctcaatggtaagacatacaatgcaacagtggttggtttgagtccttgggtggaatatgaatttcgtgttgttgccggcaacagcattgggattggagaaccaagtgaaccatcagaattgttaagaactaaagcatcagtccctgttgtggcaccagtaaacatccatggaggtggaggaagtcggtctgaactcgtcattacgtgggagtcaattccagaagaactgcagaatggggagggatttggatatatcatcatgttccggccagtgggctcgacaacctggtccaaggagaaagtgtcatctgtggaatcatcaaggtttgtctacagaaatgaaagcatcatcccactgtctccctttgaagtcaaagtgggtgtgtataataatgaaggagaaggatccctgagtactgtgaccattgtctactctggggaagatgaacctcaactggccccaaggggaacttctctccagagtttttctgcttctgaaatggaggtttcatggaatgctattgcctggaatagaaacactggaagagtgctgggctatgaggtcttatactggacagatgactccaaagaatccatgataggtaaaattagagtcagtggaaatgtcacaaccaaaaacatcacggggctgaaagctaataccatctactttgcttccgtaagagcttacaacactgctgggacagggccctcaagccccccagtcaatgttaccaccaaaaagtctcctccaagccaaccaccagcaaacattgcctggaagctgacaaactctaaattatgcttgaactgggagcatgtaaaaaccatggaaaatgagtctgaagttttggggtacaagattctgtaccggcaaaacagacagagtaaaactcatattttggaaacaaacaatacatcagctgagcttctggttccatttgaagaagactacttaattgaaataagaacagtcagtgatggtggagatggaagcagcagtgaggaaattaggattccaaaaatgtcaagtttgagttccagaggaattcaattcttagaacctagcacccattttctttccattgtcattgtgatttttcactgttttgctattcagccacttatctgatgaataaaaccataaatctttgagagttttttgaaagcaaatcattctgtatatatgctctccagcctctgacacaagatgcgttcttaatacagacttgtttgcaaagaaaaaaaaaagtatattattaaaatcctgtaaatatctatggtatattaataaaacaattttaaacacttttgaattttaaaatccgcacatgattacatgaattcctaggtgccacattaacctggggagttgtaactgctgtgtcttttaagttacttatatggagaaaataaataactcccctcaatgatgctgatgatgaatacaaacttggctcctagttaccataactcacatgtacatttttatgtattccagacaatcacttcagtatttaaaatttccaccctacttcaaaataaaatacaattatttgtttatagttgggattctttaaaaatacaaactattccaaagcatggggtgcttttatctctgaatcaagttggaataagaaatctttttactcaagaatatttcaatatacatgatgttcttctcagcccacttttcagaagattcagtcacaataaaggcagaaaaagtattttatggcaaagaaaaataaatgatgggaaatgagcacccacctaaaataatcttctaacaactctggtatatattaagcaattgctcatggcaaagttgaacatttgaactgctgcatgaacaaatctcaggtaattatgacaagttgattgcaatgtatgtggccttatttttataataaaacaatgtggaaacagaa

SEQ ID NO: 6759 - DNA, 3519 bp, Homo sapiens
  source 1..3519: mol_type = unassigned DNA
aataagagagattttctgatgacccgacaggagtgactatctccagtcaaagaaagaggagggtgaatttaatctttcatggccctggaatggcagctgctctcagctctctctgattctgtgaaggttgatgaagatagagctggctttcaatgtagaaagaattttccttttgaatattccaaacgagagctttgcacatgtgcctcaagaactgattgtctggctccgacaggaatgcagcaggagaggagcgtatttcatgcttaagaccagagaagagccacgcaatactcagtggataaaaggcttgcagtcccagctgggaaaaagagtcccattatctcccagctgcatagacattccatacggcttggttctgcctggacgcacagcatgcctggctgagagcttgaaacagagttctgcagaaaaactgtaaagatcccgagacatttccctggtgatggtcttttaagccgtcctatttttactcaggagccacatgatgtcatttttcctttggatttatcaaaatctgaggtcatcctgaattgtgctgctaatggttacccttcgcctcattataggtggaagcaaaatggcacagacattgattttactatgagttatcactacaggttggatggaggcagtcttgcaatcaatagcccccacacagatcaagatattggcatgtaccagtgcctggccaccaatcttctggggacaattctgagtcggaaggcaaagctccaatttgcatatattgaagactttgaaactaaaacaagaagcacagtatctgtccgagaaggtcaaggtgtggtgcttctctgtggcccaccgccacattttggagatttatcttatgcatggaccttcaatgataaccccttatacgtccaagaggacaataggcgatttgtatctcaagagacgggaaacttgtacattgccaaagtggaaccatcagatgtgggcaactacacttgctttataactaacaaagaggcccagagaagtgttcaaggtccacccactccattagtgcagcgcactgatggtgtgatgggggaatatgaaccaaagattgaagtgcgttttcctgaaactatacaagctgcaaaggattcatctgtaaaactggaatgttttgcccttggaaatccagtccccgatattagttggagaaggttggacgggagcccgttgccagggaaagtcaagtacagcaaatcccaagctatccttgaaatcccgaacttccaacaagaagatgaaggcttttatgagtgcattgcaagcaaccttcgaggaagaaaccttgcaaagggtcaactcattttttatgctcctccagaatgggaacagaaaatccaaaatacacacctctctatctatgacaacttgctctgggaatgtaaagctagtggaaagccaaacccttggtatacatggttaaaaaatggtgaacgactcaacccagaggagagaattcaaatagaaaatgggacactcatcataacgatgctgaatgtgtcagattctggtgtgtaccaatgtgctgcagaaaacaaatatcagataatttatgcaaatgctgaattgagagttttagcctcagctccagatttctccaaaagtccagttaaaaaaaagtcttttgttcaagttggtggggatattgttatcggatgcaaaccaaatgcttttcccagggcagctatctcttggaaaagaggaacggagacccttagacaaagcaaaagaatatttctcttggaggatggcagcctcaagatatataatattaccaggtcagatgctggatcatatacatgcatagccacaaatcagtttggcactgcaaagaacactggcagcctcattgtaaaagagagaactgtcattaccgtcccaccttccaaaatggatgttacagttggcgagagtatagtgctaccatgccaggtgtcccatgacccctccattgaagtggtatttgtatggtttttcaatggagatgtcatagacttaaaaaaaggagtggctcattttgaaaggattggaggagaatctgttggggatttgatgataaggaatattcagttacatcattcaggaaaatatctctgcacagtacaaacaaccctagaaagtttatctgcagtagccgatatcattgttagaggtccaccaggtcctcctgaggatgtgcaagtggaagacatttccagtactacttctcaactaagttggagagcaggcccagataataacagtcccattcaaatatttactattcagactcggacaccattttctgtgggttggcaggctgttgctacagttccagaaattctcaatggtaagacatacaatgcaacagtggttggtttgagtccttgggtggaatatgaatttcgtgttgttgccggcaacagcattgggattggagaaccaagtgaaccatcagaattgttaagaactaaagcatcagtccctgttgtggcaccagtaaacatccatggaggtggaggaagtcggtctgaactcgtcattacgtgggagtcaattccagaagaactgcagaatggggagggatttggatatatcatcatgttccggccagtgggctcgacaacctggtccaaggagaaagtgtcatctgtggaatcatcaaggtttgtctacagaaatgaaagcatcatcccactgtctccctttgaagtcaaagtgggtgtgtataataatgaaggagaaggatccctgagtactgtgaccattgtctactctggggaagatgaacctcaactggccccaaggggaacttctctccagagtttttctgcttctgaaatggaggtttcatggaatgctattgcctggaatagaaacactggaagagtgctgggctatgaggtcttatactggacagatgactccaaagaatccatgataggtaaaattagagtcagtggaaatgtcacaaccaaaaacatcacggggctgaaagctaataccatctactttgcttccgtaagagcttacaacactgctgggacagggccctcaagccccccagtcaatgttaccaccaaaaagtctcctccaagccaaccaccagcaaacattgcctggaagctgacaaactctaaattatgcttgaactgggagcatgtaaaaaccatggaaaatgagtctgaagttttggggtacaagattctgtaccggcaaaacagacagagtaaaactcatattttggaaacaaacaatacatcagctgagcttctggttccatttgaagaagactacttaattgaaataagaacagtcagtgatggtggagatggaagcagcagtgaggaaattaggattccaaaaatgtcaagtttgagttccagaggaattcaattcttagaacctagcacccattttctttccattgtcattgtgatttttcactgttttgctattcagccacttatctgatgaataaaaccataaatctttgag

SEQ ID NO: 6760 - DNA, 9894 bp, Homo sapiens
  source 1..9894: mol_type = unassigned DNA
acaagctctccatgtgagctgacaggcgagtggaaacccctcgagtcacgctgcccggcggcggagggagcgctcgcccgcagtggcaacagctgcaccaccgtccccgtcgctctgccttcctcttctgcagcctctgctcttctgattacctccctcccccgtcctttggtgatttttttttttcaagaaggagagggcggggtaggtgtccgttccctcccctcttccccctcctttgccttcttggtttgaatttcctcccccggcgttgcactggcacacagtgcaagaggcaatacccgcacggagggagaacgaaggctgagactcccctgccgctccaagcccggaagaactggagcctggaggggggtgaggggagaagaggaagcgggaggggcttggcttcctcgcgtatttgaggacagcccatctcccttcaagaaccctacggagagtcggactgcatctccgcagcgagctcttggagcgccgccggccgggaggcgaaggatgcaggcggctccgcgcgccggctgcggggcagcgctcctgctgtggattgtcagcagctgcctctgcagagcctggacggctccctccacgtcccaaaaatgtgatgagccacttgtctctggactcccccatgtggctttcagcagctcctcctccatctctggtagctattctcccggctatgccaagataaacaagagaggaggtgctgggggatggtctccatcagacagcgaccattatcaatggcttcaggttgactttggcaatcggaagcagatcagtgccattgcaacccaaggaaggtatagcagctcagattgggtgacccaataccggatgctctacagcgacacagggagaaactggaaaccctatcatcaagatgggaatatctgggcatttcccggaaacattaactctgacggtgtggtccggcacgaattacagcatccgattattgcccgctatgtgcgcatagtgcctctggattggaatggagaaggtcgcattggactcagaattgaagtttatggctgttcttactgggctgatgttatcaactttgatggccatgttgtattaccatatagattcagaaacaagaagatgaaaacactgaaagatgtcattgccttgaactttaagacgtctgaaagtgaaggagtaatcctgcacggagaaggacagcaaggagattacattaccttggaactgaaaaaagccaagctggtcctcagtttaaacttaggaagcaaccagcttggccccatatatggccacacatcagtgatgacaggaagtttgctggatgaccaccactggcactctgtggtcattgagcgccaggggcggagcattaacctcactctggacaggagcatgcagcacttccgtaccaatggagagtttgactacctggacttggactatgagataacctttggaggcatccctttctctggcaagcccagctccagcagtagaaagaatttcaaaggctgcatggaaagcatcaactacaatggcgtcaacattactgatcttgccagaaggaagaaattagagccctcaaatgtgggaaatttgagcttttcttgtgtggaaccctatacggtgcctgtctttttcaacgctacaagttacctggaggtgcccggacggcttaaccaggacctgttctcagtcagtttccagtttaggacatggaaccccaatggtctcctggtcttcagtcactttgcggataatttgggcaatgtggagattgacctcactgaaagcaaagtgggtgttcacatcaacatcacacagaccaagatgagccaaatcgatatttcctcaggttctgggttgaatgatggacagtggcacgaggttcgcttcctagccaaggaaaattttgctattctcaccatcgatggagatgaagcatcagcagttcgaactaatagtccccttcaagttaaaactggcgagaagtacttttttggaggttttctgaaccagatgaataactcaagtcactctgtccttcagccttcattccaaggatgcatgcagctcattcaagtggacgatcaacttgtaaatttatacgaagtggcacaaaggaagccgggaagtttcgcgaatgtcagcattgacatgtgtgcgatcatagacagatgtgtgcccaatcactgtgagcatggtggaaagtgctcgcaaacatgggacagcttcaaatgcacttgtgatgagacaggatacagtggggccacctgccacaactctatctacgagccttcctgtgaagcctacaaacacctaggacagacatcaaattattactggatagatcctgatggcagcggacctctggggcctctgaaagtttactgcaacatgacagaggacaaagtgtggaccatagtgtctcatgacttgcagatgcagacgcctgtggtcggctacaacccagaaaaatactcagtgacacagctcgtttacagcgcctccatggaccagataagtgccatcactgacagtgccgagtactgcgagcagtatgtctcctatttctgcaagatgtcaagattgttgaacaccccagatggaagcccttacacttggtgggttggcaaagccaacgagaagcactactactggggaggctctgggcctggaatccagaaatgtgcctgcggcatcgaacgcaactgcacagatcccaagtactactgtaactgcgacgcggactacaagcaatggaggaaggatgctggtttcttatcatacaaagatcacctgccagtgagccaagtggtggttggagatactgaccgtcaaggctcagaagccaaattgagcgtaggtcctctgcgctgccaaggagacaggaattattggaatgccgcctctttcccaaacccatcctcctacctgcacttctctactttccaaggggaaactagcgctgacatttctttctacttcaaaacattaaccccctggggagtgtttcttgaaaatatgggaaaggaagatttcatcaagctggagctgaagtctgccacagaagtgtccttttcatttgatgtgggaaatgggccagtagagattgtagtgaggtcaccaacccctctcaacgatgaccagtggcaccgggtcactgcagagaggaatgtcaagcaggccagcctacaggtggaccggctaccgcagcagatccgcaaggccccaacagaaggccacacccgcctggagctctacagccagttatttgtgggtggtgctgggggccagcagggcttcctgggctgcatccgctccttgaggatgaatggggtgacacttgacctggaggaaagagcaaaggtcacatctgggttcatatccggatgctcgggccattgcaccagctatggaacaaactgtgaaaatggaggcaaatgcctagagagataccacggttactcctgcgattgctctaatactgcatatgatggaacattttgcaacaaagatgttggtgcattttttgaagaagggatgtggctacgatataactttcaggcaccagcaacaaatgccagagactccagcagcagagtagacaacgctcccgaccagcagaactcccacccggacctggcacaggaggagatccgcttcagcttcagcaccaccaaggcgccctgcattctcctctacatcagctccttcaccacagacttcttggcagtcctcgtcaaacccactggaagcttacagattcgatacaacctgggtggcacccgagagccatacaatattgacgtagaccacaggaacatggccaatggacagccccacagtgtcaacatcacccgccacgagaagaccatctttctcaagctcgatcattatccttctgtgagttaccatctgccaagttcatccgacaccctcttcaattctcccaagtcgctctttctgggaaaagttatagaaacagggaaaattgaccaagagattcacaaatacaacaccccaggattcactggttgcctctccagagtccagttcaaccagatcgcccctctcaaggccgccttgaggcagacaaacgcctcggctcacgtccacatccagggcgagctggtggagtccaactgcggggcctcgccgctgaccctctcccccatgtcgtccgccaccgacccctggcacctggatcacctggattcagccagtgcggattttccatataatccaggacaaggccaagctataagaaatggagtcaacagaaactcggctatcattggaggcgtcattgctgtggtgattttcaccatcctgtgcaccctggtcttcctgatccggtacatgttccgccacaagggcacctaccataccaacgaagcaaagggggcggagtcggcagagagcgcggacgccgccatcatgaacaacgaccccaacttcacagagaccattgatgaaagcaaaaaggaatggctcatttgaggggtggctacttggctatgggatagggaggagggaattactagggaggagagaaagggacaaaagcaccctgcttcatactcttgagcacatccttaaaatatcagcacaagttgggggaggcaggcaatggaatataatggaatattcttgagactgatcacaaaaaaaaaaacctttttaatatttctttatagctgagttttcccttctgtatcaaaacaaaataatacaaaaaatgcttttagagtttaagcaatggttgaaatttgtaggtactatctgtcttattttgtgtgtgtttagaggtgttctaaagacccgtggtaacagggcaagttttctacgtttttaagagcccttagaacgtgggtattttttttcttgagaaaagctaatgcacctacagatggcccccaacattctcttccttttgcttctagtcaaccttaatgggctgttacagaaactagttcgtgtttatatactatttcctttgatgtcctataagtcggaaaagaaaggggcaaagagaacctattatttgccagtttttaagcagagctcaatctatgccagctctctggcatctggggttcctgactgataccagcagttgaaggaagagagtgcatggcacctggtgtgtaacgacacaatcagcacaactggagagaggcattaaagaaccagggaaggtagtttgatttttcattgaattctacaagctaatattgttccacgtatgtagtcttagaccaatagctgtaactatcagctgcaataccatggtgaccagctgttacaaaagattttttcctgttttatctgaaacatactggatttatatatgtataagcgcctcaatggggaattagagccagatgttatgatttgtttgctctttttcttttatagtttagttatagcaaaaatatggataatttctagtgaatgcataaattaggttgcgtttcttattttgctttaaatctctggtagtttttccacccctgtgacacaatcctaatagacagtgtcctgtaaatggacacaacacaataaagtcaagttattattgctgttactctggatgatatggaaaacactgccatattttaaatcaactactccacgtgtttttccatccaatcacactgctgtgattcagggatctttcttctaagacggacacatttgaacctcaggttcatcacaaacctggtacctgttgcttcccagaggatggagaagtgtagttaatcacacctcttagtttaatctgaaatcttgacccagttatttaacaaataaatacctcattgattatatttaaaagtaatacacttcctgtaaacaaatggggacaatgcatccaaaaaatctttttaaacagattacacaaaaattatttccagaaaggctaccatttatcatcattatatttcaagcctcttatacttaataagcactttctaaaaagtcttgagatcccaccattctgaggaattcaatatgatcactttttccttctttgcctgggagaggttaagaggaggtttcgaaggtatagatgctattgttctgatggcccggctgaataaaatggaaattctagtttgttagaattatgcattctttttcaagattctcagtgtgcctaacttattggagcacatcagtttcttgggtaatggaaaacattacctagagttgccagtggcacattacaccagtacagagcacattccaaaggagacattggaccagttaattcccatacaagtcaaggtaacagaacaaaagggaatcctgatgcccttttaccattgctggttgagctcaggcactgtcatggacacccttaattttaaaaggttttaatcattcttctataaaatacatttaaaatggaaaaatacttaatatcactaaatatcagaacaatgtaacatttacaaatgacatattgaaagcaaaggctgttttatttagccaagatgattaccattaggagttactttatgtattgttgaaagcaaattttaaacatgatgttttagaagtgtttctgatttttaaacctggtttacaggtattacttctgcacttaccaaataatgccagatggaaatttattatttcttgcaattcccatgatagctctgttctttatgcattgtctcaacactttcccttttttcccaaaatgagtagagaattaaagccacccaaaacagcttctgctactaaaatgttctcatcctttctcctccctctccttttcctgccacaaaaggtgaaaaatgagatccaatcctctcaccaaaatttcaaacctaggacactggaatgactgcagggatcagtggttctcccatatcaccatcaattaagacatataggacactgtcttccttcaagagggttacaatgtggccatcagacaggaaaccaaacggtggataaagtattaagtaactaagtgccaaataaatgctggaaatcttgacctctccttgggattatgggtgtaacaaaaatccctacatctgtttatgaaggccatattcagtacattttaaatggtaaataatctgtttatgtgaagaaaaagaattaagtctttcttccaactctctccttggatagcctagcacagtgcagcctccataaccatgacattcccgcccaagctctcagtgcctaatcctgctttgtcattcacatctcacaaaatcttgacatcttacattccaatacattatcaagcaagcacaagtatgctggtagtagcctctttaaataatatgtatagacaacaacaacgacaaaaaatagactgttttaaagtttcagggaaagttggtggctgatttaaagttgtgcaggaaacatcttctgtgtatgaagcaaatgtcgatgttttgaaaaaagctaggagatgactttgaatgaatgcaaggttagtgagatcctaagctctcaaaatagcatattccctagagctcaagaaagctggtccaggaggttgaaaaagctattttgttgttaaattattttctggcccttcttaatatttaaaaatgtatttccccttgtggctttcaaccacctgctcaaaaaaagagacttgttacatgaaagttttcattaaagagctgaaaacaagaatttagagagccattcctagaaaatgtcctactgccctgcatttgacaaacaagcatcctttactaacaagagcaggaattcagaggcacaagaaaaagcattggcatgagccaaagagtctgtcttaatgttacttttgaaaatctgctgagcggccaccatatgcaggctgagagctgggcacaggcgaagccattggaagcacttcaggaacaagcacacagctgtgggacttgaacatgcaagtgttcaggttgtgtcaagaagcttttctttccttctatgatggaatctgttcttttctatcctacttttttctctcttcctctcctcaccacattataccctgctcttacgcagtaaacgttttaatggcccgtttatgtctcatgcctccaaacaacactgaatttgaaaccccccattttttcttttcaccaccctgttgagcaattttcccaaaaaaagggcagcaattattaaattgaattcaagtaagccagccaaagataggtcctaaattgctagtcccagtagaaccacctgatcctaaaccagtgcgaaacaaacagtaacaatgtccccagctgacttcagctaagaaccaatggctcctacccccgccccgcttttttttgttgttttttgttttgttttgagacggagtcttgctctgtcccccaggctggagtgcactggcgcaatctcgggctcactgcaacctcctcctcctcccacattgaggcgattctcctgcctcagcctcccaagtagctgggattacaggcacccgccatcacacccagctaatttttttttttttttgtattattagtagaagccaggtttcaccatgttggccagggtggtctcgaactcctgacctcaagtgatccgtccacctcggccttgcaaattgctgggattacaggtgtgagccaccgtgccgagccagccccattttttaaatgatgttttggttaagagtggaccatgagaattagctgacagcatcccctttctctctccctgccttggtgggaccctccctgtgtgaccttggtcaagtcctcgaacttttgtcccgtatttaagatggagctgttttacctacttcataagacagttgcgaggtgccattgattcttgactgcaaaataccttgaaacccttatataaagactgaagtcaacggagcctagtgaaagacttactttgtggcttgtggttgaaagtcacatcaaaagacaaatgtggccacgttcaggaattggagacttactggcatggctctacagctgctcagttattaatcatgcagactaacctgtcaacactgggagatgcaacatagcaaaaggacagagaaattagaattttttgtgcagaaagccctaaattcccacctgaatgtaacttacagctcccttacctactctcacacatgccctcaaacatgctagattggcttatacataggccaacacaaaatacaaacgtgacgtgttcatgtagcctagtggctatatgcctattctccatgtaccctgcatggtagtgctgcaaactttaaagtacatttctttcacagcagtattttttttcataagtggcatataaatgtcattcaatgaaatggggaaatcacgttgagaagttggtctgtcatctcccattgagcaaagactggcaggagataataaaaataaatatgggcacacatgtattaatatacagcacgcatttacaagtttattttccagataaaattgtgctataagaacagctctaccaagacagtctgcaccatttccaagtctcagttaatttacagcaactgctgctttcggagatggctgtgaaaatatggaagttcctctcaagtaggccaagaaacagttctagattttactaagttttattttgtcaggttttttaaattttttcagtgagcgtggtgactgcagaggttagtgctgtgaaaagctgggctaaatattctttctgtaaagtcaaacaggattccatcccctgtgaaataacacaaaatttcactctctaaaagcaacagcatgtaaactagaatgaaagaaggaaattatgtacgtatgcctaatattctttgtgaatgtctttcatttaactaaaattatattagaaaccagattgataaataaaaaattcaaagtagttttaattatcctaaaa

SEQ ID NO: 6761 - DNA, 1944 bp, Homo sapiens
  source 1..1944: mol_type = unassigned DNA
taagagctagtcacatgtctccacctggatgcacagggaccaggaaggcagttactggctgggtagcagctttgcgggagtgatgatgaaaaggggaaagaaaccttctgtgaatggttagtggtctcttttacaggtactatgacaccaaaaaggagtaaactttaaagacaccaagctgccacagaagtgtccttttcatttgatgtgggaaatgggccagtagagattgtagtgaggtcaccaacccctctcaacgatgaccagtggcaccgggtcactgcagagaggaatgtcaagcaggccagcctacaggtggaccggctaccgcagcagatccgcaaggccccaacagaaggccacacccgcctggagctctacagccagttatttgtgggtggtgctgggggccagcagggcttcctgggctgcatccgctccttgaggatgaatggggtgacacttgacctggaggaaagagcaaaggtcacatctgggttcatatccggatgctcgggccattgcaccagctatggaacaaactgtgaaaatggaggcaaatgcctagagagataccacggttactcctgcgattgctctaatactgcatatgatggaacattttgcaacaaagatgttggtgcattttttgaagaagggatgtggctacgatataactttcaggcaccagcaacaaatgccagagactccagcagcagagtagacaacgctcccgaccagcagaactcccacccggacctggcacaggaggagatccgcttcagcttcagcaccaccaaggcgccctgcattctcctctacatcagctccttcaccacagacttcttggcagtcctcgtcaaacccactggaagcttacagattcgatacaacctgggtggcacccgagagccatacaatattgacgtagaccacaggaacatggccaatggacagccccacagtgtcaacatcacccgccacgagaagaccatctttctcaagctcgatcattatccttctgtgagttaccatctgccaagttcatccgacaccctcttcaattctcccaagtcgctctttctgggaaaagttatagaaacagggaaaattgaccaagagattcacaaatacaacaccccaggattcactggttgcctctccagagtccagttcaaccagatcgcccctctcaaggccgccttgaggcagacaaacgcctcggctcacgtccacatccagggcgagctggtggagtccaactgcggggcctcgccgctgaccctctcccccatgtcgtccgccaccgacccctggcacctggatcacctggattcagccagtgcggattttccatataatccaggacaaggccaagctataagaaatggagtcaacagaaactcggctatcattggaggcgtcattgctgtggtgattttcaccatcctgtgcaccctggtcttcctgatccggtacatgttccgccacaagggcacctaccataccaacgaagcaaagggggcggagtcggcagagagcgcggacgccgccatcatgaacaacgaccccaacttcacagagaccattgatgaaagcaaaaaggaatggctcatttgaggggtggctacttggctatgggatagggaggagggaattactagggaggagagaaagggacaaaagcaccctgcttcatactcttgagcacatccttaaaatatcagcacaagttgggggaggcaggcaatggaatataatggaatattcttgagactgatcacaaaaaaaaaaacctttttaatatttctttatagctgagttttcccttctgtatcaaaacaaaataatacaaaaaatgcttttagagtttaagcaatggttgaaatttgtaggtactatctgtcttattttgtgtgtgtttagaggtgttctaaagacccg

SEQ ID NO: 6762 - DNA, 2036 bp, Homo sapiens
  source 1..2036: mol_type = unassigned DNA
aagaagctgagagtgacgcctctgagccgcggaggattgtgggaggaggttgtctccaatttctcctccccctcccggccaagatgtctgacatggaggatgatttcatgtgcgatgatgaggaggactacgacctggaatactctgaagatagtaactccgagccaaatgtggatttggaaaatcagtactataattccaaagcattaaaagaagatgacccaaaagcggcattaagcagtttccaaaaggttttggaacttgaaggtgaaaaaggagaatggggatttaaagcactgaaacaaatgattaagattaacttcaagttgacaaactttccagaaatgatgaatagatataagcagctattgacctatattcggagtgcagtcacaagaaattattctgaaaaatccattaattctattcttgattatatctctacttctaaacagaattctgattttttatgtcagatggatttactgcaggaattctatgaaacaacactggaagctttgaaagatgctaagaatgatagactgtggtttaagacaaacacaaagcttggaaaattatatttagaacgagaggaatatggaaagcttcaaaaaattttacgccagttacatcagtcgtgccagactgatgatggagaagatgatctgaaaaaaggtacacagttattagaaatatatgctttggaaattcaaatgtacacagcacagaaaaataacaaaaaacttaaagcactctatgaacagtcacttcacatcaagtctgccatccctcatccactgattatgggagttatcagagaatgtggtggtaaaatgcacttgagggaaggtgaatttgaaaaggcacacactgatttttttgaagccttcaagaattatgatgaatctggaagtccaagacgaaccacttgcttaaaatatttggtcttagcaaatatgcttatgaaatcgggaataaatccatttgactcacaggaggccaagccgtacaaaaatgatccagaaattttagcaatgacgaatttagtaagtgcctatcagaataatgacatcactgaatttgaaaagattctaaaaacaaatcacagcaacatcatggatgatcctttcataagagaacacattgaagagcttttgcgaaacatcagaacacaagtgcttataaaattaattaagccttacacaagaatacatattccttttatttctaaggagttaaacatagatgtagctgatgtggagagcttgctggtgcagtgcatattggataacactattcatggccgaattgatcaagtcaaccaactccttgaactggatcatcagaagaggggtggtgcacgatatactgcactagataaatggaccaaccaactaaattctctcaaccaggctgtagtcagtaaactggcttaacagagaacaagcttttacagacgtccttaaggcaacagtgcagagatgtaatccttaaaagaactgggaatggcaaaactactgtcggttgatgtgtcctgaaaattattggagttatggcagaagtgcttttttgatcaactggtttgtgttttgctgctgcatttatcccaagaaaaacagctttaatctccagaagaaaaccaaaataccatgggatttatgctgtattgacatcttgccctaaacgtacaacatcatagtaatttgtcatgggcaacatgaccagagagaagatttttgtcatgattttaaatacactgacacgctactgttggttaaatttaaacatgttttacctgcagaaattctctcacaaataacctgcaataacttgaaatgcatacccttttgaacacttccttttctcatgtataaattaaaatgtttgctgcattttgcaaaatgtcaattctctaaaaatgtgtccgtatatttctgtacctgcagtgtagtaaaggtttagacgaaaccccataattatagtggcatactgtcacttaggtttcaagcagcaaaataaacagtgcagctcagaaa

SEQ ID NO: 6763 - DNA, 4061 bp, Homo sapiens
  source 1..4061: mol_type = unassigned DNA
agagtgacgcctctgagccgcggaggattgtgggaggaggttgtctccaatttctcctccccctcccggccaagatgtctgacatggaggatgatttcatgtgcgatgatgaggaggactacgacctggaatactctgaagatagtaactccgagccaaatgtggatttggaaaatcagtactataattccaaagcattaaaagaagatgacccaaaagcggcattaagcagtttccaaaaggttttggaacttgaaggtgaaaaaggagaatggggatttaaagcactgaaacaaatgattaagattaacttcaagttgacaaactttccagaaatgatgaatagatataagcagctattgacctatattcggagtgcagtcacaagaaattattctgaaaaatccattaattctattcttgattatatctctacttctaaacagatggatttactgcaggaattctatgaaacaacactggaagctttgaaagatgctaagaatgatagactgtggtttaagacaaacacaaagcttggaaaattatatttagaacgagaggaatatggaaagcttcaaaaaattttacgccagttacatcagtcgtgccagactgatgatggagaagatgatctgaaaaaaggtacacagttattagaaatatatgctttggaaattcaaatgtacacagcacagaaaaataacaaaaaacttaaagcactctatgaacagtcacttcacatcaagtctgccatccctcatccactgattatgggagttatcagagaatgtggtggtaaaatgcacttgagggaaggtgaatttgaaaaggcacacactgatttttttgaagccttcaagaattatgatgaatctggaagtccaagacgaaccacttgcttaaaatatttggtcttagcaaatatgcttatgaaatcgggaataaatccatttgactcacaggaggccaagccgtacaaaaatgatccagaaattttagcaatgacgaatttagtaagtgcctatcagaataatgacatcactgaatttgaaaagattctaaaaacaaatcacagcaacatcatggatgatcctttcataagagaacacattgaagagcttttgcgaaacatcagaacacaagtgcttataaaattaattaagccttacacaagaatacatattccttttatttctaaggagttaaacatagatgtagctgatgtggagagcttgctggtgcagtgcatattggataacactattcatggccgaattgatcaagtcaaccaactccttgaactggatcatcagaagaggggtggtgcacgatatactgcactagataaatggaccaaccaactaaattctctcaaccaggctgtagtcagtaaactggcttaacagagaacaagcttttacagacgtccttaaggcaacagtgcagagatgtaatccttaaaagaactgggaatggcaaaactactgtcggttgatgtgtcctgaaaattattggagttatggcagaagtgcttttttgatcaactggtttgtgttttgctgctgcatttatcccaagaaaaacagctttaatctccagaagaaaaccaaaataccatgggatttatgctgtattgacatcttgccctaaacgtacaacatcatagtaatttgtcatgggcaacatgaccagagagaagatttttgtcatgattttaaatacactgacacgctactgttggttaaatttaaacatgttttacctgcagaaattctctcacaaataacctgcaataacttgaaatgcatacccttttgaacacttccttttctcatgtataaattaaaatgtttgctgcattttgcaaaatgtcaattctctaaaaatgtgtccgtatatttctgtacctgcagtgtagtaaaggtttagacgaaaccccataattatagtggcatactgtcacttaggtttcaagcagcaaaataaacagtgcagctcagaaattgtagtttggttcttgatgtgtttttattacatttggagttgttttgttttttagtaccttcgaaatttcaaattattttatcttcagttaatgattttaaaaagcctgggggcaaataagttggttatttgctttcaagtttttaaaagtagtctttattgatagagtaaggagaactactttctaacaaaacacgtgcatagttatgacagtgatgctttaaaggaataaaattctttttttttaaagagtgatattccttttcaaaagaatactaactctcagaatgttcactttaaacgaatatgccagaacatagacagctaaatgaatgttactctgcatagtgatcatgctggaaggttatttcctaatgccagcaatctaccattgcccaaaacctgctgagtttactcttttagaattgcattcaaagttaatttgtcacacacactaaactttatgattatacattgttttaaaaaatatagtattaggaagcttgattatttttagttaccattacttggcaccaaatgaaagtttccaaaacttccacctaactttgaggtaatgcagaaagtatataactggctttgaaggcaatcccaaaagagttttaaaggttttttgagcagtggcagtatacttaggagaatgaactgtggccttccaaggtaactaccttaaaggaactcagctcatttgaatgtattgagttttggatgtatttgtttcattttttaaaaagttcacattattttatagtgtcgaaaggaagaactaggattaacataatttctttggtttttctattgcttgttattattatgtaaaaactgggtggcagttcagaaggaagattgtggttacagaagagtgacaaccaagaattttttgatcattaaatcagattttataaacagtggaaggagcatggacttaaaacaaggcatgcttattcggttttgtcaaaattttacgaaaatatgtgatatatatttatactaaaaatatataatccttagatttagaaaagcaatcagttaatgtctttagcagactaaagcagtattaaacacaggtacaagttggaaattgtagaaaacggaaagaaaacaaaagacaaaatgtctatggtagggaataaaagtttaagatattataaaattatgtgtattttctcttttacataaatcatttgtgaaaagtgtgctaaactttttttacaagagtgatattaattaggatttatttttcaatataatttggagaccctttgttatccaaataaaaatgatgagtttttgtgcctgtattcaaatatgtatgcatgtgataacccttgaaagctaaagcccttcttaacttttgagttgatggaattagaattcaaagatttgaatgaaatgatttaacctttatcctccaattcttacagtgcccagttctcctgtgctatctttgctttgtacaatagtgcatcttccactttctagagagaaagcatgcacttgttatttggaaaactgggctaaatatataacagtatccaaagttataccataataatttattgtaattgtgtattacatagctttgtttacccagatataggtgcgttcttttttttctgttagtcatctgtgacttttgttctggaatacaggtttttaaatatatcttaacagtctgactaacttaaaataatttattcttcccttaaaacatttttctgtgtttttgtgcatcaaatattgtagagttgaaatcttagagattgcttatcgaaatataaatttaggggaagttaaaaatcgattggcaaatttgtagcatttattcactgattaaatcttttccacttttgtgaaaaccataccagtggtttacatcatattgtaatgtgttcatctcattcttctttttatccctaaacctagctaaaagttactgcaaagaaatctttggctgccacaagtagatgctctctactacaagagctggatttccattactcactcttgctcttacattaaagttgttgattaaa

SEQ ID NO: 6764 - DNA, 1657 bp, Homo sapiens
  source 1..1657: mol_type = unassigned DNA
tcgccgctcgcgaggacctcaggtggatcgccgcggcccctcctcccagagcggcagccttttcccgcgcgtgctgccttcgccgctcgggccgcccgggggaaaacatggcgtctgccctggagcagttcgtgaacagtgtccgacagctctcagctcaagggcaaatgacacagctttgtgaactgatcaacaagagtggggaactccttgcgaagaacttatcccatctggacactgtgctcggggctctggatgtacaagaacactccttgggcgtccttgctgttttgtttgtgaagttttctatgcccagtgttcctgacttcgaaacgctattctcacaggttcagctcttcatcagcacttgtaatggggagcacattcgatatgcaacagacacttttgctgggctttgccatcagctaacaaatgcacttgtggaaagaaaacagcccctgcgaggaattggcatccttaagcaagccatagacaagatgcagatgaatacaaaccagctgacctcaatacatgctgatctctgccagctttgtttgctagcaaaatgctttaagcctgcccttccatatcttgacgtggatatgatggatatctgtaaagagaatggagcctatgatgcaaaacactttttatgttactattattatggagggatgatctatactgggctgaagaactttgaaagagctctctacttttatgaacaggctataactactcctgccatggcggtcagtcatatcatgttggaatcatataaaaagtatattttagtgtctttgatattacttggcaaagtacaacagctaccaaaatatacatctcaaattgtgggtagattcattaagcctcttagcaatgcataccacgagttagcacaagtgtattcaaccaacaacccctcagaactccgaaacctggtgaataagcacagtgaaaccttcactcgcgataacaacatggggctggtgaagcaatgcttgtcatctctttataagaagaatattcagaggctaacaaagacctttttaactctatcattacaagatatggcaagtcgtgtgcagttgtctggacctcaggaggcagagaaatacgttctgcacatgatagaagatggtgagatttttgcaagtattaaccagaaggacggtatggtcagtttccatgataaccctgaaaaatataataacccagccatgcttcataacattgatcaggagatgctgaagtgcattgagctggatgagcggctgaaagccatggaccaggagatcacagtgaaccctcagtttgtacaaaagagtatgggctcacaagaagatgattcaggaaacaaaccatccagttattcttgaaactaacatccatcctgagctaaacaagagaaactaccatcttggccagtgacaagtgttcggagggcagcagagaggaccaagcctgtgtcacctggagactaagaaattaagttttgttttgacatcttcagtcctgtgtgctttcagaaaaccattttctctgcaaagaaaggaaacagatttgcaaactttaaagtctgtcgtggatttatttatcctcagattattgttactgcattaaatctacctttttgttttaagttgcttgaacatta

SEQ ID NO: 6765 - DNA, 1009 bp, Homo sapiens
  source 1..1009: mol_type = unassigned DNA
cagccttttcccgcgcgtgctgccttcgccgctcgggccgcccgggggaaaacatggcgtctgccctggagcagttcgtgaacagtgtccgacagctctcagctcaagggcaaatgacacagctttgtgaactgatcaacaagagtggggaactccttgcgaagaacttatcccatctggacactgtgctcggggctctggatgtacaagaacactccttgggcgtccttgctgttttgtttgtgaagttttctatgcccagtgttcctgacttcgaaacgctattctcacaggttcagctcttcatcagcacttgtaatggggagcacattcgatatgcaacagacacttttgctgggctttgccatcagctaacaaatgcacttgtggaaagaaaacagcccctgcgaggaattggcatccttaagcaagccatagacaagatgcagatgaatacaaaccagctgacctcaatacatgctgatctctgccagctttgtttgctagcaaaatgctttaagcctgcccttccatatcttgacgtggatatgatggatatctgtaaagagaatggagcctatgatgcaaaacactttttatgttactattattatggagggatgatctatactgggctgaagaactttgaaagagctctctacttttatgaacaggctataactactcctgccatggcggtcagtcatatcatgttggaatcatataaaaagtatattttagtgtctttgatattacttggcaaagtacaacagctaccaaaatatacatctcaaattgtgggtagattcattaagagacagagtctcgctatgttggccaggttggtgttgaactcctggcctcaagcagtccttctgcgtctgcctcccagagtgctgggattacagcctcttagcaatgcataccacgagttagcacaagtgtattcaaccaacaacccctcagaactccgaaacctggtgaataagcacagtgaaaccttcactcg

SEQ ID NO: 6766 - DNA, 831 bp, Homo sapiens
  source 1..831: mol_type = unassigned DNA
gcgagtccgttctgggtgtcttggctctatggctcgcctctgccagctcctccgctgccaggcggcgcacgctcgggaacctgtgcgcctattttggtcctacagaatgctgcggaagctctcgctcggcaaatgacacagctttgtgaactgatcaacaagagtggggaactccttgcgaagaacttatcccatctggacactgtgctcggggctctggatgtacaagaacactccttgggcgtccttgctgttttgtttgtgaagttttctatgcccagtgttcctgacttcgaaacgctattctcacaggttcagctcttcatcagcacttgtaatggggagcacattcgatatgcaacagacacttttgctgggctttgccatcagctaacaaatgcacttgtggaaagaaaacagcccctgcgaggaattggcatccttaagcaagccatagacaagatgcagatgaatacaaaccagctgacctcaatacatgctgatctctgccagctttgtttgctagcaaaatgctttaagcctgcccttccatatcttgacgtggatatgatggatatctgtaaagagaatggagcctatgatgcaaaacactttttatgttactattattatggagggatgatctatactgggctgaagaactttgaaagagctctctacttttatgaacaggctataactactcctgccatggcggtcagtcatatcatgttggaatcatataaaaagtatattttagtgtctttgatattacttggcaaagtacaacagctaccaaaatatacatctcaaattgtgggtagattcatt

SEQ ID NO: 6767 - DNA, 1613 bp, Homo sapiens
  source 1..1613: mol_type = unassigned DNA
gagtccgttctgggtgtcttggctctatggctcgcctctgccagctcctccgctgccaggcggcgcacgctcgggaacctgtgcgcctattttggtcctacagaatgctgcggaagctctcgctcggcaaatgacacagctttgtgaactgatcaacaagagtggggaactccttgcgaagaacttatcccatctggacactgtgctcggggctctggatgtacaagaacactccttgggcgtccttgctgttttgtttgtgaagttttctatgcccagtgttcctgacttcgaaacgctattctcacaggttcagctcttcatcagcacttgtaatggggagcacattcgatatgcaacagacacttttgctgggctttgccatcagctaacaaatgcacttgtggaaagaaaacagcccctgcgaggaattggcatccttaagcaagccatagacaagatgcagatgaatacaaaccagctgacctcaatacatgctgatctctgccagctttgtttgctagcaaaatgctttaagcctgcccttccatatcttgacgtggatatgatggatatctgtaaagagaatggagcctatgatgcaaaacactttttatgttactattattatggagggatgatctatactgggctgaagaactttgaaagagctctctacttttatgaacaggctataactactcctgccatggcggtcagtcatatcatgttggaatcatataaaaagtatattttagtgtctttgatattacttggcaaagtacaacagctaccaaaatatacatctcaaattgtgggtagattcattaagcctcttagcaatgcataccacgagttagcacaagtgtattcaaccaacaacccctcagaactccgaaacctggtgaataagcacagtgaaaccttcactcgcgataacaacatggggctggtgaagcaatgcttgtcatctctttataagaagaatattcagaggctaacaaagacctttttaactctatcattacaagatatggcaagtcgtgtgcagttgtctggacctcaggaggcagagaaatacgttctgcacatgatagaagatggtgagatttttgcaagtattaaccagaaggacggtatggtcagtttccatgataaccctgaaaaatataataacccagccatgcttcataacattgatcaggagatgctgaagtgcattgagctggatgagcggctgaaagccatggaccaggagatcacagtgaaccctcagtttgtacaaaagagtatgggctcacaagaagatgattcaggaaacaaaccatccagttattcttgaaactaacatccatcctgagctaaacaagagaaactaccatcttggccagtgacaagtgttcggagggcagcagagaggaccaagcctgtgtcacctggagactaagaaattaagttttgttttgacatcttcagtcctgtgtgctttcagaaaaccattttctctgcaaagaaaggaaacagatttgcaaactttaaagtctgtcgtggatttatttatcctcagattattgttactgcattaaatctacctttttgttttaagttgcttg

SEQ ID NO: 6768 - DNA, 4760 bp, Homo sapiens
  source 1..4760: mol_type = unassigned DNA
tatgacttttaaaattcatgaatttgaataattcatcagttttctcagaactcaagacatggctgcccagtgtgtcacaaaggtggcgctgaatgtttcctgtgccaatcttttggataaagatatagggtcaaagtcagaccctttatgtgtgttgtttttgaatacaagtggtcaacagtggtatgaggttgagcgcacagaaaggattaagaattgcttgaatccccaattttccaagacatttattattgattactactttgaagtggttcagaaattgaaatttggggtttatgacatcgacaacaaaactattgagctgagtgatgatgacttcttaggggaatgtgaatgtacccttggacaaattgtttccagcaagaagctaactcgaccactggtgatgaaaactggcagacctgcaggaaaagggagcattacgatttcagctgaagaaataaaagataatagagtggtcttgtttgaaatggaagccagaaaactggataataaggatctatttggaaagtcagacccatacctggaattccacaagcagacatctgatggaaactggctaatggttcatcggacagaggttgttaaaaacaacttgaatcctgtttggaggcctttcaagatctctcttaactcactgtgttacggagatatggacaaaaccattaaggtggagtgttatgattatgacaatgatgggtcacatgatctcattggaacatttcagaccaccatgacaaaactgaaagaagcctccagaagctcacctgttgaatttgaatgcataaatgagaaaaaaaggcaaaagaaaaaaagctacaagaattcaggtgttatcagtgtgaaacagtgtgagattacagtagaatgcacattccttgactatataatgggaggatgtcagctgaattttactgtgggagtggacttcactggctccaatggtgacccaaggtctccagactcccttcattacatcagccccaatggcgttaatgagtatttgactgctctctggtctgtgggactggtcattcaagattatgatgctgataagatgtttccagcttttggttttggcgctcagatacctcctcagtggcaggtatcacatgaatttccaatgaacttcaacccatccaatccctactgcaatggaatccaaggcattgtagaggcgtatcggtcttgtcttcctcagataaaactctatggaccaactaatttttctccaatcataaatcacgtggccaggtttgctgctgcagccacgcaacagcagacagcttctcaatattttgtgcttttgattattactgatggtgtgatcacagaccttgatgaaaccagacaagctatagttaatgcctccaggctgcctatgtccatcataattgttggagttggaggtgctgacttcagcgccatggagtttctggatggtgatggtggaagtctccgctccccattgggcgaagtggccatcagagatattgtccagtttgtgcctttcagacagttccagaatgctccaaaagaagcacttgctcagtgtgtcttggcagagattccccagcaggtggtgggctacttcaatacatacaaactccttcctcccaagaacccagccacgaaacaacagaagcagtgaccacttcaacagaattcttttgtgttatgtggagcaatgccatctctcaccccaaatcgtgtatctgtcattctacgtactttttacccccagcatttatgatgtaaatctctttctctatggattatatctgtttaaagcattctttctaggttattttggggggacagtgccaagtccatctttgcccagtcaattcagtgattgatagcaatttacattaattgcagtaaagctctttggattagaaattagtgtggggaaagcttattctgttgttgtttttgtttactttcatatgatgaaaatgctgtgtttaagtgtttgtcaataggaagaatggaaaactgttgggatgatgtggtttgcaggttgctgtgcctgattcacagtgtatgttgtataagccaatgtccatacctgattatgagagcttcttaaattatatgatatcaaatttgttcctgtaactctgtatacagtgcttttctgcaaggtaaaaataacctgtctatgcatctgatttttgctacagtttagacactgtggtttacaaaacagcatgcactcaacttgggactttatgaaaagtactgaatgagcaggaaaaggcacatactcagttttttaaatgtacaatcaacaagtaaaaataacctcatgtaagtaagccatttttatttgcctttctagatattttattttattgtggaaaactgtaaacatggtcagatttggctttttttttcattaactgagcaagactttcaggatattgtagatgcacagatggtaggttgtcctgaattctacattattagattactttaattgagatttgttaaaacggttaggactgttttgtccaggaaagataagaggaccaaacatataaggtgaaattcagaattccgtttccttctaactaatgaaaaactgcttactaaaaaaaaattttatactttccttgctaaggtcccatatattgatttgtacagatccacttagtcattttctcctttttttaagaaccattttcatctgatttttaaactcacgataccagttatctgttaatcaaaattgcattttacaatttaataatgtgatatttcctatgtctacagcataccttattaggtataaaacctactgcaacttagaaaaaggaaagaaaaaagaaaacttttccaactgctgcattaagatagggtggattttatgtgctttttttttttaagagttgaatttcttttcctgacttttaccttttacagcgtattacttagtgaacattacattttcagaatagatcctaatattttattgagggcctatgtgctaaaaactatgcatatctatatattggccaattatctttaataatttaccttttgaaattgcatgtttatcatatatccttaagtggacacatacagtgccatgttgatgtgcctctcagttttattgaaaagctgccccacagcccatgtctcttgttctctgcaatgcctcaagggagtgagctctcaaccacagatagctgtggcttctcagaagcagctcattgccaaggccaggctgagaggggacctgcttgctgtggtggttgcctagcccagatgagcatttacctaccaccttcccacttggctagctgtcctttggatatgtgctgttaactggggaaggcatctaactagtagcctgctactccatagtatggctcaatagatgacacatcattttgacattatcaataggagaaaagaaaactaacccttcttctgattgtttggagccatagttgtctcagatgttctaattctctttgtatgcttggaaacagcatagatatgttgctgtggttttcagaattttctcttttaatcacaagaagccttttaaaaaatgacttacacatattctcaatgtacagtaaaacagacagaagtgagcttatctgtttgatgctgtggcagggtcccagtcactgggcatatcctccttctccttaaccagctccacagcagcccctgagtcacctgcacaaggtgcttgggaactgctggttatgagcattcctggttttcttcagccaaataacaggtaatcactgtcaattggatttggtcttcattattttatattctgattttatcagaattattctattttaaaattgttttaaaatttaaaacatttaattcatgatcatgttcatcagtagatgctattattcataagaactgtgattccagcaaactagggtaattggtgcctttttacagttttgaataaaagcatttacaatttctaaattatcagttttcacagtttcagcactcaacctcatcatacgctgatttaatattgttttacattaaaatagtccttttccctgttgtgccaccattcatttaagtgctgtttgttcttaaaatgcatttaaagaaaaattacccatattgactttcacacctcatataatcagatctattacaaatatatatcggagtgacggtgcccaggatagatgtaatatttcttacagatgctggcacagaggaaataatataccagctaatctagtcacctaaccttgtggttagaattgcaattttaagaccagaaaaatttgaagtctgatcagagatttacaactgttcattatagtggtgccttaggcaatctttccaaagtaaattcagggccccattgctacttatgccatatttggacatactttttttttcttcaattttgtaaacttcctggaaagctgtcttcactaagtatcccctagtctctatatatgtggttagtagtcatggaaatgacacataaagtacgccagaagtttgatggaacgtgttagaaactgttttgtgcttttatggatgtcatacttgacaatacatgtgtaagttactaatatatgaattgatgctaaatatatcttacatttgaattccttttggataaagttatttcttgatgtgacagagtagtgtgttttcatttttattctttacatgtgaccaaaacaatagaaaagttaaaaataaaatatagtgttttaggtggc

SEQ ID NO: 6769 - DNA, 580 bp, Homo sapiens
  source 1..580: mol_type = unassigned DNA
gaatcctgcggtcccagcgtcgctccggacgctgccaacctgttctccaccgtcgctcgacttccacctctaagactcccacgtgagtgcgggcgtctcccagttcctgggccggaaactcaggttgaataattcatcaaattacacaactgaactcaagacatggctgcccagtgtgtcacaaaggtggcgctgaatgtttcctgtgccaatcttttggataaagatatagggtcaaagtcagaccctttatgtgtgttgtttttgaatacaagtggtcaacagtggtatgaggttgagcgcacagaaaggattaagaattgcttgaatccccaattttccaagacatttattattgattactactttgaagtggttcagaaattgaaatttggggtttatgacatcgacaacaaaactattgagctgagtgatgatgacttcttaggggaatgtgaatgtacccttggacaaattgtttccagcaagaagctaactcgaccactggtgatgaaaactggcagacctgcaggaaaagggagcattacgatttcagctgaagaaataaaagataatagag

SEQ ID NO: 6770 - DNA, 278 bp, Homo sapiens
  source 1..278: mol_type = unassigned DNA
agccctaggttctcctgaatcctgcggtcccagcgtcgctccggacgctgccaacctgttctccaccgtcgctcgacttccacctctaagactcccacgaaactcaggttgaataattcatcaaattacacaactgggtcttgctctgtcacccaggctgcagtgcatagcttactgtggcctcgaactcctgaacttgagtgagcctcctgccttagcctactgagtagctgggactacagaactcaagacatggctgcccagtgtgtcacaaaggt

SEQ ID NO: 6771 - DNA, 4864 bp, Homo sapiens
  source 1..4864: mol_type = unassigned DNA
cttgctctgccagtccagccctaggttctcctgaatcctgcggtcccagcgtcgctccggacgctgccaacctgttctccaccgtcgctcgacttccacctctaagactcccacgaaactcaggttgaataattcatcaaattacacaactgaactcaagacatggctgcccagtgtgtcacaaaggtggcgctgaatgtttcctgtgccaatcttttggataaagatatagggtcaaagtcagaccctttatgtgtgttgtttttgaatacaagtggtcaacagtggtatgaggttgagcgcacagaaaggattaagaattgcttgaatccccaattttccaagacatttattattgattactactttgaagtggttcagaaattgaaatttggggtttatgacatcgacaacaaaactattgagctgagtgatgatgacttcttaggggaatgtgaatgtacccttggacaaattgtttccagcaagaagctaactcgaccactggtgatgaaaactggcagacctgcaggaaaagggagcattacgatttcagctgaagaaataaaagataatagagtggtcttgtttgaaatggaagccagaaaactggataataaggatctatttggaaagtcagacccatacctggaattccacaagcagacatctgatggaaactggctaatggttcatcggacagaggttgttaaaaacaacttgaatcctgtttggaggcctttcaagatctctcttaactcactgtgttacggagatatggacaaaaccattaaggtggagtgttatgattatgacaatgatgggtcacatgatctcattggaacatttcagaccaccatgacaaaactgaaagaagcctccagaagctcacctgttgaatttgaatgcataaatgagaaaaaaaggcaaaagaaaaaaagctacaagaattcaggtgttatcagtgtgaaacagtgtgagattacagtagaatgcacattccttgactatataatgggaggatgtcagctgaattttactgtgggagtggacttcactggctccaatggtgacccaaggtctccagactcccttcattacatcagccccaatggcgttaatgagtatttgactgctctctggtctgtgggactggtcattcaagattatgatgctgataagatgtttccagcttttggttttggcgctcagatacctcctcagtggcaggtatcacatgaatttccaatgaacttcaacccatccaatccctactgcaatggaatccaaggcattgtagaggcgtatcggtcttgtcttcctcagataaaactctatggaccaactaatttttctccaatcataaatcacgtggccaggtttgctgctgcagccacgcaacagcagacagcttctcaatattttgtgcttttgattattactgatggtgtgatcacagaccttgatgaaaccagacaagctatagttaatgcctccaggctgcctatgtccatcataattgttggagttggaggtgctgacttcagcgccatggagtttctggatggtgatggtggaagtctccgctccccattgggcgaagtggccatcagagatattgtccagtttgtgcctttcagacagttccagaatgctccaaaagaagcacttgctcagtgtgtcttggcagagattccccagcaggtggtgggctacttcaatacatacaaactccttcctcccaagaacccagccacgaaacaacagaagcagtgaccacttcaacagaattcttttgtgttatgtggagcaatgccatctctcaccccaaatcgtgtatctgtcattctacgtactttttacccccagcatttatgatgtaaatctctttctctatggattatatctgtttaaagcattctttctaggttattttggggggacagtgccaagtccatctttgcccagtcaattcagtgattgatagcaatttacattaattgcagtaaagctctttggattagaaattagtgtggggaaagcttattctgttgttgtttttgtttactttcatatgatgaaaatgctgtgtttaagtgtttgtcaataggaagaatggaaaactgttgggatgatgtggtttgcaggttgctgtgcctgattcacagtgtatgttgtataagccaatgtccatacctgattatgagagcttcttaaattatatgatatcaaatttgttcctgtaactctgtatacagtgcttttctgcaaggtaaaaataacctgtctatgcatctgatttttgctacagtttagacactgtggtttacaaaacagcatgcactcaacttgggactttatgaaaagtactgaatgagcaggaaaaggcacatactcagttttttaaatgtacaatcaacaagtaaaaataacctcatgtaagtaagccatttttatttgcctttctagatattttattttattgtggaaaactgtaaacatggtcagatttggctttttttttcattaactgagcaagactttcaggatattgtagatgcacagatggtaggttgtcctgaattctacattattagattactttaattgagatttgttaaaacggttaggactgttttgtccaggaaagataagaggaccaaacatataaggtgaaattcagaattccgtttccttctaactaatgaaaaactgcttactaaaaaaaaattttatactttccttgctaaggtcccatatattgatttgtacagatccacttagtcattttctcctttttttaagaaccattttcatctgatttttaaactcacgataccagttatctgttaatcaaaattgcattttacaatttaataatgtgatatttcctatgtctacagcataccttattaggtataaaacctactgcaacttagaaaaaggaaagaaaaaagaaaacttttccaactgctgcattaagatagggtggattttatgtgctttttttttttaagagttgaatttcttttcctgacttttaccttttacagcgtattacttagtgaacattacattttcagaatagatcctaatattttattgagggcctatgtgctaaaaactatgcatatctatatattggccaattatctttaataatttaccttttgaaattgcatgtttatcatatatccttaagtggacacatacagtgccatgttgatgtgcctctcagttttattgaaaagctgccccacagcccatgtctcttgttctctgcaatgcctcaagggagtgagctctcaaccacagatagctgtggcttctcagaagcagctcattgccaaggccaggctgagaggggacctgcttgctgtggtggttgcctagcccagatgagcatttacctaccaccttcccacttggctagctgtcctttggatatgtgctgttaactggggaaggcatctaactagtagcctgctactccatagtatggctcaatagatgacacatcattttgacattatcaataggagaaaagaaaactaacccttcttctgattgtttggagccatagttgtctcagatgttctaattctctttgtatgcttggaaacagcatagatatgttgctgtggttttcagaattttctcttttaatcacaagaagccttttaaaaaatgacttacacatattctcaatgtacagtaaaacagacagaagtgagcttatctgtttgatgctgtggcagggtcccagtcactgggcatatcctccttctccttaaccagctccacagcagcccctgagtcacctgcacaaggtgcttgggaactgctggttatgagcattcctggttttcttcagccaaataacaggtaatcactgtcaattggatttggtcttcattattttatattctgattttatcagaattattctattttaaaattgttttaaaatttaaaacatttaattcatgatcatgttcatcagtagatgctattattcataagaactgtgattccagcaaactagggtaattggtgcctttttacagttttgaataaaagcatttacaatttctaaattatcagttttcacagtttcagcactcaacctcatcatacgctgatttaatattgttttacattaaaatagtccttttccctgttgtgccaccattcatttaagtgctgtttgttcttaaaatgcatttaaagaaaaattacccatattgactttcacacctcatataatcagatctattacaaatatatatcggagtgacggtgcccaggatagatgtaatatttcttacagatgctggcacagaggaaataatataccagctaatctagtcacctaaccttgtggttagaattgcaattttaagaccagaaaaatttgaagtctgatcagagatttacaactgttcattatagtggtgccttaggcaatctttccaaagtaaattcagggccccattgctacttatgccatatttggacatactttttttttcttcaattttgtaaacttcctggaaagctgtcttcactaagtatcccctagtctctatatatgtggttagtagtcatggaaatgacacataaagtacgccagaagtttgatggaacgtgttagaaactgttttgtgcttttatggatgtcatacttgacaatacatgtgtaagttactaatatatgaattgatgctaaatatatcttacatttgaattccttttggataaagttatttcttgatgtgacagagtagtgtgttttcatttttattctttacatgtgaccaaaacaatagaaaagttaaaaataaaatatagtgttttaggtggc

SEQ ID NO: 6772 - DNA, 446 bp, Homo sapiens
  source 1..446: mol_type = unassigned DNA
gttcctgggccggtgaggcagcagcccagcaaccgtaccgcccgggggaaaaggaaagtcctggcctggaggatccgagcccgcaggctccgtgcggcaggtcccgccgggccctgctgctggaagtgctccgtgggcttcgcgcagctggggatcggcaggaaactcaggttgaataattcatcaaattacacaactgaactcaagacatggctgcccagtgtgtcacaaaggtggcgctgaatgtttcctgtgccaatcttttggataaagatatagggtcaaagtcagaccctttatgtgtgttgtttttgaatacaagtggtcaacagtggtatgaggttgagcgcacagaaaggattaagaattgcttgaatccccaattttccaagacatttattattgattactactttgaagtggttcagaaattgaaatttggggtt

SEQ ID NO: 6773 - DNA, 679 bp, Homo sapiens
  source 1..679: mol_type = unassigned DNA
agtccagccctaggttctcctgaatcctgcggtcccagcgtcgctccggacgctgccaacctgttctccaccgtcgctcgacttccacctctaagactcccacgaaactcaggttgaataattcatcaaattacacaactgacggagtcttgctctgtcgcccaggttggaatgcaatggcgtgatctcactgaccgaaacctccgcctctgaggttcaagtgattctcctgcctcagcctcctgagtagctgggattacagaactcaagacatggctgcccagtgtgtcacaaaggtggcgctgaatgtttcctgtgccaatcttttggataaagatatagggtcaaagtcagaccctttatgtgtgttgtttttgaatacaagtggtcaacagtggtatgaggttgagcgcacagaaaggattaagaattgcttgaatccccaattttccaagacatttattattgattactactttgaagtggttcagaaattgaaatttggggtttatgacatcgacaacaaaactattgagctgagtgatgatgacttcttaggggaatgtgaatgtacccttggacaaattgtttccagcaagaagctaactcgaccactggtgatgaaaactggcagacctgcaggaaaagggagcattacgatttcagctgaagaaataaa

SEQ ID NO: 6774 - DNA, 816 bp, Homo sapiens
  source 1..816: mol_type = unassigned DNA
cagtccagccctaggttctcctgaatcctgcggtcccagcgtcgctccggacgctgccaacctgttctccaccgtcgctcgacttccacctctaagactcccacaactcaagacatggctgcccagtgtgtcacaaaggtggcgctgaatgtttcctgtgccaatcttttggataaagatatagggtcaaagtcagaccctttatgtgtgttgtttttgaatacaagtggtcaacagtggtatgaggttgagcgcacagaaaggattaagaattgcttgaatccccaattttccaagacatttattattgattactactttgaagtggttcagaaattgaaatttggggtttatgacatcgacaacaaaactattgagctgagtgatgatgacttcttaggggaatgtgaatgtacccttggacaaattgtttccagcaagaagctaactcgaccactggtgatgaaaactggcagacctgcaggaaaagggagcattacgatttcagctgaagaaataaaagataatagagtggtcttgtttgaaatggaagccagaaaactggataataaggatctatttggaaagtcagacccatacctggaattccacaagcagacatctgatggaaactggctaatggttcatcggacagaggttgttaaaaacaacttgaatcctgtttggaggcctttcaagatctctcttaactcactgtgttacggagatatggacaaaaccattaaggtggagtgttatgattatgacaatgatgggtcacatgatctcattggaacatttcagaccaccatgaca

SEQ ID NO: 6775 - DNA, 656 bp, Homo sapiens
  source 1..656: mol_type = unassigned DNA
ctccaccgtcgctcgacttccacctctaagactcccacgaaactcaggttgaataattcatcaaattacacaactgctaattaactattaattagaggctttagtgctctgaagggattttggcataaaggggaaaatacctgggtttatgctgtggtggtgacacttactagctttgtgatcccataactcaagacatggctgcccagtgtgtcacaaaggtggcgctgaatgtttcctgtgccaatcttttggataaagatatagggtcaaagtcagaccctttatgtgtgttgtttttgaatacaagtggtcaacagtggtatgaggttgagcgcacagaaaggattaagaattgcttgaatccccaattttccaagacatttattattgattactactttgaagtggttcagaaattgaaatttggggtttatgacatcgacaacaaaactattgagctgagtgatgatgacttcttaggggaatgtgaatgtacccttggacaaattgtttccagcaagaagctaactcgaccactggtgatgaaaactggcagacctgcaggaaaagggagcattacgatttcagctgaagaaataaaagataatagagtggtcttgtttgaaatggaagccagaaaactggataataag

SEQ ID NO: 6776 - DNA, 3897 bp, Homo sapiens
  source 1..3897: mol_type = unassigned DNA
gggcagatttgattttcccgcagcccgggcgccccggagccgaagcccgagccgaggaggtggcgctcgcagccgcgtctcagccccgtcgccgccggcgccaagacccagggagaggcggcgcagcccgggcgctcgggctccgcgctgccggcgccccgccacccccgccgccagcgccccatccggcgcctcccgctcctcacgcccctctccctgtcttctgcatcccctctacctctgcccacagacgcgcgtccctctcctggtgcccctctccacgactccgcgtttccctcccggtgccctctccccgagcccctctccccgcgcccctctctgccttccccgctgtgcccccgctccctgggctccttgcccttccccactgggcccctagcctcctcgcggcgtcacccgagccccctcctcgatccgcggcccccgctccctccgccctcttccctctctcacttcccacgccccctcttcgcgctcctctctcctccccttgccgcccagcccaggctctggagttgggggagagcccagggctccagtcgctccggaggaggcgtgaatcgcgcagggattgactaatttggggtggggggtgcggtgggcgatggagcagcctgaggacatggcgtcgctgagcgagttcgactccttggcgggcagcatcccggccaccaaggtggagatcaccgtgtcctgcaggaacctcctggacaaagacatgttttccaagtccgacccactgtgcgtcatgtatacccaagggatggagaacaagcagtggcgggagtttgggcgcaccgaagtcatcgacaacacgctcaatcctgacttcgtgcgcaagttcattgtggattactttttcgaggagaagcagaacctccgttttgatctatacgacgttgactctaagagtcctgatttatccaaacacgatttcctgggccaggccttctgcacccttggagagattgtggggtcccctgggagccgcctggaaaagcccctcacgataggcgcattcagcctgaattccaggacgggcaaacccatgccagctgtgtccaacggtggtgtcccaggaaagaaatgtggcaccatcatcctgtccgctgaggagctcagcaactgtagggatgtcgccaccatgcagttctgtgccaacaagctggacaagaaagatttctttgggaaatctgaccccttcttggtattctacagaagcaacgaggatggaacgttcaccatttgccacaagaccgaggtcatgaagaacaccctaaatccagtctggcaaactttctccattcccgtgagagccctctgcaacggcgactacgatcggaccatcaaggtggaggtgtacgactgggatcgggacggcagccatgacttcattggggagttcaccaccagttaccgggagctggcccgtgggcagagccaattcaacatctatgaggtggtaaacccgaaaaagaaaatgaagaaaaagaaatacgtgaattctggcacagtcaccctgctttcctttgctgtggagtcagagtgcaccttccttgactacatcaaaggagggacccagatcaacttcactgtggccattgatttcactgcctccaatgggaacccctcacagtccacatccctgcactacatgagcccctaccagctgaacgcctacgcgctggcgctgactgccgtcggagagatcatccagcactacgacagtgacaagatgttccctgccctgggcttcggggccaagctgcccccggatggcagagtgtcccacgagttcccactgaatggcaaccaggagaacccctcatgctgtggcatcgacggcatcctggaggcctaccaccgcagcctgcgcactgtgcagctgtacggccccaccaactttgcccccgtggtcacccacgtggccaggaatgcagcggccgtgcaggatggctcccagtactcggtgctgctcatcattactgatggggtcatctcggacatggcgcagaccaaggaggccattgtcaacgctgccaagctccccatgtccatcattatcgtcggcgtgggccaggcagagttcgacgccatggtggagctggatggcgacgacgtgcggatctcctcccgggggaagctggctgaacgcgacatcgtccagtttgtacccttccgggactacgtggaccgcacaggcaaccacgtgctgagcatggcccgcctggcccgagacgtgctggcagagatccctgaccaactggtgtcctacatgaaggcacagggcattcgcccgcgtcccccacccgcagcaccaacccactcgccctcgcagtccccagcccgcacgccccctgcgtcccccctgcacacgcacatctgaacctggtctcagcaggcaggtggctggggcctgggagaggccaggtgaatgggaggccagggccccagactccccgaagttggcctgcccggcctttgggacatctgtgtgcctgggaggctgccagggggtggggcttctgaagacccctcctcaatttcttggcctcacttattgcccaaacccagggagttaggggggtacgggtgaaagaggggtacacagggacccagcccttctcttcttccccaatacctggctctaacccagccaggaaggtgtaaacaataagggtgattggggtccctgtcgcccacccccggcaatcctatttgcttacctgtcaccctgaagcctgggcttggcctcctccagccccccatctccgtcccatcctcccatggtgtctactcctgtccctgagccccgccctgtggtctatcctgtgcccgatttccagtgaaccccatgaagctgatgggtttgcaggaaggcctgaacatgtgcaccctcccagggacactggatgcgctgggagccccggggaccccatggggtgctgtaatcatggaccgtaggccatgtgatgggcctgaagtggaggctgctcagcacagagccctttctggtgcctctcgaactcagtacgatgcaagttctagacacacagatggcctgtggaggcctctccctggtgtgggcccacaggtacttccatggttgactcctggcttcaggaatcccttcctccctccagaggcttcccagggccctcggtgcccacgcctctgcccatctggaggcctgagtaaggagtggctcagccccacgttcccacactgctcctgctctttgccctgtatcccatgaggctaggagacaggagtcctgggtttgagccctgcctccccccactgcctaatgtgggaacccaagcaaggcccttctaccttttgggcctcagtttccatgtctgtaccacaagagggttgaccagatggccccaggttttcctttaggtctgacatcctgagggtcattcatcccatgcccagttccccccatcctactcctaacagatgtgaccctacttgaggccgccttggcttttgggtcaccctgtctcatcccatcaccccaaacataccctagtccttcagcctggggctctggcatctgagcccgagctcctgcccctgctgtgggaaaggtggggaagaaggggatctccctcccgggcccacccagctgcccagcctttgcccactcggggagcagatcatgcatgccaatccctgttgccgcatggagctcctcagcccactgacctctccgtgcctggtgcaggccaggcccccgtcttccgcctgcctctgcttccccgtcatgcatggtggtggtgtttctacggtgtctggttctgtgcccgtctctgagacagtctctgtgtggaatttgccttaaactgaagtaaatttggttcttttagt

SEQ ID NO: 6777 - DNA, 2542 bp, Homo sapiens
  source 1..2542: mol_type = unassigned DNA
gaagtagatagcaatactcacccagacagaagagaccacggtaaagatcagctgacggcctctgtgggaacaaagacagggaaaggggaaatgagttcaccagaaaccaacaggcagcacaggaggtggtaaacccgaaaaagaaaatgaagaaaaagaaatacgtgaattctggcacagtcaccctgctttcctttgctgtggagtcagagtgcaccttccttgactacatcaaaggagggacccagatcaacttcactgtggccattgatttcactgcctccaatgggaacccctcacagtccacatccctgcactacatgagcccctaccagctgaacgcctacgcgctggcgctgactgccgtcggagagatcatccagcactacgacagtgacaagatgttccctgccctgggcttcggggccaagctgcccccggatggcagagtgtcccacgagttcccactgaatggcaaccaggagaacccctcatgctgtggcatcgacggcatcctggaggcctaccaccgcagcctgcgcactgtgcagctgtacggccccaccaactttgcccccgtggtcacccacgtggccaggaatgcagcggccgtgcaggatggctcccagtactcggtgctgctcatcattactgatggggtcatctcggacatggcgcagaccaaggaggccattgtcaacgctgccaagctccccatgtccatcattatcgtcggcgtgggccaggcagagttcgacgccatggtggagctggatggcgacgacgtgcggatctcctcccgggggaagctggctgaacgcgacatcgtccagtttgtacccttccgggactacgtggaccgcacaggcaaccacgtgctgagcatggcccgcctggcccgagacgtgctggcagagatccctgaccaactggtgtcctacatgaaggcacagggcattcgcccgcgtcccccacccgcagcaccaacccactcgccctcgcagtccccagcccgcacgccccctgcgtcccccctgcacacgcacatctgaacctggtctcagcaggcaggtggctggggcctgggagaggccaggtgaatgggaggccagggccccagactccccgaagttggcctgcccggcctttgggacatctgtgtgcctgggaggctgccagggggtggggcttctgaagacccctcctcaatttcttggcctcacttattgcccaaacccagggagttaggggggtacgggtgaaagaggggtacacagggacccagcccttctcttcttccccaatacctggctctaacccagccaggaaggtgtaaacaataagggtgattggggtccctgtcgcccacccccggcaatcctatttgcttacctgtcaccctgaagcctgggcttggcctcctccagccccccatctccgtcccatcctcccatggtgtctactcctgtccctgagccccgccctgtggtctatcctgtgcccgatttccagtgaaccccatgaagctgatgggtttgcaggaaggcctgaacatgtgcaccctcccagggacactggatgcgctgggagccccggggaccccatggggtgctgtaatcatggaccgtaggccatgtgatgggcctgaagtggaggctgctcagcacagagccctttctggtgcctctcgaactcagtacgatgcaagttctagacacacagatggcctgtggaggcctctccctggtgtgggcccacaggtacttccatggttgactcctggcttcaggaatcccttcctccctccagaggcttcccagggccctcggtgcccacgcctctgcccatctggaggcctgagtaaggagtggctcagccccacgttcccacactgctcctgctctttgccctgtatcccatgaggctaggagacaggagtcctgggtttgagccctgcctccccccactgcctaatgtgggaacccaagcaaggcccttctaccttttgggcctcagtttccatgtctgtaccacaagagggttgaccagatggccccaggttttcctttaggtctgacatcctgagggtcattcatcccatgcccagttccccccatcctactcctaacagatgtgaccctacttgaggccgccttggcttttgggtcaccctgtctcatcccatcaccccaaacataccctagtccttcagcctggggctctggcatctgagcccgagctcctgcccctgctgtgggaaaggtggggaagaaggggatctccctcccgggcccacccagctgcccagcctttgcccactcggggagcagatcatgcatgccaatccctgttgccgcatggagctcctcagcccactgacctctccgtgcctggtgcaggccaggcccccgtcttccgcctgcctctgcttccccgtcatgcatggtggtggtgtttctacggtgtctggttctgtgcccgtctctgagacagtctctgtgtggaatttgccttaaactgaagtaaatttggttcttttagt

SEQ ID NO: 6778 - DNA, 2009 bp, Homo sapiens
  source 1..2009: mol_type = unassigned DNA
gccggagctggagccggcgccagcggctggagcagcaagggagtcagggccagggccagagagccggagagaggagcccccgaccgagagcccagtgacatgtcggaccctgagatgggatgggtgcctgagcccccaaccatgacgctgggggcctctcgggtggagctgcgggtgtcctgccatggcctcctggaccgggacacactcaccaaaccccacccctgcgtgctgctcaagctctactctgatgagcagtgggtggaggtagagcgcacagaggtgcttcgctcctgttccagccctgtcttctcccgggtgctggcccttgagtatttttttgaggagaagcagcccctgcagttccacgtgttcgatgccgaggacggagccaccagcccccgaaatgataccttcctcggctctacggagtgcaccttgggccagattgtgtcacaaaccaaggtcactaagccattattgctgaagaatgggaagactgcgggcaagtccaccatcacgatcgtggccgaggaggtatcaggcacaaacgactatgtgcaactcaccttcagagcctacaagctggacaacaaggatctgttcagcaagtctgaccctttcatggaaatctataagaccaacgaggaccaaagtgatcagctggtctggagaactgaggtggtgaagaacaacctgaaccccagctgggagccgttccgcctgtccctgcattccctatgcagctgtgatgttcaccgacctctcaagttcctggtgtatgactatgactccagtgggaagcatgacttcatcggcgagttcaccagcactttccaggagatgcaggaagggacggcaaaccctgggcaggagatgcagtgggactgtatcaaccccaagtatcgggacaagaagaagaattacaagagctcagggacggtagtgctggcccagtgcacggtggagaaggtgcacaccttcctggattacatcatgggtggctgccagatcagcttcacggtggccattgacttcaccgcctccaatggggacccgaggagcagccagtccctgcactgcctcagtccccgacagcccaaccactacctgcaggccctgcgtgcagtgggaggcatctgccaggactatgacagtgataagcggttcccagcttttggctttggggctcgaatcccccccaacttcgaggtgtcccatgactttgctatcaactttgacccggaaaatcctgaatgtgaagagatctcaggggtcatcgcctcctaccgtcgttgcctgccccagatccagctctacggccccaccaatgtggcccccatcatcaaccgtgtggctgagccggcccagcgggagcagagcaccggccaagccacgaagtactcggtgctgctggtgctcactgacggtgtggtgagcgacatggctgagactcgcactgctatcgtgcgtgcctcccgcctgcccatgtccatcatcatcgtaggcgtgggcaatgctgacttctctgacatgcggctgctggatggcgacgacggccccttgcgctgcccccgaggggtgcctgcagcccgagacattgtccagttcgtgcccttccgagacttcaaggatgctgccccctctgcactcgccaagtgtgtcctggctgaggtgccacggcaggtggtggagtactacgccagccagggcatcagccctggggctcccaggccctgcacactggctacgactcccagccctagcccgtgactgcctccctccggaccgacactccctcagcctctcagtgcctgtcctgaccctcgtgactccagtgaccaatgcctccacctcttggaccaggtgtgccccctgggttctggacgtgagtggtgggtcctgctcctatctctccaaaccccatacccttcaatgctgtggcccctcagtgacttccttgggtgatcctgactttctagccattaataaagagaactgctcctagc

SEQ ID NO: 6779 - DNA, 2235 bp, Homo sapiens
  source 1..2235: mol_type = unassigned DNA
agtccttcagcagatgccctcatgtgaccaggatatgaggttgggtgtccttaagcaattatgtccatttcctgtgtctccttataaaatggtggctagggaactggacatcattctcaaagctatgacgttcagcaaggtatgtgatggcttttaaggagcacgggaagatcacatcctgctgtattccgggccccataaatagcagcagagccggagctggagccggcgccagcggctggagcagcaagggagtcagggccagggccagagagccggagagaggagcccccgaccgagagcccagtgacatgtcggaccctgagatgggatgggtgcctgagcccccaaccatgacgctgggggcctctcgggtggagctgcgggtgtcctgccatggcctcctggaccgggacacactcaccaaaccccacccctgcgtgctgctcaagctctactctgatgagcagtgggtggaggtagagcgcacagaggtgcttcgctcctgttccagccctgtcttctcccgggtgctggcccttgagtatttttttgaggagaagcagcccctgcagttccacgtgttcgatgccgaggacggagccaccagcccccgaaatgataccttcctcggctctacggagtgcaccttgggccagattgtgtcacaaaccaaggtcactaagccattattgctgaagaatgggaagactgcgggcaagtccaccatcacgatcgtggccgaggaggtatcaggcacaaacgactatgtgcaactcaccttcagagcctacaagctggacaacaaggatctgttcagcaagtctgaccctttcatggaaatctataagaccaacgaggaccaaagtgatcagctggtctggagaactgaggtggtgaagaacaacctgaaccccagctgggagccgttccgcctgtccctgcattccctatgcagctgtgatgttcaccgacctctcaagttcctggtgtatgactatgactccagtgggaagcatgacttcatcggcgagttcaccagcactttccaggagatgcaggaagggacggcaaaccctgggcaggagatgcagtgggactgtatcaaccccaagtatcgggacaagaagaagaattacaagagctcagggacggtagtgctggcccagtgcacggtggagaaggtgcacaccttcctggattacatcatgggtggctgccagatcagcttcacggtggccattgacttcaccgcctccaatggggacccgaggagcagccagtccctgcactgcctcagtccccgacagcccaaccactacctgcaggccctgcgtgcagtgggaggcatctgccaggactatgacagtgataagcggttcccagcttttggctttggggctcgaatcccccccaacttcgaggtgtcccatgactttgctatcaactttgacccggaaaatcctgaatgtgaagagatctcaggggtcatcgcctcctaccgtcgttgcctgccccagatccagctctacggccccaccaatgtggcccccatcatcaaccgtgtggctgagccggcccagcgggagcagagcaccggccaagccacgaagtactcggtgctgctggtgctcactgacggtgtggtgagcgacatggctgagactcgcactgctatcgtgcgtgcctcccgcctgcccatgtccatcatcatcgtaggcgtgggcaatgctgacttctctgacatgcggctgctggatggcgacgacggccccttgcgctgcccccgaggggtgcctgcagcccgagacattgtccagttcgtgcccttccgagacttcaaggatgctgccccctctgcactcgccaagtgtgtcctggctgaggtgccacggcaggtggtggagtactacgccagccagggcatcagccctggggctcccaggccctgcacactggctacgactcccagccctagcccgtgactgcctccctccggaccgacactccctcagcctctcagtgcctgtcctgaccctcgtgactccagtgaccaatgcctccacctcttggaccaggtgtgccccctgggttctggacgtgagtggtgggtcctgctcctatctctccaaaccccatacccttcaatgctgtggcccctcagtgacttccttgggtgatcctgactttctagccattaataaagagaactgctcctagcacctcagcctctaa

SEQ ID NO: 6780 - DNA, 2130 bp, Homo sapiens
  source 1..2130: mol_type = unassigned DNA
agtccttcagcagatgccctcatgtgaccaggatatgaggttgggtgtccttaagcaattatgtccatttcctgtgtctccttataaaatggtggctagggaactggacatcattctcaaagctatgacgttcagcaaggtatgtgatggcttttaaggagcacgggaagatcacatcctgctgtattccgggccccataaatagcagcagagccggagctggagccggcgccagcggctggagcagcaagggagtcagggccagggccagagagccggagagaggagcccccgaccgagagcccagtgacatgtcggaccctgagatgggatgggtgcctgagcccccaaccatgacgctgggggcctctcgggtggagctgcgggtgtcctgccatggcctcctggaccgggacacactcaccaaaccccacccctgcgtgctgctcaagctctactctgatgagcagtgggtggaggtagagcgcacagaggtgcttcgctcctgttccagccctgtcttctcccgggtgctggcccttgagtatttttttgaggagaagcagcccctgcagttccacgtgttcgatgccgaggacggagccaccagcccccgaaatgataccttcctcggctctacggagtgcaccttgggccagattgtgtcacaaaccaaggtcactaagccattattgctgaagaatgggaagactgcgggcaagtccaccatcacgatcgtggccgaggaggtatcaggcacaaacgactatgtgcaactcaccttcagagcctacaagctggacaacaaggatctgttcagcaagtctgaccctttcatggaaatctataagaccaacgaggaccaaagtgatcagctggtctggagaactgaggtggtgaagaacaacctgaaccccagctgggagccgttccgcctgtccctgcattccctatgcagctgtgatgttcaccgacctctcaagttcctggtgtatgactatgactccagtgggaagcatgacttcatcggcgagttcaccagcactttccaggagatgcaggaagggacggcaaaccctgggcaggagatgcagtgggactgtatcaaccccaagtatcgggacaagaagaagaattacaagagctcagggacggtagtgctggcccagtgcacggtggagaaggtgcacaccttcctggattacatcatgggtggctgccagatcagcttcacggtggccattgacttcaccgcctccaatggggacccgaggagcagccagtccctgcactgcctcagtccccgacagcccaaccactacctgcaggccctgcgtgcagtgggaggcatctgccaggactatgacagtgataagcggttcccagcttttggctttggggctcgaatcccccccaacttcgaggtgtcccatgactttgctatcaactttgacccggaaaatcctgaatgtgaagagatctcaggggtcatcgcctcctaccgtcgttgcctgccccagatccagctctacggccccaccaatgtggcccccatcatcaaccgtgtggctgagccggcccagcgggagcagagcaccggccaagccacgaagtactcggtgctgctggtgctcactgacggtgtggtgagcgacatggctgagactcgcactgctatcgtgcgtgcctcccgcctgcccatgtccatcatcatcgtaggcgtgggcaatgctgacttctctgacatgcggctgctggatggcgacgacggccccttgcgctgcccccgaggggtgcctgcagcccgagacattgtccagttcgtgcccttccgagacttcaaggatgctgccccctctgcactcgccaagtgtgtcctggctgaggtgccacggcaggtggtggagtactacgccagccagggcatcagccctggggctcccaggccctgcacactggctacgactcccagccctagcccgtgactgcctccctccggaccgacactccctcagcctctcagtgcctgtcctgaccctcgtgactccagtgaccaatgcctccacctcttggaccaggtgtgccccctgggttctggacgtgagtggtgggtcctgctcctatctctcc

SEQ ID NO: 6781 - DNA, 453 bp, Homo sapiens
  source 1..453: mol_type = unassigned DNA
cagtgagtttatgtactggcgcctgtgtgtgtcaagatatgtgtgagcctgtgagtcgtgggtgcatgtgtcgccatcatttctctgtttgaatgtgtatgtgcatgccactgcaatgtgcgcatctctgcgattctgggtgtgggtgtagtgtgaaggggaagatgtgtgtcactgtgtctgtgggggtcctgcctctaagccacccccagcctgccctcctcccccggttctgtggctccctcccagggccagagagccggagagaggagcccccgaccgagagcccagtgacatgtcggaccctgagatgggatgggtgcctgagcccccaaccatgacgctgggggcctctcgggtggagctgcgggtgtcctgccatggcctcctggaccgggacacactcaccaaaccccacccctgcgtgctgctcaagctctactctgatgagca

SEQ ID NO: 6782 - DNA, 591 bp, Homo sapiens
  source 1..591: mol_type = unassigned DNA
atgtccatttcctgtgtctccttataaaatggtggctagggaactggacatcattctcaaagctatgacgttcagcaaggccccataaatagcagcagagccggagctggagccggcgccagcggctggagcagcaagggagtcagggccagggccagagagccggagagaggagcccccgaccgagagcccagtgacatgtcggaccctgagatgggatgggtgcctgagcccccaaccatgacgctgggggcctctcgggtggagctgcgggtgtcctgccatggcctcctggaccgggacacactcaccaaaccccacccctgcgtgctgctcaagctctactctgatgagcagtgggtggaggtagagcgcacagaggtgcttcgctcctgttccagccctgtcttctcccgggtgctggcccttgagtatttttttgaggagaagcagcccctgcagttccacgtgttcgatgccgaggacggagccaccagcccccgaaatgataccttcctcggctctacggagtgcaccttgggccagattgtgtcacaaaccaaggtcactaagccattattgctgaagaat

SEQ ID NO: 6783 - DNA, 964 bp, Homo sapiens
  source 1..964: mol_type = unassigned DNA
actgtgtctgtgggggtcctgcctctaagccacccccagcctgccctcctcccccggttctgtggctccctcccaggctgtggccctgccccttccctcttctccctcccaatccatccacgcggggggagctggtgctgcgcccccccccacccctccccatccaggccccataaatagcagcagagccggagctggagccggcgccagcggctggagcagcaagggagtcagggccagggccagagagccggagagaggagcccccgaccgagagcccagtgacatgtcggaccctgagatgggatgggtgcctgagcccccaaccatgacgctgggggcctctcgggtggagctgcgggtgtcctgccatggcctcctggaccgggacacactcaccaaaccccacccctgcgtgctgctcaagctctactctgatgagcagtgggtggaggtagagcgcacagaggtgcttcgctcctgttccagccctgtcttctcccgggtgctggcccttgagtatttttttgaggagaagcagcccctgcagttccacgtgttcgatgccgaggacggagccaccagcccccgaaatgataccttcctcggctctacggagtgcaccttgggccagattgtgtcacaaaccaaggtcactaagccattattgctgaagaatgggaagactgcgggcaagtccaccatcacgatcgtggccgaggaggtatcaggcacaaacgactatgtgcaactcaccttcagagcctacaagctggacaacaaggatctgttcagcaagtctgaccctttcatggaaatctataagaccaacgaggaccaaagtgatcagctggtctggagaactgaggtggtgaagaacaacctgaaccccagctgggagccgttccgcctgtccctgcattccctatgcagctgtgatgttcaccgacctctcaagttcctg

SEQ ID NO: 6784 - DNA, 543 bp, Homo sapiens
  source 1..543: mol_type = unassigned DNA
gctgtattccgggttagtttgagtgagtacatgtgtgacaaggacagcccagtgttcctgtatatgtgactgcagatatccttagctagtgtaacaatgttgaaagtgatgtgagaagggcagcagagccggagctggagccggcgccagcggctggagcagcaagggagtcagggccagggccagagagccggagagaggagcccccgaccgagagcccagtgacatgtcggaccctgagatgggatgggtgcctgagcccccaaccatgacgctgggggcctctcgggtggagctgcgggtgtcctgccatggcctcctggaccgggacacactcaccaaaccccacccctgcgtgctgctcaagctctactctgatgagcagtgggtggaggtagagcgcacagaggtgcttcgctcctgttccagccctgtcttctcccgggtgctggcccttgagtatttttttgaggagaagcagcccctgcagttccacgtgttcgatgccgaggacggagccaccagcccccgaaatgatacctt

SEQ ID NO: 6785 - DNA, 733 bp, Homo sapiens
  source 1..733: mol_type = unassigned DNA
agatgccctcatgtgaccaggatatgaggttgggtgtccttaagcaattatgtccatttcctgtgtctccttataaaatggtggctagggaactggacatcattctcaaagctatgacgttcagcaaggtatgtgatggcttttaaggagcacgggaagatcacatcctgctgtattccgggttagtttgagccccataaatagcagcagagccggagctggagccggcgccagcggctggagcagcaagggagtcagggccagggccagagagccggagagaggagcccccgaccgagagcccagtgacatgtcggaccctgagatgggatgggtgcctgagcccccaaccatgacgctgggggcctctcgggtggagctgcgggtgtcctgccatggcctcctggaccgggacacactcaccaaaccccacccctgcgtgctgctcaagctctactctgatgagcagtgggtggaggtagagcgcacagaggtgcttcgctcctgttccagccctgtcttctcccgggtgctggcccttgagtatttttttgaggagaagcagcccctgcagttccacgtgttcgatgccgaggacggagccaccagcccccgaaatgataccttcctcggctctacggagtgcaccttgggccagattgtgtcacaaaccaaggtcactaagccattattgctgaagaatgggaagactgcgggcaagtccaccatcacg

SEQ ID NO: 6786 - DNA, 657 bp, Homo sapiens
  source 1..657: mol_type = unassigned DNA
agatatccttagctagtgtaacaatgttgaaagtgatgtgagaaggggccccataaatagcagcagagccggagctggagccggcgccagcggctggagcagcaagggagtcagggccagggccagagagccggagagaggagcccccgaccgagagcccaggtgttccctttccagagtccaggccacctgctctgtccccacagtgacatgtcggaccctgagatgggatgggtgcctgagcccccaaccatgacgctgggggcctctcgggtggagctgcgggtgtcctgccatggcctcctggaccgggacacactcaccaaaccccacccctgcgtgctgctcaagctctactctgatgagcagtgggtggaggtagagcgcacagaggtgcttcgctcctgttccagccctgtcttctcccgggtgctggcccttgagtatttttttgaggagaagcagcccctgcagttccacgtgttcgatgccgaggacggagccaccagcccccgaaatgataccttcctcggctctacggagtgcaccttgggccagattgtgtcacaaaccaaggtcactaagccattattgctgaagaatgggaagactgcgggcaagtccaccatcacgatcgtggccgaggaggtatcaggc

SEQ ID NO: 6787 - DNA, 2657 bp, Homo sapiens
  source 1..2657: mol_type = unassigned DNA
gcgcccggcaggcgttcagggaagcgcggccacgcctgggccggccaccatttcccgggcgccgcggcggcgccgactcgcgggcagcggcccctcagtgcgcccagccgggcccccgaacgccgggagcatgagcgcgggctcggagcgcggggcggcggcaacccccgggggtttgcccgcgccctgcgcctcgaaggtggagctgcggctcagctgccggcacctgctggaccgcgacccgctcaccaagtccgaccccagcgtggcgttgctgcagcaggcgcagggccagtgggtgcaggtgggcagaaccgaggtggtccggagcagcctgcatcccgtgttctccaaggtcttcacggtggactactacttcgaggaggtgcagaggctgcgctttgaggtgtacgacacgcatgggcccagcggcttcagctgtcaggaggacgatttcctggggggcatggagtgcaccctggggcagccagcccaaaagtggcttctgcaagtcgtgatgagagtgtctgttgatgtgctgggccctgctggacactgcgctaagcacttcctgtgctgcacggaatcctcacaccttgccaggacgggtccttcttttttattgaggtatgatgacctctgcctcccctgggcgactgctggcgccgtgaggtggtggacgtgcaggggtggccacacgcagggatggcagattgtggcccagaagaaggtgacccgcccgctgctgctcaagtttggcaggaacgctggcaagtccaccatcacggtgatcgccgaggacatctcggggaacaacggctacgtggagctctccttccgggccaggaagctggacgacaaggacctcttcagcaagtccgaccccttcctggagctctacagggtcaacgacgaccagggcttgcagctggtgtacaggacggaggtggtgaagaacaacctgaacccggtgtgggaggccttcaaagtctctctgagttccctctgcagctgcgaggagacaaggcctctaaagtgcctggtctgggattacgactctcgaggaaagcacgacttcatcggagaattctctaccaccttcgaggagatgcagaaggcctttgaggaggggcaggcccagtgggactgtgtgaaccccaaatacaagcagaagagacgcagttataagaactcaggagtggtcgtcctggctgacctcaagttccacagggtgtactccttcctggactatatcatgggcggctgccagatccacttcaccgtggccattgacttcaccgcctccaatggagacccgcggaacagctgctccctgcactacatcaacccctaccagccgaacgagtacctgaaggcactggtgtccgtgggcgagatctgccaggactatgacagtgacaagaggttttccgctttggggtttggagcccggatccctcccaagtatgaggtgtcccatgactttgccatcaatttcaaccctgaggacgatgagtgtgaaggcatccagggcgtggtggaggcctaccagaactgcctgcccagggtccagctctacggccccaccaacgtggcgcccatcatctccaaggtggcacgcgtggcggcggccgaggagagcaccgggaaagcctctcaatactacatcctgctgatcctgacggacggcgtggtgaccgacatggccgacacacgggaggccattgtgcgtgcctcacgcctgcccatgtccatcatcatcgtgggcgtgggcaacgccgacttcaccgacatgcaggtcctggacggcgacgacggcgtcctgcgctccccacggggtgagcccgcgctccgggacatcgtacagttcgtgcccttccgggagctcaagaacgcatcccctgcggcgctggccaagtgcgtgctggccgaggtcccgaagcaggtggtggagtactacagccacagaggcctgcccccgagaagcctgggtgtccctgccggagaggccagcccaggctgcacaccgtgaagatgtggagggcgtagggtgggggcagtgaggaatgggtccgtacagcctctgtctgcaacatgcttggggtcccttaagctccctccgacctcccagaagcctccagtccccaccaggccccactcccagtcctcctgggatcctgctggcttgggcccggctctggggcccccaaggccgaagggtgacaaaatacaggcccccatgcctggccctgcctgagccaggtgggtggagggagggagatcatgagggacttggagggagctgggagttcatccacgggagaccctgccccgatgagaaggggcagggactgggggctctgctttgcgtctaacctttgtgggggagggccagcaaggcagtccccccacgcccgagaaagcctgggggacccagacacctgtccccacagtcaaagcctggggacccagacatcctgtccccacagtcagcctcctgtccctgctggtgcccccacacccacctaccctgtgctttttgccgtcgggcctctgcacctgggtccatggggtctgcggggtctgcggggtctgcctggcctgtgggttctgccggtggggcttcaggagtaataaagtgtcaccctatccttgta

SEQ ID NO: 6788 - DNA, 2433 bp, Homo sapiens
  source 1..2433: mol_type = unassigned DNA
cgcgcccggcaggcgttcagggaagcgcggccacgcctgggccggccaccatttcccgggcgccgcggcggcgccgactcgcgggcagcggcccctcagtgcgcccagccgggcccccgaacgccgggagcatgagcgcgggctcggagcgcggggcggcggcaacccccgggggtttgcccgcgccctgcgcctcgaaggtggagctgcggctcagctgccggcacctgctggaccgcgacccgctcaccaagtccgaccccagcgtggcgttgctgcagcaggcgcagggccagtgggtgcaggtgggcagaaccgaggtggtccggagcagcctgcatcccgtgttctccaaggtcttcacggtggactactacttcgaggaggtgcagaggctgcgctttgaggtgtacgacacgcatgggcccagcggcttcagctgtcaggaggacgatttcctggggggcatggagtgcaccctggggcagattgtggcccagaagaaggtgacccgcccgctgctgctcaagtttggcaggaacgctggcaagtccaccatcacggtgatcgccgaggacatctcggggaacaacggctacgtggagctctccttccgggccaggaagctggacgacaaggacctcttcagcaagtccgaccccttcctggagctctacagggtcaacgacgaccagggcttgcagctggtgtacaggacggaggtggtgaagaacaacctgaacccggtgtgggaggccttcaaagtctctctgagttccctctgcagctgcgaggagacaaggcctctaaagtgcctggtctgggattacgactctcgaggaaagcacgacttcatcggagaattctctaccaccttcgaggagatgcagaaggcctttgaggaggggcaggcccagtgggactgtgtgaaccccaaatacaagcagaagagacgcagttataagaactcaggagtggtcgtcctggctgacctcaagttccacagggtgtactccttcctggactatatcatgggcggctgccagatccacttcaccgtggccattgacttcaccgcctccaatggagacccgcggaacagctgctccctgcactacatcaacccctaccagccgaacgagtacctgaaggcactggtgtccgtgggcgagatctgccaggactatgacagtgacaagaggttttccgctttggggtttggagcccggatccctcccaagtatgaggtgtcccatgactttgccatcaatttcaaccctgaggacgatgagtgtgaaggcatccagggcgtggtggaggcctaccagaactgcctgcccagggtccagctctacggccccaccaacgtggcgcccatcatctccaaggtggcacgcgtggcggcggccgaggagagcaccgggaaagcctctcaatactacatcctgctgatcctgacggacggcgtggtgaccgacatggccgacacacgggaggccattgtgcgtgcctcacgcctgcccatgtccatcatcatcgtgggcgtgggcaacgccgacttcaccgacatgcaggtcctggacggcgacgacggcgtcctgcgctccccacggggtgagcccgcgctccgggacatcgtacagttcgtgcccttccgggagctcaagaacgcatcccctgcggcgctggccaagtgcgtgctggccgaggtcccgaagcaggtggtggagtactacagccacagaggcctgcccccgagaagcctgggtgtccctgccggagaggccagcccaggctgcacaccgtgaagatgtggagggcgtagggtgggggcagtgaggaatgggtccgtacagcctctgtctgcaacatgcttggggtcccttaagctccctccgacctcccagaagcctccagtccccaccaggccccactcccagtcctcctgggatcctgctggcttgggcccggctctggggcccccaaggccgaagggtgacaaaatacaggcccccatgcctggccctgcctgagccaggtgggtggagggagggagatcatgagggacttggagggagctgggagttcatccacgggagaccctgccccgatgagaaggggcagggactgggggctctgctttgcgtctaacctttgtgggggagggccagcaaggcagtccccccacgcccgagaaagcctgggggacccagacacctgtccccacagtcaaagcctggggacccagacatcctgtccccacagtcagcctcctgtccctgctggtgcccccacacccacctaccctgtgctttttgccgtcgggcctctgcacctgggtccatggggtctgcggggtctgcggggtctgcctggcctgtgggttctgccggtggggcttcaggagtaataaagtgtcaccctatccttgta

SEQ ID NO: 6789 - DNA, 1430 bp, Homo sapiens
  source 1..1430: mol_type = unassigned DNA
cagcttggccacctggctgcacagcgacgccaccgtcagcttcgccagagggaaggactgcagaatccggccctcctgcggggggcgcttctgaggctctggggacgtcgtcctagtggggaagagcgacagcggacgcagcagccggtggtaaaaccgctggagctcaggctcgggcttcgggggctccatcatagagccggcggccgccaccgtccaggaacagaaagccgaggggttactaaggcaaccaggagcccgacggcccgagtgcgcctgcgcggccgccacccggtggctgacgaagcagggccttgcgtgcgcacgcactaggaggaggagttaagggtggctttagaggctcagtccccgcgacgccgcgctggttggtgctcctgcgccggaggagttctgcgtctcggggtggtgactgggtccagaatggcttcggattcggggaaccaggggaccctctgcacgttggagttcgcggtgcagatgacctgtcagagctgtgtggacgcggtgcgcaaatccctgcaaggggtggcaggtgtccaggatgtggaggtgcacttggaggaccagatggtcttggtacacaccactctacccagccaggaggtgcaggctctcctggaaggcacggggcggcaggcggtactcaagggcatgggcagcggccagttgcagaatctgggggcagcagtggccatcctgggggggcctggcaccgtgcagggggtggtgcgcttcctacagctgacccctgagcgctgcctcatcgagggaactattgacggcctggagcctgggctgcatggactccacgtccatcagtacggggaccttacaaacaactgcaacagctgtgggaatcactttaaccctgatggagcatctcatgggggcccccaggactctgaccggcaccgcggagacctgggcaatgtccgtgctgatgctgacggccgcgccatcttcagaatggaggatgagcagctgaaggtgtgggatgtgattggccgcagcctgattattgatgagggagaagatgacctgggccggggaggccatcccttatccaagatcacagggaactccggggagaggttggcctgtggcatcattgcacgctccgctggccttttccagaaccccaagcagatctgctcttgcgatggcctcaccatctgggaggagcgaggccggcccatcgctggcaagggccgaaaggagtcagcgcagccccctgcccacctttgagcaggacctcaccttggctctgttgctgtcctccagggcgagcactttccacttccagagggggccagagggactttgcctgcccagtctttggagagctcagtacagggcaggagctgctgtggtgttcccttggcaaatgaaagttttattttcgtttggga

SEQ ID NO: 6790 - DNA, 2825 bp, Homo sapiens
  source 1..2825: mol_type = unassigned DNA
cgcgcagggacgccgcaggcggcgataggatccggactacagctcccagcgcgccccagttcccgcccccgcctccggagcccgacgctgcagcggctcttctcgaaaggttctttccgcctgtgcagctcgccggctcaatactccgggggtctgggtggggggctcaaacgcagggctctgggacgcaggcactgctccaggtgatagtgcgggaacatggccttgcagctgggcaggctgagctcgggcccctgctggctcgtggcgcggggcggctgcggagggccccgcgcctggtcccagtgcggcggcggagggctccgagcctggtcccagcgcagcgcagccggacgcgtctgccggccccctggcccggctggcacggagcagagccgcgggctggggcacggctcgacgtcgagaggcggcccctgggtggggacagggctggccgcggcgctggcggggttggtggggctggccaccgccgccttcgggcatgtgcagcgggcggagatgttgcctaagacctcggggacgcgggccacttcgctggggaggccggaggaggaggaggatgagctggcccaccgctgcagcagcttcatggccccgcctgtgaccgacctgggcgagctgcgaaggaggccgggcgacatgaagaccaagatggagctgctgattctggagacccaggcccaggtgtgccaggctctggcacaggtagacgggggcgccaacttttctgtggaccggtgggagaggaaggaaggaggtggcggcatcagctgtgtacttcaagatgggtgtgttttcgaaaaggctggggtgagcatttctgttgttcatggaaatctttcagaggaagctgcaaaacaaatgagaagcagaggaaaagttctgaagactaaagatggtaaattgccattttgtgctatgggcgtgagctctgttatccaccccaagaatcctcatgctcctactatccatttcaactacagatactttgaagtagaagaagctgatggcaacaagcagtggtggtttggtggtggatgtgacctcactccaacatacttgaatcaagaagacgctgtccattttcacagaactctgaaggaggcttgtgaccagcatggtccagatctctaccccaaatttaaaaaatggtgtgatgattacttctttatagcccatcgtggagaacggcggggcattggtggtatcttttttgatgatcttgactctccgtccaaggaggaggtgtttcgctttgtacagagctgtgccagggctgtagttccttcttacattccccttgtgaaaaagcactgtgatgactcattcaccccccaggagaagctgtggcagcagctcagaagaggacggtatgtagaatttaatctgctgtatgatcggggcacaaagtttggcctcttcactccaggatccagaattgaaagtatcttgatgtctttacctctaactgcccgatgggagtacatgcattcaccctcagagaattccaaagaagctgaaattctggaagttctacgccatccaagggactgggtgcgttgatgcaggcagaatggctgtgcaggggtttggagggcacacgatgtgtgctccccatgccactggtcggcactttgccactgtgtggcagttacccgtgccttagtcttctccactctgcaccctacctcgtgggcagatgataacatgttttggatgctgtcagtgatgaatggtgagatggcagattgtcagagtcaattgattaaacctcatttatacttctagtgtcattttatatgactagtttacaaaataggacattgagtttccaagtattgagataagggaatataaatagtattatatgtatcaggaaatctctcatcttgtttttgtttcatgtattttttaaagttttcatttgtgccacaaaaatctgtcgtggaatatattttattttcattaattcagtgaagttgagacttcatagtaattttagaatgcaacttgaaggtaaaaattttactttgtcaatactgaagtctctgctgtaatccttatatatctttctccagagaacataatattgtcaaatagatacacatttttctaataggtatttagaagcacttgaaataatctctgcatgtgttacaattcagttatttctgtagtttgtaaactctaaagtgacattactattattttagagatgtctaagttgtaattttgatttttgtggaaccattgtttgttaatgttgggattctctgcacttttgaatgtgaaagcttatatccctgaattctgatacttaagagttttctatttcagacatctctgtgtggaagttgagactaagaataatcctagggatgtcatgaatttaggcaatgtttctcatttggaaaatgaaatgagaaataatttccttctttaaagcaagtatatatagtatgagaaacttggaggcatttcatacacacgtttcttaggaaaatggacacattgaaaatgtcctcttttttatattagagattctgcagctctttgctcttaagagcaaatcacaacaggattcttaatgtatgatttctttgttcatatattatgaatgtattattttatttgcttcgtaataaagtttataaggaagagcatctcatacatatcattatcgtggaacacgttgaatgtttgtgattctgtgtggcctttttggggctggaaaatgtatgaattcttcaactgtcttacaagagatctgctaataaattttattattaaataagactaagaaa

SEQ ID NO: 6791 - DNA, 1777 bp, Homo sapiens
  source 1..1777: mol_type = unassigned DNA
tacagctttgattttataacatcctgctaatttttgttcttacagaaatacactttcgggaaatggcctctaaatcctggctgaattttttaaccttcctctgtggatcagcaataggatttcttttatgttctcagctatttagtattttgttgggagaaaaggttgacacccagcctaatgttcttcataatgatcctcatgcaaggcattcagatgataatggacagaatcatctagaaggacaaatgaacttcaatgcagattctagccaacataaagatgagaacacagacattgctgaaaacctctatcagaaagttagaattctttgctgggttatgaccggccctcaaaacctagagaaaaaggccaaacacgtcaaagctacttgggcccagcgttgtaacaaagtgttgtttatgagttcagaagaaaataaagacttccctgctgtgggactgaaaaccaaagaaggcagagatcaactatactggaaaacaattaaagcttttcagtatgttcatgaacattatttagaagatgctgattggtttttgaaagcagatgatgacacgtatgtcatactagacaatttgaggtggcttctttcaaaatacgaccctgaagaacccatttactttgggagaagatttaagccttatgtaaagcagggctacatgagtggaggagcaggatatgtactaagcaaagaagccttgaaaagatttgttgatgcatttaaaacagacaagtgtacacatagttcctccattgaagacttagcactggggagatgcatggaaattatgaatgtagaagcaggagattccagagataccattggaaaagaaacttttcatccctttgtgccagaacaccatttaattaaaggttatctacctagaacgttttggtactggaattacaactattatcctcctgtagagggtcctggttgctgctctgatcttgcagtttcttttcactatgttgattctacaaccatgtatgagttagaatacctcgtttatcatcttcgtccatatggttatttatacagatatcaacctaccttacctgaacgtatactaaaggaaattagtcaagcaaacaaaaatgaagatacaaaagtgaagttaggaaatccttgaaagaaaatcatgaatgaacaaaggtaatatgtctagcactgcactgaaaaaggacttctgcatttctgacatagaacactggaatcccagtgaggaattctaagtgaacattccttatagaaacctttcacatgaatgactataaactgaagctttaaatgagctgtgaagtgtgttaaaatgtgttttgatacagtaatatataaatatgtctatatatatgaggaacttgtgttttttaaatggtggccaggtagaggaactagaaaagagattttgttgcctgttttctgaccatctgtgttattgtcactgagaaactaaaatagtaaatttactaaaactacactgcaccatgttagtaataaacagatctgccttaaagaaaagaaaattttagaaagaaatattgttgctcagtgttgttaatatagctcaagaattgagtttatatttgcagtatgctataaatgatacccccctaccacacccacacacacagtttttgtctaatgaaaatgttgctgtgattatttataattggtagtatttcttccagaagaagctaaaataagactggcacttaccctgaagtgcattaataaaaccacactttaaaatta

SEQ ID NO: 6792 - DNA, 930 bp, Homo sapiens
  source 1..930: mol_type = unassigned DNA
atggcctctaaatcctggctgaattttttaaccttcctctgtggatcagcaataggatttcttttatgttctcagctatttagtattttgttgggagaaaaggttgacacccagcctaatgttcttcataatgatcctcatgcaaggcattcagatgataatggacagaatcatctagaaggacaaatgaacttcaatgcagattctagccaacataaagatgagaacacagacattgctgaaaacctctatcagaaagttagaattctttgctgggttatgaccggccctcaaaacctagagaaaaaggccaaacacgtcaaagctacttgggcccagcgttgtaacaaagtgttgtttatgagttcagaagaaaataaagacttccctgctgtgggactgaaaaccaaagaaggcagagatcaactatactggaaaacaattaaagcttttcagtatgttcatgaacattatttagaagatgctgattggtttttgaaagcagatgatgacacgtatgtcatactagacaatttgaggtggcttctttcaaaatacgaccctgaagaacccatttactttgggagaagatttaagccttatgtaaagcagggctacatgagtggaggagcaggatatgtactaagcaaagaagccttgaaaagatttgttgatgcatttaaaacagacaagtgtacacatagttcctccattgaagacttagcactggggagatgcatggaaattatgaatgtagaagcaggagattccagagataccattggaaaagaaacttttcatccctttgtgccagaacaccatttaattaaaggttatctacctagaacgttttggtactggaattacaactattatcctcctgtagaggtaagtttagaaattttattactatgtcaatacttggactga

SEQ ID NO: 6793 - DNA, 591 bp, Homo sapiens
  source 1..591: mol_type = unassigned DNA
agacttcgggtggcggctgcgccataggcgggccacggcctggacgcgctgcggggaggggcggagcgagcgggcgggagcgcgcgctgggcccgccttggccgccgccgctgtgctgccgctgccggggaataatctgggcggcagcgggcggcctcggctagcggccacgagccacttctgcggctgcccagagaagcaaaggtcaccagtcccaagtcgtccccctctccgccccccaggaggggcgagagggagccgcagctgatgtcagaaatacactttcgggaaatggcctctaaatcctggctgaattttttaaccttcctctgtggatcagcaataggatttcttttatgttctcagctatttagtattttgttgggagaaaaggttgacacccagcctaatgttcttcataatgatcctcatgcaaggcattcagatgataatggacagaatcatctagaaggacaaatgaacttcaatgcagattctagccaacataaagatgagaacacagacattgctgaaaacctctatcagaaagttagaattctttgctgggttatgaccggccctcaaaaccta

SEQ ID NO: 6794 - DNA, 802 bp, Homo sapiens
  source 1..802: mol_type = unassigned DNA
gtcaaaatattggatttactctcagagtttctatcctgctcaatttgaattttcttcacggaagtgttttcctcaggaaagatattttattggctatttctgagttatttgagtacataagccacccagtaccttctgatcttcccattttctcttagtgtgtggctgagatatttttattctactcagccataaattggagtcagaagccttctcctttttactgttattttcacaatatttacttgctgagaatcccactcaagctgctaaaactaggcatgctctgtatgagttctactgctgttgtctgtggtttgggtggggcaaaacccactggcattctgaggctcatggggatgttttttcagttggctttctggaggatgtgaaatacactttcgggaaatggcctctaaatcctggctgaattttttaaccttcctctgtggatcagcaataggatttcttttatgttctcagctatttagtattttgttgggagaaaaggttgacacccagcctaatgttcttcataatgatcctcatgcaaggcattcagatgataatggacagaatcatctagaaggacaaatgaacttcaatgcagattctagccaacataaagatgagaacacagacattgctgaaaacctctatcagaaagttagaattctttgctgggttatgaccggccctcaaaacctagagaaaaaggccaaacacgtcaaagctacttgggcccagcgttgtaacaaagtgttgtttatgagttcagaagaaaataaagacttccctgctg

SEQ ID NO: 6795 - DNA, 6208 bp, Homo sapiens
  source 1..6208: mol_type = unassigned DNA
agcgggcgggagcgcgcgctgggcccgccttggccgccgccgctgtgctgccgctgccggggaataatctgggcggcagcgggcggcctcggctagcggccacgagccacttctgcggctgcccagagaagcaaaggtcaccagtcccaagtcgtccccctctccgccccccaggaggggcgagagggagccgcagctgatgtcagaaatacactttcgggaaatggcctctaaatcctggctgaattttttaaccttcctctgtggatcagcaataggatttcttttatgttctcagctatttagtattttgttgggagaaaaggttgacacccagcctaatgttcttcataatgatcctcatgcaaggcattcagatgataatggacagaatcatctagaaggacaaatgaacttcaatgcagattctagccaacataaagatgagaacacagacattgctgaaaacctctatcagaaagttagaattctttgctgggttatgaccggccctcaaaacctagagaaaaaggccaaacacgtcaaagctacttgggcccagcgttgtaacaaagtgttgtttatgagttcagaagaaaataaagacttccctgctgtgggactgaaaaccaaagaaggcagagatcaactatactggaaaacaattaaagcttttcagtatgttcatgaacattatttagaagatgctgattggtttttgaaagcagatgatgacacgtatgtcatactagacaatttgaggtggcttctttcaaaatacgaccctgaagaacccatttactttgggagaagatttaagccttatgtaaagcagggctacatgagtggaggagcaggatatgtactaagcaaagaagccttgaaaagatttgttgatgcatttaaaacagacaagtgtacacatagttcctccattgaagacttagcactggggagatgcatggaaattatgaatgtagaagcaggagattccagagataccattggaaaagaaacttttcatccctttgtgccagaacaccatttaattaaaggttatctacctagaacgttttggtactggaattacaactattatcctcctgtagagggtcctggttgctgctctgatcttgcagtttcttttcactatgttgattctacaaccatgtatgagttagaatacctcgtttatcatcttcgtccatatggttatttatacagatatcaacctaccttacctgaacgtatactaaaggaaattagtcaagcaaacaaaaatgaagatacaaaagtgaagttaggaaatccttgaaagaaaatcatgaatgaacaaaggtaatatgtctagcactgcactgaaaaaggacttctgcatttctgacatagaacactggaatcccagtgaggaattctaagtgaacattccttatagaaacctttcacatgaatgactataaactgaagctttaaatgagctgtgaagtgtgttaaaatgtgttttgatacagtaatatataaatatgtctatatatatgaggaacttgtgttttttaaatggtggccaggtagaggaactagaaaagagattttgttgcctgttttctgaccatctgtgttattgtcactgagaaactaaaatagtaaatttactaaaactacactgcaccatgttagtaataaacagatctgccttaaagaaaagaaaattttagaaagaaatattgttgctcagtgttgttaatatagctcaagaattgagtttatatttgcagtatgctataaatgatacccccctaccacacccacacacacagtttttgtctaatgaaaatgttgctgtgattatttataattggtagtatttcttccagaagaagctaaaataagactggcacttaccctgaagtgcattaataaaaccacactttaaaattatcatgggccttgactatattatatacttgattctaattagtcatcttttacgcaatctctgttgtctcttttctaaatgtgtttagccactcttgaataccattctccactattaacattaatttactcaaaccgttcatagcattctgtaaacatgtattttacatatttgttcccaaatttgcccattgttcattatgggtaactaataataaatttaatgctgtttcaggatgcttttcttataacagtgccactctcaggaattactaagtgacattttaaattgatattttaaactctttccaactacatagttatggtttatttcattctcatcctgttgggatgagaacttgtttgtgcctttcataacttgtttaaagcagagttttaaaattagtttataggatctgaggtggctattagttacagtggcaagattatttagaaagcaagattttgatgagaattaaaaacaatagaaaatgtagagtgcttaaacaaaaatgttatattttgaaagagtagatacttaatttataaataacagtctgaaggttggtgctattttgggataattgttttgctaatggataattctaacaatgcagaatacctagtcaagactgtcatcaaaaacattcacaaatgtttcattctatttttagtgactctgtttaaagagtttctgaaaggaaagaaattttttatttttattatctttagcagtactgagtgtcatagcagaatattttacagactttctatgagattatttttatggtacaaagtatttacatttccctcatgtttatcattatgccaattttacatggcagtcatgccactgactctgctatttagctaagtaatttcttttttcggagactgtctcactctgtctcccaggctggactgcagtggtgcgattctcctgcctcagcctcccgagtagcggggattacaggcacgcgctgccacgccccgccagttttcatatttttagtagagacagggttttgccgtgttggccaggctggtcttgaactcctgacctcaggtgatccacccaccttggcatcccaaagtgctgggattacgagcgtgagtcacagcacccggctaagtaatttctatttattgtgccaaaacatgtcaaaatcatgacctctttgaatggtatatttgagaggatgttcatttcattggttaaccatggactactctgtccacgtagtgaaaacatgcaccagtttttacctattatcatggtagtatcatctgccaaaatttcaaggcattcattttattctttgaacaactcttcaccatggtgtggacatgaattttcatatgtgttacttgactagaagtataaatggtttactatagatatccaaaaaccttgagatttgctcataggaaatgaatattgtgatgaatcctgggctctagagtcagacttgcttgggtttaaattcttgctctaacacttactgtttttgtaaccttgagcaattttaatctctctgtgtctcaatttcctcatcttttaattagggatgataatactacctacctcacaggatttttatgaggattaaataaatgtaaggtttttagaacattgatagggagcaataaatagaagattgtattattattctgttaccttggagtgtaagtactgcatttaagtgaatgaaaaatttgctttgaccagatactgaaggaaataagtaatagctagtatttatccaatgccaactgtatgctaggtactgtgcttagataatctgtgtataatagtgttaatcctcaaaatttgggtgttatacccctattatagataaggaaactgaggctcagagacaaagtaactttgtcactgtcacaaagctagtaagtaacagaggtaggatttatattcaaaaccctgtgtgttcattggaaccgtatcaggcttggggctattcatgtagcattatttccatttttatgtatatgatatatgacgtctgatgcattggccagtaatagtcaaattaacccagccaaattgtcacagtgattcttaaactgtggttctcacacttgcccaggatgttgttaaatgcagatctgaagaccccaatctcagaaattcaaatttaagcatggggcccaagagtatgcattcttaccagataccttgggcagtgactgtcaaaagtctggtcccaacaaacagcattaacgtcacctgggaacttgttggaaatgcagcctctctcggggcctcatctcagatcagatctactaaatcagatactctaggggcaggggcaggggcaggggctagcagttgtgtttaagcaaactctgcaggtgtctttcttatcctagtttgagaaccaatacccaacaacctacgtgattttggtgcaagtagtgtttgaaacacactgaagattactgcccaattactaagacatttttcaaaaagcatgttttaaatcagtgtagtccaggatcacactatattaaatataaagataacttaaaggatcattggatcattcattttggccaaatttttagcttctccaaagtgactaacatcagggcctacaataaaatctgtaattctccaagtttagtaattttatattgaggcaggaagggctcattaagtactaataagtacataatttattaaaaacatacataagtgtcatcaaaaaggtccacaattgttagtaaaaaaaattaaattgaagtagtaaatgctgttttataacatacatttttctgctaattcattctgttttgtgtgacctaataaagcaaaagaaaaataaaaaagcaattctccaagtacttcatagagcacataaaaccagatttcatgatgatgatgtattcactatcttttagattaagatctttgttatttggtaaatgatttcagtatggttttaaaacataaggcttttgatgtcttatgttctctaataatggtatgcttgtattttctagtgggaagttcatagataaagcagatttttgtcccagtttgctttcaaatataaatttcagagggctttttcttactgtaatgaggtatgaaaataaatcattgatcagctcttaatattttttgaatacagaattggatttgagcagtaaatttgctaactggttattttcacaattttcttgaatattaatttttcacttctttgagactgtcaaactatagttactaccaggttgatgcactgtacttgaaagaatcccttgattaaattacatctagcattttatttgccatttcaattttcagttcattagactataattctttgacagtttctgcctggtgtttattgcccttctttgtttgctttattactaacttccattttctagttactcttaaatgctgccttcacaaggttaatttggctgttaatagtgattagaatttttatcacttaattgataattttaagcctactaactagggttccctatgaaattgaaagtaaaagtctaagaataatgcctgctggctctcgagatacttgccctacttaaaaatctataatttaaaattaattctatgtctacaattattaaaggaagtaaagttatttgggttcttccactcacccttttctcaaaaacaacaacaaaaaacaaaactcattttatttttctactttatagtaggcctgacagaaacatagtgaagcaatctgggaggcaacctgtggtagattttatgctaaatgttaatgtaacctctgttgattttttaaaaatgtgtttatatataagatttgaaataaaaactttaatacaggctagaataaggaattttacaaattctctttagagcaaccaacattaaagttttagagttgaattttgctctatttcaactcccttacctctctagttttcagtttatattaagttttaataactttgcggggccctgcaaattaataatctacatgaagtatattattagagggaaactaatcttactgctaagcagtgtgttgtactacatagtgaatgttcgtgttttggaatttaaaaattatttaaggtaatggtgttacgaatggtttaaaaatgtctggtgacttgcttatttttaagtgatcaccattaagtcagaaaaatgtatttttaaatgtttcttgaagtgccttttgaacatttttaaacagcggatttaaataatgcataaaataaattgccatgttcaaagttg

SEQ ID NO: 6796 - DNA, 3136 bp, Homo sapiens
  source 1..3136: mol_type = unassigned DNA
gcggtgagcgctggggctgcgcgggcggcaggcaacggctgaggcggcggcggcggcggcggcggcgtgggttgggctcgagcgggcggcggcgcctcagactccccggaacgggagcccacgcgggcgggcgcctgaaacaaagggaagcgggcgtccgggcgccgcgggtgggcggtcagtcggtcagcgcggagccagccagcgggtgcccgcgcaagccccgagcgcggccggccggcgcggcctcagggcgggaagatgccgcgcgtcgtgcccgaccagagaagcaagttcgagaacgaggagttttttaggaagctgagccgcgagtgtgagattaagtacacgggcttcagggaccggccccacgaggaacgccaggcacgcttccagaacgcctgccgcgacggccgctcggaaatcgcttttgtggccacaggaaccaatctgtctctccagttttttccggccagctggcagggagaacagcgacaaacacctagccgagagtatgtcgacttagaaagagaagcaggcaaggtatatttgaaggctcccatgattctgaatggagtctgtgttatctggaaaggctggattgatctccaaagactggatggtatgggctgtctggagtttgatgaggagcgagcccagcaggaggatgcattagcacaacaggcctttgaagaggctcggagaaggacacgcgaatttgaagatagagacaggtctcatcgggaggaaatggaggtgagagtttcacagctgctggcagtaactggcaagaagacaacaagaccctagtcctggttccaatttaggtggtggtgatgacctcaaacttcgttaattaatagcacagcagatgtgtgctgcccatctttacatacacattgcttctagttggcagaaataattgattaaaagaccagaaactgtgataactggaggtactacggtctatttctcaaccttaggcagtaatagacatcacaaactgccatggttttgcactatgattataatacctgcatttctaattttttaagcatgtagccagtaataatttgaagttttttttctatgcaagcttaccttgttggcattattttagggagttgaaactatcaactgtaaagctccttttcttccactttaatttaaaagttcatgtcatttaaaaacaagtcaagaaattaaaattgtatcagagggttttctctaatcattttttctatttttttttttgtacttctagatgttttggttatacagcttcattttagatgagcattcttattttttgttttgtttgccccatttccttttgtgtttttatagtctatagcattttaaaactgctgatgttgtttgcattatttacaggctaaaaacttagtagcatagagctgtctgccacagccttctgacaaagtttacagttattaaagttgcagtatccttttaaatgctagtaatcagcactctttcttttttttttttttaatagagacagggtctcgcagtgttgcccaggctggtctcgaactcctggcatcaagcgatcctcctgccttagcctcccagagtactgggattacaggctctttctttttaaacataaaagttttaaattggtattaactctgtactctgccctagattgttttagcttctgttctgtaatcatgagtttggttggagatattctccatagatgatcttctactgaaatgcctaaagaagtcacaggctggcttctgttttattcagggatttttttaaaaagtcaatcagaaaagggatactggagcttcttcatgtatgtaacagcatattaaactggagacagtgatgaatcagctacaaaggtaatattgtattaaaatcatgtttaagatagctgcttttatgtgtattttatattgcatgcttttgtaaaaacatgctgggtgatgaaagattagttttagagagaaaatgttcatctgtgcagaggatgcattttcttccattaattctggaaaaaacgttcacagttatatatatggtattttgcaaaaggactattaatagaaccttttgagatgaattaatgtaagaatattttttaaataggcttactgtcaaattgcaactttttttttagatacagagtggaaaacagtgctaagtcatttggcacctccttacaaatatttttcatggtcacatttattaaatgttactacatttctgaatttttgaaaaatgtattttatcattaaatggcattattttaaagggtgaaaaactgacacagtcaattcagaaaatggactgaagtctgaataaggtcattgcatttaaaaagcatataactgtacttgactgatgagggaggtgttactttcattgtatataggtcttatttcataaacagatatcctgtatcaaataaaagtatttgttatatatttgaagttatgcatggaaaggagtgtgtttaaattgttacaaacaataatgcgtcattaaaggccatgctgatcttgcataactataagtactatgaatgaatttggttggttttggtgttgtacagctcacatgtttacacactcagtgccctaatttcccctgagggaatcgctttttaagtgatccttacagtggtgttttatgttactttattacagagctccttggttttttacttctgcacttaaatttttttaaataacatgatgatggtacattttcctctattgtctagctaagggctttcggtccaccagtaaataagatcaaatgctcttaaatgttcctgttaccatcctaatgtaaatactggatttttctgtcatttagcaccatgctgcttctgtctgtcttaatgctggcattaagatcatgagccctttttctccagtagtacaggctttgaaaactacttctattaagttattgatgcaatttgatattttttcataatctatatttaaacaaaattacatcattgcatcatcttttctaaattcatctccattaaaacttgccttaagctaccagattgcttttgccaccattggccatactgtgtgtttgtttgtttaatttactttcacaataaacttctgtgtagtaaaaa

SEQ ID NO: 6797 - DNA, 3100 bp, Homo sapiens
  source 1..3100: mol_type = unassigned DNA
gcggtgagcgctggggctgcgcgggcggcaggcaacggctgaggcggcggcggcggcggcggcggcgtgggttgggctcgagcgggcggcggcgcctcagactccccggaacgggagcccacgcgggcgggcgcctgaaacaaagggaagcgggcgtccgggcgccgcgggtgggcggtcagtcggtcagcgcggagccagccagcgggtgcccgcgcaagccccgagcgcggccggccggcgcggcctcagggcgggaagatgccgcgcgtcgtgcccgaccagagaagcaagttcgagaacgaggagttttttaggaagctgagccgcgagtgtgagattaagtacacgggcttcagggaccggccccacgaggaacgccaggcacgcttccagaacgcctgccgcgacggccgctcggaaatcgcttttgtggccacaggaaccaatctgtctctccagttttttccggccagctggcagggagaacagcgacaaacacctagccgagagtatgtcgacttagaaagagaagcaggcaaggtatatttgaaggctcccatgattctgaatggagtctgtgttatctggaaaggctggattgatctccaaagactggatggtatgggctgtctggagtttgatgaggagcgagcccagcaggaggatgcattagcacaacaggcctttgaagaggctcggagaaggacacgcgaatttgaagatagagacaggtctcatcgggaggaaatggaggcaagaagacaacaagaccctagtcctggttccaatttaggtggtggtgatgacctcaaacttcgttaattaatagcacagcagatgtgtgctgcccatctttacatacacattgcttctagttggcagaaataattgattaaaagaccagaaactgtgataactggaggtactacggtctatttctcaaccttaggcagtaatagacatcacaaactgccatggttttgcactatgattataatacctgcatttctaattttttaagcatgtagccagtaataatttgaagttttttttctatgcaagcttaccttgttggcattattttagggagttgaaactatcaactgtaaagctccttttcttccactttaatttaaaagttcatgtcatttaaaaacaagtcaagaaattaaaattgtatcagagggttttctctaatcattttttctatttttttttttgtacttctagatgttttggttatacagcttcattttagatgagcattcttattttttgttttgtttgccccatttccttttgtgtttttatagtctatagcattttaaaactgctgatgttgtttgcattatttacaggctaaaaacttagtagcatagagctgtctgccacagccttctgacaaagtttacagttattaaagttgcagtatccttttaaatgctagtaatcagcactctttcttttttttttttttaatagagacagggtctcgcagtgttgcccaggctggtctcgaactcctggcatcaagcgatcctcctgccttagcctcccagagtactgggattacaggctctttctttttaaacataaaagttttaaattggtattaactctgtactctgccctagattgttttagcttctgttctgtaatcatgagtttggttggagatattctccatagatgatcttctactgaaatgcctaaagaagtcacaggctggcttctgttttattcagggatttttttaaaaagtcaatcagaaaagggatactggagcttcttcatgtatgtaacagcatattaaactggagacagtgatgaatcagctacaaaggtaatattgtattaaaatcatgtttaagatagctgcttttatgtgtattttatattgcatgcttttgtaaaaacatgctgggtgatgaaagattagttttagagagaaaatgttcatctgtgcagaggatgcattttcttccattaattctggaaaaaacgttcacagttatatatatggtattttgcaaaaggactattaatagaaccttttgagatgaattaatgtaagaatattttttaaataggcttactgtcaaattgcaactttttttttagatacagagtggaaaacagtgctaagtcatttggcacctccttacaaatatttttcatggtcacatttattaaatgttactacatttctgaatttttgaaaaatgtattttatcattaaatggcattattttaaagggtgaaaaactgacacagtcaattcagaaaatggactgaagtctgaataaggtcattgcatttaaaaagcatataactgtacttgactgatgagggaggtgttactttcattgtatataggtcttatttcataaacagatatcctgtatcaaataaaagtatttgttatatatttgaagttatgcatggaaaggagtgtgtttaaattgttacaaacaataatgcgtcattaaaggccatgctgatcttgcataactataagtactatgaatgaatttggttggttttggtgttgtacagctcacatgtttacacactcagtgccctaatttcccctgagggaatcgctttttaagtgatccttacagtggtgttttatgttactttattacagagctccttggttttttacttctgcacttaaatttttttaaataacatgatgatggtacattttcctctattgtctagctaagggctttcggtccaccagtaaataagatcaaatgctcttaaatgttcctgttaccatcctaatgtaaatactggatttttctgtcatttagcaccatgctgcttctgtctgtcttaatgctggcattaagatcatgagccctttttctccagtagtacaggctttgaaaactacttctattaagttattgatgcaatttgatattttttcataatctatatttaaacaaaattacatcattgcatcatcttttctaaattcatctccattaaaacttgccttaagctaccagattgcttttgccaccattggccatactgtgtgtttgtttgtttaatttactttcacaataaacttctgtgtagt

SEQ ID NO: 6798 - DNA, 7319 bp, Homo sapiens
  source 1..7319: mol_type = unassigned DNA
cggtggtggtgtctggttagctcggcggctgcagatctcgcggcgacgcctgcgagggacccgggccgcgggtcgaggcgggcggcgcctgcgagggacccgtgtcgcgggtagaggcgggcggcgcgcggcggcggcgctcggcgatggtaggcgtccctggagcggccgccttccagcttggtcctgagaaaagggtgccagcgatgcctggatcgcctgtggaagtgaagatacagtccagatcctcacctcccaccatgccacccctcccaccaataaatcctggaggaccgaggccagtgtccttcactcctactgcattaagcaatggcatcaaccattctcctcctaccctgaatggtgccccatcaccgccacagagattcagcaatggtcctgcctcctccacatcatctgcactcacaaatcagcaattgccagccacttgtggtgctcgacaactcagcaagttgaaacgctttcttaccactctgcaacagtttggcaatgacatctcccctgagattggggagaaggtgcggactcttgttcttgcactggtgaactcaacagtgacaattgaggaattccactgtaagctccaagaagccacaaactttccccttcgtccttttgtgattccatttctcaaggccaacctgcccctgctgcagcgggaactgctgcactgcgctcgggcggccaagcagaccccatcccagtacctggctcagcacgaacaccttctgctcaacacaagcattgcatcgcctgctgactcgtcagagttgctcatggaggtgcacggaaatgggaagaggcccagtccagagaggagagaagagaatagttttgatagagacacaattgctcctgagcctcctgccaagagagtatgtaccatcagccctgctcctcggcacagtcctgctctcactgtgcccctcatgaatcccgggggccaattccatcctacccctccacctcttcagcattacaccttagaggatattgcaacttctcacctgtatcgggaacccaacaagatgctagagcatcgagaagttcgtgatagacaccacagtcttggtctaaatggaggctatcaagatgagttggtagatcatcgtttgacagaaagggaatgggctgatgaatggaaacatcttgaccatgcgctgaattgcattatggaaatggtagagaaaacaaggcgctctatggcagttctgcggcgctgtcaggaatcagatcgtgaagaactcaactactggaaaagacggtacaatgaaaacacagagctgaggaaaacggggaccgagttggtctccaggcagcacagccctgggagtgcagattctctcagcaatgattctcagagagagttcaacagcaggccaggtacaggatacgtacctgtggagttttggaaaaaaacagaagaagctgtgaataaggtgaaaattcaggccatgtcagaagtacagaaggccgtcgctgaggcagagcagaaagcctttgaagtgattgcaacagagagagcacgaatggagcaaaccatagcggatgtcaagcggcaggccgcagaggatgctttcctcgtcatcaatgagcaagaggagtccacggagaactgctggaactgtggccgcaaagccagcgagacatgcagtggctgcaatatcgcgcgatactgtggctctttctgccagcacaaggactgggagcggcaccaccgcctctgtggtcagaacctgcatggccagagcccccacggccagggccggccgctgcttcctgtaggcaggggctcctctgccaggtccgccgactgcagcgtgcccagcccagccctcgacaagacctcggcaaccacatcgcgttcctcaacacctgcttctgtgacagctatcgacaccaacggactctgagccccggactctgcttaccctgatggctgctcagcaccacagagtgcttgggctgagggactgactgttggaacccgtgcatgtagctgccgggtcatcagcaagaaatgaattggaggcaggaagagtccaagcctgaataataacaccccacagcctctctgtgcacttgctgtctgcggagccagtgtgccattctctgcacatgggcagccagcctgagctgcctcctccatggctttcctggtttgttcctctctccactgaagctgacttagccggccccttttcagtgtagaccaccagctcccctccccatctccttgagtcagcagactgtccaatgtgctcagccaggctggaggcggcaggcggcaggcagcaggctgtggaggaggcccctcggtcagggagcggcctgcctcacccctgaatagctccttcggccccatctccatcctcagcagatgacactgattggcctcacggggacttgggtaagcaacaggcggcattcaggactcttctcaaccctgctgttcagacttgataagatctcagagtccacaggaaagaagtcactgttgcaataaaagcacccgtagtagcaaaaacataaaacaaataaaacttcccccacatcacagatgattttggacaagattttccaaccttgctggctactttagtttgggacctgttttttttctcatttgattttgcttgtgcagaaaatagtttccagcacatggattgatctgagagagaatgaggctcagttgtggatagtctgttttctctgagcatgttggccaactagtatcgtcaaattattgagtggatcatctcttggaaatgcagaacttctgccaccacttggctatttgcacagtcatcttgttctgtgtccttttatctctcagaccacacacatctggaacgctgtgggcatcttctgcccatgggctccatttggcacctgctgagccacagttgtcctgctggatgtgctgtgcaggttggtaggacttgcccccactgtcaaggcctggtctcatctgaaaagccctcctggacctcaaagaattcttcagacctcatagttacaggtcattatatctactatgttgatttatcatcaggcacacaacttctgtttccttctcttgtgttatctgatagcgtccctccttgagctcatcagaaaggttttatgaaatgtgaaccattttgggaaaagctgatcaatttttcttcctagcttcccattttcaaatgggacatcactcatatccctttcagaatgttaggaactgcctcccacattcttccctgtctttttgggttttgttttttgttgttgtggtggttttttaacacaaagtctcactctgttgcccaggctggagtgcagtggcatgatcttggctcactgcaacctctgccttccaggttcaagcaattctcctgcctcagcctcccgagtagctgagattacaggcgcccaccaccacgcccagctaatttttgtatttttagtagagacagggtttcaccatgttggccaggctgatctcgaactcctgacctcaggtgacctgccttggcctcccaaagtgcagggattacaagcgtgagccaccatgcccggcctgtctttttggttttgatgggagtctgaggaccccgacccctcctgctctccatctttgagcctctggcatcctctcacacccagaaatcagttggagtaagtttaattggccctgctccagctggcctttgaagcacaagtttaaatctccaccttctgtgcactgaccagagtctaaaataaaagttgtcagtaccataaaggaaaagggatccacacaggtagccttctccttggatacaggtacatcttactgtaagaatttcaagtcctggctgggcgcagtggctcactcctgtaatcccagcactttgagagaccgaggcaggcagatcacttgaggtcaggaattcaagaccaacctggccaacatggtgaaaccctgtctctaataaaaaaaaaatagaaaaatcagccgggtgtggtggcacacacctgtaatcctagctactcaggaggctgaggcaagagaatctcttgaacctgtgagccagaggttgcagtgagccgagattccaccactgcactccagcctgggcaacagagcaaaactctgtctcaaaaaaaaaaaaaaaaaggcaaaattaaagaatttcaagtccctaatttactctaaccaagcattttcagtcttacaaagaaatctagtgcacgacacctttaaaatgcctagatttccattgcctaaagtaaggtgtgaccagtgaaacaacagcagagaatcatgttcctttgctgtggaacacataagccccacagttttccagtcagcctaatacatgggtatcccccgaccccatctgcctccttaagccacagtccttggtggggaactctaagggggacggagtcagtaccccggacagggccacatttgcatgagacatggctgtctcacaggtcacagagccattacaacagcttactagtttttcatggatttgttggattaacaccttaagcaggttttttattgttattttgtttgtttgtttgttttgagacgggagtttctctcttgtctcccaggctggagtgcaatcgcgcaatctcggctcacggtaacctctgcctcccaggttcaagcgagtctcctgcctcagccttctgagtagctgggattacaggcatgcgccaccacgcccaactaattttgtatttttagtagagacggggtttctccttgttggtcaggctggtctcaaaccccggacctcaggtgatccccccaccttggcctcccaaagtgccaggattacaggcatgagccactgtgtccggtcttgagcaggtttttaaaatctccagtggccataaaactagccagggtagctcatgcttttactggttggaataaggagccaaaaccaacaaaataatatttattagggctcgatgcccatttctgtggctaaggcttaggtttggtgtgcagagcctggcctgctcttgtgggctgtggttgctgtgacagtttcgttttctgaatctttgtaatgctcttccaccctgctcgtgctgcccagaggctgatctgcaaacctgggcagtattccacactgaagctcagtttgcaaaccttctgctgtgttaattctggtcagtttcacacagaagtcacgagggcctctgcccaggaccttctattcacatttcaagaatccctttctgaaattctccaactctctggtcaggaggaggagcaccattggggcggggtaggcagctagaggcgcaggagcgaatccaggttccttgcgtggttcccagcctctgctgacagcacctcagctaccaggtggggagtggaaattcagcctgcttagaggactgacctctacagttcatatttgcagtgacataaaaggcaaagaggagctggcatggtggtacagaaggtatcagtcaagcgcaggctcttcagaaacctagaaactaaaaagagatgcaacatgtgactggccatcagccagacatgtctagggtgagaccagtgctcagcaccacccgccaaggaacactgatgagttgtgggacattatggtcggccaagtgaggaatgattgcagggaccagagaagaccaaagatgccagatgtccccagagtttcttgagggctgggtttcacgtctttgcttgtcctttttgtccccacttgcctgcaccgtgcctgactcatccagtggggaaggtgactcaagaagttgtttaagcctaggcctaggcagtccacttcgggaggtgggggcactccacactggggggccctgcagctccagggctggtgctctagcagatccgctcaggcacggttgggtgaccgtggggtcaccgattgcgtagattatttctagggcagtgctgggttagaaatgtctgtctggaaacaggacacatcttgccaccacaagtccacacctggccttggctgctgcccgctctctgcagcgtggatttcctttgcccatttgggccagaaggtcaccaggagttcatcactgcttagtgtcaacttgacatcttcagcttccagacagaaaacccatgctttactttgtacagccctgtcccagagttagtaagcctcggcttgtcacctgcttgcaaagggtatagacatcattctgggtagttctagaggatatcgcaacaagtgcgtttgaaggttcagcacagctggaattgtacggtagtgagctcttcaaaatgaaaacagaatgaccggatggccatctgtcctggaaactgtagaattgaataaatcactgaaaatagaacacttcttggaggctttcttcagaactgaactagaaacaaggtttccaggctcccaggtcagtagaccaaaccaacttccttagatttttttttttaagctgtttgcagaaaactgggtggtagcgtgtctgaaccaaacggaagaatagccagcggagcatggactgttccagcacgggccagatggccagctgtcgagagcagccctgcccagattgcggtgggggctgtgccagcggctccgcagggcccttccaactctggagtgtctgtagttcttgtgaaaccaaaacgttgactacctgcctctttcctcgggcatcgacgtgctcatttccaaagatgatggtgcaggtgaccttttccatcgtgagctaagagaaggttaggaggcctgaggggcgggccttgtgtcccctcctccccctccacagcccctgaggtggagcttccctcacagaccccatctggtcgagcctacggctgcccagtgtacactcagtgatgcttataccaaatagggcatgtgcgctggtgtctgttggggacagccccatccctaccttggagtcggcagagaagcagcaataagcattaggcgaatgattgaaagggctgctgcgccaagaggccttcagtccccttaacgtggctttccaacttcctgacgaggctacaaaggctccgctcacaaaagaaagccaataatgtaaataaatagaaaacgaagcctccacgcgtggtttttaaagggggatgatgaatgtgacaccacccacagaatgcattagaatctggtttttctgtgctttgtcattttactctgataggaatttttgttacctaactctgtgcataacttatttaatgtactgtataaatgaaccaaaactgttaaatatgtatttagtttgttctacttaaagtagtcaataaaaaggctatattcctt

SEQ ID NO: 6799 - DNA, 7737 bp, Homo sapiens
  source 1..7737: mol_type = unassigned DNA
ggagggagaaaaagagagagactgactgtatctggggattctggcaaggtgaagagctggtctgtttggcaggaccttcccatctgggatccatctgtgtttccctggaatgggacaggcagctctagtcagtgagaaatcgcagatgtgagagagctgacacatgtccagctaatgaaaggaggaggaaggctggtctccgattgagctttgaagattaggaggagaaaaagaggagctttggaatatctatttcaaataaatttggtgtatttaagaatctggattgtttataatttgggcatttgggaggtggggttttgccatgttgcccaggtgggtctcaaactcctgggctaaagcgatcttcccatgttggctgcccaaagtgctgggattacaggcaagagccaccataccagttcctgtctagatattatgatgaagattgaggatggtagtttttgtggagcacaatcctgactgtacctgtgatgttgcattcatcttttggaacataagcagatcaccaggtgaatggctaaagaatctggaataagcttgaaagaaatacaggtcctggcaaggcaatggaaagttggtcctgagaaaagggtgccagcgatgcctggatcgcctgtggaagtgaagatacagtccagatcctcacctcccaccatgccacccctcccaccaataaatcctggaggaccgaggccagtgtccttcactcctactgcattaagcaatggcatcaaccattctcctcctaccctgaatggtgccccatcaccgccacagagattcagcaatggtcctgcctcctccacatcatctgcactcacaaatcagcaattgccagccacttgtggtgctcgacaactcagcaagttgaaacgctttcttaccactctgcaacagtttggcaatgacatctcccctgagattggggagaaggtgcggactcttgttcttgcactggtgaactcaacagtgacaattgaggaattccactgtaagctccaagaagccacaaactttccccttcgtccttttgtgattccatttctcaaggccaacctgcccctgctgcagcgggaactgctgcactgcgctcgggcggccaagcagaccccatcccagtacctggctcagcacgaacaccttctgctcaacacaagcattgcatcgcctgctgactcgtcagagttgctcatggaggtgcacggaaatgggaagaggcccagtccagagaggagagaagagaatagttttgatagagacacaattgctcctgagcctcctgccaagagagtatgtaccatcagccctgctcctcggcacagtcctgctctcactgtgcccctcatgaatcccgggggccaattccatcctacccctccacctcttcagcattacaccttagaggatattgcaacttctcacctgtatcgggaacccaacaagatgctagagcatcgagaagttcgtgatagacaccacagtcttggtctaaatggaggctatcaagatgagttggtagatcatcgtttgacagaaagggaatgggctgatgaatggaaacatcttgaccatgcgctgaattgcattatggaaatggtagagaaaacaaggcgctctatggcagttctgcggcgctgtcaggaatcagatcgtgaagaactcaactactggaaaagacggtacaatgaaaacacagagctgaggaaaacggggaccgagttggtctccaggcagcacagccctgggagtgcagattctctcagcaatgattctcagagagagttcaacagcaggccaggtacaggatacgtacctgtggagttttggaaaaaaacagaagaagctgtgaataaggtgaaaattcaggccatgtcagaagtacagaaggccgtcgctgaggcagagcagaaagcctttgaagtgattgcaacagagagagcacgaatggagcaaaccatagcggatgtcaagcggcaggccgcagaggatgctttcctcgtcatcaatgagcaagaggagtccacggagaactgctggaactgtggccgcaaagccagcgagacatgcagtggctgcaatatcgcgcgatactgtggctctttctgccagcacaaggactgggagcggcaccaccgcctctgtggtcagaacctgcatggccagagcccccacggccagggccggccgctgcttcctgtaggcaggggctcctctgccaggtccgccgactgcagcgtgcccagcccagccctcgacaagacctcggcaaccacatcgcgttcctcaacacctgcttctgtgacagctatcgacaccaacggactctgagccccggactctgcttaccctgatggctgctcagcaccacagagtgcttgggctgagggactgactgttggaacccgtgcatgtagctgccgggtcatcagcaagaaatgaattggaggcaggaagagtccaagcctgaataataacaccccacagcctctctgtgcacttgctgtctgcggagccagtgtgccattctctgcacatgggcagccagcctgagctgcctcctccatggctttcctggtttgttcctctctccactgaagctgacttagccggccccttttcagtgtagaccaccagctcccctccccatctccttgagtcagcagactgtccaatgtgctcagccaggctggaggcggcaggcggcaggcagcaggctgtggaggaggcccctcggtcagggagcggcctgcctcacccctgaatagctccttcggccccatctccatcctcagcagatgacactgattggcctcacggggacttgggtaagcaacaggcggcattcaggactcttctcaaccctgctgttcagacttgataagatctcagagtccacaggaaagaagtcactgttgcaataaaagcacccgtagtagcaaaaacataaaacaaataaaacttcccccacatcacagatgattttggacaagattttccaaccttgctggctactttagtttgggacctgttttttttctcatttgattttgcttgtgcagaaaatagtttccagcacatggattgatctgagagagaatgaggctcagttgtggatagtctgttttctctgagcatgttggccaactagtatcgtcaaattattgagtggatcatctcttggaaatgcagaacttctgccaccacttggctatttgcacagtcatcttgttctgtgtccttttatctctcagaccacacacatctggaacgctgtgggcatcttctgcccatgggctccatttggcacctgctgagccacagttgtcctgctggatgtgctgtgcaggttggtaggacttgcccccactgtcaaggcctggtctcatctgaaaagccctcctggacctcaaagaattcttcagacctcatagttacaggtcattatatctactatgttgatttatcatcaggcacacaacttctgtttccttctcttgtgttatctgatagcgtccctccttgagctcatcagaaaggttttatgaaatgtgaaccattttgggaaaagctgatcaatttttcttcctagcttcccattttcaaatgggacatcactcatatccctttcagaatgttaggaactgcctcccacattcttccctgtctttttgggttttgttttttgttgttgtggtggttttttaacacaaagtctcactctgttgcccaggctggagtgcagtggcatgatcttggctcactgcaacctctgccttccaggttcaagcaattctcctgcctcagcctcccgagtagctgagattacaggcgcccaccaccacgcccagctaatttttgtatttttagtagagacagggtttcaccatgttggccaggctgatctcgaactcctgacctcaggtgacctgccttggcctcccaaagtgcagggattacaagcgtgagccaccatgcccggcctgtctttttggttttgatgggagtctgaggaccccgacccctcctgctctccatctttgagcctctggcatcctctcacacccagaaatcagttggagtaagtttaattggccctgctccagctggcctttgaagcacaagtttaaatctccaccttctgtgcactgaccagagtctaaaataaaagttgtcagtaccataaaggaaaagggatccacacaggtagccttctccttggatacaggtacatcttactgtaagaatttcaagtcctggctgggcgcagtggctcactcctgtaatcccagcactttgagagaccgaggcaggcagatcacttgaggtcaggaattcaagaccaacctggccaacatggtgaaaccctgtctctaataaaaaaaaaatagaaaaatcagccgggtgtggtggcacacacctgtaatcctagctactcaggaggctgaggcaagagaatctcttgaacctgtgagccagaggttgcagtgagccgagattccaccactgcactccagcctgggcaacagagcaaaactctgtctcaaaaaaaaaaaaaaaaaggcaaaattaaagaatttcaagtccctaatttactctaaccaagcattttcagtcttacaaagaaatctagtgcacgacacctttaaaatgcctagatttccattgcctaaagtaaggtgtgaccagtgaaacaacagcagagaatcatgttcctttgctgtggaacacataagccccacagttttccagtcagcctaatacatgggtatcccccgaccccatctgcctccttaagccacagtccttggtggggaactctaagggggacggagtcagtaccccggacagggccacatttgcatgagacatggctgtctcacaggtcacagagccattacaacagcttactagtttttcatggatttgttggattaacaccttaagcaggttttttattgttattttgtttgtttgtttgttttgagacgggagtttctctcttgtctcccaggctggagtgcaatcgcgcaatctcggctcacggtaacctctgcctcccaggttcaagcgagtctcctgcctcagccttctgagtagctgggattacaggcatgcgccaccacgcccaactaattttgtatttttagtagagacggggtttctccttgttggtcaggctggtctcaaaccccggacctcaggtgatccccccaccttggcctcccaaagtgccaggattacaggcatgagccactgtgtccggtcttgagcaggtttttaaaatctccagtggccataaaactagccagggtagctcatgcttttactggttggaataaggagccaaaaccaacaaaataatatttattagggctcgatgcccatttctgtggctaaggcttaggtttggtgtgcagagcctggcctgctcttgtgggctgtggttgctgtgacagtttcgttttctgaatctttgtaatgctcttccaccctgctcgtgctgcccagaggctgatctgcaaacctgggcagtattccacactgaagctcagtttgcaaaccttctgctgtgttaattctggtcagtttcacacagaagtcacgagggcctctgcccaggaccttctattcacatttcaagaatccctttctgaaattctccaactctctggtcaggaggaggagcaccattggggcggggtaggcagctagaggcgcaggagcgaatccaggttccttgcgtggttcccagcctctgctgacagcacctcagctaccaggtggggagtggaaattcagcctgcttagaggactgacctctacagttcatatttgcagtgacataaaaggcaaagaggagctggcatggtggtacagaaggtatcagtcaagcgcaggctcttcagaaacctagaaactaaaaagagatgcaacatgtgactggccatcagccagacatgtctagggtgagaccagtgctcagcaccacccgccaaggaacactgatgagttgtgggacattatggtcggccaagtgaggaatgattgcagggaccagagaagaccaaagatgccagatgtccccagagtttcttgagggctgggtttcacgtctttgcttgtcctttttgtccccacttgcctgcaccgtgcctgactcatccagtggggaaggtgactcaagaagttgtttaagcctaggcctaggcagtccacttcgggaggtgggggcactccacactggggggccctgcagctccagggctggtgctctagcagatccgctcaggcacggttgggtgaccgtggggtcaccgattgcgtagattatttctagggcagtgctgggttagaaatgtctgtctggaaacaggacacatcttgccaccacaagtccacacctggccttggctgctgcccgctctctgcagcgtggatttcctttgcccatttgggccagaaggtcaccaggagttcatcactgcttagtgtcaacttgacatcttcagcttccagacagaaaacccatgctttactttgtacagccctgtcccagagttagtaagcctcggcttgtcacctgcttgcaaagggtatagacatcattctgggtagttctagaggatatcgcaacaagtgcgtttgaaggttcagcacagctggaattgtacggtagtgagctcttcaaaatgaaaacagaatgaccggatggccatctgtcctggaaactgtagaattgaataaatcactgaaaatagaacacttcttggaggctttcttcagaactgaactagaaacaaggtttccaggctcccaggtcagtagaccaaaccaacttccttagatttttttttttaagctgtttgcagaaaactgggtggtagcgtgtctgaaccaaacggaagaatagccagcggagcatggactgttccagcacgggccagatggccagctgtcgagagcagccctgcccagattgcggtgggggctgtgccagcggctccgcagggcccttccaactctggagtgtctgtagttcttgtgaaaccaaaacgttgactacctgcctctttcctcgggcatcgacgtgctcatttccaaagatgatggtgcaggtgaccttttccatcgtgagctaagagaaggttaggaggcctgaggggcgggccttgtgtcccctcctccccctccacagcccctgaggtggagcttccctcacagaccccatctggtcgagcctacggctgcccagtgtacactcagtgatgcttataccaaatagggcatgtgcgctggtgtctgttggggacagccccatccctaccttggagtcggcagagaagcagcaataagcattaggcgaatgattgaaagggctgctgcgccaagaggccttcagtccccttaacgtggctttccaacttcctgacgaggctacaaaggctccgctcacaaaagaaagccaataatgtaaataaatagaaaacgaagcctccacgcgtggtttttaaagggggatgatgaatgtgacaccacccacagaatgcattagaatctggtttttctgtgctttgtcattttactctgataggaatttttgttacctaactctgtgcataacttatttaatgtactgtataaatgaaccaaaactgttaaatatgtatttagtttgttctacttaaagtagtcaataaaaaggctatattcctt

SEQ ID NO: 6800 - DNA, 7617 bp, Homo sapiens
  source 1..7617: mol_type = unassigned DNA
agcagcggtggtggtgtctggttagctcggcggctgcagatctcgcggcgacgcctgcgagggacccgggccgcgggtcgaggcgggcggcgcctgcgagggacccgtgtcgcgggtagaggcgggcggcgcgcggcggcggcgctcggcgatggtaggcgtccctggagcggccgccttccagcaggtggggttttgccatgttgcccaggtgggtctcaaactcctgggctaaagcgatcttcccatgttggctgcccaaagtgctgggattacaggcaagagccaccataccagttcctgtctagatattatgatgaagattgaggatggtagtttttgtggagcacaatcctgactgtacctgtgatgttgcattcatcttttggaacataagcagatcaccaggtgaatggctaaagaatctggaataagcttgaaagaaatacaggtcctggcaaggcaatggaaagttggtcctgagaaaagggtgccagcgatgcctggatcgcctgtggaagtgaagatacagtccagatcctcacctcccaccatgccacccctcccaccaataaatcctggaggaccgaggccagtgtccttcactcctactgcattaagcaatggcatcaaccattctcctcctaccctgaatggtgccccatcaccgccacagagattcagcaatggtcctgcctcctccacatcatctgcactcacaaatcagcaattgccagccacttgtggtgctcgacaactcagcaagttgaaacgctttcttaccactctgcaacagtttggcaatgacatctcccctgagattggggagaaggtgcggactcttgttcttgcactggtgaactcaacagtgacaattgaggaattccactgtaagctccaagaagccacaaactttccccttcgtccttttgtgattccatttctcaaggccaacctgcccctgctgcagcgggaactgctgcactgcgctcgggcggccaagcagaccccatcccagtacctggctcagcacgaacaccttctgctcaacacaagcattgcatcgcctgctgactcgtcagagttgctcatggaggtgcacggaaatgggaagaggcccagtccagagaggagagaagagaatagttttgatagagacacaattgctcctgagcctcctgccaagagagtatgtaccatcagccctgctcctcggcacagtcctgctctcactgtgcccctcatgaatcccgggggccaattccatcctacccctccacctcttcagcattacaccttagaggatattgcaacttctcacctgtatcgggaacccaacaagatgctagagcatcgagaagttcgtgatagacaccacagtcttggtctaaatggaggctatcaagatgagttggtagatcatcgtttgacagaaagggaatgggctgatgaatggaaacatcttgaccatgcgctgaattgcattatggaaatggtagagaaaacaaggcgctctatggcagttctgcggcgctgtcaggaatcagatcgtgaagaactcaactactggaaaagacggtacaatgaaaacacagagctgaggaaaacggggaccgagttggtctccaggcagcacagccctgggagtgcagattctctcagcaatgattctcagagagagttcaacagcaggccaggtacaggatacgtacctgtggagttttggaaaaaaacagaagaagctgtgaataaggtgaaaattcaggccatgtcagaagtacagaaggccgtcgctgaggcagagcagaaagcctttgaagtgattgcaacagagagagcacgaatggagcaaaccatagcggatgtcaagcggcaggccgcagaggatgctttcctcgtcatcaatgagcaagaggagtccacggagaactgctggaactgtggccgcaaagccagcgagacatgcagtggctgcaatatcgcgcgatactgtggctctttctgccagcacaaggactgggagcggcaccaccgcctctgtggtcagaacctgcatggccagagcccccacggccagggccggccgctgcttcctgtaggcaggggctcctctgccaggtccgccgactgcagcgtgcccagcccagccctcgacaagacctcggcaaccacatcgcgttcctcaacacctgcttctgtgacagctatcgacaccaacggactctgagccccggactctgcttaccctgatggctgctcagcaccacagagtgcttgggctgagggactgactgttggaacccgtgcatgtagctgccgggtcatcagcaagaaatgaattggaggcaggaagagtccaagcctgaataataacaccccacagcctctctgtgcacttgctgtctgcggagccagtgtgccattctctgcacatgggcagccagcctgagctgcctcctccatggctttcctggtttgttcctctctccactgaagctgacttagccggccccttttcagtgtagaccaccagctcccctccccatctccttgagtcagcagactgtccaatgtgctcagccaggctggaggcggcaggcggcaggcagcaggctgtggaggaggcccctcggtcagggagcggcctgcctcacccctgaatagctccttcggccccatctccatcctcagcagatgacactgattggcctcacggggacttgggtaagcaacaggcggcattcaggactcttctcaaccctgctgttcagacttgataagatctcagagtccacaggaaagaagtcactgttgcaataaaagcacccgtagtagcaaaaacataaaacaaataaaacttcccccacatcacagatgattttggacaagattttccaaccttgctggctactttagtttgggacctgttttttttctcatttgattttgcttgtgcagaaaatagtttccagcacatggattgatctgagagagaatgaggctcagttgtggatagtctgttttctctgagcatgttggccaactagtatcgtcaaattattgagtggatcatctcttggaaatgcagaacttctgccaccacttggctatttgcacagtcatcttgttctgtgtccttttatctctcagaccacacacatctggaacgctgtgggcatcttctgcccatgggctccatttggcacctgctgagccacagttgtcctgctggatgtgctgtgcaggttggtaggacttgcccccactgtcaaggcctggtctcatctgaaaagccctcctggacctcaaagaattcttcagacctcatagttacaggtcattatatctactatgttgatttatcatcaggcacacaacttctgtttccttctcttgtgttatctgatagcgtccctccttgagctcatcagaaaggttttatgaaatgtgaaccattttgggaaaagctgatcaatttttcttcctagcttcccattttcaaatgggacatcactcatatccctttcagaatgttaggaactgcctcccacattcttccctgtctttttgggttttgttttttgttgttgtggtggttttttaacacaaagtctcactctgttgcccaggctggagtgcagtggcatgatcttggctcactgcaacctctgccttccaggttcaagcaattctcctgcctcagcctcccgagtagctgagattacaggcgcccaccaccacgcccagctaatttttgtatttttagtagagacagggtttcaccatgttggccaggctgatctcgaactcctgacctcaggtgacctgccttggcctcccaaagtgcagggattacaagcgtgagccaccatgcccggcctgtctttttggttttgatgggagtctgaggaccccgacccctcctgctctccatctttgagcctctggcatcctctcacacccagaaatcagttggagtaagtttaattggccctgctccagctggcctttgaagcacaagtttaaatctccaccttctgtgcactgaccagagtctaaaataaaagttgtcagtaccataaaggaaaagggatccacacaggtagccttctccttggatacaggtacatcttactgtaagaatttcaagtcctggctgggcgcagtggctcactcctgtaatcccagcactttgagagaccgaggcaggcagatcacttgaggtcaggaattcaagaccaacctggccaacatggtgaaaccctgtctctaataaaaaaaaaatagaaaaatcagccgggtgtggtggcacacacctgtaatcctagctactcaggaggctgaggcaagagaatctcttgaacctgtgagccagaggttgcagtgagccgagattccaccactgcactccagcctgggcaacagagcaaaactctgtctcaaaaaaaaaaaaaaaaaggcaaaattaaagaatttcaagtccctaatttactctaaccaagcattttcagtcttacaaagaaatctagtgcacgacacctttaaaatgcctagatttccattgcctaaagtaaggtgtgaccagtgaaacaacagcagagaatcatgttcctttgctgtggaacacataagccccacagttttccagtcagcctaatacatgggtatcccccgaccccatctgcctccttaagccacagtccttggtggggaactctaagggggacggagtcagtaccccggacagggccacatttgcatgagacatggctgtctcacaggtcacagagccattacaacagcttactagtttttcatggatttgttggattaacaccttaagcaggttttttattgttattttgtttgtttgtttgttttgagacgggagtttctctcttgtctcccaggctggagtgcaatcgcgcaatctcggctcacggtaacctctgcctcccaggttcaagcgagtctcctgcctcagccttctgagtagctgggattacaggcatgcgccaccacgcccaactaattttgtatttttagtagagacggggtttctccttgttggtcaggctggtctcaaaccccggacctcaggtgatccccccaccttggcctcccaaagtgccaggattacaggcatgagccactgtgtccggtcttgagcaggtttttaaaatctccagtggccataaaactagccagggtagctcatgcttttactggttggaataaggagccaaaaccaacaaaataatatttattagggctcgatgcccatttctgtggctaaggcttaggtttggtgtgcagagcctggcctgctcttgtgggctgtggttgctgtgacagtttcgttttctgaatctttgtaatgctcttccaccctgctcgtgctgcccagaggctgatctgcaaacctgggcagtattccacactgaagctcagtttgcaaaccttctgctgtgttaattctggtcagtttcacacagaagtcacgagggcctctgcccaggaccttctattcacatttcaagaatccctttctgaaattctccaactctctggtcaggaggaggagcaccattggggcggggtaggcagctagaggcgcaggagcgaatccaggttccttgcgtggttcccagcctctgctgacagcacctcagctaccaggtggggagtggaaattcagcctgcttagaggactgacctctacagttcatatttgcagtgacataaaaggcaaagaggagctggcatggtggtacagaaggtatcagtcaagcgcaggctcttcagaaacctagaaactaaaaagagatgcaacatgtgactggccatcagccagacatgtctagggtgagaccagtgctcagcaccacccgccaaggaacactgatgagttgtgggacattatggtcggccaagtgaggaatgattgcagggaccagagaagaccaaagatgccagatgtccccagagtttcttgagggctgggtttcacgtctttgcttgtcctttttgtccccacttgcctgcaccgtgcctgactcatccagtggggaaggtgactcaagaagttgtttaagcctaggcctaggcagtccacttcgggaggtgggggcactccacactggggggccctgcagctccagggctggtgctctagcagatccgctcaggcacggttgggtgaccgtggggtcaccgattgcgtagattatttctagggcagtgctgggttagaaatgtctgtctggaaacaggacacatcttgccaccacaagtccacacctggccttggctgctgcccgctctctgcagcgtggatttcctttgcccatttgggccagaaggtcaccaggagttcatcactgcttagtgtcaacttgacatcttcagcttccagacagaaaacccatgctttactttgtacagccctgtcccagagttagtaagcctcggcttgtcacctgcttgcaaagggtatagacatcattctgggtagttctagaggatatcgcaacaagtgcgtttgaaggttcagcacagctggaattgtacggtagtgagctcttcaaaatgaaaacagaatgaccggatggccatctgtcctggaaactgtagaattgaataaatcactgaaaatagaacacttcttggaggctttcttcagaactgaactagaaacaaggtttccaggctcccaggtcagtagaccaaaccaacttccttagatttttttttttaagctgtttgcagaaaactgggtggtagcgtgtctgaaccaaacggaagaatagccagcggagcatggactgttccagcacgggccagatggccagctgtcgagagcagccctgcccagattgcggtgggggctgtgccagcggctccgcagggcccttccaactctggagtgtctgtagttcttgtgaaaccaaaacgttgactacctgcctctttcctcgggcatcgacgtgctcatttccaaagatgatggtgcaggtgaccttttccatcgtgagctaagagaaggttaggaggcctgaggggcgggccttgtgtcccctcctccccctccacagcccctgaggtggagcttccctcacagaccccatctggtcgagcctacggctgcccagtgtacactcagtgatgcttataccaaatagggcatgtgcgctggtgtctgttggggacagccccatccctaccttggagtcggcagagaagcagcaataagcattaggcgaatgattgaaagggctgctgcgccaagaggccttcagtccccttaacgtggctttccaacttcctgacgaggctacaaaggctccgctcacaaaagaaagccaataatgtaaataaatagaaaacgaagcctccacgcgtggtttttaaagggggatgatgaatgtgacaccacccacagaatgcattagaatctggtttttctgtgctttgtcattttactctgataggaatttttgttacctaactctgtgcataacttatttaatgtactgtataaatgaaccaaaactgttaaatatgtatttagtttgttctacttaaagtagtcaataaaaaggctatattccttttctg

SEQ ID NO: 6801 - DNA, 1416 bp, Homo sapiens
  source 1..1416: mol_type = unassigned DNA
ggagggagaaaaagagagagactgactgtatctggggattctggcaaggtgaagagctggtctgtttggcaggaccttcccatctgggatccatctgtgtttccctggaatgggacaggcagctctagtcagtgagaaatcgcagatgtgagagagctgacacatgtccagctaatgaaaggaggaggaaggctggtctccgattgagctttgaagattaggaggagaaaaagaggagctttggaatatctatttcaaataaatttggtgtatttaagaatctggattgtttataatttgggcatttgggaggtggggttttgccatgttgcccaggtgggtctcaaactcctgggctaaagcgatcttcccatgttggctgcccaaagtgctgggattacaggcaagagccaccataccagttcctgtctagatattatgatgaagattgaggatggtagtttttgtggagcacaatcctgactgtacctgtgatgttgcattcatcttttggaacataagcagatcaccaggtgaatggctaaagaatctggaataagcttgaaagaaatacaggtcctggcaaggcaatggaaagttggtcctgagaaaagggtgccagcgatgcctggatcgcctgtggaagtgaagatacagtccagatcctcacctcccaccatgccacccctcccaccaataaatcctggaggaccgaggccagtgtccttcactcctactgcattaagcaatggcatcaaccattctcctcctaccctgaatggtgccccatcaccgccacagagattcagcaatggtcctgcctcctccacatcatctgcactcacaaatcagcaattgccagccacttgtggtgctcgacaactcagcaagttgaaacgctttcttaccactctgcaacagtttggcaatgacatctcccctgagattggggagaaggtgcggactcttgttcttgcactggtgaactcaacagtgacaattgaggaattccactgtaagctccaagaagccacaaactttccccttcgtccttttgtgattccatttctcaaggccaacctgcccctgctgcagcgggaactgctgcactgcgctcgggcggccaagcagaccccatcccagtacctggctcagcacgaacaccttctgctcaacacaagcattgcatcgcctgctgactcgtcagagttgctcatggaggtgcacggaaatgggaagaggcccagtccagagagctgcataatacatctaaaatctatgggagtagcttccagacatgagtatttttcgggaactcttcagatgcctgcacacccggtaagaaactctactctagagaatttatgggtcgactgttccagaagcctcaggagtacagttctgccttttccttga

SEQ ID NO: 6802 - DNA, 7449 bp, Homo sapiens
  source 1..7449: mol_type = unassigned DNA
ggagggagaaaaagagagagactgactgtatctggggattctggcaaggtgaagagctggtctgtttggcaggaccttcccatctgggatccatctgtgtttccctggaatgggacaggcagctctagtcagtgagaaatcgcagatgtgagagagctgacacatgtccagctaatgaaaggaggaggaaggctggtctccgattgagctttgaagattaggaggagaaaaagaggagctttggaatatctatttcaaataaatttggtgtatttaagaatctggattgtttataatttgggcatttgggttggtcctgagaaaagggtgccagcgatgcctggatcgcctgtggaagtgaagatacagtccagatcctcacctcccaccatgccacccctcccaccaataaatcctggaggaccgaggccagtgtccttcactcctactgcattaagcaatggcatcaaccattctcctcctaccctgaatggtgccccatcaccgccacagagattcagcaatggtcctgcctcctccacatcatctgcactcacaaatcagcaattgccagccacttgtggtgctcgacaactcagcaagttgaaacgctttcttaccactctgcaacagtttggcaatgacatctcccctgagattggggagaaggtgcggactcttgttcttgcactggtgaactcaacagtgacaattgaggaattccactgtaagctccaagaagccacaaactttccccttcgtccttttgtgattccatttctcaaggccaacctgcccctgctgcagcgggaactgctgcactgcgctcgggcggccaagcagaccccatcccagtacctggctcagcacgaacaccttctgctcaacacaagcattgcatcgcctgctgactcgtcagagttgctcatggaggtgcacggaaatgggaagaggcccagtccagagaggagagaagagaatagttttgatagagacacaattgctcctgagcctcctgccaagagagtatgtaccatcagccctgctcctcggcacagtcctgctctcactgtgcccctcatgaatcccgggggccaattccatcctacccctccacctcttcagcattacaccttagaggatattgcaacttctcacctgtatcgggaacccaacaagatgctagagcatcgagaagttcgtgatagacaccacagtcttggtctaaatggaggctatcaagatgagttggtagatcatcgtttgacagaaagggaatgggctgatgaatggaaacatcttgaccatgcgctgaattgcattatggaaatggtagagaaaacaaggcgctctatggcagttctgcggcgctgtcaggaatcagatcgtgaagaactcaactactggaaaagacggtacaatgaaaacacagagctgaggaaaacggggaccgagttggtctccaggcagcacagccctgggagtgcagattctctcagcaatgattctcagagagagttcaacagcaggccaggtacaggatacgtacctgtggagttttggaaaaaaacagaagaagctgtgaataaggtgaaaattcaggccatgtcagaagtacagaaggccgtcgctgaggcagagcagaaagcctttgaagtgattgcaacagagagagcacgaatggagcaaaccatagcggatgtcaagcggcaggccgcagaggatgctttcctcgtcatcaatgagcaagaggagtccacggagaactgctggaactgtggccgcaaagccagcgagacatgcagtggctgcaatatcgcgcgatactgtggctctttctgccagcacaaggactgggagcggcaccaccgcctctgtggtcagaacctgcatggccagagcccccacggccagggccggccgctgcttcctgtaggcaggggctcctctgccaggtccgccgactgcagcgtgcccagcccagccctcgacaagacctcggcaaccacatcgcgttcctcaacacctgcttctgtgacagctatcgacaccaacggactctgagccccggactctgcttaccctgatggctgctcagcaccacagagtgcttgggctgagggactgactgttggaacccgtgcatgtagctgccgggtcatcagcaagaaatgaattggaggcaggaagagtccaagcctgaataataacaccccacagcctctctgtgcacttgctgtctgcggagccagtgtgccattctctgcacatgggcagccagcctgagctgcctcctccatggctttcctggtttgttcctctctccactgaagctgacttagccggccccttttcagtgtagaccaccagctcccctccccatctccttgagtcagcagactgtccaatgtgctcagccaggctggaggcggcaggcggcaggcagcaggctgtggaggaggcccctcggtcagggagcggcctgcctcacccctgaatagctccttcggccccatctccatcctcagcagatgacactgattggcctcacggggacttgggtaagcaacaggcggcattcaggactcttctcaaccctgctgttcagacttgataagatctcagagtccacaggaaagaagtcactgttgcaataaaagcacccgtagtagcaaaaacataaaacaaataaaacttcccccacatcacagatgattttggacaagattttccaaccttgctggctactttagtttgggacctgttttttttctcatttgattttgcttgtgcagaaaatagtttccagcacatggattgatctgagagagaatgaggctcagttgtggatagtctgttttctctgagcatgttggccaactagtatcgtcaaattattgagtggatcatctcttggaaatgcagaacttctgccaccacttggctatttgcacagtcatcttgttctgtgtccttttatctctcagaccacacacatctggaacgctgtgggcatcttctgcccatgggctccatttggcacctgctgagccacagttgtcctgctggatgtgctgtgcaggttggtaggacttgcccccactgtcaaggcctggtctcatctgaaaagccctcctggacctcaaagaattcttcagacctcatagttacaggtcattatatctactatgttgatttatcatcaggcacacaacttctgtttccttctcttgtgttatctgatagcgtccctccttgagctcatcagaaaggttttatgaaatgtgaaccattttgggaaaagctgatcaatttttcttcctagcttcccattttcaaatgggacatcactcatatccctttcagaatgttaggaactgcctcccacattcttccctgtctttttgggttttgttttttgttgttgtggtggttttttaacacaaagtctcactctgttgcccaggctggagtgcagtggcatgatcttggctcactgcaacctctgccttccaggttcaagcaattctcctgcctcagcctcccgagtagctgagattacaggcgcccaccaccacgcccagctaatttttgtatttttagtagagacagggtttcaccatgttggccaggctgatctcgaactcctgacctcaggtgacctgccttggcctcccaaagtgcagggattacaagcgtgagccaccatgcccggcctgtctttttggttttgatgggagtctgaggaccccgacccctcctgctctccatctttgagcctctggcatcctctcacacccagaaatcagttggagtaagtttaattggccctgctccagctggcctttgaagcacaagtttaaatctccaccttctgtgcactgaccagagtctaaaataaaagttgtcagtaccataaaggaaaagggatccacacaggtagccttctccttggatacaggtacatcttactgtaagaatttcaagtcctggctgggcgcagtggctcactcctgtaatcccagcactttgagagaccgaggcaggcagatcacttgaggtcaggaattcaagaccaacctggccaacatggtgaaaccctgtctctaataaaaaaaaaatagaaaaatcagccgggtgtggtggcacacacctgtaatcctagctactcaggaggctgaggcaagagaatctcttgaacctgtgagccagaggttgcagtgagccgagattccaccactgcactccagcctgggcaacagagcaaaactctgtctcaaaaaaaaaaaaaaaaaggcaaaattaaagaatttcaagtccctaatttactctaaccaagcattttcagtcttacaaagaaatctagtgcacgacacctttaaaatgcctagatttccattgcctaaagtaaggtgtgaccagtgaaacaacagcagagaatcatgttcctttgctgtggaacacataagccccacagttttccagtcagcctaatacatgggtatcccccgaccccatctgcctccttaagccacagtccttggtggggaactctaagggggacggagtcagtaccccggacagggccacatttgcatgagacatggctgtctcacaggtcacagagccattacaacagcttactagtttttcatggatttgttggattaacaccttaagcaggttttttattgttattttgtttgtttgtttgttttgagacgggagtttctctcttgtctcccaggctggagtgcaatcgcgcaatctcggctcacggtaacctctgcctcccaggttcaagcgagtctcctgcctcagccttctgagtagctgggattacaggcatgcgccaccacgcccaactaattttgtatttttagtagagacggggtttctccttgttggtcaggctggtctcaaaccccggacctcaggtgatccccccaccttggcctcccaaagtgccaggattacaggcatgagccactgtgtccggtcttgagcaggtttttaaaatctccagtggccataaaactagccagggtagctcatgcttttactggttggaataaggagccaaaaccaacaaaataatatttattagggctcgatgcccatttctgtggctaaggcttaggtttggtgtgcagagcctggcctgctcttgtgggctgtggttgctgtgacagtttcgttttctgaatctttgtaatgctcttccaccctgctcgtgctgcccagaggctgatctgcaaacctgggcagtattccacactgaagctcagtttgcaaaccttctgctgtgttaattctggtcagtttcacacagaagtcacgagggcctctgcccaggaccttctattcacatttcaagaatccctttctgaaattctccaactctctggtcaggaggaggagcaccattggggcggggtaggcagctagaggcgcaggagcgaatccaggttccttgcgtggttcccagcctctgctgacagcacctcagctaccaggtggggagtggaaattcagcctgcttagaggactgacctctacagttcatatttgcagtgacataaaaggcaaagaggagctggcatggtggtacagaaggtatcagtcaagcgcaggctcttcagaaacctagaaactaaaaagagatgcaacatgtgactggccatcagccagacatgtctagggtgagaccagtgctcagcaccacccgccaaggaacactgatgagttgtgggacattatggtcggccaagtgaggaatgattgcagggaccagagaagaccaaagatgccagatgtccccagagtttcttgagggctgggtttcacgtctttgcttgtcctttttgtccccacttgcctgcaccgtgcctgactcatccagtggggaaggtgactcaagaagttgtttaagcctaggcctaggcagtccacttcgggaggtgggggcactccacactggggggccctgcagctccagggctggtgctctagcagatccgctcaggcacggttgggtgaccgtggggtcaccgattgcgtagattatttctagggcagtgctgggttagaaatgtctgtctggaaacaggacacatcttgccaccacaagtccacacctggccttggctgctgcccgctctctgcagcgtggatttcctttgcccatttgggccagaaggtcaccaggagttcatcactgcttagtgtcaacttgacatcttcagcttccagacagaaaacccatgctttactttgtacagccctgtcccagagttagtaagcctcggcttgtcacctgcttgcaaagggtatagacatcattctgggtagttctagaggatatcgcaacaagtgcgtttgaaggttcagcacagctggaattgtacggtagtgagctcttcaaaatgaaaacagaatgaccggatggccatctgtcctggaaactgtagaattgaataaatcactgaaaatagaacacttcttggaggctttcttcagaactgaactagaaacaaggtttccaggctcccaggtcagtagaccaaaccaacttccttagatttttttttttaagctgtttgcagaaaactgggtggtagcgtgtctgaaccaaacggaagaatagccagcggagcatggactgttccagcacgggccagatggccagctgtcgagagcagccctgcccagattgcggtgggggctgtgccagcggctccgcagggcccttccaactctggagtgtctgtagttcttgtgaaaccaaaacgttgactacctgcctctttcctcgggcatcgacgtgctcatttccaaagatgatggtgcaggtgaccttttccatcgtgagctaagagaaggttaggaggcctgaggggcgggccttgtgtcccctcctccccctccacagcccctgaggtggagcttccctcacagaccccatctggtcgagcctacggctgcccagtgtacactcagtgatgcttataccaaatagggcatgtgcgctggtgtctgttggggacagccccatccctaccttggagtcggcagagaagcagcaataagcattaggcgaatgattgaaagggctgctgcgccaagaggccttcagtccccttaacgtggctttccaacttcctgacgaggctacaaaggctccgctcacaaaagaaagccaataatgtaaataaatagaaaacgaagcctccacgcgtggtttttaaagggggatgatgaatgtgacaccacccacagaatgcattagaatctggtttttctgtgctttgtcattttactctgataggaatttttgttacctaactctgtgcataacttatttaatgtactgtataaatgaaccaaaactgttaaatatgtatttagtttgttctacttaaagtagtcaataaaaaggctatattcctt

SEQ ID NO: 6803 - DNA, 1883 bp, Homo sapiens
  source 1..1883: mol_type = unassigned DNA
gcggcctaacggcggcggcggcggcggcgacggcgacagcagcggtggtggtgtctggttagctcggcggctgcagatctcgcggcgacgcctgcgagggacccgggccgcgggtcgaggcgggcggcgcctgcgagggacccgtgtcgcgggtagaggcgggcggcgcgcggcggcggcgctcggcgatggtaggcgtccctggagcggccgccttccagcaactcaacagtgacaattgaggaattccactgtaagctccaagaagccacaaactttccccttcgtccttttgtgattccatttctcaaggccaacctgcccctgctgcagcgggaactgctgcactgcgctcgggcggccaagcagaccccatcccagtacctggctcagcacgaacaccttctgctcaacacaagcattgcatcgcctgctgactcgtcagagttgctcatggaggtgcacggaaatgggaagaggcccagtccagagaggagagaagagaatagttttgatagagacacaattgctcctgagcctcctgccaagagagtatgtaccatcagccctgctcctcggcacagtcctgctctcactgtgcccctcatgaatcccgggggccaattccatcctacccctccacctcttcagcattacaccttagaggatattgcaacttctcacctgtatcgggaacccaacaagatgctagagcatcgagaagttcgtgatagacaccacagtcttggtctaaatggaggctatcaagatgagttggtagatcatcgtttgacagaaagggaatgggctgatgaatggaaacatcttgaccatgcgctgaattgcattatggaaatggtagagaaaacaaggcgctctatggcagttctgcggcgctgtcaggaatcagatcgtgaagaactcaactactggaaaagacggtacaatgaaaacacagagctgaggaaaacggggaccgagttggtctccaggcagcacagccctgggagtgcagattctctcagcaatgattctcagagagagttcaacagcaggccaggtacaggatacgtacctgtggagttttggaaaaaaacagaagaagctgtgaataaggtgaaaattcaggccatgtcagaagtacagaaggccgtcgctgaggcagagcagaaagcctttgaagtgattgcaacagagagagcacgaatggagcaaaccatagcggatgtcaagcggcaggccgcagaggatgctttcctcgtcatcaatgagcaagaggagtccacggagaactgctggaactgtggccgcaaagccagcgagacatgcagtggctgcaatatcgcgcgatactgtggctctttctgccagcacaaggactgggagcggcaccaccgcctctgtggtcagaacctgcatggccagagcccccacggccagggccggccgctgcttcctgtaggcaggggctcctctgccaggtccgccgactgcagcgtgcccagcccagccctcgacaagacctcggcaaccacatcgcgttcctcaacacctgcttctgtgacagctatcgacaccaacggactctgagccccggactctgcttaccctgaataataacaccccacagcctctctgtgcacttgctgtctgcggagccagtgtgccattctctgcacatgggcagccagcctgagctgcctcctccatggctttcctggtttgttcctctctccactgaagctgacttagccggccccttttcagtgtagaccaccagctcccctccccatctccttgagtcagcagactgtccaatgtgctcagccaggctggaggcggcaggcggcaggcagcaggctgtggaggaggcccctcggtca

SEQ ID NO: 6804 - DNA, 677 bp, Homo sapiens
  source 1..677: mol_type = unassigned DNA
tctggttagctcggcggctgcagatctcgcggcgacgcctgcgagggacccgggccgcgggtcgaggcgggcggcgcctgcgagggacccgtgtcgcgggtagaggcgggcggcgcgcggcggcggcgctcggcgatggtaggcgtccctggagcggccgccttccagcttggtcctgagaaaagggtgccagcgatgcctggatcgcctgtggaagtgaagatacagtccagatcctcacctcccaccatgccacccctcccaccaataaatcctggaggaccgaggccagtgtccttcactcctactgcattaagcaatggcatcaaccattctcctcctaccctgaatggtgccccatcaccgccacagagattcagcaatggtcctgcctcctccacatcatctgcactcacaaatcagcaattgccagccacttgtggtgctcgacaactcagcaagttgaaacgctttcttaccactctgcaacagtttggcaatgacatctcccctgagattggggagaaggtgcggactcttgttcttgcactggtgaactcaacagtgacaattgaggaattccactgtaagctccaagaagccacaaactttccccttcgtccttttgtgattccatttctcaaggccaacctgcccctgctgcagcgggaactgct

SEQ ID NO: 6805 - DNA, 575 bp, Homo sapiens
  source 1..575: mol_type = unassigned DNA
gattgagctttgaagattaggaggagaaaaagaggagctttggaatatctatttcaaataaatttggtgtatttaagaatctggattgtttataatttgggcatttgggaggtggggttttgccatgttgcccaggtgggtctcaaactcctgggctaaagcgatcttcccatgttggctgcccaaagtgctgggattacaggcaagagccaccataccagttcctgtctagatattatgatgaagattgaggatggtagtttttgtggagcacaatcctgactgtacctgtgatgttgcattcatcttttggaacataagcagatcaccaggtgaatggctaaagaatctggaataagcttgaaagaaatacaggtcctggcaaggcaatggaaagttggtcctgagaaaagggtgccagcgatgcctggatcgcctgtggaagtgaagatacagtccagatcctcacctcccaccatgccacccctcccaccaataaatcctggaggaccgaggccagtgtccttcactcctactgcattaagcaatggcatcaaccattctcctcctaccct

SEQ ID NO: 6806 - DNA, 3502 bp, Homo sapiens
  source 1..3502: mol_type = unassigned DNA
gtattttgggacttcacattcacattctcattgggctgaggctcaaacatatggaatgtgttattttgcagcgtctacattagggaaatcaagcagggcattggtgatgggaggaagtgaacaggaaccaggtaggatgatggtaagtggacagggtttaaaaacccagggcttttggcagtctgcccaaatctatgtctttagcccttgtttgtgcacctagtcttatttatttaattgcctcctggccatttacacctggatgccccagaggcacctccaccttctcacttgcctccacactagctttgtgtggactgtccatttcattgcctagctttagcattcttctctttcacctccacttccaggcccttcggtgctcccaacctttttctgcctcatcccttcctcagtgccacttattcctgcctaaattcagcctcttctatcagttcaatcattgcaccagcctcccggttgctatctctgtctttaatcttccccttgcatagaatcctttatggagtttcctttgaaaataaagtcaagccgactgggcacggtggctcatgcctgtaatcccagcactttgggaggccaaggtgggcggatcacgaggtcaagagatcgagaccatcctggctaacatggtgaaaccctgtctctattaaaaatacaaaaaattagccaggtgtggtggcgggcacctgtagtcccagctactcaggaggctgaggcaggagaatggcgtgaacccgggaggcggagcttgcagtgagcagagattacgccactgcactccagcctgggcaacagagcgggactccgtcgcaaaaaaaaaaaaagaaaataagttcaagccgggggtggtgcctcacccctataacactttaacaccaacgctttgggaggctgaggtaggaggatcacttgagcgcaggagttcgagacaagccttagcaacataaagctgtgaataaggtgaaaattcaggccatgtcagaagtacagaaggccgtcgctgaggcagagcagaaagcctttgaagtgattgcaacagagagagcacgaatggagcaaaccatagcggatgtcaagcggcaggccgcagaggatgctttcctcgtcatcaatgagcaagaggagtccacggagaactgctggaactgtggccgcaaagccagcgagacatgcagtggctgcaatatcgcgcgatactgtggctctttctgccagcacaaggactgggagcggcaccaccgcctctgtggtcagaacctgcatggccagagcccccacggccagggccggccgctgcttcctgtaggcaggggctcctctgccaggtccgccgactgcagcgtgcccagcccagccctcgacaagacctcggcaaccacatcgcgttcctcaacacctgcttctgtgacagctatcgacaccaacggactctgagccccggactctgcttaccctgatggctgctcagcaccacagagtgcttgggctgagggactgactgttggaacccgtgcatgtagctgccgggtcatcagcaagaaatgaattggaggcaggaagagtccaagcctgaataataacaccccacagcctctctgtgcacttgctgtctgcggagccagtgtgccattctctgcacatgggcagccagcctgagctgcctcctccatggctttcctggtttgttcctctctccactgaagctgacttagccggccccttttcagtgtagaccaccagctcccctccccatctccttgagtcagcagactgtccaatgtgctcagccaggctggaggcggcaggcggcaggcagcaggctgtggaggaggcccctcggtcagggagcggcctgcctcacccctgaatagctccttcggccccatctccatcctcagcagatgacactgattggcctcacggggacttgggtaagcaacaggcggcattcaggactcttctcaaccctgctgttcagacttgataagatctcagagtccacaggaaagaagtcactgttgcaataaaagcacccgtagtagcaaaaacataaaacaaataaaacttcccccacatcacagatgattttggacaagattttccaaccttgctggctactttagtttgggacctgttttttttctcatttgattttgcttgtgcagaaaatagtttccagcacatggattgatctgagagagaatgaggctcagttgtggatagtctgttttctctgagcatgttggccaactagtatcgtcaaattattgagtggatcatctcttggaaatgcagaacttctgccaccacttggctatttgcacagtcatcttgttctgtgtccttttatctctcagaccacacacatctggaacgctgtgggcatcttctgcccatgggctccatttggcacctgctgagccacagttgtcctgctggatgtgctgtgcaggttggtaggacttgcccccactgtcaaggcctggtctcatctgaaaagccctcctggacctcaaagaattcttcagacctcatagttacaggtcattatatctactatgttgatttatcatcaggcacacaacttctgtttccttctcttgtgttatctgatagcgtccctccttgagctcatcagaaaggttttatgaaatgtgaaccattttgggaaaagctgatcaatttttcttcctagcttcccattttcaaatgggacatcactcatatccctttcagaatgttaggaactgcctcccacattcttccctgtctttttgggttttgttttttgttgttgtggtggttttttaacacaaagtctcactctgttgcccaggctggagtgcagtggcatgatcttggctcactgcaacctctgccttccaggttcaagcaattctcctgcctcagcctcccgagtagctgagattacaggcgcccaccaccacgcccagctaatttttgtatttttagtagagacagggtttcaccatgttggccaggctgatctcgaactcctgacctcaggtgacctgccttggcctcccaaagtgcagggattacaagcgtgagccaccatgcccggcctgtctttttggttttgatgggagtctgaggaccccgacccctcctgctctccatctttgagcctctggcatcctctcacacccagaaatcagttggagtaagtttaattggccctgctccagctggcctttgaagcacaagtttaaatctccaccttctgtgcactgaccagagtctaaaataaaagttgtcagtaccataaaggaaaagggatccacacaggtagccttctccttggatacaggtacatcttactgtaagaatttcaagtcctggctgggcgcagtggctcactcctgtaatcccagcactttgagagaccgaggcaggcagatcacttgaggtcaggaattcaagaccaacctggccaacatggtgaaaccctgtctct

SEQ ID NO: 6807 - DNA, 4238 bp, Homo sapiens
  source 1..4238: mol_type = unassigned DNA
ggagggcctcggctttccagggacagaggcccaactccaggacgccccagctggcccagcccctcctctttccctcaaggctgcaggaggtcgggaaaggcagtcctggtagaggcctgtcctgggctccaggttggcccctgagggtggccctcctcatgccggcttcaagactgagggacagggcagccagttcagcctcgggatccacctgtggctccatgtcccagacgcaccctgtgctggagagcggcctcctggcatctgccggctgctccgcaccccggggtcccaggaagggcggcccagccccagtggacaggaaagctaaggcctcagcgatgccggactccccagcggaggtgaagacgcagccccggtccacaccccccagcatgccgcccccaccgcctgccgcatcccagggggccacacgccccccctccttcacgccacacacacatcgagaggacgggcctgcgacgctgccccacggccgttttcatggctgcttaaaatggtctatggtctgtctcttgatgaacggcagcagccactcaccaacagccatcaatggtgcaccgtgcacacccaacggcttcagcaatggcccggccacctcgtccacagcctccttgtccacacagcacctgcccccagcctgcggggcccggcagctcagcaagctcaagcgcttcctcaccacactgcagcagtttggcagcgacatctccccagagattggggagcgcgtgcgcacactggtgctgggcctggtgaactcgacattgacgatcgaggagtttcattccaagcttcaggaggccaccaacttccctctgcggccgtttgtcattcccttcctgaaggcaaacctgcccttgctgcagcgggagctcctgcactgtgcacgcctggccaagcagacgcccgcccagtacttggcccagcatgagcagctcctgctggacgccagcgcctcctcccccatcgactcctcagagctgctactggaagtcaacgagaacggcaagaggaggacgcccgacaggaccaaagagaacgggtcagaccgcgacccgctgcaccccgagcacctcagcaaacggccatgcaccctgaaccctgcccagcgctacagccccagcaacgggccaccgcagcccacaccgccgccgcactaccgcctggaggacatagccatggcccaccacttccgagatgcctaccgccacccagacccccgggagctacgagagcgccatcggccgcttgtggtgcctgggtcccggcaggaagaagtgatcgaccacaagctcacagagcgtgagtgggcagaagagtggaagcacctcaacaacctcctgaactgcatcatggacatggtggagaagacgcggcgctcgctcacggtgctgcgcaggtgccaggaggccgaccgcgaggagctcaaccactgggcgcggcgctacagcgacgccgaggacacaaagaagggccccgctcccgccgcggcccggccccgcagcagctccgccggtcccgaagggcctcagctagacgtgcctcgcgagttcctgccgaggaccctcaccggctacgtgcctgaggacatctggaggaaggctgaagaggccgtgaatgaggtgaagcggcaggccatgtcggagctgcagaaagccgtgtcggacgcggagcgcaaagcgcacgagctcatcaccacggagcgtgccaagatggagcgggccctggccgaggcgaagcggcaggcctccgaggacgccctgacggtcatcaaccagcaggaggactccagcgagagctgctggaactgcgggcggaaagccagtgagacgtgcagcggctgcaacgcggcacgctactgcgggtccttctgccagcatcgggactgggagaagcatcaccacgtgtgtggccagagcctgcagggccccacagccgtggtggccgacccggtgcctggaccgcccgaagccgcccacagcctgggcccctccctgcctgtgggtgctgccagccccagcgaagccggctctgcggggccttctcgccccggctcccccagcccacctggcccactggacaccgtgccccgctgaccccactggcccctggcctgccggacacagcaccgtgccaaccccacccagctccaggcccaccggatgctgtgcctggcctccgatgcctggcctgccagacactgcgccccgcctgacctgggggagccgaccaattagtcactgctgctactgcccctctccgaaagaagacacagaaccaacaaaaccgcattcagtgcacctgcctcagctacctaatgattccgcgcggagacctcctgacaacgtctcttcaagcatcctcagaagcctcgactgagctttagacagcagagcagatgccgcaggcgcggcggctctgcccacctctcttttcctctctgtctgtctctccccctctgtcttctctatcctctctctctctatgactatcacacactttctcttcaatgaaaaaatcgaattggtggcttatattttcagcaaagaattttggggggttttgtgtgttggcaaaagagctactcagaaatggacaaagaaaacgggggggttctccccctcctgattaaaaagggagaaagaaaactgcgattttatagctggagatctgaacccagctgtgcccctcccccaggggcgtgaggctgatcagcgaagacgggaggaaagatttcgatttctgactcaagatgcatttttggtttcagatttttttttcctgtaatgttaaactctttggctttaagtaaaaatccaaaaagtttttttaaaaaagcaaaggaagcatacttgtgaactaccttgctagctagccagccaaggataccggacacacctctgctccaaaggaaatccaaaaaagcaaacacaagaaatcaaaatccaaaatttgtttgtcactgccaaagtatttttttcactgtttcacttgctcttgggtttgtttggatgtgggtctttttctcttctgttctgattttgtttgtgggtgtcgggatatttgggtgcagagggtttgtgcccagttagaagcgacttttgttctcttctgcgtaggcgttggtgcgtccgccgcgtgtgcgtggtccgtgtgccgttgctccggcctgcgtctccatatgtgtaggaaaggacacgccgtctgtcctcacgccccctgtgacttttcatatttccgttttccacttgtggaaaaaaagtgctaaagttttcttcccagagagagcataattccgaaacaaaactgtgacaatcttttgggttgattctcgactgcttttcgagcatgcggagccagcaggcctccctgaaacactgcttctcggccagcccgtcctcctctacctctctcctctccgcgccctccgacctctctcggccccctcaccccagctccgacctctctcagccccatcgccccaactccaacctctcggccccatcgccccaccgcagctactcccctttcttccaaacttttgcagaaaaaacaaaaaaactacaaacaaaagcagccctctgcctcctccccagggaagaccctgaccgtgtacatagccctggtgctcctgcccagccacccctcagatgcgttcgcctctggccctggggtgtgtctcggtgacgttttctatcagacgtgctccctcccatcctccagccctgcccaccctccctccactcctctcaactgcctcagcgatttcaagaaggaaataaagggataaagaaattcatgcttgcaccgagtacaaggacagacagcaggcacggcccgcagcctggcatctgtgcgtgtggcgtggcccgtggcttggcatctgtgtgcgtggtgtggcccgtggcctggcatctgtgtgcgtggcgtggcccgtggcctggcatctgtgtgtgtggcgtggcccgtggcctggcatctgtgcgcgtggcgtggcccgtggcctggcatctgtgtgcgtggctatcaggagttctaggaactcagtgcaatacgggagtgacccagctactgaaccagccacgaacagcccgccagaggcctgaagctgagcgtgtacgttaatgtgaatgtatatagtctttgcagaggtccaaatgatattcatgatggtaataaacgagatgtttgccaaataaaaaacagaaaccgca

SEQ ID NO: 6808 - DNA, 4033 bp, Homo sapiens
  source 1..4033: mol_type = unassigned DNA
ggccgccccgcgcgccccagccccgccgcgcgcctgagcccggtgcggcgccagaagacagcgcgcagccgcccctgagtcgtggaggcggggaccaagctggaaggagcagcgactcccggaccgagtcgcgagtgtgcgccgtccgccgcccgccggatcccccggaccccccgaccccccagtggacaggaaagctaaggcctcagcgatgccggactccccagcggaggtgaagacgcagccccggtccacaccccccagcatgccgcccccaccgcctgccgcatcccagggggccacacgccccccctccttcacgccacacacactgatgaacggcagcagccactcaccaacagccatcaatggtgcaccgtgcacacccaacggcttcagcaatggcccggccacctcgtccacagcctccttgtccacacagcacctgcccccagcctgcggggcccggcagctcagcaagctcaagcgcttcctcaccacactgcagcagtttggcagcgacatctccccagagattggggagcgcgtgcgcacactggtgctgggcctggtgaactcgacattgacgatcgaggagtttcattccaagcttcaggaggccaccaacttccctctgcggccgtttgtcattcccttcctgaaggcaaacctgcccttgctgcagcgggagctcctgcactgtgcacgcctggccaagcagacgcccgcccagtacttggcccagcatgagcagctcctgctggacgccagcgcctcctcccccatcgactcctcagagctgctactggaagtcaacgagaacggcaagaggaggacgcccgacaggaccaaagagaacgggtcagaccgcgacccgctgcaccccgagcacctcagcaaacggccatgcaccctgaaccctgcccagcgctacagccccagcaacgggccaccgcagcccacaccgccgccgcactaccgcctggaggacatagccatggcccaccacttccgagatgcctaccgccacccagacccccgggagctacgagagcgccatcggccgcttgtggtgcctgggtcccggcaggaagaagtgatcgaccacaagctcacagagcgtgagtgggcagaagagtggaagcacctcaacaacctcctgaactgcatcatggacatggtggagaagacgcggcgctcgctcacggtgctgcgcaggtgccaggaggccgaccgcgaggagctcaaccactgggcgcggcgctacagcgacgccgaggacacaaagaagggccccgctcccgccgcggcccggccccgcagcagctccgccggtcccgaagggcctcagctagacgtgcctcgcgagttcctgccgaggaccctcaccggctacgtgcctgaggacatctggaggaaggctgaagaggccgtgaatgaggtgaagcggcaggccatgtcggagctgcagaaagccgtgtcggacgcggagcgcaaagcgcacgagctcatcaccacggagcgtgccaagatggagcgggccctggccgaggcgaagcggcaggcctccgaggacgccctgacggtcatcaaccagcaggaggactccagcgagagctgctggaactgcgggcggaaagccagtgagacgtgcagcggctgcaacgcggcacgctactgcgggtccttctgccagcatcgggactgggagaagcatcaccacgtgtgtggccagagcctgcagggccccacagccgtggtggccgacccggtgcctggaccgcccgaagccgcccacagcctgggcccctccctgcctgtgggtgctgccagccccagcgaagccggctctgcggggccttctcgccccggctcccccagcccacctggcccactggacaccgtgccccgctgaccccactggcccctggcctgccggacacagcaccgtgccaaccccacccagctccaggcccaccggatgctgtgcctggcctccgatgcctggcctgccagacactgcgccccgcctgacctgggggagccgaccaattagtcactgctgctactgcccctctccgaaagaagacacagaaccaacaaaaccgcattcagtgcacctgcctcagctacctaatgattccgcgcggagacctcctgacaacgtctcttcaagcatcctcagaagcctcgactgagctttagacagcagagcagatgccgcaggcgcggcggctctgcccacctctcttttcctctctgtctgtctctccccctctgtcttctctatcctctctctctctatgactatcacacactttctcttcaatgaaaaaatcgaattggtggcttatattttcagcaaagaattttggggggttttgtgtgttggcaaaagagctactcagaaatggacaaagaaaacgggggggttctccccctcctgattaaaaagggagaaagaaaactgcgattttatagctggagatctgaacccagctgtgcccctcccccaggggcgtgaggctgatcagcgaagacgggaggaaagatttcgatttctgactcaagatgcatttttggtttcagatttttttttcctgtaatgttaaactctttggctttaagtaaaaatccaaaaagtttttttaaaaaagcaaaggaagcatacttgtgaactaccttgctagctagccagccaaggataccggacacacctctgctccaaaggaaatccaaaaaagcaaacacaagaaatcaaaatccaaaatttgtttgtcactgccaaagtatttttttcactgtttcacttgctcttgggtttgtttggatgtgggtctttttctcttctgttctgattttgtttgtgggtgtcgggatatttgggtgcagagggtttgtgcccagttagaagcgacttttgttctcttctgcgtaggcgttggtgcgtccgccgcgtgtgcgtggtccgtgtgccgttgctccggcctgcgtctccatatgtgtaggaaaggacacgccgtctgtcctcacgccccctgtgacttttcatatttccgttttccacttgtggaaaaaaagtgctaaagttttcttcccagagagagcataattccgaaacaaaactgtgacaatcttttgggttgattctcgactgcttttcgagcatgcggagccagcaggcctccctgaaacactgcttctcggccagcccgtcctcctctacctctctcctctccgcgccctccgacctctctcggccccctcaccccagctccgacctctctcagccccatcgccccaactccaacctctcggccccatcgccccaccgcagctactcccctttcttccaaacttttgcagaaaaaacaaaaaaactacaaacaaaagcagccctctgcctcctccccagggaagaccctgaccgtgtacatagccctggtgctcctgcccagccacccctcagatgcgttcgcctctggccctggggtgtgtctcggtgacgttttctatcagacgtgctccctcccatcctccagccctgcccaccctccctccactcctctcaactgcctcagcgatttcaagaaggaaataaagggataaagaaattcatgcttgcaccgagtacaaggacagacagcaggcacggcccgcagcctggcatctgtgcgtgtggcgtggcccgtggcttggcatctgtgtgcgtggtgtggcccgtggcctggcatctgtgtgcgtggcgtggcccgtggcctggcatctgtgtgtgtggcgtggcccgtggcctggcatctgtgcgcgtggcgtggcccgtggcctggcatctgtgtgcgtggctatcaggagttctaggaactcagtgcaatacgggagtgacccagctactgaaccagccacgaacagcccgccagaggcctgaagctgagcgtgtacgttaatgtgaatgtatatagtctttgcagaggtccaaatgatattcatgatggtaataaacgagatgtttgccaaataaaaaacagaaaccgca

SEQ ID NO: 6809 - DNA, 4190 bp, Homo sapiens
  source 1..4190: mol_type = unassigned DNA
agggcagaggacacccagttggtggccgggagggcctcggctttccagggacagaggcccaactccaggacgccccagctggcccagcccctcctctttccctcaaggctgcaggaggtcgggaaaggcagtcctggtagaggcctgtcctgggctccaggttggcccctgagggtggccctcctcatgccggcttcaagactgagggacagggcagccagttcagcctcgggatccacctgtggctccatgtcccagacgcaccctgtgctggagagcggcctcctggcatctgccggctgctccgcaccccggggtcccaggaagggcggcccagccccagtggacaggaaagctaaggcctcagcgatgccggactccccagcggaggtgaagacgcagccccggtccacaccccccagcatgccgcccccaccgcctgccgcatcccagggggccacacgccccccctccttcacgccacacacactgatgaacggcagcagccactcaccaacagccatcaatggtgcaccgtgcacacccaacggcttcagcaatggcccggccacctcgtccacagcctccttgtccacacagcacctgcccccagcctgcggggcccggcagctcagcaagctcaagcgcttcctcaccacactgcagcagtttggcagcgacatctccccagagattggggagcgcgtgcgcacactggtgctgggcctggtgaactcgacattgacgatcgaggagtttcattccaagcttcaggaggccaccaacttccctctgcggccgtttgtcattcccttcctgaaggcaaacctgcccttgctgcagcgggagctcctgcactgtgcacgcctggccaagcagacgcccgcccagtacttggcccagcatgagcagctcctgctggacgccagcgcctcctcccccatcgactcctcagagctgctactggaagtcaacgagaacggcaagaggaggacgcccgacaggaccaaagagaacgggtcagaccgcgacccgctgcaccccgagcacctcagcaaacggccatgcaccctgaaccctgcccagcgctacagccccagcaacgggccaccgcagcccacaccgccgccgcactaccgcctggaggacatagccatggcccaccacttccgagatgcctaccgccacccagacccccgggagctacgagagcgccatcggccgcttgtggtgcctgggtcccggcaggaagaagtgatcgaccacaagctcacagagcgtgagtgggcagaagagtggaagcacctcaacaacctcctgaactgcatcatggacatggtggagaagacgcggcgctcgctcacggtgctgcgcaggtgccaggaggccgaccgcgaggagctcaaccactgggcgcggcgctacagcgacgccgaggacacaaagaagggccccgctcccgccgcggcccggccccgcagcagctccgccggtcccgaagggcctcagctagacgtgcctcgcgagttcctgccgaggaccctcaccggctacgtgcctgaggacatctggaggaaggctgaagaggccgtgaatgaggtgaagcggcaggccatgtcggagctgcagaaagccgtgtcggacgcggagcgcaaagcgcacgagctcatcaccacggagcgtgccaagatggagcgggccctggccgaggcgaagcggcaggcctccgaggacgccctgacggtcatcaaccagcaggaggactccagcgagagctgctggaactgcgggcggaaagccagtgagacgtgcagcggctgcaacgcggcacgctactgcgggtccttctgccagcatcgggactgggagaagcatcaccacgtgtgtggccagagcctgcagggccccacagccgtggtggccgacccggtgcctggaccgcccgaagccgcccacagcctgggcccctccctgcctgtgggtgctgccagccccagcgaagccggctctgcggggccttctcgccccggctcccccagcccacctggcccactggacaccgtgccccgctgaccccactggcccctggcctgccggacacagcaccgtgccaaccccacccagctccaggcccaccggatgctgtgcctggcctccgatgcctggcctgccagacactgcgccccgcctgacctgggggagccgaccaattagtcactgctgctactgcccctctccgaaagaagacacagaaccaacaaaaccgcattcagtgcacctgcctcagctacctaatgattccgcgcggagacctcctgacaacgtctcttcaagcatcctcagaagcctcgactgagctttagacagcagagcagatgccgcaggcgcggcggctctgcccacctctcttttcctctctgtctgtctctccccctctgtcttctctatcctctctctctctatgactatcacacactttctcttcaatgaaaaaatcgaattggtggcttatattttcagcaaagaattttggggggttttgtgtgttggcaaaagagctactcagaaatggacaaagaaaacgggggggttctccccctcctgattaaaaagggagaaagaaaactgcgattttatagctggagatctgaacccagctgtgcccctcccccaggggcgtgaggctgatcagcgaagacgggaggaaagatttcgatttctgactcaagatgcatttttggtttcagatttttttttcctgtaatgttaaactctttggctttaagtaaaaatccaaaaagtttttttaaaaaagcaaaggaagcatacttgtgaactaccttgctagctagccagccaaggataccggacacacctctgctccaaaggaaatccaaaaaagcaaacacaagaaatcaaaatccaaaatttgtttgtcactgccaaagtatttttttcactgtttcacttgctcttgggtttgtttggatgtgggtctttttctcttctgttctgattttgtttgtgggtgtcgggatatttgggtgcagagggtttgtgcccagttagaagcgacttttgttctcttctgcgtaggcgttggtgcgtccgccgcgtgtgcgtggtccgtgtgccgttgctccggcctgcgtctccatatgtgtaggaaaggacacgccgtctgtcctcacgccccctgtgacttttcatatttccgttttccacttgtggaaaaaaagtgctaaagttttcttcccagagagagcataattccgaaacaaaactgtgacaatcttttgggttgattctcgactgcttttcgagcatgcggagccagcaggcctccctgaaacactgcttctcggccagcccgtcctcctctacctctctcctctccgcgccctccgacctctctcggccccctcaccccagctccgacctctctcagccccatcgccccaactccaacctctcggccccatcgccccaccgcagctactcccctttcttccaaacttttgcagaaaaaacaaaaaaactacaaacaaaagcagccctctgcctcctccccagggaagaccctgaccgtgtacatagccctggtgctcctgcccagccacccctcagatgcgttcgcctctggccctggggtgtgtctcggtgacgttttctatcagacgtgctccctcccatcctccagccctgcccaccctccctccactcctctcaactgcctcagcgatttcaagaaggaaataaagggataaagaaattcatgcttgcaccgagtacaaggacagacagcaggcacggcccgcagcctggcatctgtgcgtgtggcgtggcccgtggcttggcatctgtgtgcgtggtgtggcccgtggcctggcatctgtgtgcgtggcgtggcccgtggcctggcatctgtgtgtgtggcgtggcccgtggcctggcatctgtgcgcgtggcgtggcccgtggcctggcatctgtgtgcgtggctatcaggagttctaggaactcagtgcaatacgggagtgacccagctactgaaccagccacgaacagcccgccagaggcctgaagctgagcgtgtacgttaatgtgaatgtatatagtctttgcagaggtccaaatgatattcatgatggtaataaacgagatgtttgccaaataaaaaacagaaaccgc

SEQ ID NO: 6810 - DNA, 4151 bp, Homo sapiens
  source 1..4151: mol_type = unassigned DNA
agggcagaggacacccagttggtggccgggagggcctcggctttccagggacagaggcccaactccaggacgccccagctggcccagcccctcctctttccctcaaggctgcaggaggtcgggaaaggcagtcctggtagaggcctgtcctgggctccaggttggcccctgagggtggccctcctcatgccggcttcaagactgagggacagggcagccagttcagcctcgggatccacctgtggctccatgtcccagacgcaccctgtgctggagagcggcctcctggcatctgccggctgctccgcaccccggggtcccaggaagggcggcccagccccagtggacaggaaagctaaggcctcagcgatgccggactccccagcggaggtgaagacgcagccccggtccacaccccccagcatgccgcccccaccgcctgccgcatcccagggggccacacgccccccctccttcacgccacacacactgatgaacggcagcagccactcaccaacagccatcaatggtgcaccgtgcacacccaacggcttcagcaatggcccggccacctcgtccacagcctccttgtccacacagcacctgcccccagcctgcggggcccggcagctcagcaagctcaagcgcttcctcaccacactgcagcagtttggcagcgacatctccccagagattggggagcgcgtgcgcacactggtgctgggcctggtgaactcgacattgacgatcgaggagtttcattccaagcttcaggaggccaccaacttccctctgcggccgtttgtcattcccttcctgaaggcaaacctgcccttgctgcagcgggagctcctgcactgtgcacgcctggccaagcagacgcccgcccagtacttggcccagcatgagcagctcctgctggacgccagcgcctcctcccccatcgactcctcagagctgctactggaagtcaacgagaacggcaagaggaggacgcccgacaggaccaaagagaacgggtcagaccgcgacccgctgcaccccgagcgctacagccccagcaacgggccaccgcagcccacaccgccgccgcactaccgcctggaggacatagccatggcccaccacttccgagatgcctaccgccacccagacccccgggagctacgagagcgccatcggccgcttgtggtgcctgggtcccggcaggaagaagtgatcgaccacaagctcacagagcgtgagtgggcagaagagtggaagcacctcaacaacctcctgaactgcatcatggacatggtggagaagacgcggcgctcgctcacggtgctgcgcaggtgccaggaggccgaccgcgaggagctcaaccactgggcgcggcgctacagcgacgccgaggacacaaagaagggccccgctcccgccgcggcccggccccgcagcagctccgccggtcccgaagggcctcagctagacgtgcctcgcgagttcctgccgaggaccctcaccggctacgtgcctgaggacatctggaggaaggctgaagaggccgtgaatgaggtgaagcggcaggccatgtcggagctgcagaaagccgtgtcggacgcggagcgcaaagcgcacgagctcatcaccacggagcgtgccaagatggagcgggccctggccgaggcgaagcggcaggcctccgaggacgccctgacggtcatcaaccagcaggaggactccagcgagagctgctggaactgcgggcggaaagccagtgagacgtgcagcggctgcaacgcggcacgctactgcgggtccttctgccagcatcgggactgggagaagcatcaccacgtgtgtggccagagcctgcagggccccacagccgtggtggccgacccggtgcctggaccgcccgaagccgcccacagcctgggcccctccctgcctgtgggtgctgccagccccagcgaagccggctctgcggggccttctcgccccggctcccccagcccacctggcccactggacaccgtgccccgctgaccccactggcccctggcctgccggacacagcaccgtgccaaccccacccagctccaggcccaccggatgctgtgcctggcctccgatgcctggcctgccagacactgcgccccgcctgacctgggggagccgaccaattagtcactgctgctactgcccctctccgaaagaagacacagaaccaacaaaaccgcattcagtgcacctgcctcagctacctaatgattccgcgcggagacctcctgacaacgtctcttcaagcatcctcagaagcctcgactgagctttagacagcagagcagatgccgcaggcgcggcggctctgcccacctctcttttcctctctgtctgtctctccccctctgtcttctctatcctctctctctctatgactatcacacactttctcttcaatgaaaaaatcgaattggtggcttatattttcagcaaagaattttggggggttttgtgtgttggcaaaagagctactcagaaatggacaaagaaaacgggggggttctccccctcctgattaaaaagggagaaagaaaactgcgattttatagctggagatctgaacccagctgtgcccctcccccaggggcgtgaggctgatcagcgaagacgggaggaaagatttcgatttctgactcaagatgcatttttggtttcagatttttttttcctgtaatgttaaactctttggctttaagtaaaaatccaaaaagtttttttaaaaaagcaaaggaagcatacttgtgaactaccttgctagctagccagccaaggataccggacacacctctgctccaaaggaaatccaaaaaagcaaacacaagaaatcaaaatccaaaatttgtttgtcactgccaaagtatttttttcactgtttcacttgctcttgggtttgtttggatgtgggtctttttctcttctgttctgattttgtttgtgggtgtcgggatatttgggtgcagagggtttgtgcccagttagaagcgacttttgttctcttctgcgtaggcgttggtgcgtccgccgcgtgtgcgtggtccgtgtgccgttgctccggcctgcgtctccatatgtgtaggaaaggacacgccgtctgtcctcacgccccctgtgacttttcatatttccgttttccacttgtggaaaaaaagtgctaaagttttcttcccagagagagcataattccgaaacaaaactgtgacaatcttttgggttgattctcgactgcttttcgagcatgcggagccagcaggcctccctgaaacactgcttctcggccagcccgtcctcctctacctctctcctctccgcgccctccgacctctctcggccccctcaccccagctccgacctctctcagccccatcgccccaactccaacctctcggccccatcgccccaccgcagctactcccctttcttccaaacttttgcagaaaaaacaaaaaaactacaaacaaaagcagccctctgcctcctccccagggaagaccctgaccgtgtacatagccctggtgctcctgcccagccacccctcagatgcgttcgcctctggccctggggtgtgtctcggtgacgttttctatcagacgtgctccctcccatcctccagccctgcccaccctccctccactcctctcaactgcctcagcgatttcaagaaggaaataaagggataaagaaattcatgcttgcaccgagtacaaggacagacagcaggcacggcccgcagcctggcatctgtgcgtgtggcgtggcccgtggcttggcatctgtgtgcgtggtgtggcccgtggcctggcatctgtgtgcgtggcgtggcccgtggcctggcatctgtgtgtgtggcgtggcccgtggcctggcatctgtgcgcgtggcgtggcccgtggcctggcatctgtgtgcgtggctatcaggagttctaggaactcagtgcaatacgggagtgacccagctactgaaccagccacgaacagcccgccagaggcctgaagctgagcgtgtacgttaatgtgaatgtatatagtctttgcagaggtccaaatgatattcatgatggtaataaacgagatgtttgccaaataaaaaacagaaaccgc

SEQ ID NO: 6811 - DNA, 4037 bp, Homo sapiens
  source 1..4037: mol_type = unassigned DNA
agggcagaggacacccagttggtggccgggagggcctcggctttccagggacagaggcccaactccaggacgccccagctggcccagcccctcctctttccctcaaggctgcaggaggtcgggaaaggcagtcctggtagaggcctgtcctgggctccaggttggcccctgagggtggccctcctcatgccggcttcaagactgagggacagggcagccagttcagcctcgggatccacctgtggctccatgtcccagacgcaccctgtgctggagagcggcctcctggcatctgccggctgctccgcaccccggggtcccaggaagggcggcccagtgatgaacggcagcagccactcaccaacagccatcaatggtgcaccgtgcacacccaacggcttcagcaatggcccggccacctcgtccacagcctccttgtccacacagcacctgcccccagcctgcggggcccggcagctcagcaagctcaagcgcttcctcaccacactgcagcagtttggcagcgacatctccccagagattggggagcgcgtgcgcacactggtgctgggcctggtgaactcgacattgacgatcgaggagtttcattccaagcttcaggaggccaccaacttccctctgcggccgtttgtcattcccttcctgaaggcaaacctgcccttgctgcagcgggagctcctgcactgtgcacgcctggccaagcagacgcccgcccagtacttggcccagcatgagcagctcctgctggacgccagcgcctcctcccccatcgactcctcagagctgctactggaagtcaacgagaacggcaagaggaggacgcccgacaggaccaaagagaacgggtcagaccgcgacccgctgcaccccgagcacctcagcaaacggccatgcaccctgaaccctgcccagcgctacagccccagcaacgggccaccgcagcccacaccgccgccgcactaccgcctggaggacatagccatggcccaccacttccgagatgcctaccgccacccagacccccgggagctacgagagcgccatcggccgcttgtggtgcctgggtcccggcaggaagaagtgatcgaccacaagctcacagagcgtgagtgggcagaagagtggaagcacctcaacaacctcctgaactgcatcatggacatggtggagaagacgcggcgctcgctcacggtgctgcgcaggtgccaggaggccgaccgcgaggagctcaaccactgggcgcggcgctacagcgacgccgaggacacaaagaagggccccgctcccgccgcggcccggccccgcagcagctccgccggtcccgaagggcctcagctagacgtgcctcgcgagttcctgccgaggaccctcaccggctacgtgcctgaggacatctggaggaaggctgaagaggccgtgaatgaggtgaagcggcaggccatgtcggagctgcagaaagccgtgtcggacgcggagcgcaaagcgcacgagctcatcaccacggagcgtgccaagatggagcgggccctggccgaggcgaagcggcaggcctccgaggacgccctgacggtcatcaaccagcaggaggactccagcgagagctgctggaactgcgggcggaaagccagtgagacgtgcagcggctgcaacgcggcacgctactgcgggtccttctgccagcatcgggactgggagaagcatcaccacgtgtgtggccagagcctgcagggccccacagccgtggtggccgacccggtgcctggaccgcccgaagccgcccacagcctgggcccctccctgcctgtgggtgctgccagccccagcgaagccggctctgcggggccttctcgccccggctcccccagcccacctggcccactggacaccgtgccccgctgaccccactggcccctggcctgccggacacagcaccgtgccaaccccacccagctccaggcccaccggatgctgtgcctggcctccgatgcctggcctgccagacactgcgccccgcctgacctgggggagccgaccaattagtcactgctgctactgcccctctccgaaagaagacacagaaccaacaaaaccgcattcagtgcacctgcctcagctacctaatgattccgcgcggagacctcctgacaacgtctcttcaagcatcctcagaagcctcgactgagctttagacagcagagcagatgccgcaggcgcggcggctctgcccacctctcttttcctctctgtctgtctctccccctctgtcttctctatcctctctctctctatgactatcacacactttctcttcaatgaaaaaatcgaattggtggcttatattttcagcaaagaattttggggggttttgtgtgttggcaaaagagctactcagaaatggacaaagaaaacgggggggttctccccctcctgattaaaaagggagaaagaaaactgcgattttatagctggagatctgaacccagctgtgcccctcccccaggggcgtgaggctgatcagcgaagacgggaggaaagatttcgatttctgactcaagatgcatttttggtttcagatttttttttcctgtaatgttaaactctttggctttaagtaaaaatccaaaaagtttttttaaaaaagcaaaggaagcatacttgtgaactaccttgctagctagccagccaaggataccggacacacctctgctccaaaggaaatccaaaaaagcaaacacaagaaatcaaaatccaaaatttgtttgtcactgccaaagtatttttttcactgtttcacttgctcttgggtttgtttggatgtgggtctttttctcttctgttctgattttgtttgtgggtgtcgggatatttgggtgcagagggtttgtgcccagttagaagcgacttttgttctcttctgcgtaggcgttggtgcgtccgccgcgtgtgcgtggtccgtgtgccgttgctccggcctgcgtctccatatgtgtaggaaaggacacgccgtctgtcctcacgccccctgtgacttttcatatttccgttttccacttgtggaaaaaaagtgctaaagttttcttcccagagagagcataattccgaaacaaaactgtgacaatcttttgggttgattctcgactgcttttcgagcatgcggagccagcaggcctccctgaaacactgcttctcggccagcccgtcctcctctacctctctcctctccgcgccctccgacctctctcggccccctcaccccagctccgacctctctcagccccatcgccccaactccaacctctcggccccatcgccccaccgcagctactcccctttcttccaaacttttgcagaaaaaacaaaaaaactacaaacaaaagcagccctctgcctcctccccagggaagaccctgaccgtgtacatagccctggtgctcctgcccagccacccctcagatgcgttcgcctctggccctggggtgtgtctcggtgacgttttctatcagacgtgctccctcccatcctccagccctgcccaccctccctccactcctctcaactgcctcagcgatttcaagaaggaaataaagggataaagaaattcatgcttgcaccgagtacaaggacagacagcaggcacggcccgcagcctggcatctgtgcgtgtggcgtggcccgtggcttggcatctgtgtgcgtggtgtggcccgtggcctggcatctgtgtgcgtggcgtggcccgtggcctggcatctgtgtgtgtggcgtggcccgtggcctggcatctgtgcgcgtggcgtggcccgtggcctggcatctgtgtgcgtggctatcaggagttctaggaactcagtgcaatacgggagtgacccagctactgaaccagccacgaacagcccgccagaggcctgaagctgagcgtgtacgttaatgtgaatgtatatagtctttgcagaggtccaaatgatattcatgatggtaataaacgagatgtttgccaaataaaaaacagaaaccgc

SEQ ID NO: 6812 - DNA, 526 bp, Homo sapiens
  source 1..526: mol_type = unassigned DNA
agtgcccgtgtctccacacgtctgcctccatcactgccatcgcgatcctgcagctatgtcctaccctgtgaccagtcagccccagtgcgccaccaccagctgctaccagacccagctcagtgactggcacacaggtctcacggactgctgcaacgacatgcctgtctgtctgtgcggcacttttgctcctctgtgccttgcctgccgcatctccgacgactttggcgagtgctgctgcgcgccctacctgcccggaggcctgcactccatccgcaccggcatgcgggagcgctaccacatccagggctccgtcgggcacgactgggcggccctcaccttttgtctgccctgcgccctctgccagatggcgcgggaactgaagatccgagagtaaggaagttccctgtcttccccgtccttttccaccagtctcgcctctggccttctctggccactcctgggagggactgcctcaccacccctgtcccgctgccagaaatacacccacaataaaaacctgaaaacc

SEQ ID NO: 6813 - DNA, 3284 bp, Homo sapiens
  source 1..3284: mol_type = unassigned DNA
tgctcagcgtgcacctgagacccgacgcccggggtcctcgaagacgcgtccgccgccgtgcccgtcgccatgaaccgcttcagggtgtccaagttccggcacaccgaggctcggccgccccgccgcgagtcctggatcagtgacattcgagcaggaaccgccccttcatgcaggaaccacatcaaatcaagctgcagcttgatcgccttcaactccgaccgtcctggtgtactgggcattgtgcctctgcaaggccaaggagaggacaagcgacgcgtggcccacctgggctgccattcagacctagtcaccgacttggacttctcgccctttgatgacttcctcctggccacaggctcggctgacaggacggtaaaactctggcgactgccagggcctggccaggccctgccctcagcacccggggtggtgctgggccccgaggacctcccagtggaggtactgcagttccaccccacctctgacggcattctggtgagcgcagcaggcaccactgtgaaggtctgggacgcagccaagcagcagcccctgacagagctggcagcccatggggacctggtgcagagcgccgtctggagccgagatggagccctggtgggcacggcgtgcaaggacaagcagctgcggatctttgaccccagaacaaagccgcgggcctctcagagcacgcaggcccatgagaacagcagggatagccggctggcatggatgggcacctgggagcaccttgtgtctactggattcaaccagatgcgtgagcgcgaagtgaagctgtgggacacgcggttcttctccagcgccctggcctccctcaccttggacacctcgcttgggtgtctcgtgcctctgctggaccctgactctgggctcctggtcctggcaggaaagggcgagaggcagctgtactgttacgaggtggtcccgcagcagccggcgctgagcccagtgacccagtgtgtcctggagagcgtgctgcgtggggctgcccttgtgccccggcaggcgctggccgtcatgagctgcgaggtactccgcgtcctacagctgagcgacacagccatcgtgcccatcggctaccatgtgccccgcaaggctgtggagttccacgaggacctgttcccggacactgccggctgtgtgcctgccaccgacccccatagctggtgggctggggacaaccagcaggtgcagaaggtcagcctcaaccccgcctgccggccccacccgagcttcacttcctgtctggtgccccctgcggagcccctccctgacacagcccagcctgcggtgatggagacacccgtgggtgatgcagacgcaagcgagggtttctcttcccctcccagttcgctgacctcgccctccacgccctccagcctggggccctcactctccagcaccagtggcatcgggaccagccccagtttgaggtcgctgcagagcctgctgggccccagttccaagttccgccatgctcagggcactgtcctgcaccgagacagccacatcaccaacctcaaggggctcaacctcaccacacctggtgagagtgacggcttctgtgccaacaagctgcgtgtggccgtgccgctgctcagcagcgggggacaggtggctgtgcttgagctacggaagcctggccgcctgcccgacacggcactgcccacgctgcagaatggggcagctgtgactgatctggcctgggacccctttgacccccatcgcctcgctgtggctggtgaggacgccaggatccgactgtggcgggtacccgcagagggcctggaagaggtgctcaccacgccagagactgtgctcacaggccacacggagaagatctgctccctgcgcttccacccactggcagccaatgtgctggcctcgtcctcctatgacctcactgttcgcatctgggaccttcaggctggagctgatcggctgaagctgcagggccaccaagaccagatcttcagcctggcctggagtcctgatgggcagcagctggccactgtctgcaaggatgggcgtgtgcgggtctacaggccccggagtggccctgagcccctgcaggaaggcccagggcccaagggaggacgcggagctcgcattgtctgggtatgtgatggtcgctgtctgctggtgtctggctttgacagccaaagtgagcgccagctgctcctatatgaagctgaggccctggccggcggacccttggcagtgttgggcctggacgtggctccctcaaccctgctgcccagctacgacccagacactggcctggtgctcctgaccggcaagggcgacacccgtgtattcctgtacgagctgctccccgagtcccctttcttcctggagtgcaacagcttcacgtcgcctgacccccacaagggcctcgtcctcctgcctaagacggagtgcgacgtgcgggaagtggagctgatgcggtgcctgcggctgcgtcagtcctccctggagcctgtggccttccggctgccccgagtccggaaagagttcttccaggatgacgtgttcccagacacggctgtgatctgggagcctgtgctcagtgccgaggcctggctgcaaggcgctaatgggcagccctggcttctcagcctgcagcctcctgacatgagcccagtgagccaagccccccgagaggcccctgctcgtcgggccccatcctcagcgcagtacctggaagaaaagtctgaccagcaaaagaaggaggagctgctgaatgccatggtggcaaaactggggaaccgggaggacccactcccccaggactcctttgaaggcgtggacgaggacgagtgggccaagtacctggcccagatcattgtgatgggcgtgcaggtggtgggcagggcctttgcacgggccttgcggcaggagtttgcagccagccgggccgcagctgatgcccgaggacgcgctggacaccggtctgcagccgcttccaacctctccggcctcagcctccaggaggcacagcagattctcaacgtgtccaagctgagccctgaggaggtccagaagaactatgaacacttatttaaggtgaatgataaatccgtgggtggctccttctacctgcagtcaaaggtggtccgcgcaaaggagcgcctggatgaggaactcaaaatccaggcccaggaggacagagaaaaagggcagatgccccatacgtgactgctcggctccccccgcccaccccgccgcctctaatttatagcttggtaataaatttcttttctgca

SEQ ID NO: 6814 - DNA, 3496 bp, Homo sapiens
  source 1..3496: mol_type = unassigned DNA
cccgggtggggccgaggcagcgggagtcgcggttgctcagcgtgcacctgagacccgacgcccggggtcctcgaagacgcgtccgccgccgtgcccgtcgccatgaaccgcttcagggtgtccaagttccggcacaccgaggctcggccgccccgccgcgagtcctggatcagtgacattcgagcaggaaccgccccttcatgcaggaaccacatcaaatcaagctgcagcttgatcgccttcaactccgaccgtcctggtgtactgggcattgtgcctctgcaaggccaaggagaggacaagcgacgcgtggcccacctgggctgccattcagacctagtcaccgacttggacttctcgccctttgatgacttcctcctggccacaggctcggctgacaggacggtaaaactctggcgactgccagggcctggccaggccctgccctcagcacccggggtggtgctgggccccgaggacctcccagtggaggtactgcagttccaccccacctctgacggcattctggtgagcgcagcaggcaccactgtgaaggtctgggacgcagccaagcagcagcccctgacagagctggcagcccatggggacctggtgcagagcgccgtctggagccgagatggagccctggtgggcacggcgtgcaaggacaagcagctgcggatctttgaccccagaacaaagccgcgggcctctcagagcacgcaggcccatgagaacagcagggatagccggctggcatggatgggcacctgggagcaccttgtgtctactggattcaaccagatgcgtgagcgcgaagtgaagctgtgggacacgcggttcttctccagcgccctggcctccctcaccttggacacctcgcttgggtgtctcgtgcctctgctggaccctgactctgggctcctggtcctggcaggaaagggcgagaggcagctgtactgttacgaggtggtcccgcagcagccggcgctgagcccagtgacccagtgtgtcctggagagcgtgctgcgtggggctgcccttgtgccccggcaggcgctggccgtcatgagctgcgaggtactccgcgtcctacagctgagcgacacagccatcgtgcccatcggctaccatgtgccccgcaaggctgtggagttccacgaggacctgttcccggacactgccggctgtgtgcctgccaccgacccccatagctggtgggctggggacaaccagcaggtgcagaaggtcagcctcaaccccgcctgccggccccacccgagcttcacttcctgtctggtgccccctgcggagcccctccctgacacagcccagcctgcggtgatggagacacccgtgggtgatgcagacgcaagcgagggtttctcttcccctcccagttcgctgacctcgccctccacgccctccagcctggggccctcactctccagcaccagtggcatcgggaccagccccagtttgaggtcgctgcagagcctgctgggccccagttccaagttccgccatgctcagggcactgtcctgcaccgagacagccacatcaccaacctcaaggggctcaacctcaccacacctggtgagagtgacggcttctgtgccaacaagctgcgtgtggccgtgccgctgctcagcagcgggggacaggtggctgtgcttgagctacggaagcctggccgcctgcccgacacggcactgcccacgctgcagaatggggcagctgtgactgatctggcctgggacccctttgacccccatcgcctcgctgtggctggtgaggacgccaggatccgactgtggcgggtacccgcagagggcctggaagaggtgctcaccacgccagagactgtgctcacaggccacacggagaagatctgctccctgcgcttccacccactggcagccaatgtgctggcctcgtcctcctatgacctcactgttcgcatctgggaccttcaggctggagctgatcggctgaagctgcagggccaccaagaccagatcttcagcctggcctggagtcctgatgggcagcagctggccactgtctgcaaggatgggcgtgtgcgggtctacaggccccggagtggccctgagcccctgcaggaaggcccagggcccaagggaggacgcggagctcgcattgtctgggtatgtgatggtcgctgtctgctggtgtctggctttgacagccaaagtgagcgccagctgctcctatatgaagctgaggccctggccggcggacccttggcagtgttgggcctggacgtggctccctcaaccctgctgcccagctacgacccagacactggcctggtgctcctgaccggcaagggcgacacccgtgtattcctgtacgagctgctccccgagtcccctttcttcctggagtgcaacagcttcacgtcgcctgacccccacaagggcctcgtcctcctgcctaagacggagtgcgacgtgcgggaagtggagctgatgcggtgcctgcggctgcgtcagtcctccctggagcctgtggccttccggctgccccgagtccggaaagagttcttccaggatgacgtgttcccagacacggctgtgatctgggagcctgtgctcagtgccgaggcctggctgcaaggcgctaatgggcagccctggcttctcagcctgcagcctcctgacatgagcccagtgagccaagccccccgagaggcccctgctcgtcgggccccatcctcagcgcagtacctggaagaaaagtctgaccagcaaaagaaggaggagctgctgaatgccatggtggcaaaactggggaaccgggaggacccactcccccaggactcctttgaaggcgtggacgaggacgagtgggactagcctgcgcccccgtcacctccacctcacctgtgctgccacttcctagtgcacacctcacggctcatcctcaagctggaagatacctctctggccccggcacatgtcacccctgcactcctgccttcccgtgggcacttccacatcctctgggcctctggcagttcccagggactgttttcacctctgctgtctctggggtcagctgctgctcatcagctgcccgctagcatgtggccaggggtgcagggtggcggggggtcagcagcatgtccctgggcaggccctgggcaccctgtctcccctggtctcactgctgacctgggctggtcccagcctggattggcctcatccaggatctttggtcaccccacgctgccccatcttgcctgctgttccagttctggtcaagggccttgggggctggccccccaccaggccttctagagcagcaccagtctcagggccctgggaccagctgccctacttcccaggtttgtagccaggagaagggggcatcacagagctgatggtccaataaggggggtgtgagccccgcagggactggcccgcacctgccttggatgttttcagcaattaaacttttttaagctggcca

SEQ ID NO: 6815 - DNA, 1622 bp, Homo sapiens
  source 1..1622: mol_type = unassigned DNA
agtcgcggttgctcagcgtgcacctgagacccgacgcccggggtcctcgaagacgcgtccgccgccgtgcccgtcgccatgaaccgcttcagggtgtccaagttccggcacaccgaggctcggccgccccgccgcgaggacaagcagctgcggatctttgaccccagaacaaagccgcgggcctctcagagcacgcaggcccatgagaacagcagggatagccggctggcatggatgggcacctgggagcaccttgtgtctactggattcaaccagatgcgtgagcgcgaagtgaagctgtgggacacgcggttcttctccagcgccctggcctccctcaccttggacacctcgcttgggtgtctcgtgcctctgctggaccctgactctgggctcctggtcctggcaggaaagggcgagaggcagctgtactgttacgaggtggtcccgcagcagccggcgctgagcccagtgacccagtgtgtcctggagagcgtgctgcgtggggctgcccttgtgccccggcaggcgctggccgtcatgagctgcgaggtactccgcgtcctacagctgagcgacacagccatcgtgcccatcggctaccatgtgccccgcaaggctgtggagttccacgaggacctgttcccggacactgccggctgtgtgcctgccaccgacccccatagctggtgggctggggacaaccagcaggtgcagaaggtcagcctcaaccccgcctgccggccccacccgagcttcacttcctgtctggtgccccctgcggagcccctccctgacacagcccagcctgcggtgatggagacacccgtgggtgatgcagacgcaagcgagggtttctcttcccctcccagttcgctgacctcgccctccacgccctccagcctggggccctcactctccagcaccagtggcatcgggaccagccccagtttgaggtcgctgcagagcctgctgggccccagttccaagttccgccatgctcagggcactgtcctgcaccgagacagccacatcaccaacctcaaggggctcaacctcaccacacctggtgagagtgacggcttctgtgccaacaagctgcgtgtggccgtgccgctgctcagcagcgggggacaggtggctgtgcttgagatgagggagaagaggcacagagaggtttagtgacctgcccgggtcacacagctgtctacggaagcctggccgcctgcccgacacggcactgcccacgctgcagaatggggcagctgtgactgatctggcctgggacccctttgacccccatcgcctcgctgtggctggtgaggacgccaggatccgactgtggcgggtacccgcagagggcctggaagaggtgctcaccacgccagagactgtgctcacaggccacacggagaagatctgctccctgcgcttccacccactggcagccaatgtgctggcctcgtcctcctatgacctcactgttcgcatctgggaccttcaggctggagctgatcggctgaagctgcagggccaccaagaccagatcttcagcctggcctggagtcctgatgggcagcagctggccactgtctgcaaggatgggcgtgtgcgggtctaca

SEQ ID NO: 6816 - DNA, 3258 bp, Homo sapiens
  source 1..3258: mol_type = unassigned DNA
gtgaccgcggcattgggtcccgggtggggccgaggcagcgggagtcgcggttgctcagcgtgcacctgagacccgacgcccggggtcctcgaagacgcgtccgccgccgtgcccgtcgccatgaaccgcttcagggtgtccaagttccggcacaccgaggctcggccgccccgccgcgagtcctggatcagtgacattcgagcaggaaccgccccttcatgcaggaaccacatcaaatcaagctgcagcttgatcgccttcaactccgaccgtcctggtgtactgggcattgtgcctctgcaaggccaaggagaggacaagcgacgcgtggcccacctgggctgccattcagagctggcagcccatggggacctggtgcagagcgccgtctggagccgagatggagccctggtgggcacggcgtgcaaggacaagcagctgcggatctttgaccccagaacaaagccgcgggcctctcagagcacgcaggcccatgagaacagcagggatagccggctggcatggatgggcacctgggagcaccttgtgtctactggattcaaccagatgcgtgagcgcgaagtgaagctgtgggacacgcggttcttctccagcgccctggcctccctcaccttggacacctcgcttgggtgtctcgtgcctctgctggaccctgactctgggctcctggtcctggcaggaaagggcgagaggcagctgtactgttacgaggtggtcccgcagcagccggcgctgagcccagtgacccagtgtgtcctggagagcgtgctgcgtggggctgcccttgtgccccggcaggcgctggccgtcatgagctgcgaggtactccgcgtcctacagctgagcgacacagccatcgtgcccatcggctaccatgtgccccgcaaggctgtggagttccacgaggacctgttcccggacactgccggctgtgtgcctgccaccgacccccatagctggtgggctggggacaaccagcaggtgcagaaggtcagcctcaaccccgcctgccggccccacccgagcttcacttcctgtctggtgccccctgcggagcccctccctgacacagcccagcctgcggtgatggagacacccgtgggtgatgcagacgcaagcgagggtttctcttcccctcccagttcgctgacctcgccctccacgccctccagcctggggccctcactctccagcaccagtggcatcgggaccagccccagtttgaggtcgctgcagagcctgctgggccccagttccaagttccgccatgctcagggcactgtcctgcaccgagacagccacatcaccaacctcaaggggctcaacctcaccacacctggtgagagtgacggcttctgtgccaacaagctgcgtgtggccgtgccgctgctcagcagcgggggacaggtggctgtgcttgagctacggaagcctggccgcctgcccgacacggcactgcccacgctgcagaatggggcagctgtgactgatctggcctgggacccctttgacccccatcgcctcgctgtggctggtgaggacgccaggatccgactgtggcgggtacccgcagagggcctggaagaggtgctcaccacgccagagactgtgctcacaggccacacggagaagatctgctccctgcgcttccacccactggcagccaatgtgctggcctcgtcctcctatgacctcactgttcgcatctgggaccttcaggctggagctgatcggctgaagctgcagggccaccaagaccagatcttcagcctggcctggagtcctgatgggcagcagctggccactgtctgcaaggatgggcgtgtgcgggtctacaggccccggagtggccctgagcccctgcaggaaggcccagggcccaagggaggacgcggagctcgcattgtctgggtatgtgatggtcgctgtctgctggtgtctggctttgacagccaaagtgagcgccagctgctcctatatgaagctgaggccctggccggcggacccttggcagtgttgggcctggacgtggctccctcaaccctgctgcccagctacgacccagacactggcctggtgctcctgaccggcaagggcgacacccgtgtattcctgtacgagctgctccccgagtcccctttcttcctggagtgcaacagcttcacgtcgcctgacccccacaagggcctcgtcctcctgcctaagacggagtgcgacgtgcgggaagtggagctgatgcggtgcctgcggctgcgtcagtcctccctggagcctgtggccttccggctgccccgagtccggaaagagttcttccaggatgacgtgttcccagacacggctgtgatctgggagcctgtgctcagtgccgaggcctggctgcaaggcgctaatgggcagccctggcttctcagcctgcagcctcctgacatgagcccagtgagccaagccccccgagaggcccctgctcgtcgggccccatcctcagcgcagtacctggaagaaaagtctgaccagcaaaagaaggaggagctgctgaatgccatggtggcaaaactggggaaccgggaggacccactcccccaggactcctttgaaggcgtggacgaggacgagtgggactagcctgcgcccccgtcacctccacctcacctgtgctgccacttcctagtgcacacctcacggctcatcctcaagctggaagatacctctctggccccggcacatgtcacccctgcactcctgccttcccgtgggcacttccacatcctctgggcctctggcagttcccagggactgttttcacctctgctgtctctggggtcagctgctgctcatcagctgcccgctagcatgtggccaggggtgcagggtggcggggggtcagcagcatgtccctgggcaggccctgggcaccctgtctcccctggtctcactgctgacctgggctggtcccagcctggattggcctcatccaggatctttggtcaccccacgctgccccatcttgcctgctgttccagttctggtcaagggccttgggggctggccccccaccaggccttctagagcagcaccagtctcagggccctgggaccagctgccctacttcccaggtttgtagccaggagaagggggcatcacagagctgatggtccaataaggggggtgtgagccccgcagggactggcccgcacctgccttggatgttttcagcaattaaacttttttaagctggcc

SEQ ID NO: 6817 - DNA, 3454 bp, Homo sapiens
  source 1..3454: mol_type = unassigned DNA
ctttatctcggtgatgctgccacggctgggtggggcctggggaagcctgagcaggtggagccccaaagaattgctgagccaggtgccgggagacccttcggacccccgaaacggcaggaggactgatgaggggtgcgccttggaaacgatgtcagctctgctcttccgctttccgtgttattttcctggatcagtgacattcgagcaggaaccgccccttcatgcaggaaccacatcaaatcaagctgcagcttgatcgccttcaactccgaccgtcctggtgtactgggcattgtgcctctgcaaggccaaggagaggacaagcgacgcgtggcccacctgggctgccattcagacctagtcaccgacttggacttctcgccctttgatgacttcctcctggccacaggctcggctgacaggacggtaaaactctggcgactgccagggcctggccaggccctgccctcagcacccggggtggtgctgggccccgaggacctcccagtggaggtactgcagttccaccccacctctgacggcattctgagctggcagcccatggggacctggtgcagagcgccgtctggagccgagatggagccctggtgggcacggcgtgcaaggacaagcagctgcggatctttgaccccagaacaaagccgcgggcctctcagagcacgcaggcccatgagaacagcagggatagccggctggcatggatgggcacctgggagcaccttgtgtctactggattcaaccagatgcgtgagcgcgaagtgaagctgtgggacacgcggttcttctccagcgccctggcctccctcaccttggacacctcgcttgggtgtctcgtgcctctgctggaccctgactctgggctcctggtcctggcaggaaagggcgagaggcagctgtactgttacgaggtggtcccgcagcagccggcgctgagcccagtgacccagtgtgtcctggagagcgtgctgcgtggggctgcccttgtgccccggcaggcgctggccgtcatgagctgcgaggtactccgcgtcctacagctgagcgacacagccatcgtgcccatcggctaccatgtgccccgcaaggctgtggagttccacgaggacctgttcccggacactgccggctgtgtgcctgccaccgacccccatagctggtgggctggggacaaccagcaggtgcagaaggtcagcctcaaccccgcctgccggccccacccgagcttcacttcctgtctggtgccccctgcggagcccctccctgacacagcccagcctgcggtgatggagacacccgtgggtgatgcagacgcaagcgagggtttctcttcccctcccagttcgctgacctcgccctccacgccctccagcctggggccctcactctccagcaccagtggcatcgggaccagccccagtttgaggtcgctgcagagcctgctgggccccagttccaagttccgccatgctcagggcactgtcctgcaccgagacagccacatcaccaacctcaaggggctcaacctcaccacacctggtgagagtgacggcttctgtgccaacaagctgcgtgtggccgtgccgctgctcagcagcgggggacaggtggctgtgcttgagctacggaagcctggccgcctgcccgacacggcactgcccacgctgcagaatggggcagctgtgactgatctggcctgggacccctttgacccccatcgcctcgctgtggctggtgaggacgccaggatccgactgtggcgggtacccgcagagggcctggaagaggtgctcaccacgccagagactgtgctcacaggccacacggagaagatctgctccctgcgcttccacccactggcagccaatgtgctggcctcgtcctcctatgacctcactgttcgcatctgggaccttcaggctggagctgatcggctgaagctgcagggccaccaagaccagatcttcagcctggcctggagtcctgatgggcagcagctggccactgtctgcaaggatgggcgtgtgcgggtctacaggccccggagtggccctgagcccctgcaggaaggcccagggcccaagggaggacgcggagctcgcattgtctgggtatgtgatggtcgctgtctgctggtgtctggctttgacagccaaagtgagcgccagctgctcctatatgaagctgaggccctggccggcggacccttggcagtgttgggcctggacgtggctccctcaaccctgctgcccagctacgacccagacactggcctggtgctcctgaccggcaagggcgacacccgtgtattcctgtacgagctgctccccgagtcccctttcttcctggagtgcaacagcttcacgtcgcctgacccccacaagggcctcgtcctcctgcctaagacggagtgcgacgtgcgggaagtggagctgatgcggtgcctgcggctgcgtcagtcctccctggagcctgtggccttccggctgccccgagtccggaaagagttcttccaggatgacgtgttcccagacacggctgtgatctgggagcctgtgctcagtgccgaggcctggctgcaaggcgctaatgggcagccctggcttctcagcctgcagcctcctgacatgagcccagtgagccaagccccccgagaggcccctgctcgtcgggccccatcctcagcgcagtacctggaagaaaagtctgaccagcaaaagaaggaggagctgctgaatgccatggtggcaaaactggggaaccgggaggacccactcccccaggactcctttgaaggcgtggacgaggacgagtgggactagcctgcgcccccgtcacctccacctcacctgtgctgccacttcctagtgcacacctcacggctcatcctcaagctggaagatacctctctggccccggcacatgtcacccctgcactcctgccttcccgtgggcacttccacatcctctgggcctctggcagttcccagggactgttttcacctctgctgtctctggggtcagctgctgctcatcagctgcccgctagcatgtggccaggggtgcagggtggcggggggtcagcagcatgtccctgggcaggccctgggcaccctgtctcccctggtctcactgctgacctgggctggtcccagcctggattggcctcatccaggatctttggtcaccccacgctgccccatcttgcctgctgttccagttctggtcaagggccttgggggctggccccccaccaggccttctagagcagcaccagtctcagggccctgggaccagctgccctacttcccaggtttgtagccaggagaagggggcatcacagagctgatggtccaataaggggggtgtgagccccgcagggactggcccgcacctgccttggatgttttcagcaattaaacttttttaagctggc

SEQ ID NO: 6818 - DNA, 1622 bp, Homo sapiens
  source 1..1622: mol_type = unassigned DNA
gtcttgacaagagcatcttcagcgggcgagtccccggctcctccagctccttcctcctcttcctcctcctcctccacctccggcttttgggggatcactgtcctctctcggcagcagatacaggctgctcctcaagactggggctcttcacatacgctcctcaccgctctttgggcaggccgacctagcagcctcttcgggagtcctggggtggccgggggtgctggagcccccaaatgagccggcaggtggtccgctccagcaagttccgccacgtgtttggacagccggccaaggccgaccagtgctatgaagatgtgcgcgtctcacagaccacctgggacagtggcttctgtgctgtcaaccctaagtttgtggccctgatctgtgaggccagcgggggaggggccttcctggtgctgcccctgggcaagactggacgtgtggacaagaatgcgcccacggtctgtggccacacagcccctgtgctagacatcgcctggtgcccgcacaatgacaacgtcattgccagtggctccgaggactgcacagtcatggtgtgggagatcccagatgggggcctgatgctgcccctgcgggagcccgtcgtcaccctggagggccacaccaagcgtgtgggcattgtggcctggcacaccacagcccagaacgtgctgctcagtgcaggttgtgacaacgtgatcatggtgtgggacgtgggcactggggcggccatgctgacactgggcccagaggtgcacccagacacgatctacagtgtggactggagccgagatggaggcctcatttgtacctcctgccgtgacaagcgcgtgcgcatcatcgagccccgcaaaggcactgtcgtagctgagaaggaccgtccccacgaggggacccggcccgtgcgtgcagtgttcgtgtcggaggggaagatcctgaccacgggcttcagccgcatgagtgagcggcaggtggcgctgtgggacacaaagcacctggaggagccgctgtccctgcaggagctggacaccagcagcggtgtcctgctgcccttctttgaccctgacaccaacatcgtctacctctgtggcaagggtgacagctcaatccggtactttgagatcacttccgaggcccctttcctgcactatctctccatgttcagttccaaggagtcccagcggggcatgggctacatgcccaaacgtggcctggaggtgaacaagtgtgagatcgccaggttctacaagctgcacgagcggaggtgtgagcccattgccatgacagtgcctcgaaagtcggacctgttccaggaggacctgtacccacccaccgcagggcccgaccctgccctcacggctgaggagtggctggggggtcgggatgctgggcccctcctcatctccctcaaggatggctacgtacccccaaagagccgggagctgagggtcaaccggggcctggacaccgggcgcaggagggcagcaccagaggccagtggcactcccagctcggatgccgtgtctcggctggaggaggagatgcggaagctccaggccacggtgcaggagctccagaagcgcttggacaggctggaggagacagtccaggccaagtag

SEQ ID NO: 6819 - DNA, 3301 bp, Homo sapiens
  source 1..3301: mol_type = unassigned DNA
gcgcccccgctccgccgcggagtttctgcatgactgtcacaaagatgtcctggcgtccgcaataccgtagctccaagttccggaatgtctacgggaaggtggccaaccgggagcactgcttcgatgggatccccatcaccaagaatgtgcacgacaaccacttctgtgccgtcaacacccgcttcctggccatcgtcaccgagagcgcagggggcggctccttcctcgtcatccccctggagcagacaggcaggattgaacccaactaccccaaggtctgcggccaccagggcaatgtgctggatatcaaatggaaccccttcatcgacaacatcattgcctcgtgctcggaggacacgtcggtgcggatctgggagatccccgagggcgggctgaagcggaacatgacggaggcgctcctggagctgcacgggcacagccggcgtgtggggctggtcgagtggcaccccaccaccaacaacatcctgttcagcgctggctacgactacaaggtcctcatctggaacctggatgtgggtgagccggtgaagatgattgactgccacacggatgtgatcctctgcatgtccttcaacacggacggcagcctgctcaccaccacgtgcaaggacaagaagctgcgtgtgattgagccccgctctggccgtgttctgcaggaggccaactgcaaaaaccacagagtgaaccgggtggtgttcctggggaacatgaagcggctcctcacgacaggggtctccaggtggaacacaagacagattgccctctgggaccaggaggacctctccatgcccctgatcgaagaggaaattgatgggctctctggcctcctgttccccttctatgatgctgacacccacatgctctacctggctggaaagggtgatggaaacatccggtactacgagatcagcactgagaagccctacctgagttacctcatggagttccgctccccagccccgcagaaaggcctaggggtcatgcccaagcacgggctggatgtgtcagcctgcgaggtgttccgcttctacaagctggtgactctcaagggcctgatcgagcccatctccatgatcgtgccccggaggtcagattcctaccaggaagacatttacccaatgacaccaggcacggagccagcactgaccccggatgaatggctgggaggcatcaaccgagatcccgtgctgatgtctttgaaagaaggctataagaagtcctcaaaaatggtatttaaggctcccatcaaagaaaagaagagtgttgtggtcaacggaatagatttattagaaaatgtcccacccaggacagagaatgagctccttcgaatgttcttccggcagcaggatgagattcgacggttgaaagaggagctggcccagaaggacatccgcattcggcagctccagctggaactgaaaaacttgcgcaacagccccaagaactgttagctccccagctgggctgttttctaagccgatctctccgtcgtttctactcatcccttaacttctcccttaccagtgaccccagagacagagccaggacaggagtgggggccagcctgaggacccccgcctaccacctcgagaactggaagccaacctctaacctcctgacctcatgctaataaaagtccccagcttctggagaccccctgccggcagcccctttccctgccaccccaggagccaggcttcccctcagctgggtgaagactacagactccctggggttggcaggggctccatctcagtggaccaggaagcaagaggggaagcgggatcccagctagacttagaacttggacttttcccctgtgaagggggctgccaggacatctcagcactcccgcctggagctctcagcatcactgaaggtaccacagtgtaagtgctggactgcaggctgcagtgatccctctttcgtcccaccccctcttccctcagcagccccggaagcctgcctcacccgacgaggacagcgagcggcccggctcctttctgtctcttcccttcccaccctcttgtcttcagggaattcagaggattgctctccaaggccataatgaccccttgccttccccatgattctctacaaagctcttgcacacccttttcccattcaatttgtgagccaggcagggtagggattagtgtccccctttgacaaatgacagaactgagggttgcaatggggaaatgacttataaagtcacccagcaggtcaacaatgggcccacgaccaagaccctgggtgttcagaccccaaggccagggcctttcccgctgcatcaagatgccaatccctttgtgggcttcaccagtgcccaagtctctatggagaatgagaactggaagccactgctaccgtctacccagcaccagtagtgccgatgtgccacactgcccagttgaggcccctcacgctctgtgcccctagatccttcaggtccccaccctcagctgtcaccaccaccctccccaggggactccatctgagatgaggcctcgtcctcctggaagctgaggctgagaagggtggagcttggccctggggaaggcagaccagggtctgatggcttctagggatgctctgcgtgtgtctcagcaccgctatctcagccactttcagccttatgcacgtagaatgaccacagccactcgcatccgtatagcactttaaagtttctgcagtcctttgacacataggatctcatggagcctcacgtctactcccttctgcagatgaggaaaccgagagaagtggcccaaggtcacgcaactctgagatgccacatttcatttgatcttgtacacattttcttttattccttcttttttcctcctttcatttcccactacgcacaaagagtttataaacactgttctcagaagagtcacagtttggggtgagatctggaaatcaagaaatgggtgtccactcttttctttcattagctaggatctactagatgcattatactccatacctgcttttcccatggccgccctacggaaaatcccatccacagaggccagggctacccaagcccctccaggtgagctgggcctttcctttatgaacctccatcctcccagccagctacagtagggcctcctcaccccgtaccccacagctagacagtgtcagcactcatctcctcctcccacatttctggagcttttttttttccttccccattgacctttgtggtcttctgtgattatttatgctgcctcccaaggatagaattgaaataaaatgttttcaacttatc

SEQ ID NO: 6820 - DNA, 1654 bp, Homo sapiens
  source 1..1654: mol_type = unassigned DNA
caccccggaggcgggcgcacggctgcttctcattcattgtcttgacaagagcatcttcagcgggcgagtccccggctcctccagctccttcctcctcttcctcctcctcctccacctccggcttttgggggatcactgtcctctctcggcagcagaatgagccggcaggtggtccgctccagcaagttccgccacgtgtttggacagccggccaaggccgaccagtgctatgaagatgtgcgcgtctcacagaccacctgggacagtggcttctgtgctgtcaaccctaagtttgtggccctgatctgtgaggccagcgggggaggggccttcctggtgctgcccctgggcaagactggacgtgtggacaagaatgcgcccacggtctgtggccacacagcccctgtgctagacatcgcctggtgcccgcacaatgacaacgtcattgccagtggctccgaggactgcacagtcatggtgtgggagatcccagatgggggcctgatgctgcccctgcgggagcccgtcgtcaccctggagggccacaccaagcgtgtgggcattgtggcctggcacaccacagcccagaacgtgctgctcagtgcaggttgtgacaacgtgatcatggtgtgggacgtgggcactggggcggccatgctgacactgggcccagaggtgcacccagacacgatctacagtgtggactggagccgagatggaggcctcatttgtacctcctgccgtgacaagcgcgtgcgcatcatcgagccccgcaaaggcactgtcgtagctgagaaggaccgtccccacgaggggacccggcccgtgcgtgcagtgttcgtgtcggaggggaagatcctgaccacgggcttcagccgcatgagtgagcggcaggtggcgctgtgggacacaaagcacctggaggagccgctgtccctgcaggagctggacaccagcagcggtgtcctgctgcccttctttgaccctgacaccaacatcgtctacctctgtggcaagggtgacagctcaatccggtactttgagatcacttccgaggcccctttcctgcactatctctccatgttcagttccaaggagtcccagcggggcatgggctacatgcccaaacgtggcctggaggtgaacaagtgtgagatcgccaggttctacaagctgcacgagcggaggtgtgagcccattgccatgacagtgcctcgaaagtcggacctgttccaggaggacctgtacccacccaccgcagggcccgaccctgccctcacggctgaggagtggctggggggtcgggatgctgggcccctcctcatctccctcaaggatggctacgtacccccaaagagccgggagctgagggtcaaccggggcctggacaccgggcgcaggagggcagcaccagaggccagtggcactcccagctcggatgccgtgtctcggctggaggaggagatgcggaagctccaggccacggtgcaggagctccagaagcgcttggacaggctggaggagacagtccaggccaagtagagccccgcagggcctccagcagggtcagccattcacacccatccactcacctcccattcccagccacatggcagagaaaaaaatcataataaaatggctttattttctggta

SEQ ID NO: 6821 - DNA, 1881 bp, Homo sapiens
  source 1..1881: mol_type = unassigned DNA
ctccgggtccctctgtcacttcctgaatcctgcttcctgcttcccagaggccgggatccggagccgcccgaagccggtgccgcagccccctgcgcccccggtgcccccgacatgtccttccgcaaagtggtccggcagagcaaattccggcatgtgttcgggcagccggtcaagaacgaccagtgctatgaggacattcgcgtgtcccgtgttacctgggacagcaccttctgcgccgtcaaccccaagttcctggcggtgattgtggaggccagtggagggggtgcctttctggtgctccccctaagcaagacgggccgcattgacaaggcctacccgacggtgtgtgggcacacgggacctgtcctggacatcgactggtgtcctcacaacgacgaagtcatagccagcggctcggaggactgcacggtcatggtgtggcagatcccagagaacgggctgacctccccgctgacagagccggtggtggtactggaggggcacaccaagcgagtgggcatcatcgcctggcaccccacggcccgaaacgtgctgctcagtgcaggctgcgacaacgtggtactcatctggaatgtgggcacagcggaggagctgtaccgcctggacagcctgcaccctgacctcatctacaatgtcagctggaaccacaatggcagcctgttttgctcagcatgcaaggacaagagcgtgcgcatcatcgacccccgtcggggcaccctggtggcagagcgggagaaggctcatgagggggcccggcccatgcgggccatcttcctggcagatggcaaggtgttcaccacaggcttcagccgaatgagcgagcggcagctggcgctctgggacccagaaaacctcgaggaacccatggccctgcaggaactggactcgagcaacggggccctgctgcccttctacgaccccgacaccagtgtggtctacgtctgcggcaagggtgactccagcatccggtactttgagatcacagaggagcctccctacatccacttcctgaacacgttcaccagcaaggagccgcagcggggtatgggcagcatgcccaagcggggcctggaggtcagcaagtgcgagatcgcccggttctacaaactgcatgagcgcaagtgtgagcccatcgtcatgactgtgccaagaaagtcggacctcttccaggatgatctgtaccccgacacagccgggcccgaggcagccctggaggctgaggagtgggtgagcgggcgggatgccgacccgatcctcatctcactgcgggaggcctacgtgcccagcaagcagcgggacctgaagatcagccggcgcaacgtgttgtctgacagccggcccgccatggccccgggctcctcccacctaggggcccccgcctccaccaccactgctgctgatgccacccccagcggcagcctggccagagccggggaggctgggaagctggaggaggtgatgcaggagctgcgggccctgagggcgctggtcaaggagcagggcgaccgcatctgccgcctggaggagcagctgggccgcatggagaacggggatgcgtagggccacagccacacgccaccttcatctcctccgccgcccccttcccactcagcttctgccagcgggtcgcaccgggctagctggctgcccagagcctctgaggcagcgcaggggtcagttcccacccccacccgtcccaggcccaggccgaagccagcgcccagctttcctcactgttcctgtggaggatgtctacgcccaggcgagctcctcgacctctgagggaccatctccccgaccactgcccagccctctgctccctccccagaggaggcgggagggtgggctctatattttcat

SEQ ID NO: 6822 - DNA, 877 bp, Homo sapiens
  source 1..877: mol_type = unassigned DNA
acttcctgaatcctgcttcctgcttcccagaggccgggatccggagccgcccgaagccggtgccgcagccccctgcgcccccggtgcccccgacatgtccttccgcaaagtggtccggcagagcaaattccggcatgtgttcgggcagccggtcaagaacgaccagtgctatgaggacattcgcgtgtcccgtgttacctgggacagcaccttctgcgccgtcaaccccaagttcctggcggtgattgtggaggccagtggagggggtgcctttctggtgctccccctaagcaagacgggccgcattgacaaggcctacccgacggtgtgtgggcacacgggacctgtcctggacatcgactggtgtcctcacaacgacgaagtcatagccagcggctcggaggactgcacggtcatggtgtggcagatcccagagaacgggctgacctccccgctgacagagccggtggtggtactggaggggcacaccaagcgagtgggcatcatcgcctggcaccccacggcccgaaacgtgctgctcagtgcaggctgcgacaacgtggtactcatctggaatgtgggcacagcggaggagctgtaccgcctggacagcctgcaccctgacctcatctacaatgtcagctggaaccacaatggcagcctgttttgctcagcatgcaaggacaagagcgtgcgcatcatcgacccccgtcggggcaccctggtggcagagcgggagaaggctcatgagggggcccggcccatgcgggccatcttcctggcagatggcaaggtgttcaccacaggcttcagccgaatgagcgagcggcagctggcgctctgggacccaggggtgaggaggttctgcttggcctga

SEQ ID NO: 6823 - DNA, 1902 bp, Homo sapiens
  source 1..1902: mol_type = unassigned DNA
attatgaggagcaagaacgcgaaggggcctcgggtccgctaggccgggatccggagccgcccgaagccggtgccgcagccccctgcgcccccggtgcccccgacatgtccttccgcaaagtggtccggcagagcaaattccggcatgtgttcgggcagccggtcaagaacgaccagtgctatgaggacattcgcgtgtcccgtgttacctgggacagcaccttctgcgccgtcaaccccaagttcctggcggtgattgtggaggccagtggagggggtgcctttctggtgctccccctaagcaagacgggccgcattgacaaggcctacccgacggtgtgtgggcacacgggacctgtcctggacatcgactggtgtcctcacaacgacgaagtcatagccagcggctcggaggactgcacggtcatggtgtggcagatcccagagaacgggctgacctccccgctgacagagccggtggtggtactggaggggcacaccaagcgagtgggcatcatcgcctggcaccccacggcccgaaacgtgctgctcagtgcaggctgcgacaacgtggtactcatctggaatgtgggcacagcggaggagctgtaccgcctggacagcctgcaccctgacctcatctacaatgtcagctggaaccacaatggcagcctgttttgctcagcatgcaaggacaagagcgtgcgcatcatcgacccccgtcggggcaccctggtggcagagcgggagaaggctcatgagggggcccggcccatgcgggccatcttcctggcagatggcaaggtgttcaccacaggcttcagccgaatgagcgagcggcagctggcgctctgggacccagaaaacctcgaggaacccatggccctgcaggaactggactcgagcaacggggccctgctgcccttctacgaccccgacaccagtgtggtctacgtctgcggcaagggtgactccagcatccggtactttgagatcacagaggagcctccctacatccacttcctgaacacgttcaccagcaaggagccgcagcggggtatgggcagcatgcccaagcggggcctggaggtcagcaagtgcgagatcgcccggttctacaaactgcatgagcgcaagtgtgagcccatcgtcatgactgtgccaagaaagtcggacctcttccaggatgatctgtaccccgacacagccgggcccgaggcagccctggaggctgaggagtgggtgagcgggcgggatgccgacccgatcctcatctcactgcgggaggcctacgtgcccagcaagcagcgggacctgaagatcagccggcgcaacgtgttgtctgacagccggcccgccatggccccgggctcctcccacctaggggcccccgcctccaccaccactgctgctgatgccacccccagcggcagcctggccagagccggggaggctgggaagctggaggaggtgatgcaggagctgcgggccctgagggcgctggtcaaggagcagggcgaccgcatctgccgcctggaggagcagctgggccgcatggagaacggggatgcgtagggccacagccacacgccaccttcatctcctccgccgcccccttcccactcagcttctgccagcgggtcgcaccgggctagctggctgcccagagcctctgaggcagcgcaggggtcagttcccacccccacccgtcccaggcccaggccgaagccagcgcccagctttcctcactgttcctgtggaggatgtctacgcccaggcgagctcctcgacctctgagggaccatctccccgaccactgcccagccctctgctccctccccagaggaggcgggagggtgggctctatattttcattccaaataaaattctctttctaaaagcc

SEQ ID NO: 6824 - DNA, 1161 bp, Homo sapiens
  source 1..1161: mol_type = unassigned DNA
ttcccagaggccgggatccggagccgcccgaagccggtgccgcagccccctgcgcccccggtgcccccgacatgtccttccgcaaagtggtccggcagagcaaattccggcatgtgttcgggcagccggtcaagaacgaccagtgctatgaggacattcgcgtgtcccgtgttacctgggacagcaccttctgcgccgtcaaccccaagttcctggcggtgattgtggaggccagtggagggggtgcctttctggtgctccccctaagcaagacgggccgcattgacaaggcctacccgacggtgtgtgggcacacgggacctgtcctggacatcgactggtgtcctcacaacgacgaagtcatagccagcggctcggaggactgcacggtcatggtgtggcagatcccagagaacgggctgacctccccgctgacagagccggtggtggtactggaggggcacaccaagcgagtgggcatcatcgcctggcaccccacggcccgaaacgtgctgctcagtgcaggctgcgacaacgtggtactcatctggaatgtgggcacagcggaggagctgtaccgcctggacagcctgcaccctgacctcatctacaatgtcagctggaaccacaatggcagcctgttttgctcagcatgcaaggacaagagcgtgcgcatcatcgacccccgtcggggcaccctggtggcagagcgggagaaggctcatgagggggcccggcccatgcgggccatcttcctggcagatggcaaggtgttcaccacaggcttcagccgaatgagcgagcggcagctggcgctctgggacccagtgagtggccagcctgagggggcaaacttgagacttgggccccaccctgggccaggcaggcagggttcaccctggggaggcctgtggttcctagcttctctgcctggaacttgaggctctcagggcctaggactctgtcagactttcctctcctgccccctgctcgcccgactgccccaccactcccccatggcctcccactgcctctgtgtctttgcccatgttgttcatgccaacggaagggcccttctctcccttgcttgcctgtaccacccactgcctgcacagggctccccgctcctccagaaagcctcctcctccagcaagcctcctg

SEQ ID NO: 6825 - DNA, 1037 bp, Homo sapiens
  source 1..1037: mol_type = unassigned DNA
aatcctgcttcctgcttcccagaggccgggatccggagccgcccgaagccggtgccgcagccccctgcgcccccggtgcccccgacatgtccttccgcaaagtggtccggcagagcaaattccggcatgtgttcgggcagccggtcaagaacgaccagtgctatgaggacattcgcgtgtcccgtgttacctgggacagcaccttctgcgccgtcaaccccaagttcctggcggtgattgtggaggccagtggagggggtgcctttctggtgctccccctaagcaagacgggccgcattgacaaggcctacccgacggtgtgtgggcacacgggacctgtcctggacatcgactggtgtcctcacaacgacgaagtcatagccagcggctcggaggactgcacggtcatggtgtggcagatcccagagaacgggctgacctccccgctgacagagccggtggtggtactggaggggcacaccaagcgagtgggcatcatcgcctggcaccccacggcccgaaacgtgctgctcagtgcaggtctgcaccgccccccgttttgtgctccccccccccacggacccctccatacatcccagcagcccctccagggcccacatgacaaatgggaaagctgaggccctcagagttggagagacccgtctgtcccagggtggtgggcagagtgggcctcagcctggtgagctaatggcctcctgccacccacccggcccgagctgacaaccctcacctgccaggctgcgacaacgtggtactcatctggaatgtgggcacagcggaggagctgtaccgcctggacagcctgcaccctgacctcatctacaatgtcagctggaaccacaatggcagcctgttttgctcagcatgcaaggacaagagcgtgcgcatcatcgacccccgtcggggcaccctggtggcagtacgtggctctggagggcaaggatggctgtggataggcccaggaccttgagcagggcgctgcactgaccagcctgtccccccgacaggagcgggag

SEQ ID NO: 6826 - DNA, 3892 bp, Homo sapiens
  source 1..3892: mol_type = unassigned DNA
gcgcggcgcgggggcggggcctacgcgcggtggcgggggcggtggcggctgcccgcgcccctcccccgcacggcgctcagtgccaggctggaggcggcagcggttggaggcttcgcccggctttgcagcggggacttcggcggcggcgcctcaggcacctcggcccggacacgatgaggcgagtggtacgacagagcaagtttcggcatgtatttgggcaagcggtgaaaaatgaccagtgctatgatgacatccgggtttctcgtgtgacctgggatagttccttttgtgctgtcaatcccagatttgttgccataatcatagaggcaagtgggggaggagcgttccttgtcctccctctgcacaagactggtcgaattgacaaatcttaccctacagtatgtggccacacaggaccagtgctggacatagactggtgcccacataacgatcaggtcattgccagcggttcagaggactgcacggtcatggtatggcagatcccagaaaatggactcaccctttccctgactgaacctgtggtgattttggaaggccactcaaagagagtcggcatcgtggcttggcatccaacggcccgcaatgtgcttcttagtgcaggctgtgataatgccattatcatctggaatgtgggaacaggggaagcccttataaacttggacgatatgcattcagacatgatttacaatgtgagctggaaccggaatggcagtctgatctgcacagcttccaaagacaagaaagtgagagtcattgatcccaggaaacaagagattgttgctgagaaggagaaagcacatgaaggagcaagacccatgagagccatcttcctggccgatggcaatgtcttcaccactgggttcagccgcatgagcgagcggcagctggctctctggaatccgaaaaatatgcaggaaccaattgctcttcatgagatggacactagcaatggggtgttgctgcctttctatgaccctgacaccagcatcatttacttatgtggaaagggtgacagcagtattcgctattttgagatcacggatgaatccccgtacgtccactacctcaacacattcagcagcaaggagcctcagagagggatgggttacatgcccaagaggggacttgatgttaacaaatgtgagattgccagattcttcaaacttcatgagagaaagtgtgaacctattattatgactgttcccaggaagtctgaccttttccaagatgacctgtatcctgacacagcggggccagaggccgcgctggaggcagaagagtggttcgaaggcaagaatgcagacccaatcctcatctccttgaagcacgggtacattccaggcaaaaacagggatctcaaggtggtcaagaagaacattctggatagcaagcccactgcaaacaagaagtgcgacctgatcagcatccccaagaaaaccacagacacggccagtgtgcaaaatgaagccaagttggatgagattttaaaagagatcaaatctataaaagacacaatctgcaatcaagatgagcgtatttccaagttagaacagcagatggcaaagatagcagcctgaaggtcccacccccacccctacagaaaaaatgggagcaagaacttgtgcttgggagctggttattggtgtggtcctagggagggcggaaagggaggcactgccatttggagacattccatttcagatttgtcaaccagcgataggccacattccagtaagaactcaatttgtctcccaaatttgcagaaacaaaacgtgatttaaaagctgagctttttatcagaaagcttttttgatgttttaagtgttatgtgacttgttgaactttttaaaaagtgctacttttaaaatcccagatactctgaattttagaaaacaaactaattctgattgtgtcgtgcccaagtacccttttttttttaatgaatagggaccaatgccacattgctttttatatttctttcttttttaatgttgccaaaaccaaaagtagctttgttttcctttgtattttgctactttgcagtatttgtgtgtgtggttttttttccttaatttgaaagggacagcactgtgtatgtttataaactaaatgaagataagatattattttgtataaacattcatctgagaacaatcaaagcagtagccacatggtgctggctcctttgcagcacaaacctggtcattttgatgactgtacaacaggaagacttgaaaaatcacgtggattcatattaccaccgctctcatttcatggagtcttctgatcaaaaaagctcacgtcgtatttcttcttttcctttctcttttctagaaattgggtgtttgtaccagaatggaattttgcttctcggttatcctgtgcttcagatgattataatctaacccaaactagcatgtgtttctgcagtttgttacacacctaggatcatattgcattcatcactttaaacatcatgtttcaggttttggtcaatacttgacaagggtgcccaggacaggaagacgtgtactgctgagtgttccttcttgcccttttcagcagcttgcccagctcttgagtacagtggtggggactaaaaatgtgggcatgtggagaggggtatttgccctgggtgatcctgtttccctgtgctgtccccatgctgtgttggaggaggaagtggctctccttccaccaacaaagctcctgctctaccctcttcctcacatgtgctgcgacctctctcagggctcccccagccattccttctttccttcctgccttttagctctaaccacattaagctaagacaaggccagagggtgcgattgaatgagtattgagactgaggagaatgatagagagtgaagcagaaacaggagcacagacctctgctgtagctttaatgcatacaaacatgtccctccgcacaactaacctgccctgcctctccatctctcaccaaggctgcgtcaaagcacagaggctccccggactcggagggggccagagactgagctctggtcacctgttcattcctcggttagctggaactttgccccgtttccagtttcttatagtgcatgcttgggaaacaagatttaaggagcctctgttttggaagggctgtctgtgattgaacgtgaaatgtgtagtgccattgggaccacgaagggaattcttgcacatgctcgtgctggtgtgggcatgggactggctggaaacgtctgtatgcagggagccagggtgagggcagagtgtggtgacagccgaacttggagtaatgtccgtgtagaaaaaggaccatgttcttatccagccaatactgggagtgctgtctccacaatttcagggcatctgaatgtttgatgtggttttgtgtgtgtgtatgtatgtgtttaatattgaagtggatcatgagatgtaaagaaaacaataatggcaatgacttatattcaaatctgtatttgtttctttatcaatgtaatctgctgaggaccttttgtctaagattcagtagtgttttaaggttctgatatcgaattaatgaagtaaagttgttgatggtggtgaaacaccgtagggcatgtggttcaaagagaagcaggagggcaagggaaagttaccctgatcttagtttgtagcttatgacttatttaatgaatggatgcccagccaagctcagagtaggcgcccaaagcattgtggattattttcctgttttgtctttttttttttttttttttaagccatgacatcccagaagaggacagtgaattactcctaggtcggctcttatagagtggccatagtgttctgtcaaaacacttgcttccattttcagagataaaaatcattgattacaaaa

SEQ ID NO: 6827 - DNA, 1633 bp, Homo sapiens
  source 1..1633: mol_type = unassigned DNA
aggaccctggccacgaatcatttgccatctcctctaccaaagactcaaaatgtatggccctggtagtcagctgggaaagtctggcaataacagctgggctaaggaacgtggatgctcaattgcctgccaagggtctcttacttcagcccggctacatgcccccagcattggagagaggccactttcacacatgcgttggaaggacacgatgaggcgagtggtacgacagagcaagtttcggcatgtatttgggcaagcggtgaaaaatgaccagtgctatgatgacatccgggtttctcgtgtgacctgggatagttccttttgtgctgtcaatcccagatttgttgccataatcatagaggcaagtgggggaggagcgttccttgtcctccctctgcacaagactggtcgaattgacaaatcttaccctacagtatgtggccacacaggaccagtgctggacatagactggtgcccacataacgatcaggtcattgccagcggttcagaggactgcacggtcatggtatggcagatcccagaaaatggactcaccctttccctgactgaacctgtggtgattttggaaggccactcaaagagagtcggcatcgtggcttggcatccaacggcccgcaatgtgcttcttagtgcaggctgtgataatgccattatcatctggaatgtgggaacaggggaagcccttataaacttggacgatatgcattcagacatgatttacaatgtgagctggaaccggaatggcagtctgatctgcacagcttccaaagacaagaaagtgagagtcattgatcccaggaaacaagagattgttgctgagaaggagaaagcacatgaaggagcaagacccatgagagccatcttcctggccgatggcaatgtcttcaccactgggttcagccgcatgagcgagcggcagctggctctctggaatccgaaaaatatgcaggaaccaattgctcttcatgagatggacactagcaatggggtgttgctgcctttctatgaccctgacaccagcatcatttacttatgtggaaagggtgacagcagtattcgctattttgagatcacggatgaatccccgtacgtccactacctcaacacattcagcagcaaggagcctcagagagggatgggttacatgcccaagaggggacttgatgttaacaaatgtgagattgccagattcttcaaacttcatgagagaaagtgtgaacctattattatgactgttcccaggaagtctgaccttttccaagatgacctgtatcctgacacagcggggccagaggccgcgctggaggcagaagagtggttcgaaggcaagaatgcagacccaatcctcatctccttgaagcacgggtacattccaggcaaaaacagggatctcaaggtggtcaagaagaacattctggatagcaagcccactgcaaacaagaagtgcgacctgatcagcatccccaagaaaaccacagacacggccagtgtgcaaaatgaagccaagttggatgagattttaaaagagatcaaatctataaaagacacaatctgcaatcaagatgagcgtatttccaagttagaacagcagatggcaaagatagcagcctga

SEQ ID NO: 6828 - DNA, 2487 bp, Homo sapiens
  source 1..2487: mol_type = unassigned DNA
gcgagaccagctctgggccctgcagatctcggttgggggtcaggcggggcggggcagagctggagctggagtaatgtgggtgggggcggcttgggaagaggctgagcccggccaagggagcagagggctgggactggctgggggttgggaggggaggaacgaagcaggaaggctgtcggatcgggggcccagggtgtccgagtgaactgggtgattcagagacacgatgaggcgagtggtacgacagagcaagtttcggcatgtatttgggcaagcggtgaaaaatgaccagtgctatgatgacatccgggtttctcgtgtgacctgggatagttccttttgtgctgtcaatcccagatttgttgccataatcatagaggcaagtgggggaggagcgttccttgtcctccctctgcacaagactggtcgaattgacaaatcttaccctacagtatgtggccacacaggaccagtgctggacatagactggtgcccacataacgatcaggtcattgccagcggttcagaggactgcacggtcatggtatggcagatcccagaaaatggactcaccctttccctgactgaacctgtggtgattttggaaggccactcaaagagagtcggcatcgtggcttggcatccaacggcccgcaatgtgcttcttagtgcaggctgtgataatgccattatcatctggaatgtgggaacaggggaagcccttataaacttggacgatatgcattcagacatgatttacaatgtgagctggaaccggaatggcagtctgatctgcacagcttccaaagacaagaaagtgagagtcattgatcccaggaaacaagagattgttgctgagaaggagaaagcacatgaaggagcaagacccatgagagccatcttcctggccgatggcaatgtcttcaccactgggttcagccgcatgagcgagcggcagctggctctctggaatccgaaaaatatgcaggaaccaattgctcttcatgagatggacactagcaatggggtgttgctgcctttctatgaccctgacaccagcatcatttacttatgtggaaagggtgacagcagtattcgctattttgagatcacggatgaatccccgtacgtccactacctcaacacattcagcagcaaggagcctcagagagggatgggttacatgcccaagaggggacttgatgttaacaaatgtgagattgccagattcttcaaacttcatgagagaaagtgtgaacctattattatgactgttcccaggaagtctgaccttttccaagatgacctgtatcctgacacagcggggccagaggccgcgctggaggcagaagagtggttcgaaggcaagaatgcagacccaatcctcatctccttgaagcacgggtacattccaggcaaaaacagggatctcaaggtggtcaagaagaacattctggatagcaagcccactgcaaacaagaagtgcgacctgatcagcatccccaagaaaaccacagacacggccagtgtgcaaaatgaagccaagttggatgagattttaaaagagatcaaatctataaaagacacaatctgcaatcaagatgagcgtatttccaagttagaacagcagatggcaaagatagcagcctgaaggtcccacccccacccctacagaaaaaatgggagcaagaacttgtgcttgggagctggttattggtgtggtcctagggagggcggaaagggaggcactgccatttggagacattccatttcagatttgtcaaccagcgataggccacattccagtaagaactcaatttgtctcccaaatttgcagaaacaaaacgtgatttaaaagctgagctttttatcagaaagcttttttgatgttttaagtgttatgtgacttgttgaactttttaaaaagtgctacttttaaaatcccagatactctgaattttagaaaacaaactaattctgattgtgtcgtgcccaagtacccttttttttttaatgaatagggaccaatgccacattgctttttatatttctttcttttttaatgttgccaaaaccaaaagtagctttgttttcctttgtattttgctactttgcagtatttgtgtgtgtggttttttttccttaatttgaaagggacagcactgtgtatgtttataaactaaatgaagataagatattattttgtataaacattcatctgagaacaatcaaagcagtagccacatggtgctggctcctttgcagcacaaacctggtcattttgatgactgtacaacaggaagacttgaaaaatcacgtggattcatattaccaccgctctcatttcatggagtcttctgatcaaaaaagctcacgtcgtatttcttcttttcctttctcttttctagaaattgggtgtttgtaccagaatggaattttgcttctcggttatcctgtgcttcagatgattataatctaacccaaact

SEQ ID NO: 6829 - DNA, 899 bp, Homo sapiens
  source 1..899: mol_type = unassigned DNA
gctgcgccgaaatgactgaggatgaggtcagacgtggagggtgggaatgcagaaaccgagctctcccgcctgtccccaccggcgcacgctccccagctctccgtctctcaaatgatttgaatgtgttgggggaagtggcaggctgcggtgagagctgagaagaaaggggcttcctcttggagggaggcgctggccctggcatccttttttgggagtgttcaaaggattttgaacgctggaaaaggaatcgtaggctttactgcatcacgatttagaaacacatcctatatttggccgtaatgtaggctgcccttgttttgtggtgtctaaagtgcttgctctacatgttgcaaacgtgggattcagagtgcgaagcaaattgcaagttgttcatttcccccggcatgacacgatgaggcgagtggtacgacagagcaagtttcggcatgtatttgggcaagcggtgaaaaatgaccagtgctatgatgacatccgggtttctcgtgtgacctgggatagttccttttgtgctgtcaatcccagatttgttgccataatcatagaggcaagtgggggaggagcgttccttgtcctccctctgcacaagactggtcgaattgacaaatcttaccctacagtatgtggccacacaggaccagtgctggacatagactggtgcccacataacgatcaggtcattgccagcggttcagaggactgcacggtcatggtatggcagatcccagaaaatggactcaccctttccctgactgaacctgtggtgattttggaaggccactcaaagagagtcggcatcgtggcttggcatccaacggcccgcaatgtgcttcttagtgcaggctgtgataatgccattatcatctggaatgtgggaacag

SEQ ID NO: 6830 - DNA, 577 bp, Homo sapiens
  source 1..577: mol_type = unassigned DNA
agcaaggagcctcagagagggatgggttacatgcccaagaggggacttgatgttaacaaatgtgagattgccagattcttcaaacttcatgagagaaagtgtgaacctattattatgactgttcccaggaagtctgaccttttccaagatgacctgtatcctgacacagcggggccagaggccgcgctggaggcagaagagtggttcgaaggcaagaatgcagacccaatcctcatctccttgaagcacgggtacattccaggcaaaaacagggatctcaaggtggtcaagaagaacattctggatagcaagcccactgcaaacaagaagtgcgacctgatcagcatccccaagaaaaccacagacacggccagtgtgcaaaatgaagccaagttggatgagattttaaaagagatcaaatctataaaagacacaatctgcaatcaagatgagcgtatttccaagttagaacagcagatggcaaagatagcagcctgaagaaattgggtgtttgtaccagaatggaattttgcttctcggttatcctgtgcttcagatgattataatctaacccaaa

SEQ ID NO: 6831 - DNA, 566 bp, Homo sapiens
  source 1..566: mol_type = unassigned DNA
actaggcggtttggtaacacgatgaggcgagtggtacgacagagcaagtttcggcatgtatttgggcaagcggtgaaaaatgaccagtgctatgatgacatccgggtttctcgtgtgacctgggatagttccttttgtgctgtcaatcccagatttgttgccataatcatagaggcaagtgggggaggagcgttccttgtcctccctctgcacaagactggtcgaattgacaaatcttaccctacagtatgtggccacacaggaccagtgctggacatagactggtgcccacataacgatcaggtcattgccagcggttcagaggactgcacggtcatggtatggcagatcccagaaaatggactcaccctttccctgactgaacctgtggtgattttggaaggccactcaaagagagtcggcatcgtggcttggcatccaacggcccgcaatgtgcttcttagtgcaggctgtgataatgccattatcatctggaatgtgggaacaggggaagcccttataaacttggacgatatgcattcagacatgatttacaatgtgagctg

SEQ ID NO: 6832 - DNA, 1710 bp, Homo sapiens
  source 1..1710: mol_type = unassigned DNA
ttttgcttttcaccacctcatggaagctgtcttatctaactcacgcttgagaagtattcatattgattccaaaatgaaggaccctggccacgaatcatttgccatctcctctaccaaagactcaaaatgtatggccctggtagtcagctgggaaagtctggcaataacagctgggctaaggaacgtggatgctcaattgcctgccaagggtctcttacttcagcccggctacatgcccccagcattggagagaggccactttcacacatgcgttggaaggacacgatgaggcgagtggtacgacagagcaagtttcggcatgtatttgggcaagcggtgaaaaatgaccagtgctatgatgacatccgggtttctcgtgtgacctgggatagttccttttgtgctgtcaatcccagatttgttgccataatcatagaggcaagtgggggaggagcgttccttgtcctccctctgcacaagactggtcgaattgacaaatcttaccctacagtatgtggccacacaggaccagtgctggacatagactggtgcccacataacgatcaggtcattgccagcggttcagaggactgcacggtcatggtatggcagatcccagaaaatggactcaccctttccctgactgaacctgtggtgattttggaaggccactcaaagagagtcggcatcgtggcttggcatccaacggcccgcaatgtgcttcttagtgcaggctgtgataatgccattatcatctggaatgtgggaacaggggaagcccttataaacttggacgatatgcattcagacatgatttacaatgtgagctggaaccggaatggcagtctgatctgcacagcttccaaagacaagaaagtgagagtcattgatcccaggaaacaagagattgttgctgagaaggagaaagcacatgaaggagcaagacccatgagagccatcttcctggccgatggcaatgtcttcaccactgggttcagccgcatgagcgagcggcagctggctctctggaatccgaaaaatatgcaggaaccaattgctcttcatgagatggacactagcaatggggtgttgctgcctttctatgaccctgacaccagcatcatttacttatgtggaaagggtgacagcagtattcgctattttgagatcacggatgaatccccgtacgtccactacctcaacacattcagcagcaaggagcctcagagagggatgggttacatgcccaagaggggacttgatgttaacaaatgtgagattgccagattcttcaaacttcatgagagaaagtgtgaacctattattatgactgttcccaggaagtctgaccttttccaagatgacctgtatcctgacacagcggggccagaggccgcgctggaggcagaagagtggttcgaaggcaagaatgcagacccaatcctcatctccttgaagcacgggtacattccaggcaaaaacagggatctcaaggtggtcaagaagaacattctggatagcaagcccactgcaaacaagaagtgcgacctgatcagcatccccaagaaaaccacagacacggccagtgtgcaaaatgaagccaagttggatgagattttaaaagagatcaaatctataaaagacacaatctgcaatcaagatgagcgtatttccaagttagaacagcagatggcaaagatagcagcctga

SEQ ID NO: 6833 - DNA, 547 bp, Homo sapiens
  source 1..547: mol_type = unassigned DNA
aattctaacataattctcactcttcctttgcagacacgatgaggcgagtggtacgacagagcaagtttcggcatgtatttgggcaagcggtgaaaaatgaccagtgctatgatgacatccgggtttctcgtgtgacctgggatagttccttttgtgctgtcaatcccagatttgttgccataatcatagaggcaagtgggggaggagcgttccttgtcctccctctgcacaagactggtcgaattgacaaatcttaccctacagtatgtggccacacaggaccagtgctggacatagactggtgcccacataacgatcaggtcattgccagcggttcagaggactgcacggtcatggtatggcagatcccagaaaatggactcaccctttccctgactgaacctgtggtgattttggaaggccactcaaagagagtcggcatcgtggcttggcatccaacggcccgcaatgtgcttcttagtgcaggctgtgataatgccattatcatctggaatgtgggaacaggggaagcccttataaacttgga

SEQ ID NO: 6834 - DNA, 567 bp, Homo sapiens
  source 1..567: mol_type = unassigned DNA
gtcggatcgggggcccagggtgtccgagtgaactgggtgattcagaggtgtgtttccctaatagcggggcagctggcgagggacgcagtaaaaaggagcgaggtgcagacacgatgaggcgagtggtacgacagagcaagtttcggcatgtatttgggcaagcggtgaaaaatgaccagtgctatgatgacatccgggtttctcgtgtgacctgggatagttccttttgtgctgtcaatcccagatttgttgccataatcatagaggcaagtgggggaggagcgttccttgtcctccctctgcacaagactggtcgaattgacaaatcttaccctacagtatgtggccacacaggaccagtgctggacatagactggtgcccacataacgatcaggtcattgccagcggttcagaggactgcacggtcatggtatggcagatcccagaaaatggactcaccctttccctgactgaacctgtggtgattttggaaggccactcaaagagagtcggcatcgtggcttggcatccaacggcccgcaatgtgcttcttagtgcaggtggga

SEQ ID NO: 6835 - DNA, 547 bp, Homo sapiens
  source 1..547: mol_type = unassigned DNA
aggctttcgaggtccggaacgctcctggccgggtgcggagccgcgggccgagacacgatgaggcgagtggtacgacagagcaagtttcggcatgtatttgggcaagcggtgaaaaatgaccagtgctatgatgacatccgggtttctcgtgtgacctgggatagttccttttgtgctgtcaatcccagatttgttgccataatcatagaggcaagtgggggaggagcgttccttgtcctccctctgcacaagactggtcgaattgacaaatcttaccctacagtatgtggccacacaggaccagtgctggacatagactggtgcccacataacgatcaggtcattgccagcggttcagaggactgcacggtcatggtatggcagatcccagaaaatggactcaccctttccctgactgaacctgtggtgattttggaaggccactcaaagagagtcggcatcgtggcttggcatccaacggcccgcaatgtgcttcttagtgcaggctgtgataatgccattatcatctggaatgtgggaacagggg

SEQ ID NO: 6836 - DNA, 5635 bp, Homo sapiens
  source 1..5635: mol_type = unassigned DNA
cactgacatctttgctggactcttttaatcctcataaacccaggctgctggcacttgaaatttgagaagggcaatcagtctggcctcctgcctttctggcctgcaggcccagcctggacaaacaatttaggtggagctcctggaggctggaagcagagaggaggtacctcaccatcctctcctgccagctgttgcagactctgcctggggaactgattaagggtgagcagaggcatttatctccatgttaacaagcagatgtcatggcacccccagtaccggagctccaagttccgtcatgtctttggcaaaccagccagcaaggagaactgctacgactccgtgcctatcacccgcagcgttcacgacaaccacttctgtgccgtgaacccccacttcattgcagttgtgactgagtgtgctggtggaggggccttcctcgtcatccccctgcaccagacagggaagttggacccccactacccaaaagtctgcgggcacagaggcaacgttttggatgtcaagtggaacccttttgatgattttgagatcgcctcctgttctgaagatgccacaattaagatctggagcatccccaagcagctgctgaccaggaacctcacggcctacaggaaggaactcgtgggccacgcgcgcagagtaggcctggtggagtggcaccccacggccgccaacatcctcttcagtgctggctatgactacaaggtgatgatctggaacctggatacaaaggagtctgtcatcacaagccccatgagtacgattagctgtcaccaagatgtgatcctctccatgtccttcaacaccaacggcagcctgttggccaccacctgcaaagaccgcaagattcgggttattgacccccgagcagggaccgtcctccaggaggccagctacaaagggcaccgggccagcaaagtgctgtttctggggaacctgaagaagctgatgtccacaggcacatcccgatggaacaaccggcaggtggccttgtgggaccaggataacctctctgtgcctctgatggaggaggacctggacggctcctcgggcgtgctgtttcccttctatgacgcggacaccagcatgctctacgtggtggggaagggagatggcaacatccgctactacgaggtgagcgccgacaagcctcacctgagctacctgactgagtaccgctcctataacccacagaaggggatcggtgtcatgccaaagagaggactcgacgtgtcctcctgcgagatcttccgcttctacaagctgatcacaaccaaaagcctcatcgagcccatctccatgattgtgccccggcggtcagaatcctaccaagaggacatataccctccaacagcaggggcccagccctccctgacggcccaggagtggctcagcgggatgaatcgagacccaatcctggtgtcccttaggcctggctctgagctgctgagaccccacccactgcctgcagagagacctatcttcaattccatggccccagcctcaccccggctcttgaatcagacagaaaagctggctgcagaagatggctggaggtcttcctccctgttggaggagaagatgccaaggtgggcagcagaacacaggctggaggagaagaaaacctggctgacaaatggctttgacgttttcgaatgccccccaccaaagacagagaatgagttgctgcagatgttctaccggcaacaggaggagatccgaaggctccgggagctgttgacccagcgagaggtccaggccaaacagttggaactggagatcaaaaacttgcggatgggctcagagcagctctgagcagagacctctgccctcctcaccctcagggacaccactcggctccatggggaggtttagaaccaaaccacaagtcccctcaaggacaaccactatttctatattttttaccagaaaacaaaactctccatcgctgaaagagattccagtgggacatggtgccgtttttctgtttgccttcttgcaacaacagtttctgaattgactttgttttcagatgatgccttctgttgaattctgttattaagggcccatgatgagctgtaacttctcaagaggaaagaacacagtagaaaactagagctggaaggatctaggttgacctgtctgtgattttcaaactgtggtccagagaataggggaagactgggccagacgcagtggctcatgcctgtaatcccagcactctgggaggctgaggtgggcggattgcttgaggtcgggagtttgaaaccagtctcaccaggcgcagtggctcacgcctgtaattccagcatgttgggaggccgaggctggtggatcacgaggtcagcagttcgagaccagcctgaccaacatggtgaaaccccatctctactaaaaatacaaaaaaattagctgggcgtggtggcaggcgcctgtaattccagcgacttgggaggctgaggcaggagaattgcttgaaaccggaaggcgggggttgcagtgagctgagattgtgccactgcactctaacctgggcaataagagcaaaagtctgtctcaaaaaaaaaaaaaaaagaaagaaaccagcctggccaacatggtgaaaccccgtctctactaaaaatacaaaaattaggcagggcgtggtggttcacgcctataatcccagaactttgggaggccaagctgggcggatcttctgaggtcaggagttcaagaccagcctggccaacatggtgaaaccccgtctccactaaaaataaaaaattaaccaggcatggtggtgcatgcctgtaatcccagctatttgggaggctgaggcaggagaatcgcttgagcctgggaggcggaggttgcagtgaaccaagatcatgccacttcactccagcctgggtgacagagtgagactccgtctcaaaaaaaaaaagttggccagccgtggtggtgagcgtctgtagtccctgctattcgggaggctgagataggagaattgcttgaacctgggaggtggaggttgctatgagccacgattgcggactgcactgcagcctgggtgacagagcgagactccatctccaaaaaaaaaaaaaaaaagagagagagaataggggaagactaagcaggaaggctgtgtctcccttccccacactgtattccaaccagacagctcccttctattttatatgttgggctagtatgaaaaacaattctgctaggaaaaaaaaatttttttagaagtttgaaagctagtgatttgacccaagttcctcattttacagctggggaaactaaggcctagagagaggcaagtgatatttgtttcatggcagggctgggctgagatcctgcttttctgggtctgtctttttgctcttttgggtctgatgcagttctcagcccaaagagtagaaatctgttgcttctggcctcagctgtgccccagcttactcagtgacctcttgcaagtcctgccctctctggtctcagtttcttcatctgaaccaggggtaccctggaacaagctgctctctgcaggatctgccacctgaaaccttgacctaagagaaaactacctgtggggtgatctgggtttgctacagaaactaacggacactggcaaggggtcagaggcattcaacccaattctacaacacaggcaggtggtcaaaaccaacctttccaaccagaatcagcctgatatggatagatgctgtcccttatggagggacgcagacttcagaactgtgcccatgactgctgactgccaccaccaaggccctcaggtacacagcctgcctcctgcaggatgatgtgggcagatttcagccctagttaacagaagagtcccccaggaggtagggggcccccatcactggagacatgccagcagagcctctggccacctaaccaggaggtcttctgaaatgactatacgaggtaaagaagtagtaccagatggtcccaaagttcccttttagcctgaaagcttttctttgtccctccttagtgaatctgtgttccgagccctactctaaagttcagtggtcaatacaatagtccaccaagagactgggaatgattagaagtgaaattggtccctccttaccaaggaggggcagatgatctccattgcacagggcgattagattctggagctgaggtggggactgcaggaggccacctagtctggtaggtttcaacccaagctgtgtacattagaattcccttgggagcgtgcaggaaatacagatgcccatgccacattccagaccaactgaagctgaatctccagagtagggcctgtatggtcatataagctccacaggtgatctgcagtacagtgaagatggaagactgcatgtgtacctatttgcaataaagatgaagaggacagcaagctccagacaggagctgggactcaacccagatctcttaagtcctgcctggtggctccttaaaagtccagaagtgttgccccaagccctccctcaacatctctgggaaccgcagctgcagcacgatgggggttcagtgcccctgtttgccccttacccagctgtggtttattctgcttgtatgtctgcacaggccggatgctcgtgttccttgtcttattctccatttactcagtcactggggctcactcccgtctgatgcactagccaagattgccttagtgtgctccagaaaagaaggccaaatcccaggcattgtcagggcagcagagctctacaggataggcttacctttcccacctgtgtggctagcacttcacagtttacaaattcctcccacctccactcagtgacacatgctgttctaacacaggtcaggcaggcattacagtccccatgttcagaatcaaagacctagcctcagagaagtgaagaaacatcatgccaaggtcattgactgccaagcggtagaggtggggttgcatccagagagcttcccggtatgcctctgcacaatgccattccttggccagctccctccaccccaagggacccagactgcacacttaacaaacaggacacaggtgtctttgaacaaacttttttgtattattatttttacatctagaataaattatttaaattatttcacagcaagggagagggataggtaatttttatcagatatttttttaaaccatctgttttttaaattacatttttgtttatgttcttgagctgatgtagtggaacttgcctagcacattcaggtcccagccagttggcagagcatgctctcatctccttattccataccctgggcgtcccctttctgttgactcaggaactttctgagaatgaggacagcactaggagatgagctttggcaggtatccaccttaacgctacaataattgtgcttcctgaaacaaaacttgagattgtatcatagaaggaaacaggaagtcagaaatcaaatctatgcttttaattgaaaccgtgcctgaaacagtttgaatgattgttttaatgttgtttctgaaattccttgtacctttgtgaaaaataatgataataaataaaagtgaaaataaatagatgtggaatatgcaatggaaataatgtaacaaaataataaacatctggccattttactacaa

SEQ ID NO: 6837 - DNA, 5459 bp, Homo sapiens
  source 1..5459: mol_type = unassigned DNA
cgggagtcggcgggcggcgaggagcgcggagccggagctggacgccgccgccgccaccgccacctgcgcggcagtcatcaagatgtcatggcacccccagtaccggagctccaagttccgtcatgtctttggcaaaccagccagcaaggagaactgctacgactccgtgcctatcacccgcagcgttcacgacaaccacttctgtgccgtgaacccccacttcattgcagttgtgactgagtgtgctggtggaggggccttcctcgtcatccccctgcaccagacagggaagttggacccccactacccaaaagtctgcgggcacagaggcaacgttttggatgtcaagtggaacccttttgatgattttgagatcgcctcctgttctgaagatgccacaattaagatctggagcatccccaagcagctgctgaccaggaacctcacggcctacaggaaggaactcgtgggccacgcgcgcagagtaggcctggtggagtggcaccccacggccgccaacatcctcttcagtgctggctatgactacaaggtgatgatctggaacctggatacaaaggagtctgtcatcacaagccccatgagtacgattagctgtcaccaagatgtgatcctctccatgtccttcaacaccaacggcagcctgttggccaccacctgcaaagaccgcaagattcgggttattgacccccgagcagggaccgtcctccaggaggccagctacaaagggcaccgggccagcaaagtgctgtttctggggaacctgaagaagctgatgtccacaggcacatcccgatggaacaaccggcaggtggccttgtgggaccaggataacctctctgtgcctctgatggaggaggacctggacggctcctcgggcgtgctgtttcccttctatgacgcggacaccagcatgctctacgtggtggggaagggagatggcaacatccgctactacgaggtgagcgccgacaagcctcacctgagctacctgactgagtaccgctcctataacccacagaaggggatcggtgtcatgccaaagagaggactcgacgtgtcctcctgcgagatcttccgcttctacaagctgatcacaaccaaaagcctcatcgagcccatctccatgattgtgccccggcggtcagaatcctaccaagaggacatataccctccaacagcaggggcccagccctccctgacggcccaggagtggctcagcgggatgaatcgagacccaatcctggtgtcccttaggcctggctctgagctgctgagaccccacccactgcctgcagagagacctatcttcaattccatggccccagcctcaccccggctcttgaatcagacagaaaagctggctgcagaagatggctggaggtcttcctccctgttggaggagaagatgccaaggtgggcagcagaacacaggctggaggagaagaaaacctggctgacaaatggctttgacgttttcgaatgccccccaccaaagacagagaatgagttgctgcagatgttctaccggcaacaggaggagatccgaaggctccgggagctgttgacccagcgagaggtccaggccaaacagttggaactggagatcaaaaacttgcggatgggctcagagcagctctgagcagagacctctgccctcctcaccctcagggacaccactcggctccatggggaggtttagaaccaaaccacaagtcccctcaaggacaaccactatttctatattttttaccagaaaacaaaactctccatcgctgaaagagattccagtgggacatggtgccgtttttctgtttgccttcttgcaacaacagtttctgaattgactttgttttcagatgatgccttctgttgaattctgttattaagggcccatgatgagctgtaacttctcaagaggaaagaacacagtagaaaactagagctggaaggatctaggttgacctgtctgtgattttcaaactgtggtccagagaataggggaagactgggccagacgcagtggctcatgcctgtaatcccagcactctgggaggctgaggtgggcggattgcttgaggtcgggagtttgaaaccagtctcaccaggcgcagtggctcacgcctgtaattccagcatgttgggaggccgaggctggtggatcacgaggtcagcagttcgagaccagcctgaccaacatggtgaaaccccatctctactaaaaatacaaaaaaattagctgggcgtggtggcaggcgcctgtaattccagcgacttgggaggctgaggcaggagaattgcttgaaaccggaaggcgggggttgcagtgagctgagattgtgccactgcactctaacctgggcaataagagcaaaagtctgtctcaaaaaaaaaaaaaaaagaaagaaaccagcctggccaacatggtgaaaccccgtctctactaaaaatacaaaaattaggcagggcgtggtggttcacgcctataatcccagaactttgggaggccaagctgggcggatcttctgaggtcaggagttcaagaccagcctggccaacatggtgaaaccccgtctccactaaaaataaaaaattaaccaggcatggtggtgcatgcctgtaatcccagctatttgggaggctgaggcaggagaatcgcttgagcctgggaggcggaggttgcagtgaaccaagatcatgccacttcactccagcctgggtgacagagtgagactccgtctcaaaaaaaaaaagttggccagccgtggtggtgagcgtctgtagtccctgctattcgggaggctgagataggagaattgcttgaacctgggaggtggaggttgctatgagccacgattgcggactgcactgcagcctgggtgacagagcgagactccatctccaaaaaaaaaaaaaaaaagagagagagaataggggaagactaagcaggaaggctgtgtctcccttccccacactgtattccaaccagacagctcccttctattttatatgttgggctagtatgaaaaacaattctgctaggaaaaaaaaatttttttagaagtttgaaagctagtgatttgacccaagttcctcattttacagctggggaaactaaggcctagagagaggcaagtgatatttgtttcatggcagggctgggctgagatcctgcttttctgggtctgtctttttgctcttttgggtctgatgcagttctcagcccaaagagtagaaatctgttgcttctggcctcagctgtgccccagcttactcagtgacctcttgcaagtcctgccctctctggtctcagtttcttcatctgaaccaggggtaccctggaacaagctgctctctgcaggatctgccacctgaaaccttgacctaagagaaaactacctgtggggtgatctgggtttgctacagaaactaacggacactggcaaggggtcagaggcattcaacccaattctacaacacaggcaggtggtcaaaaccaacctttccaaccagaatcagcctgatatggatagatgctgtcccttatggagggacgcagacttcagaactgtgcccatgactgctgactgccaccaccaaggccctcaggtacacagcctgcctcctgcaggatgatgtgggcagatttcagccctagttaacagaagagtcccccaggaggtagggggcccccatcactggagacatgccagcagagcctctggccacctaaccaggaggtcttctgaaatgactatacgaggtaaagaagtagtaccagatggtcccaaagttcccttttagcctgaaagcttttctttgtccctccttagtgaatctgtgttccgagccctactctaaagttcagtggtcaatacaatagtccaccaagagactgggaatgattagaagtgaaattggtccctccttaccaaggaggggcagatgatctccattgcacagggcgattagattctggagctgaggtggggactgcaggaggccacctagtctggtaggtttcaacccaagctgtgtacattagaattcccttgggagcgtgcaggaaatacagatgcccatgccacattccagaccaactgaagctgaatctccagagtagggcctgtatggtcatataagctccacaggtgatctgcagtacagtgaagatggaagactgcatgtgtacctatttgcaataaagatgaagaggacagcaagctccagacaggagctgggactcaacccagatctcttaagtcctgcctggtggctccttaaaagtccagaagtgttgccccaagccctccctcaacatctctgggaaccgcagctgcagcacgatgggggttcagtgcccctgtttgccccttacccagctgtggtttattctgcttgtatgtctgcacaggccggatgctcgtgttccttgtcttattctccatttactcagtcactggggctcactcccgtctgatgcactagccaagattgccttagtgtgctccagaaaagaaggccaaatcccaggcattgtcagggcagcagagctctacaggataggcttacctttcccacctgtgtggctagcacttcacagtttacaaattcctcccacctccactcagtgacacatgctgttctaacacaggtcaggcaggcattacagtccccatgttcagaatcaaagacctagcctcagagaagtgaagaaacatcatgccaaggtcattgactgccaagcggtagaggtggggttgcatccagagagcttcccggtatgcctctgcacaatgccattccttggccagctccctccaccccaagggacccagactgcacacttaacaaacaggacacaggtgtctttgaacaaacttttttgtattattatttttacatctagaataaattatttaaattatttcacagcaagggagagggataggtaatttttatcagatatttttttaaaccatctgttttttaaattacatttttgtttatgttcttgagctgatgtagtggaacttgcctagcacattcaggtcccagccagttggcagagcatgctctcatctccttattccataccctgggcgtcccctttctgttgactcaggaactttctgagaatgaggacagcactaggagatgagctttggcaggtatccaccttaacgctacaataattgtgcttcctgaaacaaaacttgagattgtatcatagaaggaaacaggaagtcagaaatcaaatctatgcttttaattgaaaccgtgcctgaaacagtttgaatgattgttttaatgttgtttctgaaattccttgtacctttgtgaaaaataatgataataaataaaagtgaaaataaatagatgtggaatatgcaatggaaataatgtaacaaaataataaacatctggccattttactacaa

SEQ ID NO: 6838 - DNA, 3569 bp, Homo sapiens
  source 1..3569: mol_type = unassigned DNA
cgggccctctccctctctccctttcttcctgcctcgccttcctgcggcgaaggaggctcatctattataaatgcacattcggggctgacatcagcgacgagcggcgggcgagcgccgacgagcggtccctgcgcgctgcccgcccggagcgcagcccccaggctcggccgagccgccggcggggcgcggggagcgagccgggagctgccggacccccttccgccgccgccccgggccgccgccgccgcccccgcacgccgcgcccgcgcccccgctccgccgcggagtttctgcatgactgtcacaaagatgtcctggcgtccgcaataccgtagctccaagttccggaatgtctacgggaaggtggccaaccgggagcactgcttcgatgggatccccatcaccaagaatgtgcacgacaaccacttctgtgccgtcaacacccgcttcctggccatcgtcaccgagagcgcagggggcggctccttcctcgtcatccccctggagcagacaggcaggattgaacccaactaccccaaggtctgcggccaccagggcaatgtgctggatatcaaatggaaccccttcatcgacaacatcattgcctcgtgctcggaggacacgtcggtgcggatctgggagatccccgagggcgggctgaagcggaacatgacggaggcgctcctggagctgcacgggcacagccggcgtgtggggctggtcgagtggcaccccaccaccaacaacatcctgttcagcgctggctacgactacaaggtcctcatctggaacctggatgtgggtgagccggtgaagatgattgactgccacacggatgtgatcctctgcatgtccttcaacacggacggcagcctgctcaccaccacgtgcaaggacaagaagctgcgtgtgattgagccccgctctggccgtgttctgcaggaggccaactgcaaaaaccacagagtgaaccgggtggtgttcctggggaacatgaagcggctcctcacgacaggggtctccaggtggaacacaagacagattgccctctgggaccaggaggacctctccatgcccctgatcgaagaggaaattgatgggctctctggcctcctgttccccttctatgatgctgacacccacatgctctacctggctggaaagggtgatggaaacatccggtactacgagatcagcactgagaagccctacctgagttacctcatggagttccgctccccagccccgcagaaaggcctaggggtcatgcccaagcacgggctggatgtgtcagcctgcgaggtgttccgcttctacaagctggtgactctcaagggcctgatcgagcccatctccatgatcgtgccccggaggtcagattcctaccaggaagacatttacccaatgacaccaggcacggagccagcactgaccccggatgaatggctgggaggcatcaaccgagatcccgtgctgatgtctttgaaagaaggctataagaagtcctcaaaaatggtatttaaggctcccatcaaagaaaagaagagtgttgtggtcaacggaatagatttattagaaaatgtcccacccaggacagagaatgagctccttcgaatgttcttccggcagcaggatgagattcgacggttgaaagaggagctggcccagaaggacatccgcattcggcagctccagctggaactgaaaaacttgcgcaacagccccaagaactgttagctccccagctgggctgttttctaagccgatctctccgtcgtttctactcatcccttaacttctcccttaccagtgaccccagagacagagccaggacaggagtgggggccagcctgaggacccccgcctaccacctcgagaactggaagccaacctctaacctcctgacctcatgctaataaaagtccccagcttctggagaccccctgccggcagcccctttccctgccaccccaggagccaggcttcccctcagctgggtgaagactacagactccctggggttggcaggggctccatctcagtggaccaggaagcaagaggggaagcgggatcccagctagacttagaacttggacttttcccctgtgaagggggctgccaggacatctcagcactcccgcctggagctctcagcatcactgaaggtaccacagtgtaagtgctggactgcaggctgcagtgatccctctttcgtcccaccccctcttccctcagcagccccggaagcctgcctcacccgacgaggacagcgagcggcccggctcctttctgtctcttcccttcccaccctcttgtcttcagggaattcagaggattgctctccaaggccataatgaccccttgccttccccatgattctctacaaagctcttgcacacccttttcccattcaatttgtgagccaggcagggtagggattagtgtccccctttgacaaatgacagaactgagggttgcaatggggaaatgacttataaagtcacccagcaggtcaacaatgggcccacgaccaagaccctgggtgttcagaccccaaggccagggcctttcccgctgcatcaagatgccaatccctttgtgggcttcaccagtgcccaagtctctatggagaatgagaactggaagccactgctaccgtctacccagcaccagtagtgccgatgtgccacactgcccagttgaggcccctcacgctctgtgcccctagatccttcaggtccccaccctcagctgtcaccaccaccctccccaggggactccatctgagatgaggcctcgtcctcctggaagctgaggctgagaagggtggagcttggccctggggaaggcagaccagggtctgatggcttctagggatgctctgcgtgtgtctcagcaccgctatctcagccactttcagccttatgcacgtagaatgaccacagccactcgcatccgtatagcactttaaagtttctgcagtcctttgacacataggatctcatggagcctcacgtctactcccttctgcagatgaggaaaccgagagaagtggcccaaggtcacgcaactctgagatgccacatttcatttgatcttgtacacattttcttttattccttcttttttcctcctttcatttcccactacgcacaaagagtttataaacactgttctcagaagagtcacagtttggggtgagatctggaaatcaagaaatgggtgtccactcttttctttcattagctaggatctactagatgcattatactccatacctgcttttcccatggccgccctacggaaaatcccatccacagaggccagggctacccaagcccctccaggtgagctgggcctttcctttatgaacctccatcctcccagccagctacagtagggcctcctcaccccgtaccccacagctagacagtgtcagcactcatctcctcctcccacatttctggagcttttttttttccttccccattgacctttgtggtcttctgtgattatttatgctgcctcccaaggatagaattgaaataaaatgttttcaacttatcaaa

SEQ ID NO: 6839 - DNA, 3332 bp, Homo sapiens
  source 1..3332: mol_type = unassigned DNA
attcaaaccgcctgctgggtgccgtgggccattgtgcaagtcttccaggccgcggtcgaatgattctgacaagcgatgtcctggcgtccgcaataccgtagctccaagttccggaatgtctacgggaaggtggccaaccgggagcactgcttcgatgggatccccatcaccaagaatgtgcacgacaaccacttctgtgccgtcaacacccgcttcctggccatcgtcaccgagagcgcagggggcggctccttcctcgtcatccccctggagcagacaggcaggattgaacccaactaccccaaggtctgcggccaccagggcaatgtgctggatatcaaatggaaccccttcatcgacaacatcattgcctcgtgctcggaggacacgtcggtgcggatctgggagatccccgagggcgggctgaagcggaacatgacggaggcgctcctggagctgcacgggcacagccggcgtgtggggctggtcgagtggcaccccaccaccaacaacatcctgttcagcgctggctacgactacaaggtcctcatctggaacctggatgtgggtgagccggtgaagatgattgactgccacacggatgtgatcctctgcatgtccttcaacacggacggcagcctgctcaccaccacgtgcaaggacaagaagctgcgtgtgattgagccccgctctggccgtgttctgcaggaggccaactgcaaaaaccacagagtgaaccgggtggtgttcctggggaacatgaagcggctcctcacgacaggggtctccaggtggaacacaagacagattgccctctgggaccaggaggacctctccatgcccctgatcgaagaggaaattgatgggctctctggcctcctgttccccttctatgatgctgacacccacatgctctacctggctggaaagggtgatggaaacatccggtactacgagatcagcactgagaagccctacctgagttacctcatggagttccgctccccagccccgcagaaaggcctaggggtcatgcccaagcacgggctggatgtgtcagcctgcgaggtgttccgcttctacaagctggtgactctcaagggcctgatcgagcccatctccatgatcgtgccccggaggtcagattcctaccaggaagacatttacccaatgacaccaggcacggagccagcactgaccccggatgaatggctgggaggcatcaaccgagatcccgtgctgatgtctttgaaagaaggctataagaagtcctcaaaaatggtatttaaggctcccatcaaagaaaagaagagtgttgtggtcaacggaatagatttattagaaaatgtcccacccaggacagagaatgagctccttcgaatgttcttccggcagcaggatgagattcgacggttgaaagaggagctggcccagaaggacatccgcattcggcagctccagctggaactgaaaaacttgcgcaacagccccaagaactgttagctccccagctgggctgttttctaagccgatctctccgtcgtttctactcatcccttaacttctcccttaccagtgaccccagagacagagccaggacaggagtgggggccagcctgaggacccccgcctaccacctcgagaactggaagccaacctctaacctcctgacctcatgctaataaaagtccccagcttctggagaccccctgccggcagcccctttccctgccaccccaggagccaggcttcccctcagctgggtgaagactacagactccctggggttggcaggggctccatctcagtggaccaggaagcaagaggggaagcgggatcccagctagacttagaacttggacttttcccctgtgaagggggctgccaggacatctcagcactcccgcctggagctctcagcatcactgaaggtaccacagtgtaagtgctggactgcaggctgcagtgatccctctttcgtcccaccccctcttccctcagcagccccggaagcctgcctcacccgacgaggacagcgagcggcccggctcctttctgtctcttcccttcccaccctcttgtcttcagggaattcagaggattgctctccaaggccataatgaccccttgccttccccatgattctctacaaagctcttgcacacccttttcccattcaatttgtgagccaggcagggtagggattagtgtccccctttgacaaatgacagaactgagggttgcaatggggaaatgacttataaagtcacccagcaggtcaacaatgggcccacgaccaagaccctgggtgttcagaccccaaggccagggcctttcccgctgcatcaagatgccaatccctttgtgggcttcaccagtgcccaagtctctatggagaatgagaactggaagccactgctaccgtctacccagcaccagtagtgccgatgtgccacactgcccagttgaggcccctcacgctctgtgcccctagatccttcaggtccccaccctcagctgtcaccaccaccctccccaggggactccatctgagatgaggcctcgtcctcctggaagctgaggctgagaagggtggagcttggccctggggaaggcagaccagggtctgatggcttctagggatgctctgcgtgtgtctcagcaccgctatctcagccactttcagccttatgcacgtagaatgaccacagccactcgcatccgtatagcactttaaagtttctgcagtcctttgacacataggatctcatggagcctcacgtctactcccttctgcagatgaggaaaccgagagaagtggcccaaggtcacgcaactctgagatgccacatttcatttgatcttgtacacattttcttttattccttcttttttcctcctttcatttcccactacgcacaaagagtttataaacactgttctcagaagagtcacagtttggggtgagatctggaaatcaagaaatgggtgtccactcttttctttcattagctaggatctactagatgcattatactccatacctgcttttcccatggccgccctacggaaaatcccatccacagaggccagggctacccaagcccctccaggtgagctgggcctttcctttatgaacctccatcctcccagccagctacagtagggcctcctcaccccgtaccccacagctagacagtgtcagcactcatctcctcctcccacatttctggagcttttttttttccttccccattgacctttgtggtcttctgtgattatttatgctgcctcccaaggatagaattgaaataaaatgttttcaacttatc

SEQ ID NO: 6840 - DNA, 3611 bp, Homo sapiens
  source 1..3611: mol_type = unassigned DNA
acagattctgttgacctttagtaatgagggaggcagggctagagggtgactagcagccaggcctcccaggctcccaggcctctcagatgcctggaatttcggagctagaaggtagtcagattcccgttatcttgactgctgcagcggggtctctgggatggtgatgtgagtgcctcctgcacccgtggcccccatgtggcataactccttgggcgctattcatccacacggcccatctgtgcagggtacagccttcatggtcttagctggcagccctgacaacttggatgtgcaaagaagatacaagtttgtttcctctgaagcttgtctggtgtcatccaggagccccacctgatgtcctggcgtccgcaataccgtagctccaagttccggaatgtctacgggaaggtggccaaccgggagcactgcttcgatgggatccccatcaccaagaatgtgcacgacaaccacttctgtgccgtcaacacccgcttcctggccatcgtcaccgagagcgcagggggcggctccttcctcgtcatccccctggagcagacaggcaggattgaacccaactaccccaaggtctgcggccaccagggcaatgtgctggatatcaaatggaaccccttcatcgacaacatcattgcctcgtgctcggaggacacgtcggtgcggatctgggagatccccgagggcgggctgaagcggaacatgacggaggcgctcctggagctgcacgggcacagccggcgtgtggggctggtcgagtggcaccccaccaccaacaacatcctgttcagcgctggctacgactacaaggtcctcatctggaacctggatgtgggtgagccggtgaagatgattgactgccacacggatgtgatcctctgcatgtccttcaacacggacggcagcctgctcaccaccacgtgcaaggacaagaagctgcgtgtgattgagccccgctctggccgtgttctgcaggaggccaactgcaaaaaccacagagtgaaccgggtggtgttcctggggaacatgaagcggctcctcacgacaggggtctccaggtggaacacaagacagattgccctctgggaccaggaggacctctccatgcccctgatcgaagaggaaattgatgggctctctggcctcctgttccccttctatgatgctgacacccacatgctctacctggctggaaagggtgatggaaacatccggtactacgagatcagcactgagaagccctacctgagttacctcatggagttccgctccccagccccgcagaaaggcctaggggtcatgcccaagcacgggctggatgtgtcagcctgcgaggtgttccgcttctacaagctggtgactctcaagggcctgatcgagcccatctccatgatcgtgccccggaggtcagattcctaccaggaagacatttacccaatgacaccaggcacggagccagcactgaccccggatgaatggctgggaggcatcaaccgagatcccgtgctgatgtctttgaaagaaggctataagaagtcctcaaaaatggtatttaaggctcccatcaaagaaaagaagagtgttgtggtcaacggaatagatttattagaaaatgtcccacccaggacagagaatgagctccttcgaatgttcttccggcagcaggatgagattcgacggttgaaagaggagctggcccagaaggacatccgcattcggcagctccagctggaactgaaaaacttgcgcaacagccccaagaactgttagctccccagctgggctgttttctaagccgatctctccgtcgtttctactcatcccttaacttctcccttaccagtgaccccagagacagagccaggacaggagtgggggccagcctgaggacccccgcctaccacctcgagaactggaagccaacctctaacctcctgacctcatgctaataaaagtccccagcttctggagaccccctgccggcagcccctttccctgccaccccaggagccaggcttcccctcagctgggtgaagactacagactccctggggttggcaggggctccatctcagtggaccaggaagcaagaggggaagcgggatcccagctagacttagaacttggacttttcccctgtgaagggggctgccaggacatctcagcactcccgcctggagctctcagcatcactgaaggtaccacagtgtaagtgctggactgcaggctgcagtgatccctctttcgtcccaccccctcttccctcagcagccccggaagcctgcctcacccgacgaggacagcgagcggcccggctcctttctgtctcttcccttcccaccctcttgtcttcagggaattcagaggattgctctccaaggccataatgaccccttgccttccccatgattctctacaaagctcttgcacacccttttcccattcaatttgtgagccaggcagggtagggattagtgtccccctttgacaaatgacagaactgagggttgcaatggggaaatgacttataaagtcacccagcaggtcaacaatgggcccacgaccaagaccctgggtgttcagaccccaaggccagggcctttcccgctgcatcaagatgccaatccctttgtgggcttcaccagtgcccaagtctctatggagaatgagaactggaagccactgctaccgtctacccagcaccagtagtgccgatgtgccacactgcccagttgaggcccctcacgctctgtgcccctagatccttcaggtccccaccctcagctgtcaccaccaccctccccaggggactccatctgagatgaggcctcgtcctcctggaagctgaggctgagaagggtggagcttggccctggggaaggcagaccagggtctgatggcttctagggatgctctgcgtgtgtctcagcaccgctatctcagccactttcagccttatgcacgtagaatgaccacagccactcgcatccgtatagcactttaaagtttctgcagtcctttgacacataggatctcatggagcctcacgtctactcccttctgcagatgaggaaaccgagagaagtggcccaaggtcacgcaactctgagatgccacatttcatttgatcttgtacacattttcttttattccttcttttttcctcctttcatttcccactacgcacaaagagtttataaacactgttctcagaagagtcacagtttggggtgagatctggaaatcaagaaatgggtgtccactcttttctttcattagctaggatctactagatgcattatactccatacctgcttttcccatggccgccctacggaaaatcccatccacagaggccagggctacccaagcccctccaggtgagctgggcctttcctttatgaacctccatcctcccagccagctacagtagggcctcctcaccccgtaccccacagctagacagtgtcagcactcatctcctcctcccacatttctggagcttttttttttccttccccattgacctttgtggtcttctgtgattatttatgctgcctcccaaggatagaattgaaataaaatgttttcaacttatc

SEQ ID NO: 6841 - DNA, 5970 bp, Homo sapiens
  source 1..5970: mol_type = unassigned DNA
ggacagcagcgggttaagtgccgcccgcgcggagacggctgagtccggagccgcggctccgagctcgcattcggatccgctagagcaggaagatggcgacggacggcgcgagctgcgagcccgacttgtcccgggccccggaggacgcggcgggggccgcggcggaggcggcgaaaaaagagtttgatgtggatactctcagtaaatccgagctgcggatgctcctcagcgtgatggaaggggagctggaggccagagaccttgtcatcgaggccctgcgggctcgcaggaaggaggtatttatccaggaacggtatgggagatttaatctaaatgacccgttcctggcactccagagagactatgaagcaggtgctggtgacaaagagaagaagccagtttgtaccaaccccctctccatccttgaagcagtcatggcccactgcaagaaaatgcaagaaaggatgtccgcacagctggctgctgctgagagcagacaaaagaagctggaaatggagaagcttcagctacaagcccttgagcaagagcacaagaagctggctgcccgccttgaggaagagcgtggcaagaacaagcaggtggtcctgatgctggtcaaagagtgcaagcagctctcaggcaaagtcatagaggaggcccagaagctcgaagacgtaatggccaaactggaagaggaaaagaaaaagacgaatgaattagaagaggaactctccgctgagaaacgaagaagcacagaaatggaagctcagatggaaaaacaactctctgagtttgacactgagcgggaacagcttcgtgccaagctgaaccgggaagaagcacacaccactgacctcaaagaggagatagacaagatgaggaaaatgattgagcaactgaaaaggggaagtgacagcaaaccaagcctctctcttccacggaagacaaaagataggcgtttggtttccatatctgtgggaacagaaggaactgtgacaaggtctgttgcatgccagacagacctagtgacagaaaatgctgaccacatgaaaaagttgcctttaaccatgcctgtaaaaccttccacagggagtcccctagtttctgcaaatgcaaaagggagcgtgtgcaccagtgccaccatggccagaccaggtattgacaggcaggcttcctatggtgacttgattggcgcttctgtacccgctttcccacctccaagtgcaaacaaaattgaggaaaatggaccaagcactggctcaacaccagatccaaccagtagcacacccccacttcccagtaacgctgcccctcccaccgctcaaacaccaggcatagctcctcagaactcgcaagctccacctatgcacagtttacattcaccatgtgccaacacctctttgcatccaggtctaaacccacgaatccaagcagctagatttagatttcagggcaatgctaacgacccagaccaaaatggaaatactacccaaagtcctccgtcaagagatgtctcgcctacaagtcgtgacaacctagtggccaaacaactagctcggaatactgtgacccaagcactgtcaagatttacaagccctcaagcaggtgctccctcaaggcctggagtgcccccaacaggggatgttggcacccaccctccagttggtcggaccagtttaaagactcatggtgtagcacgagttgacagaggaaatcctcctcctatccctccaaaaaagccagggctctcccaaactccttctccaccacacccccaactcaaggttattatagacagcagcagggcctcgaacacaggggccaaagttgataacaaaactgtggcttcgactccttccagtttgccacaagggaacagggtgatcaatgaggagaaccttcctaagtcatcctcccctcagctgccaccaaaaccatccatagatttaactgtggcacctgcaggctgtgccgtttcagccctggccacgtctcaggtgggtgcctggcctgctgcaacccccggactgaaccaacctgcatgttcagacagttcccttgtcattcctaccaccattgccttttgctcttccataaaccccgttagtgcctcatcctgtagaccaggtgcctcagacagcctcctggtaacagcatcaggctggtcaccctccctaacccctttgctaatgagtggtggtcctgcccccctggctggcaggcccacccttcttcagcaagctgctgcccagggaaatgtcactttattatcaatgctgcttaatgaagaaggactggacattaattactcctgtgaagatggccattctgccttgtattctgctgctaagaatggacatacagactgtgtgagattgctgctgagtgcagaagcccaagtcaatgctgctgataaaaatggcttcacacccttgtgtgctgcagctgctcagggacatttcgagtgtgtagaattattaatttcatatgatgctaacattaatcatgctgctgatggaggacagacacctctatacctggcctgtaaaaatggaaataaagaatgtattaaactcttgttggaagctggaaccaatcgaagtgtaaaaaccacagatggctggacaccagttcacgcagctgtggacactggtaatgtggacagcctcaagcttcttatgtaccatagaataccagctcatggaaattctttcaatgaggaggagtccgagtcaagtgtctttgacttggatggaggagaagagagtcctgaaggcatatccaagcctgttgttcctgcagacctcattaaccacgccaacagagaaggctggactgctgcccacattgctgcttccaaaggttttaagaactgcctagaaatcttgtgtaggcacggagggcttgagccagaaaggagagacaagtgcaatcggactgtgcatgatgttgccactgatgactgcaagcatttgctggagaatctgaatgctcttaaaatacccttaaggatttcagtgggtgagattgaaccaagcaactatggttctgatgacttggaatgtgaaaacacaatatgtgctttaaatatccgcaaacagacatcatgggatgatttttcaaaagcagtgagtcaagctctgacaaatcatttccaggcaatctcttctgatggatggtggagtctggaagacgtgacttgcaataacaccactgattccaacatcggcctcagtgcaagaagcatacgatccatcacgctaggaaatgtgccgtggtcagtgggtcagagcttcgcgcagtccccgtgggactttatgaggaagaataaggcagagcacatcactgtgcttttgtcaggtcctcaagaaggctgtctcagtagtgtgacttatgcctccatgatccctctccagatgatgcagaactacctcaggctggttgagcaatatcataatgtcattttccacggcccagaaggaagcttgcaagactacatagtacatcagcttgcactctgcctgaagcacagacaaatggctgcaggattctcctgtgaaatagtgagagctgaagtagatgctggtttttccaaggaacagctactagacctgttcattagtagcgcttgtctgatcccagtgaaacaatctcccagtaagaagaaaatcatcatcattttagaaaatttagaaaaatcttcactgtcggagttattgagggactttttggcacctcttgaaaatcgcagcactgaaagcccctgcactttccaaaaaggaaatggactgtccgaatgttattactttcatgagaactgctttctgatgggaaccatcgccaaggcctgtctccagggctccgacttgctggtgcagcagcatttccgctgggtgcagctgcggtgggatggcgagcccatgcaaggactgctgcagaggttcttacgaaggaaagttgtgaataagttcaaaggtcaggcgccctccccctgcgatcctgtgtgcaagattgtcgactgggctctgtccgtctggcgtcagcttaactcctgcctggcccgcttgggcacacctgaagcacttcttggaccaaaatatttcctgtcttgtcctgtagttcctgggcatgcccaagtgacagtgaagtggatgtctaagctgtggaatggcgtcatcgcacccagagttcaagaagcaatattgtcaagagcctctgtgaaaagacaacctggctttgggcagacaactgctaaaagacaccctagccaaggacagcaggctgtggtcaaagctgctctcagcatcttgctaaataaagctgtactgcatggctgtcccctccccagagcagagctagaccagcatacagctgatttcaaaggaggaagtttccctttatccatagtttccagttataacacttgtaacaagaagaaaggagagagtggtgcctggagaaaggtgaacaccagtcctcgcaggaagtctggccgcttctctttacccacctggaataagccagacctaagcactgaaggtatgaaaaataagactatatcacagctgaattgtaacaggaatgcttctctgtcaaaacaaaagtctttagagaatgatctatcactgacgttgaatttggatcagagactctctctgggttcagatgacgaagcagatcttgtcaaggaacttcagagcatgtgctccagcaagtctgagtctgatatcagcaagattgctgattccagggatgatttaaggatgtttgatagttctggaaacaaccctgtactttcagcaactattaataatctgagaatgccagtgtcacaaaaggaggtcagtcctctcagcagccatcaaactactgaatgcagcaacagtaaatcaaagactgagttgggtgtttcaagagttaaatcttttcttcctgttcctagaagtaaagtcacccagtgttcccagaacaccaaaagaagcagcagcagcagtaatacaaggcaaatagaaatcaacaacaactcaaaagaagtgaattggaacttacacaaaaatgaacacctagaaaaacctaacaaataggcctgcctacaatattctcattattaacttcctctatttcacacagaaaccaaggacaacaagatacaaatacctttaaattgataaaatgttttcactgtaatataaattatgagtgcgggaccactattcaatttttttttgtaaagaatgtatttataaccaacattttgttgcttttttttttaattctgtaggattgaacttcaataccaggaagttatgccaacttttcaagtagttttataatagaaaaattgtaatagttttaatcaagatgttcaggggtattaaaacagaactgtgtactgtatatctgtatatatgtatatatgtatgtatatttaaggaagtccagaaatcatactgcatacatgctacaaaaaagtagcaaaaaagtacaaagttggcttagataacttgtaccgttttaaatggagatcataattttatgttcacttgatggggaatgactagaatggggcaataacaaatcatttctaaacagttattttccattaaaagccatattaagtattttgcttgttaaattctagttttatgttttaaatctcttagtggttacattgccatttggtagcatcatgtatatatttatgcttataagtttgcattatgactcctgtaaaatatgaaattataatgcaataaaagtgttatctttcttacaaaagttttgtacctaagtggatatagataactgcataaatgaataaattcagaattaactccttcaatatttctagtagcacaactgataatattgatattttctacaaatgttacttctaaaattacagacaaaattacttacacaattcagttaagatgctttgacactgaataaaatattgatttcatgaaa

SEQ ID NO: 6842 - DNA, 1262 bp, Homo sapiens
  source 1..1262: mol_type = unassigned DNA
ataggaacagccgcggcggcccggctcgcgcgctgcttgcctgcctcggtctccgccgctccaggggcgggtggggtgggctgagccggagcccgggccgccgccgccgccgccggggagaggccgaacgcgcagccggcgcgggtccctgagagagcgcggccgccgggcggtcggtccccgtccgggtcgaagccaggggcgcgcggcgatgtgagccatgagcgcgacgtggacgctgtcgccggagcccctgccgccgtcgacggggcccccggtgggcgcgggcctggacgcggagcagcgcacggtgttcgccttcgtgctctgcctgctcgtggtgctggtgctgttgatggtgcgctgcgtgcgcatcctgctcgacccctacagccgcatgcccgcctcgtcctggaccgaccacaaggaggcgctcgagcgcgggcagttcgactacgcgttggtgtgaggggcgcggcgccccctagccggccctgcgccggggtctcagagggccggcccggcggggggcgccgcggggccaggactgcgctcaggatcccgccccggagcccccagcccgggggagagggggagggagttgggagaagcccagcccctccccctcgagacccctcccatgtcccttcctggcctggccggagccccacctcgtgcctttatccgccctgtcccttcctctctgcgcatctcacccgcccggctggcccccacccccgactctgaatcccgggcgggaggaggacccccgcaccgccccctccccagcgtgtaagtggctctgctattgtgcgtccctggaagtggggacccccttgtccctcctccctcccctgttgtctggccgtcgtcaaccccaccttgactgagtgttgagcccgtccttgggctctggtccctgcggggcaggctctcccgggcccacggggcggacgctgcataccaatttgccctgcaccgcctgtcccggagacggagcccgaaggcctgccatggcggctgtgtcgaggatgcgtggcgcctgccgtggcgggacagcgtgggcaggctcatttctgcccccaacccgggccccaggacaggtcagcgcgccctgccccggtgcccaccgctgccccccatccgccctcctgccacttgcccctgacccccctgccgtgcctcccgcagccctcccatgccgttccactcctccctgcctctgagccgaacatgataataaaagctattattgagcgctt

SEQ ID NO: 6843 - DNA, 1980 bp, Homo sapiens
  source 1..1980: mol_type = unassigned DNA
actttgatttgcaaaatggaaaattccctgaatgcccacagaaaagtataatgtagcatttagcaggtcaacaaaatgcactcccttattctttgtctccgcctcattctccaacactttagtgcactaagttgtagtgactgaaatcattcttggtgaataatgctgggccacgctgaaaatttgtggctgagagctggaccctcgtcatcgccacgtactctgtcaatgagacagggtaacccatggttactgagctccgatcagttaaggggcagagagcctccgctccccactgctctataaaagagacccagcaaagggaccctaccagcttctagctctcagtctgcgcgagggtgtaggaaggaaagcccaggacctccggagcagagcacagcagctgcagaggcaaggccagcatgtcgcccaacttcaaacttcagtgtcacttcattctcatcttcctgacggctctaagaggggaaagccggtacctagagctgagggaagcggcggactacgatcctttcctgctcttcagcgccaacctgaagcgggagctggctggggagcagccgtaccgccgcgctctgcggtgcctggacatgctgagcctccagggccagttcaccttcaccgccgaccggccgcagctgcactgcgcagccttcttcatcagcgagcccgaggagttcattaccatccactacgaccaggtctccatcgactgtcagggcggcgacttcctgaaggtatttgatggttggattctcaagggggagaagttccccagttcccaggatcatcctctcccctcagctgagcggtacatagatttctgtgagagtggtcttagcaggaggagcatcagatcttcccagaatgtggccatgatcttcttccgagtccatgaaccaggaaatggattcacattaaccataaagacagaccccaacctctttccttgcaatgtcatttctcagactccaaatggaaagtttaccctggtagttccacaccagcatcgaaactgcagcttctccataatttatcctgtggtgatcaaaatatctgatcttaccctgggacacgtaaatggtcttcagttaaagaaatcctcagcaggttgcgagggaataggagactttgtggagctgctgggaggaactggattggacccttccaagatgacgcctttagctgatctctgctacccctttcatggcccggcccagatgaaagttggctgtgacaacactgtggtgcgcatggtctccagtggaaaacacgtaaatcgtgtgacttttgagtatcgtcagctggagccgtacgagctggaaaacccaaatggaaacagtatcggggaattctgtttgtctggtctttgaataaccaacccagtgatttacatgctgatagctaagtgagtttttaatggccattgtgtatgattttgatgcacaactagttaaaagcctttcataccagtcagtattcccagccttgagcgcacgcgcgcacacacacacacacatacacacacgcattaatttttgtactttgcttcttttatgtttgtaatctgtaaatgaacacatggcagaaaataacccctgattggtaggatcatagttctaaatggaaatgtttgtaattctttgatgtgctacaaacctgaaactggtaagacaagcacaaagcaacgtgcaatacaaaaatcgtatctcaagggaaaatactcaaagaaagaaaagtggcagcacttatattagttttataacaggataaagtcttgtgtatagcaaagtagttgcatctgtttattttctatttattattgttacaataggtaatagttatagcaattatttattgatttgtaacaacttgtttttaaccaaactttgtagcatggaaaaaattttccatccacaaatacaaacatgaataaatacattcagaatgttggcaccatga

SEQ ID NO: 6844 - DNA, 1618 bp, Homo sapiens
  source 1..1618: mol_type = unassigned DNA
ctttcagataccttctcgaaacaaaagattttcctacctgcttatacttggtaaccgagggaatttctaagacttcttgctcatttctgagtattgtctttatatcctgacactatgaatgctacttggatgcctcttaagggtctcttctgcagggtccccatgaattgtggctgaagttgtgcacaaacaagtatctccagtgacaggagtgccttctgaggcagccattgcatcttcatctgctgacactctgctaggctgacttctgtagttttcaccactgatcttcagtccacctcacagagctctataaaacgcttaaatcctctttacatcatagactttcagctacttgaagatagccatcagccgctacgtgactcttttctccaggcccttctccttctggggctgaaccccgtctctgcctccctccaggaccagcactgcgagagcctgtccctggccagcaacatctcaggactgcagtgcaacgcatccgtggacctcattggcacctgctggccccgcagccctgcggggcagctagtggttcggccctgccctgcctttttctatggtgtccgctacaataccacaaacaatggctaccgggagtgcctggccaatggcagctgggccgcccgcgtgaattactccgagtgccaggagatcctcaatgaggagaaaaaaagcaaggtgcactaccatgtcgcagtcatcatcaactacctgggccactgtatctccctggtggccctcctggtggcctttgtcctctttctgcggctcaggagcatccggtgcctgcgaaacatcatccactggaacctcatctccgccttcatcctgcgcaacgccacctggttcgtggtccagctaaccatgagccccgaggtccaccagagcaacgtgggctggtgcaggttggtgacagccgcctacaactacttccatgtgaccaacttcttctggatgttcggcgagggctgctacctgcacacagccatcgtgctcacctactccactgaccggctgcgcaaatggatgttcatctgcattggctggggtgtgcccttccccatcattgtggcctgggccattgggaagctgtactacgacaatgagaagtgctggtttggcaaaaggcctggggtgtacaccgactacatctaccagggccccatgatcctggtcctgctgatcaatttcatcttccttttcaacatcgtccgcatcctcatgaccaagctccgggcatccaccacgtctgagaccattcagtacaggaaggctgtgaaagccactctggtgctgctgcccctcctgggcatcacctacatgctgttcttcgtcaatcccggggaggatgaggtctcccgggtcgtcttcatctacttcaactccttcctggaatccttccagggcttctttgtgtctgtgttctactgtttcctcaatagtgaggtccgttctgccatccggaagaggtggcaccggtggcaggacaagcactcgatccgtgcccgagtggcccgtgccatgtccatccccacctccccaacccgtgtcagctttcacagcatcaagcagtccacagcagtctgagctggca

SEQ ID NO: 6845 - DNA, 2576 bp, Homo sapiens
  source 1..2576: mol_type = unassigned DNA
ggcgaggccggcaagaggcggccgcgggccgggctgcgtcgggaaacggcggccagacttccccgggaaggggcgagcgagagccgggccgggccgggccgggccgcggggccgggaagcgccgagccgggcatctcctcaccaggcagcgaccgaggagcccggccgcccaccccgtgccgcccgagcccgcagccgcccgccggtccctctgggatgtccgtaggacccgggcattcaggacggtagccgagcgagcccgaggatgggagggcacccgcagctccgtctcgtcaaggcccttctccttctggggctgaaccccgtctctgcctccctccaggaccagcactgcgagagcctgtccctggccagcaacatctcaggactgcagtgcaacgcatccgtggacctcattggcacctgctggccccgcagccctgcggggcagctagtggttcggccctgccctgcctttttctatggtgtccgctacaataccacaaacaatggctaccgggagtgcctggccaatggcagctgggccgcccgcgtgaattactccgagtgccaggagatcctcaatgaggagaaaaaaagcaaggtgcactaccatgtcgcagtcatcatcaactacctgggccactgtatctccctggtggccctcctggtggcctttgtcctctttctgcggctcaggagcatccggtgcctgcgaaacatcatccactggaacctcatctccgccttcatcctgcgcaacgccacctggttcgtggtccagctaaccatgagccccgaggtccaccagagcaacgtgggctggtgcaggttggtgacagccgcctacaactacttccatgtgaccaacttcttctggatgttcggcgagggctgctacctgcacacagccatcgtgctcacctactccactgaccggctgcgcaaatggatgttcatctgcattggctggggtgtgcccttccccatcattgtggcctgggccattgggaagctgtactacgacaatgagaagtgctggtttggcaaaaggcctggggtgtacaccgactacatctaccagggccccatgatcctggtcctgctgatcaatttcatcttccttttcaacatcgtccgcatcctcatgaccaagctccgggcatccaccacgtctgagaccattcagtacaggaaggctgtgaaagccactctggtgctgctgcccctcctgggcatcacctacatgctgttcttcgtcaatcccggggaggatgaggtctcccgggtcgtcttcatctacttcaactccttcctggaatccttccagggcttctttgtgtctgtgttctactgtttcctcaatagtgaggtccgttctgccatccggaagaggtggcaccggtggcaggacaagcactcgatccgtgcccgagtggcccgtgccatgtccatccccacctccccaacccgtgtcagctttcacagcatcaagcagtccacagcagtctgagctggcaggtcatggagcagcccccaaagagctgtggctggggggatgacggccaggctccctgaccaccctgcctgtggaggtgacctgttaggtctcatgcccactcccccaggagcagctggcactgacagcctgggggggccgctctccccctgcagccgtgcaggactctagctcatgagtggaaagtcacctacaggactgggccgggcccagggcctctggcttccctgcccaatcctccctggagaagggacatgggaatgaattgaaatggggcgctggacacctacagcagcacgcatgtccctccaaggctgtcttctcccagagcacaagaaggccagcccactgggccctggggctgccctcggcaaccgtggggaggccatttgctgccctggggcatcatgggcaactcgtgacagcctctgactcaccacgatgacgcctctggacctcggtgatgccttccgacaccactgggaaccaagggccctcactcaggaaccctggagacagaagtcaggtgtcatcatcagacttgcggccacagcactagagtcacccccccaggcctccagaaccttactggcactgtggcactgccaccagcaatgccctgccttgctgccttcaccctgaacatttagtaccctgcaggccaggccagcttcccctcacttaaccaccccataccagtcacctcctgctccttttcctcttttgtgagaagatgggggctggagggggcagagtggcctgtgagcaagagccaggggtgtcccagtcccagcctctggggcagagcttgtagccctggatggcctctggggcaggaccactagctaagcaagccaggagaagacccctgcccaagtggctcttgggacaacgtgctgcttacactccaggtgtggaccggccgcagcccccactgacctgcccatgtccagagggactggacagccagggcagggctttggggggcactagaagatgagggtgtcggctgtgaggcgggtggctggtataaataatatttatcttttcaaccagc

SEQ ID NO: 6846 - DNA, 1577 bp, Homo sapiens
  source 1..1577: mol_type = unassigned DNA
agattttcctacctgcttatacttggtaaccgagggaatttctaagacttcttgctcatttctgagtattgtctttatatcctgacactatgaatgctacttggatgcctcttaagggtctcttctgcagggtccccatgaattgtggctgaagttgtgcacaaacaagtatctccagtgacaggagtgccttctgaggcagccattgcatcttcatctgctgacactctgctaggctgacttctgtagttttcaccactgatcttcagtccacctcacagagctctataaaacgcttaaatcctctttacatcatagactttcagctacttgaagatagccatcagccgctacgtgactcttttctccaggaacgaggggtccctgagggaaaggactggggctccttcatctctatgatcctagtgcagtgtctgaaggcatcaggcccttctccttctggggctgaaccccgtctctgcctccctccaggaccagcactgcgagagcctgtccctggccagcaacatctcaggactgcagtgcaacgcatccgtggacctcattggcacctgctggccccgcagccctgcggggcagctagtggttcggccctgccctgcctttttctatggtgtccgctacaataccacaaaaaaaaagcaaggtgcactaccatgtcgcagtcatcatcaactacctgggccactgtatctccctggtggccctcctggtggcctttgtcctctttctgcggctcaggagcatccggtgcctgcgaaacatcatccactggaacctcatctccgccttcatcctgcgcaacgccacctggttcgtggtccagctaaccatgagccccgaggtccaccagagcaacgtgggctggtgcaggttggtgacagccgcctacaactacttccatgtgaccaacttcttctggatgttcggcgagggctgctacctgcacacagccatcgtgctcacctactccactgaccggctgcgcaaatggatgttcatctgcattggctggggtgtgcccttccccatcattgtggcctgggccattgggaagctgtactacgacaatgagaagtgctggtttggcaaaaggcctggggtgtacaccgactacatctaccagggccccatgatcctggtcctgctgatcaatttcatcttccttttcaacatcgtccgcatcctcatgaccaagctccgggcatccaccacgtctgagaccattcagtacagggcttctttgtgtctgtgttctactgtttcctcaatagtgaggtccgttctgccatccggaagaggtggcaccggtggcaggacaagcactcgatccgtgcccgagtggcccgtgccatgtccatccccacctccccaacccgtgtcagctttcacagcatcaagcagtccacagcagtctgagctggcaggtcatggagcagcccccaaagagctgtggctggggggatgacggccaggctccctgaccaccctgcctgtggaggtgacctgttaggtctcatgcccactcccccaggagcagctggcactgacagcct

SEQ ID NO: 6847 - DNA, 2534 bp, Homo sapiens
  source 1..2534: mol_type = unassigned DNA
ggcgaggccggcaagaggcggccgcgggccgggctgcgtcgggaaacggcggccagacttccccgggaaggggcgagcgagagccgggccgggccgggccgggccgcggggccgggaagcgccgagccgggcatctcctcaccaggcagcgaccgaggagcccggccgcccaccccgtgccgcccgagcccgcagccgcccgccggtccctctgggatgtccgtaggacccgggcattcaggacggtagccgagcgagcccgaggatgggagggcacccgcagctccgtctcgtcaaggcccttctccttctggggctgaaccccgtctctgcctccctccaggaccagcactgcgagagcctgtccctggccagcaacatctcaggactgcagtgcaacgcatccgtggacctcattggcacctgctggccccgcagccctgcggggcagctagtggttcggccctgccctgcctttttctatggtgtccgctacaataccacaaacaatggctaccgggagtgcctggccaatggcagctgggccgcccgcgtgaattactccgagtgccaggagatcctcaatgaggagaaaaaaagcaaggtgcactaccatgtcgcagtcatcatcaactacctgggccactgtatctccctggtggccctcctggtggcctttgtcctctttctgcggctcaggagcatccggtgcctgcgaaacatcatccactggaacctcatctccgccttcatcctgcgcaacgccacctggttcgtggtccagctaaccatgagccccgaggtccaccagagcaacgtgggctggtgcaggttggtgacagccgcctacaactacttccatgtgaccaacttcttctggatgttcggcgagggctgctacctgcacacagccatcgtgctcacctactccactgaccggctgcgcaaatggatgttcatctgcattggctggggtgtgcccttccccatcattgtggcctgggccattgggaagctgtactacgacaatgagaagtgctggtttggcaaaaggcctggggtgtacaccgactacatctaccagggccccatgatcctggtcctgctgatcaatttcatcttccttttcaacatcgtccgcatcctcatgaccaagctccgggcatccaccacgtctgagaccattcagtacaggaaggctgtgaaagccactctggtgctgctgcccctcctgggcatcacctacatgctgttcttcgtcaatcccggggaggatgaggtctcccgggtcgtcttcatctacttcaactccttcctggaatccttccaggtccgttctgccatccggaagaggtggcaccggtggcaggacaagcactcgatccgtgcccgagtggcccgtgccatgtccatccccacctccccaacccgtgtcagctttcacagcatcaagcagtccacagcagtctgagctggcaggtcatggagcagcccccaaagagctgtggctggggggatgacggccaggctccctgaccaccctgcctgtggaggtgacctgttaggtctcatgcccactcccccaggagcagctggcactgacagcctgggggggccgctctccccctgcagccgtgcaggactctagctcatgagtggaaagtcacctacaggactgggccgggcccagggcctctggcttccctgcccaatcctccctggagaagggacatgggaatgaattgaaatggggcgctggacacctacagcagcacgcatgtccctccaaggctgtcttctcccagagcacaagaaggccagcccactgggccctggggctgccctcggcaaccgtggggaggccatttgctgccctggggcatcatgggcaactcgtgacagcctctgactcaccacgatgacgcctctggacctcggtgatgccttccgacaccactgggaaccaagggccctcactcaggaaccctggagacagaagtcaggtgtcatcatcagacttgcggccacagcactagagtcacccccccaggcctccagaaccttactggcactgtggcactgccaccagcaatgccctgccttgctgccttcaccctgaacatttagtaccctgcaggccaggccagcttcccctcacttaaccaccccataccagtcacctcctgctccttttcctcttttgtgagaagatgggggctggagggggcagagtggcctgtgagcaagagccaggggtgtcccagtcccagcctctggggcagagcttgtagccctggatggcctctggggcaggaccactagctaagcaagccaggagaagacccctgcccaagtggctcttgggacaacgtgctgcttacactccaggtgtggaccggccgcagcccccactgacctgcccatgtccagagggactggacagccagggcagggctttggggggcactagaagatgagggtgtcggctgtgaggcgggtggctggtataaataatatttatcttttcaaccagc

SEQ ID NO: 6848 - DNA, 2456 bp, Homo sapiens
  source 1..2456: mol_type = unassigned DNA
ggcgaggccggcaagaggcggccgcgggccgggctgcgtcgggaaacggcggccagacttccccgggaaggggcgagcgagagccgggccgggccgggccgggccgcggggccgggaagcgccgagccgggcatctcctcaccaggcagcgaccgaggagcccggccgcccaccccgtgccgcccgagcccgcagccgcccgccggtccctctgggatgtccgtaggacccgggcattcaggacggtagccgagcgagcccgaggatgggagggcacccgcagctccgtctcgtcaaggcccttctccttctggggctgaaccccgtctctgcctccctccaggaccagcactgcgagagcctgtccctggccagcaacatctcagacaatggctaccgggagtgcctggccaatggcagctgggccgcccgcgtgaattactccgagtgccaggagatcctcaatgaggagaaaaaaagcaaggtgcactaccatgtcgcagtcatcatcaactacctgggccactgtatctccctggtggccctcctggtggcctttgtcctctttctgcggctcaggagcatccggtgcctgcgaaacatcatccactggaacctcatctccgccttcatcctgcgcaacgccacctggttcgtggtccagctaaccatgagccccgaggtccaccagagcaacgtgggctggtgcaggttggtgacagccgcctacaactacttccatgtgaccaacttcttctggatgttcggcgagggctgctacctgcacacagccatcgtgctcacctactccactgaccggctgcgcaaatggatgttcatctgcattggctggggtgtgcccttccccatcattgtggcctgggccattgggaagctgtactacgacaatgagaagtgctggtttggcaaaaggcctggggtgtacaccgactacatctaccagggccccatgatcctggtcctgctgatcaatttcatcttccttttcaacatcgtccgcatcctcatgaccaagctccgggcatccaccacgtctgagaccattcagtacaggaaggctgtgaaagccactctggtgctgctgcccctcctgggcatcacctacatgctgttcttcgtcaatcccggggaggatgaggtctcccgggtcgtcttcatctacttcaactccttcctggaatccttccagggcttctttgtgtctgtgttctactgtttcctcaatagtgaggtccgttctgccatccggaagaggtggcaccggtggcaggacaagcactcgatccgtgcccgagtggcccgtgccatgtccatccccacctccccaacccgtgtcagctttcacagcatcaagcagtccacagcagtctgagctggcaggtcatggagcagcccccaaagagctgtggctggggggatgacggccaggctccctgaccaccctgcctgtggaggtgacctgttaggtctcatgcccactcccccaggagcagctggcactgacagcctgggggggccgctctccccctgcagccgtgcaggactctagctcatgagtggaaagtcacctacaggactgggccgggcccagggcctctggcttccctgcccaatcctccctggagaagggacatgggaatgaattgaaatggggcgctggacacctacagcagcacgcatgtccctccaaggctgtcttctcccagagcacaagaaggccagcccactgggccctggggctgccctcggcaaccgtggggaggccatttgctgccctggggcatcatgggcaactcgtgacagcctctgactcaccacgatgacgcctctggacctcggtgatgccttccgacaccactgggaaccaagggccctcactcaggaaccctggagacagaagtcaggtgtcatcatcagacttgcggccacagcactagagtcacccccccaggcctccagaaccttactggcactgtggcactgccaccagcaatgccctgccttgctgccttcaccctgaacatttagtaccctgcaggccaggccagcttcccctcacttaaccaccccataccagtcacctcctgctccttttcctcttttgtgagaagatgggggctggagggggcagagtggcctgtgagcaagagccaggggtgtcccagtcccagcctctggggcagagcttgtagccctggatggcctctggggcaggaccactagctaagcaagccaggagaagacccctgcccaagtggctcttgggacaacgtgctgcttacactccaggtgtggaccggccgcagcccccactgacctgcccatgtccagagggactggacagccagggcagggctttggggggcactagaagatgagggtgtcggctgtgaggcgggtggctggtataaataatatttatcttttcaaccagc

SEQ ID NO: 6849 - DNA, 2663 bp, Homo sapiens
  source 1..2663: mol_type = unassigned DNA
ggcgaggccggcaagaggcggccgcgggccgggctgcgtcgggaaacggcggccagacttccccgggaaggggcgagcgagagccgggccgggccgggccgggccgcggggccgggaagcgccgagccgggcatctcctcaccaggcagcgaccgaggagcccggccgcccaccccgtgccgcccgagcccgcagccgcccgccggtccctctgggatgtccgtaggacccgggcattcaggacggtagccgagcgagcccgaggatgggagggcacccgcagctccgtctcgtcaaggcccttctccttctggggctgaaccccgtctctgcctccctccaggaccagcactgcgagagcctgtccctggccagcaacatctcaggactgcagtgcaacgcatccgtggacctcattggcacctgctggccccgcagccctgcggggcagctagtggttcggccctgccctgcctttttctatggtgtccgctacaataccacaaacaatggctaccgggagtgcctggccaatggcagctgggccgcccgcgtgaattactccgagtgccaggagatcctcaatgaggagaaaaaaagcaaggtgcactaccatgtcgcagtcatcatcaactacctgggccactgtatctccctggtggccctcctggtggcctttgtcctctttctgcggctcaggccaggctgcacccattggggtgaccaggcagatggagccctggaggtgggggctccatggagtggtgccccatttcaggttcgaaggagcatccggtgcctgcgaaacatcatccactggaacctcatctccgccttcatcctgcgcaacgccacctggttcgtggtccagctaaccatgagccccgaggtccaccagagcaacgtgggctggtgcaggttggtgacagccgcctacaactacttccatgtgaccaacttcttctggatgttcggcgagggctgctacctgcacacagccatcgtgctcacctactccactgaccggctgcgcaaatggatgttcatctgcattggctggggtgtgcccttccccatcattgtggcctgggccattgggaagctgtactacgacaatgagaagtgctggtttggcaaaaggcctggggtgtacaccgactacatctaccagggccccatgatcctggtcctgctgatcaatttcatcttccttttcaacatcgtccgcatcctcatgaccaagctccgggcatccaccacgtctgagaccattcagtacaggaaggctgtgaaagccactctggtgctgctgcccctcctgggcatcacctacatgctgttcttcgtcaatcccggggaggatgaggtctcccgggtcgtcttcatctacttcaactccttcctggaatccttccagggcttctttgtgtctgtgttctactgtttcctcaatagtgaggtccgttctgccatccggaagaggtggcaccggtggcaggacaagcactcgatccgtgcccgagtggcccgtgccatgtccatccccacctccccaacccgtgtcagctttcacagcatcaagcagtccacagcagtctgagctggcaggtcatggagcagcccccaaagagctgtggctggggggatgacggccaggctccctgaccaccctgcctgtggaggtgacctgttaggtctcatgcccactcccccaggagcagctggcactgacagcctgggggggccgctctccccctgcagccgtgcaggactctagctcatgagtggaaagtcacctacaggactgggccgggcccagggcctctggcttccctgcccaatcctccctggagaagggacatgggaatgaattgaaatggggcgctggacacctacagcagcacgcatgtccctccaaggctgtcttctcccagagcacaagaaggccagcccactgggccctggggctgccctcggcaaccgtggggaggccatttgctgccctggggcatcatgggcaactcgtgacagcctctgactcaccacgatgacgcctctggacctcggtgatgccttccgacaccactgggaaccaagggccctcactcaggaaccctggagacagaagtcaggtgtcatcatcagacttgcggccacagcactagagtcacccccccaggcctccagaaccttactggcactgtggcactgccaccagcaatgccctgccttgctgccttcaccctgaacatttagtaccctgcaggccaggccagcttcccctcacttaaccaccccataccagtcacctcctgctccttttcctcttttgtgagaagatgggggctggagggggcagagtggcctgtgagcaagagccaggggtgtcccagtcccagcctctggggcagagcttgtagccctggatggcctctggggcaggaccactagctaagcaagccaggagaagacccctgcccaagtggctcttgggacaacgtgctgcttacactccaggtgtggaccggccgcagcccccactgacctgcccatgtccagagggactggacagccagggcagggctttggggggcactagaagatgagggtgtcggctgtgaggcgggtggctggtataaataatatttatcttttcaaccagc

SEQ ID NO: 6850 - DNA, 231 bp, Homo sapiens
  source 1..231: mol_type = unassigned DNA
gtgtacaccgactacatctacttcaactccttcctggaatccttccagggcttctttgtgtctgtgttctactgtttcctcaatagtgaggtccgttctgccatccggaagaggtggcaccggtggcaggacaagcactcgatccgtgcccgagtggcccgtgccatgtccatccccacctccccaacccgtgtcagctttcacagcatcaagcagtccacagcagtctga

SEQ ID NO: 6851 - DNA, 1206 bp, Homo sapiens
  source 1..1206: mol_type = unassigned DNA
atgggagggcacccgcagctccgtctcgtcaaggcccttctccttctggggctgaaccccgtctctgcctccctccaggaccagcactgcgagagcctgtccctggccagcaacatctcaggactgcagtgcaacgcatccgtggacctcattggcacctgctggccccgcagccctgcggggcagctagtggttcggccctgccctgcctttttctatggtgtccgctacaataccacaaacaatggctaccgggagtgcctggccaatggcagctgggccgcccgcgtgaattactccgagtgccaggagatcctcaatgaggagaaaaaaagcaaggtgcactaccatgtcgcagtcatcatcaactacctgggccactgtatctccctggtggccctcctggtggcctttgtcctctttctgcggctcaggagcatccggtgcctgcgaaacatcatccactggaacctcatctccgccttcatcctgcgcaacgccacctggttcgtggtccagctaaccatgagccccgaggtccaccagagcaacgtgggctggtgcaggttggtgacagccgcctacaactacttccatgtgaccaacttcttctggatgttcggcgagggctgctacctgcacacagccatcgtgctcacctactccactgaccggctgcgcaaatggatgttcatctgcattggctggggtgtgcccttccccatcattgtggcctgggccattgggaagctgtactacgacaatgagaagtgctggtttggcaaaaggcctggggtgtacaccgactacatctaccagggccccatgatcctggtcctgctgatcaatttcatcttccttttcaacatcgtccgcatcctcatgaccaagctccgggcatccaccacgtctgagaccattcagtacaggaaggctgtgaaagccactctggtgctgctgcccctcctgggcatcacctacatgctgttcttcgtcaatcccggggaggatgaggtctcccgggtcgtcttcatctacttcaactccttcctggaatccttccaggtccgttctgccatccggaagaggtggcaccggtggcaggacaagcactcgatccgtgcccgagtggcccgtgccatgtccatccccacctccccaacccgtgtcagctttcacagcatcaagcagtccacagcagtctga

SEQ ID NO: 6852 - DNA, 1407 bp, Homo sapiens
  source 1..1407: mol_type = unassigned DNA
atgggaagagagccttggcctgaagacagggacctgggctttcctcagctcttctgccaaggtccctactcctactgcaacacgaccttggaccagatcggaacgtgctggccccgcagcgctgccggagccctcgtggagaggccgtgccccgagtacttcaacggcgtcaagtacaacacgacccggaatgcctatcgagaatgcttggagaatgggacgtgggcctcaaagatcaactactcacagtgtgagcccattttggatgacaagcagaggaagtatgacctgcactaccgcatcgcccttgtcgtcaactacctgggccactgcgtatctgtggcagccctggtggccgccttcctgcttttcctggccctgcggagcattcgctgtctgcggaatgtgattcactggaacctcatcaccacctttatcctgcgaaatgtcatgtggttcctgctgcagctcgttgaccatgaagtgcacgagagcaatgaggtctggtgccgctgcatcaccaccatcttcaactacttcgtggtgaccaacttcttctggatgtttgtggaaggctgctacctgcacacggccattgtcatgacctactccactgagcgcctgcgcaagtgcctcttcctcttcatcggatggtgcatccccttccccatcatcgtcgcctgggccatcggcaagctctactatgagaatgaacagtgctggtttggcaaggagcctggcgacctggtggactacatctaccaaggccccatcattctcgtgctcctgatcaatttcgtatttctgttcaacatcgtcaggatcctaatgacaaagttacgcgcgtccaccacatccgagacaatccagtacaggaaggcagtgaaggccaccctggtgctcctgcccctcctgggcatcacctacatgctcttcttcgtcaatcccggggaggacgacctgtcacagatcatgttcatctatttcaactccttcctgcagtcgttccagggtttcttcgtgtctgtcttctactgcttcttcaatggagaggtgcgctcagccgtgaggaagaggtggcaccgctggcaggaccatcactcccttcgagtccccatggcccgggccatgtccatccctacatcacccacacggatcagcttccacagcatcaagcagacggccgctgtgtgacccctcggtcgcccacctgcacagctcccctgtcctcctccaccttcttcctctgggttctctgtgctgggcaggctctcgtggggcaggagatgggaggggagagaccagctctccagcctggcaggaaagagggggtgcggcagccaagggggactgcaagggacagggatgagtgggggccaccaggctcagcgcaagaggaagcagagg

SEQ ID NO: 6853 - DNA, 1600 bp, Homo sapiens
  source 1..1600: mol_type = unassigned DNA
ggggctggccagggtgtgaccaccgtgctgggcagcaggctccagtccctaacccccagccactactggcatgaggggtccctcagggcccccaggcctcctctacgtcccacacctcctcctctgcctgctctgcctcctcccaccgccgctccaatacgcagccgggcagagccagatgcccaaagaccagcccctgtgggcacttctggagcagtactgccacaccatcatgaccctcaccaacctctcaggtccctactcctactgcaacacgaccttggaccagatcggaacgtgctggccccgcagcgctgccggagccctcgtggagaggccgtgccccgagtacttcaacggcgtcaagtacaacacgacccggaatgcctatcgagaatgcttggagaatgggacgtgggcctcaaagatcaactactcacagtgtgagcccattttggatgacaagcagaggaagtatgacctgcactaccgcatcgcccttgtcgtcaactacctgggccactgcgtatctgtggcagccctggtggccgccttcctgcttttcctggccctgcggagcattcgctgtctgcggaatgtgattcactggaacctcatcaccacctttatcctgcgaaatgtcatgtggttcctgctgcagctcgttgaccatgaagtgcacgagagcaatgaggtctggtgccgctgcatcaccaccatcttcaactacttcgtggtgaccaacttcttctggatgtttgtggaaggctgctacctgcacacggccattgtcatgacctactccactgagcgcctgcgcaagtgcctcttcctcttcatcggatggtgcatccccttccccatcatcgtcgcctgggccatcggcaagctctactatgagaatgaacagtgctggtttggcaaggagcctggcgacctggtggactacatctaccaaggccccatcattctcgtgctcctgatcaatttcgtatttctgttcaacatcgtcaggatcctaatgacaaagttacgcgcgtccaccacatccgagacaatccagtacaggaaggcagtgaaggccaccctggtgctcctgcccctcctgggcatcacctacatgctcttcttcgtcaatcccggggaggacgacctgtcacagatcatgttcatctatttcaactccttcctgcagtcgttccagggtttcttcgtgtctgtcttctactgcttcttcaatggagaggtgcgctcagccgtgaggaagaggtggcaccgctggcaggaccatcactcccttcgagtccccatggcccgggccatgtccatccctacatcacccacacggatcagcttccacagcatcaagcagacggccgctgtgtgacccctcggtcgcccacctgcacagctcccctgtcctcctccaccttcttcctctgggttctctgtgctgggcaggctctcgtggggcaggagatgggaggggagagaccagctctccagcctggcaggaaagagggggtgcggcagccaagggggactgcaagggacagggatgagtgggggccaccaggctcagcgcaagaggaagcagagg

SEQ ID NO: 6854 - DNA, 2530 bp, Homo sapiens
  source 1..2530: mol_type = unassigned DNA
agcattccgtcaccccaggcccacgctctccagcccaccgccctcctctggacgccgcgagtggaagagagctgcgaactgagaagccgtactttgggcagggtggagggcccgggggctggagactgagcccctccgagaggagccgcccggccccgccccccggcgcagccattggccgcggcggagcggctgtacccgcagctccgtgcactcggcggctcctctccgggaaggtccccacttgacagctctgggcgaccggaggtggcgcccaaaggctgcccgggagatcggggctgggctggcgggggccaggaccccgcgccctctcggccgctcactctcgcgtccactccctcgcagtcacgccgggcgcgcactcccactccctctccgcacgcggctgcgggacgcgatggacgcggcactgctccacagcctgctggaggccaactgcagcctggcgctggctgaagagctgctcttggacggctgggggccacccctggaccccgagggtccctactcctactgcaacacgaccttggaccagatcggaacgtgctggccccgcagcgctgccggagccctcgtggagaggccgtgccccgagtacttcaacggcgtcaagtacaacacgacccggaatgcctatcgagaatgcttggagaatgggacgtgggcctcaaagatcaactactcacagtgtgagcccattttggatgacaagcagaggaagtatgacctgcactaccgcatcgcccttgtcgtcaactacctgggccactgcgtatctgtggcagccctggtggccgccttcctgcttttcctggccctgcggagcattcgctgtctgcggaatgtgattcactggaacctcatcaccacctttatcctgcgaaatgtcatgtggttcctgctgcagctcgttgaccatgaagtgcacgagagcaatgaggtctggtgccgctgcatcaccaccatcttcaactacttcgtggtgaccaacttcttctggatgtttgtggaaggctgctacctgcacacggccattgtcatgacctactccactgagcgcctgcgcaagtgcctcttcctcttcatcggatggtgcatccccttccccatcatcgtcgcctgggccatcggcaagctctactatgagaatgaacagtgctggtttggcaaggagcctggcgacctggtggactacatctaccaaggccccatcattctcgtgctcctgatcaatttcgtatttctgttcaacatcgtcaggatcctaatgacaaagttacgcgcgtccaccacatccgagacaatccagtacaggaaggcagtgaaggccaccctggtgctcctgcccctcctgggcatcacctacatgctcttcttcgtcaatcccggggaggacgacctgtcacagatcatgttcatctatttcaactccttcctgcagtcgttccagggtttcttcgtgtctgtcttctactgcttcttcaatggagaggtgcgctcagccgtgaggaagaggtggcaccgctggcaggaccatcactcccttcgagtccccatggcccgggccatgtccatccctacatcacccacacggatcagcttccacagcatcaagcagacggccgctgtgtgacccctcggtcgcccacctgcacagctcccctgtcctcctccaccttcttcctctgggttctctgtgctgggcaggctctcgtggggcaggagatgggaggggagagaccagctctccagcctggcaggaaagagggggtgcggcagccaagggggactgcaagggacagggatgagtgggggccaccaggctcagcgcaagaggaagcagagggaattcacaggaccccctgagaagagccagtcagatgtctgcaggcatttgcccatcccagcctctctggccagggccttactgggcccagagcagagaaggacctgtccaacacacacagctatttatagtagcagacacagggctcccctgccctactcatggagccagcagccaggcaatggtgtggccctgcactggcccttggcctccacactcagtggtgcccctgcagttgggtggggtacgccagcaaaggatcagtttggctgccttatcccaggggctgtcacctagagaggctcacttgtaccccacccttgttcctgtgtcccctccccagccatcctcccgccttgggggctccatgaaggatgcaggcttccaggcctggcttcctctcttgggagaccccttctctgcctagtccacagattaggcaatcaaggaagacgccatcagggaagccacatccttagtcaaccagttgcatcgtgcggggcaaaatgaggagcagaggcatggaggagggaggcgtgggatgggaatagcagaaaccaaccatgtcttcagtgattgaaactcataccccattgccctttgccctccagtctccccttcagaaacatctctgctctctgtgaaataaaccatgcctcttgg

SEQ ID NO: 6855 - DNA, 1420 bp, Homo sapiens
  source 1..1420: mol_type = unassigned DNA
atggacgcggcactgctccacagcctgctggaggccaactgcagcctggcgctggctgaagagctgctcttggacggctgggggccacccctggaccccgagggtccctactcctactgcaacacgaccttggaccagatcggaacgtgctggccccgcagcgctgccggagccctcgtggagaggccgtgccccgagtacttcaacggcgtcaagtacaacacgacccggaatgcctatcgagaatgcttggagaatgggacgtgggcctcaaagatcaactactcacagtgtgagcccattttggatgacaagcagaggaagtatgacctgcactaccgcatcgcccttgtcgtcaactacctgggccactgcgtatctgtggcagccctggtggccgccttcctgcttttcctggccctgcggagcattcgctgtctgcggaatgtgattcactggaacctcatcaccacctttatcctgcgaaatgtcatgtggttcctgctgcagctcgttgaccatgaagtgcacgagagcaatgaggtctggtgccgctgcatcaccaccatcttcaactacttcgtggtgaccaacttcttctggatgtttgtggaaggctgctacctgcacacggccattgtcatgacctactccactgagcgcctgcgcaagtgcctcttcctcttcatcggatggtgcatccccttccccatcatcgtcgcctgggccatcggcaagctctactatgagaatgaacagtgctggtttggcaaggagcctggcgacctggtggactacatctaccaaggccccatcattctcgtgctcctgatcaatttcgtatttctgttcaacatcgtcaggatcctaatgacaaagttacgcgcgtccaccacatccgagacaatccagtacaggaaggcagtgaaggccaccctggtgctcctgcccctcctgggcatcacctacatgctcttcttcgtcaatcccggggaggacgacctgtcacagatcatgttcatctatttcaactccttcctgcagtcgttccagggtttcttcgtgtctgtcttctactgcttcttcaatggagaggggctggagccagtttagaaggtcaactatgcagccccgaaataacatgccagcaccccacatgtgcactcagagctgggtgagcaaggaagcccaggccgcagggcctcatggaagagagaagccagagcagaggtggtgacagaaggaagcttccagaaagagatgtgtgccaagcaatcaggtgcgctcagccgtgaggaagaggtggcaccgctggcaggaccatcactcccttcgagtccccatggcccgggccatgtccatccctacatcacccacacggatcagcttccacagcatcaagcagacggccgctgtgtga

SEQ ID NO: 6856 - DNA, 931 bp, Homo sapiens
  source 1..931: mol_type = unassigned DNA
gcgttccaaaataagagcaaattcgctctaaacacaggaaaagacctgaagctttaattaaggggttacatccaaccccagagcgcttttgtgggcactgattgctccagcttctgcgtcactgcgcgagggaagagggaagaggatccaggcgttagacatgtatagacacaaaaacagctggagattgggcttaaaatacccaccaagctccaaagaagagacccaagtccccaaaacattgatttcagggctgccaggaaggaagagcagcagcagggtgggagagaagctccagtcagcccacaagatgccattgtcccccggcctcctgctgctgctgctctccggggccacggccaccgctgccctgcccctggagggtggccccaccggccgagacagcgagcatatgcaggaagcggcaggaataaggaaaagcagcctcctgactttcctcgcttggtggtttgagtggacctcccaggccagtgccgggcccctcataggagaggaagcccgggaggtggccaggcggcaggaaggcgcacccccccagcaatctgcgcgccgggacagaatgccctgcaggaacttcttctggaagaccttctcctcctgcaaataaaacctcacccatgaatgctcacgcaagtgtaatgacagacctgaataaaatgtattaagcagcagtgatctttcctctcctccttcccaagtcatttgaaaagtgtttgttatttaaattccaataatgcccaatactgacgtgtcttgagtaatttggaacccaaagtgaagatctttgataaagatttttttgtggttcgactggactgtgctgagtgcgggcactgggcttttcttctgatgttcattatggtgctgggaagctctgtctttgatttaaaataaaatagctaaaggctac

SEQ ID NO: 6857 - DNA, 1130 bp, Homo sapiens
  source 1..1130: mol_type = unassigned DNA
atagtagaagaatgtctctgaaattactggatgagtttcagtcatactttcacatgggcacaatttcacattcaagctccttatcctaggctaattttatattatgttaaatcacttgtttttgttctcacggcttcctgcctgctataggcataattacgaggaagcagaacttctccagaagcaagcgcacatgcgttccaaaataagagcaaattcgctctaaacacaggaaaagacctgaagctttaattaaggggttacatccaaccccagagcgcttttgtgggcactgattgctccagcttctgcgtcactgcgcgagggaagagggaagaggatccaggcgttagacatgtatagacacaaaaacagctggagattgggcttaaaatacccaccaagctccaaagaagagacccaagtccccaaaacattgatttcagggctgccaggaaggaagagcagcagcagggtgggagagaagctccagtcagcccacaagatgccattgtcccccggcctcctgctgctgctgctctccggggccacggccaccgctgccctgcccctggagggtggccccaccggccgagacagcgagcatatgcaggaagcggcaggaataaggaaaagcagcctcctgactttcctcgcttggtggtttgagtggacctcccaggccagtgccgggcccctcataggagaggaagcccgggaggtggccaggcggcaggaaggcgcacccccccagcaatctgcgcgccgggacagaatgccctgcaggaacttcttctggaagaccttctcctcctgcaaataaaacctcacccatgaatgctcacgcaagtgtaatgacagacctgaataaaatgtattaagcagcagtgatctttcctctcctccttcccaagtcatttgaaaagtgtttgttatttaaattccaataatgcccaatactgacgtgtcttgagtaatttggaacccaaagtgaagatctttgataaagatttttttgtggttcgactggactgtgctgagtgcgggcactgggcttttcttctgatgttcattatggtgctgggaagctctgtctttgatttaaaataaaatagctaaaggctacacaa

SEQ ID NO: 6858 - DNA, 2873 bp, Homo sapiens
  source 1..2873: mol_type = unassigned DNA
ggaagatggcggcgcccagcgtcccgtgaggagagaggacacagggatcccggggagcggccccagactcgtaaattatggccgcatctccgcacactctctcctcacgcctcctgacaggttgcgtaggaggctctgtctggtatcttgaaagaagaactatacaggactcccctcacaagttcttacatcttctcaggaatgtcaataagcagtggattacatttcagcactttagcttcctcaaacgcatgtatgtcacacagctgaacagaagccacaaccagcaagtaagacccaagccagaaccagtagcatctcctttccttgaaaaaacatcttcaggtcaagccaaagcagaaatatatgagatgagacctctctcaccgcccagcctatctttgtccagaaagccaaatgaaaaggaattgatagaactagagccagactcagtaattgaagactcaatagatgtagggaaagagacaaaagaggaaaagcggtggaaagagatgaagctgcaagtgtatgatttgccaggaattttggctcgactatccaaaatcaaactcacagctctggttgtaagtaccactgcagctggatttgcattggctccgggcccttttgactggccctgtttcctgcttacttctgttgggacaggccttgcatcctgtgctgccaactccatcaatcagttttttgaggtgccatttgactcaaacatgaataggacaaagaacagaccgctggttcgtggacagatcagcccattgctagctgtgtcctttgccacttgttgtgctgttccgggagttgccattctgaccttgggggtgaatccactcacaggagccctggggctcttcaacattttcctgtatacctgctgctacacaccactgaaaaggatcagcattgccaacacatgggtcggagctgtggttggggccatcccgcctgtcatgggctggacagcggccacgggcagcctcgatgctggcgcatttctcctgggaggaatcctctactcctggcagtttcctcatttcaacgccctgagctggggcctccgtgaagactactcccggggcggctactgcatgatgtcggtcacccacccgggcctgtgccggcgcgtggcgctgcgccactgcctggccctgctcgtgctgtccgcagcagcccctgtgctggacatcaccacatggaccttccccatcatggcccttcccatcaatgcgtacatctcctacctcggcttccgcttctacgtggacgcagaccgcaggagctcgcggagactgttcttctgcagcctgtggcacctgccgctgctgctgctgctcatgctcacctgcaagcggccgagcggaggcggggacgcagggccccctcccagctgagagcactgggacgcccaccgcccctttccctccgctgccaggcgagcatgttgtggtaattctggaacacaagaagagaaattgctgggtttagaacaagattataaacgaattcggtgctcagtgatcacttgacagttttttttttttttaaatattacccaaaatgctccccaaataagaaatgcatcagctcagtcagtgaatacaaaaaaggaattatttttccctttgagggtctttatacatctctcctccaaccccaccctctattctgtttcttcctcctcacatgggggtacacatacacagcttcctcttttggttccatccttaccaccacaccacacgcacactccacatgcccagcagagtggcacttggtggccagaaagtgtgagcctcatgatctgctgtctgtagttctgtgagctcaggtccctcaaaggcctcggagcacccccttcctggtgactgagccagggcctgcatttttggttttccccaccccacacattctcaaccatagtccttctaacaataccaatagctaggacccggctgctgtgcactgggactggggattccacatgtttgccttgggagtctcaagctggactgccagcccctgtcctcccttcacccccattgcgtatgagcatttcagaactccaaggagtcacaggcatctttatagttcacgttaacatatagacactgttggaagcagttccttctaaaagggtagccctggacttaataccagccggatacctctggcccccaccccattactgtacctctggagtcactactgtgggtcgccactcctctgctacacagcacggctttttcaaggctgtattgagaagggaagttaggaagaagggtgtgctgggctaaccagcccacagagctcacattcctgtcccttgggtgaaaaatacatgtccatcctgatatctcctgaattcagaaattagcctccacatgtgcaatggctttaagagccagaagcagggttctgggaattttgcaagttatcctgtggccaggtgtggtctcggttaccaaatacggttacctgcagctttttagtcctttgtgctcccacgggtctgcagagtcccatctgcccaaaggtcttgaagcttgacaggatgttttcattactcagtctcccagggcactgctggtccgtagggattcattggtcggggtgggagagttaaacaacatttaaacagagttctctcaaaaatgtctaaagggattgtaggtagataacatccaatcactgtttgcacttatctgaaatcttccctcttggctgcccccaggtatttactgtggagaacattgcataggaatgtctggaaaaagcctctacaacttgttacagccttcacatttgtacaattcattgattctcttttccttccacaataaaatggtatacaagaa

SEQ ID NO: 6859 - DNA, 646 bp, Homo sapiens
  source 1..646: mol_type = unassigned DNA
caggaatgtcaataagcagtggattacatttcagcactttagcttcctcaaacgcatgtatgtcacacagctgaacagaagccacaaccagcaagtaagacccaagccagaaccagtagcatctcctttccttgaaaaaacatcttcaggtcaagccaaagcagaaatatatgagatgagacctctctcaccgcccagcctatctttgtccagaaagccaaatgaaaaggaattgatagaactagagccagactcagtaattgaagactcaatagatgtagggaaagagacaaaagaggaaaagcggtggaaagagatgaagctgcaagtgtatgatttgccaggaattttggctcgactatccaaaatcaaactcacaggtactttgtttttctgatatacttacttatttgaaactctatctttagtgaaacaaaaagctaattttatttaccacctgaaaagaataatttggaactgcaggtcctgtcttagtatttttcctctcttcaatttaactgggatttgaaattaaattttctgaattctatttacacagaattgtaaatagtattgcattgtaagtattgtattaaaaatagtcaccctttcctttgcaattaaagttgaatgtttatcctgctta

SEQ ID NO: 6860 - DNA, 1509 bp, Homo sapiens
  source 1..1509: mol_type = unassigned DNA
ttatggccgcatctccgcacactctctcctcacgcctcctgacaggttgcgtaggaggctctgtctggtatcttgaaagaagaactatacaggactcccctcacaagttcttacatcttctcaggaatgtcaataagcagtggattacatttcagcactttagcttcctcaaacgcatgtatgtcacacagctgaacagaagccacaaccagcaagtaagacccaagccagaaccagtagcatctcctttccttgaaaaaacatcttcaggtcaagccaaagcagaaatatatgagatgagacctctctcaccgcccagcctatctttgtccagaaagccaaatgaaaaggaattgatagaactagagccagactcagtaattgaagactcaatagatgtagggaaagagacaaaagaggaaaagcggtggaaagagatgaagctgcaagtgtatgatttgccaggaattttggctcgactatccaaaatcaaactcacagttttttgaggtgccatttgactcaaacatgaataggacaaagaacagaccgctggttcgtggacagatcagcccattgctagctgtgtcctttgccacttgttgtgctgttccgggagttgccattctgaccttgggggtgaatccactcacaggagccctggggctcttcaacattttcctgtatacctgctgctacacaccactgaaaaggatcagcattgccaacacatgggtcggagctgtggttggggccatcccgcctgtcatgggctggacagcggccacgggcagcctcgatgctggcgcatttctcctgggaggaatcctctactcctggcagtttcctcatttcaacgccctgagctggggcctccgtgaagactactcccggggcggctactgcatgatgtcggtcacccacccgggcctgtgccggcgcgtggcgctgcgccactgcctggccctgctcgtgctgtccgcagcagcccctgtgctggacatcaccacatggaccttccccatcatggcccttcccatcaatgcgtacatctcctacctcggcttccgcttctacgtggacgcagaccgcaggagctcgcggagactgttcttctgcagcctgtggcacctgccgctgctgctgctgctcatgctcacctgcaagcggccgagcggaggcggggacgcagggccccctcccagctgagagcactgggacgcccaccgcccctttccctccgctgccaggcgagcatgttgtggtaattctggaacacaagaagagaaattgctgggtttagaacaagattataaacgaattcggtgctcagtgatcacttgacagttttttttttttttaaatattacccaaaatgctccccaaataagaaatgcatcagctcagtcagtgaatacaaaaaaggaattatttttccctttgagggtctttatacatctctcctccaaccccaccctctattctgtttcttcctcctcacatgggggt

SEQ ID NO: 6861 - DNA, 1384 bp, Homo sapiens
  source 1..1384: mol_type = unassigned DNA
ttatggccgcatctccgcacactctctcctcacgcctcctgacaggttgcgtaggaggctctgtctggtatcttgaaagaagaactatacaggactcccctcacaagttcttacatcttctcaggaatgtcaataagcagtggattacatttcagcactttagcttcctcaaacgcatgctctggttgtaagtaccactgcagctggatttgcattggctccgggcccttttgactggccctgtttcctgcttacttctgttgggacaggccttgcatcctgtgctgccaactccatcaatcagttttttgaggtgccatttgactcaaacatgaataggacaaagaacagaccgctggttcgtggacagatcagcccattgctagctgtgtcctttgccacttgttgtgctgttccgggagttgccattctgaccttgggggtgaatccactcacaggagccctggggctcttcaacattttcctgtatacctgctgctacacaccactgaaaaggatcagcattgccaacacatgggtcggagctgtggttggggccatcccgcctgtcatgggctggacagcggccacgggcagcctcgatgctggcgcatttctcctgggaggaatcctctactcctggcagtttcctcatttcaacgccctgagctggggcctccgtgaagactactcccggggcggctactgcatgatgtcggtcacccacccgggcctgtgccggcgcgtggcgctgcgccactgcctggccctgctcgtgctgtccgcagcagcccctgtgctggacatcaccacatggaccttccccatcatggcccttcccatcaatgcgtacatctcctacctcggcttccgcttctacgtggacgcagaccgcaggagctcgcggagactgttcttctgcagcctgtggcacctgccgctgctgctgctgctcatgctcacctgcaagcggccgagcggaggcggggacgcagggccccctcccagctgagagcactgggacgcccaccgcccctttccctccgctgccaggcgagcatgttgtggtaattctggaacacaagaagagaaattgctgggtttagaacaagattataaacgaattcggtgctcagtgatcacttgacagttttttttttttttaaatattacccaaaatgctccccaaataagaaatgcatcagctcagtcagtgaatacaaaaaaggaattatttttccctttgagggtctttatacatctctcctccaaccccaccctctattctgtttcttcctcctcacatgggggtacacatacacagcttcctcttttggttccatccttaccaccacaccacacgcacactccacatgcccagcag

SEQ ID NO: 6862 - DNA, 2414 bp, Homo sapiens
  source 1..2414: mol_type = unassigned DNA
ctcgcgagatttgacctctcgtccctgagaggcgggtgggtgttagttcagagggttatgggagggctctggcgtcctggatggaggtgcgttcctttctgtggctggcgctggatccaccctgggtctccaaccagggctgcagagagggtagagccgtttcttaggccagagtggagtgggacaggaggtgccgagagaggactgaggtggcttgggacatggaagcgctgcagccttcgagcccggcatccagcattgcagccgccgcggcggcctaagagctcgaaccctttcacacgcgcgcaggaggaggagcggcggcggcagaacaagacgaccctcacttacgtggccgctgtcgccgtgggcatgctgggggcgtcctacgctgccgtacccctttatcggctctattgccagactactggacttggaggatcagcagttgcaggtcatgcctcagacaagattgaaaacatggtgcctgttaaagatcgaatcattaaaattagctttaatgcagatgtgcatgcaagtctccagtggaactttagacctcagcaaacagaaatatatgtggtgccaggagagactgcactggcgttttacagagctaagaatcctactgacaaaccagtaattggaatttctacatacaatattgttccatttgaagctggacagtatttcaataaaatacagtgcttctgttttgaagaacaaaggcttaatccccaagaggaagtagatatgccagtgtttttctacattgatcctgaatttgctgaagatccaagaatgattaaagttgatcttatcactctttcttacactttttttgaagcaaaggaagggcacaagttgccagttccaggatataattgaagtcagcaactaagtcttccttcaaagttgtgatttttgggaaaatcatatatcctatcttctcaaaggagaaatattgtacaataatatgaaggcttatattttaaataattattttttctcaactaatttttttcacttaaacttgagagaacaagttcagcttttatcataagaaactcatatgcctagctagaatatatgactgactattcaataccatactgaagagtttgatactattaaaataagccgctttgttttttaaatatgcaggcatgggttcagcttaattccataattcccttccagattattaactcttcatacttacagcaatgaatctgacaatgtttttcaaaaatgtatgctcagggttatttgtttcaagtcataggccagaacttctaaccatgtttattgtgtctaaaagagttggttgctattttccttcattatgaatagtcagtattttaaaagctcaaagtagaagaggagtcactaagccctaacagcttgtccaaagatttaaattcttatttcaaatttgatttgtcctttaaggtttagggctattttatattcagagttctgaataattactttgaaactgtagtatcataaaattgaaataaaatacatctactaggctgttagccaaagcatcaccattacaagtccatgaatgttaaaatgtacaggtgggattgtgaagatttactgacatcaaaagttcttctggaaacaaacctttgttaaaaaaaaaaagtattaaattgttttaatagtgatttatttgtcatcaaatgtacaacttattctaaatattttcattttctgtgttctaaatagaaatattaagttgcagtaaaaagagaaaaaaaggctatttagcattacaaagaatcatatttaaaggctgcccaatgtagagtctagtgacctgttcaggacacctgaaatataattaaatgacaattatcaaggttttaacaatttataattctaaaccagaggattataaagaagtgcaaattgacttttacattcaactttagttaaatgaaggcactcagtattcttcctgaataatacattcagtttctcacattttatgctttcatctattcagaattatttcatagtaaaataatctactcttatcacagctgtgtgacgatttctaaatgtaggaaggcctgtgaaacatgacactgcagttaaattggttggcctaaggactaagtaatttttcttctgctgaagttttaagtgagtatttgttccaaacaagttctgttgaaatctcacgctgttgtcaggaatcagtgttatcctggaactgttattctatttaatcttcattatagcagaaatgtgccaccatggctttgacatgttggtaggtattgtcttccaggcttcaaagctgcacagagtctacgttttagagagttggcacctttgatgtggtagtgagctgatcatccactttcttctaaaataaagagaagaaaatggccagt

SEQ ID NO: 6863 - DNA, 2356 bp, Homo sapiens
  source 1..2356: mol_type = unassigned DNA
agaccacagagccctgggttgtggaagaggtggctgttccctgtcatcagtatgcagcgattgctctttccgccgttgagggccttgaaggggaggcagtatctgccgctcctggctcctagggcagcgcctagagcacagtgtgattgcatcaggcgccctttgaggccagggcaatacagcaccatctctgaagtagctttgcaatctggaaggggtacagtgtcccttccctcaaaggctgctgagcgggtggtgggccgatggctcctggtctgcagtggaacagtggctggagcagttattcttggtggagtaactaggttgacagagtctggcctctcgatggtagattggcatttaataaaggagatgaagccacctacaagccaagaggaatgggaagcagaattccaaagataccagcaatttccagaatttaaaatcttgaatcatgatatgacactgacagaattcaagttcatctggtacatggagtactcacaccgaatgtggggtcgccttgtaggccttgtgtacatcctgcctgctgcctacttttggagaaagggctggctcagccgtggcatgaaaggacgtgttcttgccctctgtggcctcgtctgcttccagggtctgttgggatggtatatggtgaaaagtggactagaagaaaaatcagactcccatgacatccctcgggtcagtcagtaccgccttgctgcccacctgggatcagccctggttctttattgtgccagcttgtggacctcactgtcactgctactccctccgcacaagttgcctgaaacccaccaactcctacagttgagacgatttgctcatggaacagcaggtctggtgttccttacggccctctcaggggcttttgtggcagggctagatgctgggcttgtttataactcctttcccaaaatgggagaatcctggatcccggaggacctctttaccttctcccccatcctgaggaatgtttttgagaatcccaccatggtgcagtttgatcaccggattctgggaatcacttcagtcactgccattacagtgctctacttcctctctcggagaattccccttcctagaaggaccaagatggcagcagtgactctgctggctttggcgtatacacaggtgggcttgggcatcagcacgctgctgatgtatgtcccaactcctctggccgccactcaccagtcaggctccttggctttgctcactggtgctctttggctgatgaatgaactccgaagagtcccaaaatgattcttagaggaccagcctcctgggactgtgactgcttttgagagctcttcagagatcataagaacttgggcttttctacgagatgaccttgacataccaagtggtttccaaatggtcaacttacttaaaaatcttttcctgttttgagatagtcactggatcaagaatgcattaagtgtggttaccctaaatgttcccttttaaatctgcttttcatgttgaaaatcagttttaatgtagagaaagaaatgtctgccatttgctgcttaacaggctttgtgtcaggtttttcagtgttggcaagctcttggttctacgtggatgatttctacgtggatgttctcctgagtccttaattctgcctaaatagaatttctttatgatcttaacttcacttccattaggtgaagattgaaaggataggattgacatacccaaagtagccagctggtcttcagcaaaaaaaaaaaagctaatgtcttctaatatcctgattttcagaaatggggaaattgcagattttgacaagcttaatgtgtatatgtagcaaaatggtttttaagtacttggaaaaggaggtaatcgccaaatagttccatttttttttttttttttgagacagagtttcactcttgttgcccaggctggagtacaatggcgtgatctcagctcactctgcaacctccacttcccaggttcaagcgattctcatgcctcagcctcccgagtagctgggactacaggcacaagtcaccatgcctggctaattttgtatttttagtagagaaggggtttcaccacattggccgggctggtcttgaactcctgacctcaggtaatccgcccatctcggcttcccaaagtgctgagattacaggcatgggccaccacgcccagctagttcctcttttgataaggctgttaacattacaaggtcagagagaggaatggaatcgacagtataaattggttcctgagagggtttcctaacagctttgtaataagaaaaatatggccttgatggtgtagtgcatggacatctacccagataaacaaattgttgactgctgaa

SEQ ID NO: 6864 - DNA, 2788 bp, Homo sapiens
  source 1..2788: mol_type = unassigned DNA
agaccacagagccctgggttgtggaagaggtggctgttccctgtcatcagtatgcagcgattgctctttccgccgttgagggccttgaaggggaggcagtatctgccgctcctggctcctagggcagcgcctagagcacagtgtgattgcatcaggcgccctttgaggccagggcaatacagcaccatctctgaagtagctttgcaatctggaaggggtacagtgtcccttccctcaaaggctgctgagcgggtggtgggccgatggctcctggtctgcagtggaacagtggctggagcagttattcttggtggagtaactaggttgacagagtctggcctctcgatggtagattggcatttaataaaggagatgaagccacctacaagccaagaggaatgggaagcagaattccaaagataccagcaatttccagaatttaaaatcttgaatcatgatatgacactgacagaattcaagttcatctggtacatggagtactcacaccgaatgtggggtcgccttgtaggccttgtgtacatcctgcctgctgcctacttttggagaaagggctggctcagccgtggcatgaaaggacgtgttcttgccctctgtggcctcgtctgcttccagggtctgttgggatggtatatggtgaaaagtggactagaagaaaaatcagactcccatgacatccctcgggtcagtcagtaccgccttgctgcccacctgggatcagccctggttctttattgtgccagcttgtggacctcactgtcactgctactccctccgcacaagttgcctgaaacccaccaactcctacagttgagacgatttgctcatggaacagcaggtctggtgttccttacggccctctcaggggcttttgtggcagggctagatgctgggcttgtttataactcctttcccaaaatgggagaatcctggatcccggaggacctctttaccttctcccccatcctgaggaatgtttttgagaatcccaccatggtgcagtttgatcaccggattctgggaatcacttcagtcactgccattacagtgctctacttcctctctcggagaattccccttcctagaaggaccaagatggcagcagtgactctgctggctttggcgtatacacagggccctgtcttattcaactttacttttaaaatcagtgatttggatgaaggcatcagaaacatctgatttgaggatggagcaacccaatattgctaatataatagatgacagtggcaactgaaaacagtcccagaatgaccccatcgagatgaaattaaacagattagaaatgtaacatactcatttaaattaaataagttgtataagtttgggctgaagaaacctggccttatatcatttcatataaaaaagacgggattttagttgtcctcaggttcaatatgaaccaagtagtattcatgttgttattatatgataacagaaaaattagtggtacttcaggttttatcagtagaagtgtcacagccatagtcaaaatacccctaacatactgcatttcactctgggtaccaaatttaagcaagatattgatggccactaagtgtgtatccagaagaagagatcagaatgatgagtccagaacccctgtcacacagggaataggtgaaggaactagggatatttaactggagcagagaacatctggagagagagcaagattcctgtccttgagaagttgaagccgtctcatgcagaagagggaatgagcttccattatgctgcagagctggcagcaatggatgaaagttgcaggaagttagttttagttctgtagaaggcaagagtagggtagaccaaatcaaatgctcactggggtcaggctgatggagacagtaacactggcgagcaggtgccccagctcggactatactgctgagttctggtctgttgctgccactctacaggtccagggttgttagatcttctgggtttttgttttgctttttgaaataaggaaaataagcttatcttaagtttatttttccttggatatacctagattccatacagtgacaatacaaatacaaaggaagaacatctggatttcatccttgacctcatttacaaagcaaaaagagatgctggattcagatataaatgtttaattttgcagtgtttaagtcagcaaatcttctgttttttaaaaataagccacatatctagatttttctgtgaaagctctcaattaagtgttgggaactaatttcaagattttaaaaaatgttatgcaggcttaacgtgtctgagagccataaatgacctaacgtttcccgttagtctctgaactaggtgatctcagttctctttcaactccagtactctgtaagtttctgtgacctgtagtgtaccattctcaggtggtgatatggtttggatgttttgtcccctccaaatctcatgttcaaagtgtgacattcagtgttagaggtgggcctagtaggaggtatttgggtcatgggggcggatcccttatgtatgactttgtgccatccccatagtaatgagtgagttctcactctggttgtttatgcaagagctggttgtttaaaagagcctggaacttcctcctctctcgcttgctctctctcaccatgtgacacactggctccccttcaccttctgccatgattgtaagcttcgtgaggccctcaccagaagcagatgccagcgccatgcttcctatacagttctatgcagaacagtgagccaaataaacctcttttctttctaaaaa

SEQ ID NO: 6865 - DNA, 684 bp, Homo sapiens
  source 1..684: mol_type = unassigned DNA
gcgactgccggaagtgactgcggacgaatcggcgtttgccgaggctggcatagatttggctgtctccgctcatagctgcttttggcgcgaaagatgccgggtctggttgactcaaaccctgccccgcctgagtctcaggagaagaagccgctgaagccctgctgcgcttgcccggagaccaagaaggcgcgcgatgcgtgtatcatcgagaaaggagaagaacactgtggacatctaattgaggcccacaaggaatgcatgagagccctaggatttaaaatatgaaatggtggtctgctgtgtgaataaataattcctgaagaatgaagaagattaattttgggagttctttgacgaactttgatatgtggaaaaagtatttataatttattgtaagaagaaagtaaaatattactagtggaagatcttcagttgtgtttcttttttgtgttcctcatttgctcacgtggctttttcccccaaaggatatataccaacaaatcttgtaacataaggttcttatgttcttattactatgtcattctgggaactctggatatctgttgtcaggagaaagcagatactgacctcaaccaatgaaatctccagaattaggtgcatagaagtaaaataaccctttaccaattcagaatcagtgtggtagccatatcatctcattcaaca

SEQ ID NO: 6866 - DNA, 555 bp, Homo sapiens
  source 1..555: mol_type = unassigned DNA
tttaaattccccacctgtcagagagaagcaggacttcctgtactttttagagcgactgccggaagtgactgcggacgaatcggcgtttgccgaggctggcatagatttggctgtctccgctcatagctgcttttggcgcgaaagatgccgggtctggttgactcaaaccctgccccgcctgagtctcaggagaagaagccgctgaagccctgctgcgcttgcccggagaccaagaaggcgcgcgatgcgtgtatcatcgagaaaggagaagaacactgtggacatctaattgaggcccacaaggaatgcatgagagccctaggatttaaaatatgaaatggtgagtataggtgcttggagaggataaggaaatcaccctgatccaatagctggtaacctgcgaggttacctgtgctgcgtgctgtggggctggttcagtgcctgtggcctggacattgttctttggagcttcctgctggctgtggtctgcctgctccagctggcacacctggtataccgcctgcgtgaggacaccctccctgaggagtttgacct

SEQ ID NO: 6867 - DNA, 471 bp, Homo sapiens
  source 1..471: mol_type = unassigned DNA
ggctgtctccgctcatagctgcttttggcgcgaaagatgccgggtctggttgactcaaaccctgccccgcctgagtctcaggagaagaagccgctgaagccctgctgcgcttgcccggagaccaagaaggcgcgcgatgcgtggtttcgtggtcgggtctctgttgacttatcccgtagcttagtaccgggaaacgatggagagagaggagaacggcaagcttcaaccactcattccttcctacaaattatcatcgagaaaggagaagaacactgtggacatctaattgaggcccacaaggaatgcatgagagccctaggatttaaaatatgaaatggtggtctgctgtgtgaataaataattcctgaagaatgaagaagattaattttgggagttctttgacgaactttgatatgtggaaaaagtatttataatttattgtaagaagaaagtaaaatattactagtggaa

SEQ ID NO: 6868 - DNA, 660 bp, Homo sapiens
  source 1..660: mol_type = unassigned DNA
cgaggctggcatagatttggctgtctccgctcatagctgcttttggcgcgaaagatgccgggtctggttgactcaaaccctgccccgcctgagtctcaggagaagaagccgctgaagccctgctgcgcttgcccggagaccaagaaggcgcgcgatgcgtgtatcatcgagaaaggagaagaacactgtggacatctaattgaggcccacaaggaatgcatgagagccctaggatttaaaatatgaaatgggtctcactctgttacccaggctggggtgaagtggcccaatcacagctcattgcagcctcaacctgggaggttcaggtgatcctcccctcagcctcctaagtaactgggactacaggtgtgggccaccgtgcctggctaattttttgtgttgttttttagagatggggtttcaccatcttgcccaggctggtctcaacctcttggactcaggcaatcctcctgccttggtctcccaaagtgctgggattaagaggtgtgagccactatgcctggccaagaaatgcttttaagtagggagtgggtatcccacggaagtattgctttctgaaaaatgaaaatggaattgtagcatgctttattcgaataaaactaaagcctcaggccattttttttttaattaaaaagtaaa

SEQ ID NO: 6869 - DNA, 6254 bp, Homo sapiens
  source 1..6254: mol_type = unassigned DNA
cagggctagaatagcctttctgtgcaagtggaaaaaacctcaggtatttcccaaatcggtagctgcagaggggctctatccctaccagagatggagaaaagccctctcgcgctttttatgtcagccagagcggctcgttaagagagcgaaggccaggggctgcacaggtcgcatcccgtgagcatgaggtcagagaacctgcccctggggcaaaccgcgaggggtgggacgggtgggtgcaggcggggcggagggtaggagccgccctagtggcggcccctgggagtgtcccgtgcctcgccttaaaggagggcgccaacgcaatttcagtatgtgggagacgggctgccccacccccgcgcgcaaaaccctggtttagcttaagggatggaggcggggacccctgcgcaggcttgcggcgtgggaggcggccgcccgcgacctacgacgccgcgcgccgggaggctgagagttcggcgccgggagggtcccggggacagaagagcgcctcgcccggttgccaaggcaaccccacgcggctggagaagccggcgctcgcagcccggcccgggccgctgccggaagtgacgcgagttcacctgccgagcgggggctgggaggaggggcggagggtgcagaggtgccgccgccgccgcgagccagtcgggagcgcgcgaggcgcggggagcctgggaccaggagcgagagccgcctacctgcagccgccgcccacggcacggcagccaccatggcgctcctgctgtgcttcgtgctcctgtgcggagtagtggatttcgccagaagtttgagtatcactactcctgaagagatgattgaaaaagccaaaggggaaactgcctatctgccatgcaaatttacgcttagtcccgaagaccagggaccgctggacatcgagtggctgatatcaccagctgataatcagaaggtggatcaagtgattattttatattctggagacaaaatttatgatgactactatccagatctgaaaggccgagtacattttacgagtaatgatctcaaatctggtgatgcatcaataaatgtaacgaatttacaactgtcagatattggcacatatcagtgcaaagtgaaaaaagctcctggtgttgcaaataagaagattcatctggtagttcttgttaagccttcaggtgcgagatgttacgttgatggatctgaagaaattggaagtgactttaagataaaatgtgaaccaaaagaaggttcacttccattacagtatgagtggcaaaaattgtctgactcacagaaaatgcccacttcatggttagcagaaatgacttcatctgttatatctgtaaaaaatgcctcttctgagtactctgggacatacagctgtacagtcagaaacagagtgggctctgatcagtgcctgttgcgtctaaacgttgtccctccttcaaataaagctggactaattgcaggagccattataggaactttgcttgctctagcgctcattggtcttatcatcttttgctgtcgtaaaaagcgcagagaagaaaaatatgaaaaggaagttcatcacgatatcagggaagatgtgccacctccaaagagccgtacgtccactgccagaagctacatcggcagtaatcattcatccctggggtccatgtctccttccaacatggaaggatattccaagactcagtataaccaagtaccaagtgaagactttgaacgcactcctcagagtccgactctcccacctgctaaggtagctgcccctaatctaagtcgaatgggtgcgattcctgtgatgattccagcacagagcaaggatgggtctatagtatagagcctccatatgtctcatctgtgctctccgtgttcctttcctttttttgatatatgaaaacctattctggtctaaattgtgttactagcctcaaaatacatcaaaaaataagttaatcaggaactgtacggaatatatttttaaaaatttttgtttggttatatcgaaatagttacaggcactaaagttagtaaagaaaagtttaccatctgaaaaagctggattttctttaagaggttgattataaagttttctaaatttatcagtacctaagtaagatgtagcgctttgaatatgaaatcataggtgaagacatgggtgaacttacttgcataccaagttgatacttgaataaccatctgaaagtggtacttgatcatttttaccattatttttaggatgtgtatttcatttatttatggcccaccagtctcccccaaattagtacagaaatatccatgacaaaattacttacgtatgtttgtacttggttttacagctcctttgaaaactctgtgtttggaatatctctaaaaacatagaaaacactacagtggtttagaaattactaattttacttctaagtcattcataaaccttgtctatgaaatgacttcttaaatatttagttgatagactgctacaggtaatagggacttagcaagctcttttatatgctaaaggagcatctatcagattaagttagaacatttgctgtcagccacatattgagatgacactaggtgcaatagcagggatagattttgttggtgagtagtctcatgccttgagatctgtggtggtcttcaaaatggtggccagccagatcaaggatgtagtatctcatagttcccaggtgatatttttcttattagaaaaatattataactcatttgttgtttgacacttatagattgaaatttcctaatttattctaaattttaagtggttctttggttccagtgctttatgttgttgttgtttttggatggtgttacatattatatgttctagaaacatgtaatcctaaatttaccctcttgaatataatccctggatgatattttttatcataaatgcagaataatcaaatacattttaagcaagttaagtgtcctccatcaattctgtattccagacttgggaggatgtacagttgctgttgtgtgatcaaacatgtctctgtgtagttccagcaaatcaagctgagctttgaaaaagtttgtcttagttttgtgaaggtgatttattcttaaaaaaaaaaaagaaagaaaaagaaaaaaagataagaaggaggagtaaagggactactcctccttgccaaatgtgctaaatatcattttaggagaagaaagtgggtttattgtatttcccttaagattgtgagggagtgtggatacagtagaatgagccaacagtttctttataataaatacggtctgcaataaattatttcactagctctaaaacctttccctagattttagtagggagttggtttctgttaatatctttgggtgctgtggtggtaaatgctatattatgaacggtggcatgtatttacagttagagtattgtgtgtacactttttaatggtaaacttaagctgaatgtgtaatggatttgtgtatagttttacatatttggaagcattttaaaaacaggttttaaccttatgtaaaattacttttatactcgtgttaacattttcatctgtgccttttggtaatttaatttctattatgaatttctggtgcctatgagctagctatcacctacctgaaaggtgcttagaggtgaaggtactgtttctaaaaacacatcactgtgatacctttctatcctcacattttcaagcttgcctcttttctgttctttgtggatataacttaagcaattgtgttattcataaaggtttagaaatttcaatattcccaacactctatgtttctgattttataacagtagccatttttgaaagtcagatgtttggcctgttttatatgaataaagtttatttataaaatattataaaaaataagtaaataaacagaacattaataataaagttttggttcttcctattcctgactttcatataatgaaaattatcctattgatctaagtagaagttatcatagaaagtggacacgtataagactttccttcctttttttttttaataacatatgaggaacaagacttctcttcccatatacttcatattttagaggacattgttttaaaggcttatgtctcactgtaaaattctgtcagccaaatagtaccaatacgttttcaagtagttctcactgataatttagttgaaccagagatcaaatatttgctcccgaattactactggtaatcaagtagttgaacaaaaaattactaaagcatttccgttagatcagtcaaggacagtactgcatctttttttttttttttttttttaagacggagtctcggtctgtcacccaggctggagtgcagtggcgggatctcggctcactgcaagctccgcctcccaggttcacgccattctcctgcctcagcctcccgagcagctgggactacaggctcccatcaccacgctcggctaagtttttgtaattttagtagagacagggtttcaccgtgttagccaggatggtctcgatctcctgacctcgtgatctgcctgcctcggcctcccaaagtgctgggattacaggcgtgaaccactgcacccggcccagtactgcatcttaacagcaaagccattttattctactttataactgagagacttgataccatccatctctttaggttacagaggataatttgaagagaaatgttactgtagaatatatagttctgtactttttttttttttttttaagagatagggtttcactattgctcaggctggtctcaaactgctgggctcaggagatcctcctgccttggcctcccaaattgctgggattacaggtgtgagccgcagcatccagccagttctgtactttgaatatggagtagtttacagctatttttttttcttactggtaatcttaactaatatgattcccttgttagagagcctctcactcccccacccccaaaaatgtctactattcatgacagtaaccaattattctggacaaattgcttctttttaatttgagctatctgccatggactttctaaaatggaaacacagcctgagtgtatcttagggagagtttgattgaaaaaatccaaatcactatccatatagatcatggatataaagagatacctgatttttattaaaaagatactttttcaaatttaagagttaatcttggaaatttggaacaagtaaaggggcaagtaaaccttttgatgaaatataaaaggaactcattgcatgaagttgactatcaaattctgtgatgtgtggcttcttaaaaatattctcagtgtcttttgtgtgcgtgcagcatgtacatttgatgttatgtgaatgttgagttttttcttctaattttcacttcagcagtgtttagggctttcagatgccttattccagtgtgaacagaaaaagttcatattttatgtggttaatgctttgatgtgtcacataaagagtagtttgtagaaaatgttggcacaattttaacttcttagtggcttgtgacattatatattatatatatatatgtacatatatctttataacattcctgtgtttagtagtgtaaatgttctgggcaagttttaatattttgaatgcctttggatattccagcaataaaggcatcatgttctgcaataggatttcttactcatttacctattttaacactaaaatagaccacaactgagcacaaattccttttataaatgttatagaagcagggaagaataataaacacatttgtgaattgtggttcagtttatttatctttagggaaggctgatcatttatcttatagcagataaccccagcctcttattcattatggttaacttttataatttatcttattttataatttaagaatatagtacatatcagttgggtttggttttggtcatcgagactaaaagctccatcaaaacagaactttgtgttttctgctaacttatttaatgacacaagttttaagagaaccacaattcattgattcacttattcttttccctaattgtgaattttagtgataaatacacctgtactactgaggaaaatattctgacacttcacgtgtgcaaagtatagaactgacagtgtcagtttcagattttgtatgtacgatttctggcttatatatccaatggtgcagattttgaaatttgtaagaacaaaatttgttaagaaaaacaacttgctctagttttgtgaccttgtgtacttttgaaataaaatcaagaaagcagt

SEQ ID NO: 6870 - DNA, 975 bp, Homo sapiens
  source 1..975: mol_type = unassigned DNA
atggcgctcctgctgtgcttcgtgctcctgtgcggagtagtggatttcgccagaagtttgagtatcactactcctgaagagatgattgaaaaagccaaaggggaaactgcctatctgccatgcaaatttacgcttagtcccgaagaccagggaccgctggacatcgagtggctgatatcaccagctgataatcagaaggtggatcaagtgattattttatattctggagacaaaatttatgatgactactatccagatctgaaaggccgagtacattttacgagtaatgatctcaaatctggtgatgcatcaataaatgtaacgaatttacaactgtcagatattggcacatatcagtgcaaagtgaaaaaagctcctggtgttgcaaataagaagattcatctggtagttcttgttaagccttcaggtgcgagatgttacgttgatggatctgaagaaattggaagtgactttaagataaaatgtgaaccaaaagaaggttcacttccattacagtatgagtggcaaaaattgtctgactcacagaaaatgcccacttcatggttagcagcttcaaataaagctggactaattgcaggagccattataggaactttgcttgctctagcgctcattggtcttatcatcttttgctgtcgtaaaaagcgcagagaagaaaaatatgaaaaggaagttcatcacgatatcagggaagatgtgccacctccaaagagccgtacgtccactgccagaagctacatcggcagtaatcattcatccctggggtccatgtctccttccaacatggaaggatattccaagactcagtataaccaagtaccaagtgaagactttgaacgcactcctcagagtccgactctcccacctgctaaggtagctgcccctaatctaagtcgaatgggtgcgattcctgtgatgattccagcacagagcaaggatgggtctatagtatag

SEQ ID NO: 6871 - DNA, 603 bp, Homo sapiens
  source 1..603: mol_type = unassigned DNA
atggcgctcctgctgtgcttcgtgctcctgtgcggagtagtggatttcgccagaagtttgagtatcactactcctgaagagatgattgaaaaagccaaaggggaaactgcctatctgccatgcaaatttacgcttagtcccgaagaccagggaccgctggacatcgagtggctgatatcaccagctgataatcagaaggtggatcaagtgattattttatattctggagacaaaatttatgatgactactatccagatctgaaaggccgagtacattttacgagtaatgatctcaaatctggtgatgcatcaataaatgtaacgaatttacaactgtcagatattggcacatatcagtgcaaagtgaaaaaagctcctggtgttgcaaataagaagattcatctggtagttcttgggaagatgtgccacctccaaagagccgtacgtccactgccagaagctacatcggcagtaatcattcatccctggggtccatgtctccttccaacatggaaggatattccaagactcagtataaccaagtaccaagtgaagactttgaacgcactcctcagagtccgactctcccacctgctaaggtag

SEQ ID NO: 6872 - DNA, 1080 bp, Homo sapiens
  source 1..1080: mol_type = unassigned DNA
cgggagcgcgcgaggcgcggggagcctgggaccaggagcgagagccgcctacctgcagccgccgcccacggcacggcagccaccatggcgctcctgctgtgcttcgtgctcctgtgcggagtagtggatttcgccagaagtttgagtatcactactcctgaagagatgattgaaaaagccaaaggggaaactgcctatctgccatgcaaatttacgcttagtcccgaagaccagggaccgctggacatcgagtggctgatatcaccagctgataatcagaaggtggatcaagtgattattttatattctggagacaaaatttatgatgactactatccagatctgaaaggccgagtacattttacgagtaatgatctcaaatctggtgatgcatcaataaatgtaacgaatttacaactgtcagatattggcacatatcagtgcaaagtgaaaaaagctcctggtgttgcaaataagaagattcatctggtagttcttgttaagccttcaggtgcgagatgttacgttgatggatctgaagaaattggaagtgactttaagataaaatgtgaaccaaaagaaggttcacttccattacagtatgagtggcaaaaattgtctgactcacagaaaatgcccacttcatggttagcagggaagatgtgccacctccaaagagccgtacgtccactgccagaagctacatcggcagtaatcattcatccctggggtccatgtctccttccaacatggaaggatattccaagactcagtataaccaagtaccaagtgaagactttgaacgcactcctcagagtccgactctcccacctgctaaggtagctgcccctaatctaagtcgaatgggtgcgattcctgtgatgattccagcacagagcaaggatgggtctatagtatagagcctccatatgtctcatctgtgctctccgtgttcctttcctttttttgatatatgaaaacctattctggtctaaattgtgttactagcctcaaaatacatcaaaaaataagttaatcaggaactgtacggaatatatttttaaaaatttttgtttggtt

SEQ ID NO: 6873 - DNA, 1445 bp, Homo sapiens
  source 1..1445: mol_type = unassigned DNA
atggcgctcctgctgtgcttcgtgctcctgtgcggagtagtggatttcgccagaagtttgagtatcactactcctgaagagatgattgaaaaagccaaaggggaaactgcctatctgccatgcaaatttacgcttagtcccgaagaccagggaccgctggacatcgagtggctgatatcaccagctgataatcagaaggtggatcaagtgattattttatattctggagacaaaatttatgatgactactatccagatctgaaaggccgagtacattttacgagtaatgatctcaaatctggtgatgcatcaataaatgtaacgaatttacaactgtcagatattggcacatatcagtgcaaagtgaaaaaagctcctggtgttgcaaataagaagattcatctggtagttcttgttaagccttcaggtgcgagatgttacgttgatggatctgaagaaattggaagtgactttaagataaaatgtgaaccaaaagaaggttcacttccattacagtatgagtggcaaaaattgtctgactcacagaaaatgcccacttcatggttagcagaaatgacttcatctgttatatctgtaaaaaatgcctcttctgagtactctgggacatacagctgtacagtcagaaacagagtgggctctgatcagtgcctgttgcgtctaaacgttgtccctccttcaaataaagctggactaattgcaggagccattataggaactttgcttgctctagcgctcattggtcttatcatcttttgctgtcgtaaaaagcgcagagaagaaaaatatgaaaaggaagttcatcacgatatcagggaagatgtgccacctccaaagagccgtacgtccactgccagaagctacatcggcagtaatcattcatccctggggtccatgtctccttccaacatggaaggatattccaagactcagtataaccaagtaccaagtgaagactttgaacgcactcctcagagtccgactctcccacctgctaagttcaagtacccttacaagactgatggaattacagttgtataaatatggactactgaagaatctgaagtattgtattatttgactttattttaggcctctagtaaagacttaaatgttttttaaaaaaagcacaaggcacagagattagagcagctgtaagaacacatctactttatgcaatggcattagacatgtaagtcagatgtcatgtcaaaattagtacgagccaaattctttgttaaaaaaccctatgtatagtgacactgatagttaaaagatgttttattatattttcaataactaccactaacaaatttttaacttttcatatgcatattctgatatgtggtcttttaggaaaagtatggttaatagttgatttttcaaaggaaattttaaaattcttacgttctgtttaatgtttttgc

SEQ ID NO: 6874 - DNA, 270 bp, Homo sapiens
  source 1..270: mol_type = unassigned DNA
atggcgctcctgctgtgcttcgtgctcctgtgcggagtagtggatttcgccagaagtttgagtatcactactcctgaagagatgattgaaaaagccaaaggggaaactgcctatctgccatgcaaatttacgcttagtcccgaagaccagggaccgctggacatcgagtggctgatatcaccagctgataatcagaaggtggatcaagtgggaagatgtgccacctccaaagagccgtacgtccactgccagaagctacatcggcagtaa

SEQ ID NO: 6875 - DNA, 1275 bp, Homo sapiens
  source 1..1275: mol_type = unassigned DNA
gtgcaaagcgctgtcgggggccgccctagctgccgtcgccgccgccggggctctatggtctctccctagagctttgccgttggaggcggctgctgcggtcttgtgagtttgaccagcgtcgagcggcagcaacatggaggaattcgactccgaagacttctctacgtcggaggaggacgaggactacgtgccgtcgggtggagagtatagtgaagatgatgtaaatgaattagtgaaggaagatgaagtggatggtgaagagcagacacagaaaacccaagggaaaaaaagaaaggcccagagcattccagccaggaagagaagacaaggtggcctctcattagaagaagaggaagaggaggatgccaattcagaatctgagggaagcagtagtgaggaggaagatgacgctgcagagcaggaaaaaggcattggatcagaggatgccaggaaaaagaaggaggacgaactctgggccagcttcctcaatgatgtgggaccaaaatcaaaagtgcccccaagtacacaagttaagaaaggagaggagactgaagagacaagttcaagtaaattgttggtaaaagcagaagagctagagaaacctaaagaaacagaaaaagttaaaatcaccaaggtgtttgattttgctggtgaagaagtaagggtaactaaggaagtggatgctacatctaaagaggccaaatccttcttcaagcagaatgagaaagaaaaaccacaggctaatgttccttcagctctgccatcactccctgccgggtcagggttaaaaagatcaagtggcatgagcagccttttggggaaaattggtgccaagaagcagaaaatgagcacccttgagaagtccaaactggactgggagagcttcaaggaggaagaggggattggtgaagaactggccatccataatcgagggaaagaggggtacattgaacggaaagccttccttgaccgagtggatcacaggcagtttgaaattgagcgagatctcaggctgagcaaaatgaaaccttgatgttacgggctaaatcaagagcagcttaatcctgtttacaatgtgagctttttgtgcgtctgtgaaatgttttacagtgtttctcatcatctgtttcccagcaaggtcttttttttttctacattgaagttctgtctatgtatcttaatcacaaatggtttcattcactttacttttaaaaatttgtccttaaatgaataaataaaataaaagttggtcctgtgagaggataatgaagatga

SEQ ID NO: 6876 - DNA, 2015 bp, Homo sapiens
  source 1..2015: mol_type = unassigned DNA
aaggcaagagatctaggacttctagcccctgaactttcagccgaatacatcttttccaaaggagtgaattcaggcccttgtatcactggcagcaggacgtgaccatggagaagctgttgtgtttcttggtcttgaccagcctctctcatgcttttggccagacagacatgtcgaggaaggcttttgtgtttcccaaagagtcggatacttcctatgtatccctcaaagcaccgttaacgaagcctctcaaagccttcactgtgtgcctccacttctacacggaactgtcctcgacccgtgggtacagtattttctcgtatgccaccaagagacaagacaatgagattctcatattttggtctaaggatataggatacagttttacagtgggtgggtctgaaatattattcgaggttcctgaagtcacagtagctccagtacacatttgtacaagctgggagtccgcctcagggatcgtggagttctgggtagatgggaagcccagggtgaggaagagtctgaagaagggatacactgtgggggcagaagcaagcatcatcttggggcaggagcaggattccttcggtgggaactttgaaggaagccagtccctggtgggagacattggaaatgtgaacatgtgggactttgtgctgtcaccagatgagattaacaccatctatcttggcgggcccttcagtcctaatgtcctgaactggcgggcactgaagtatgaagtgcaaggcgaagtgttcaccaaaccccagctgtggccctgaggcccagctgtgggtcctgaaggtacctcccggttttttacaccgcatgggccccacgtctctgtctctggtacctcccgcttttttacactgcatggttcccacgtctctgtctctgggcctttgttcccctatatgcattgcaggcctgctccaccctcctcagcgcctgagaatggaggtaaagtgtctggtctgggagctcgttaactatgctgggaaacggtccaaaagaatcagaatttgaggtgttttgttttcatttttatttcaagttggacagatcttggagataatttcttacctcacatagatgagaaaactaacacccagaaaggagaaatgatgttataaaaaactcataaggcaagagctgagaaggaagcgctgatcttctatttaattccccacccatgacccccagaaagcaggagggcattgcccacattcacagggctcttcagtctcagaatcaggacactggccaggtgtctggtttgggtccagagtgctcatcatcatgtcatagaactgctgggcccaggtctcctgaaatgggaagcccagcaataccacgcagtccctccactttctcaaagcacactggaaaggccattagaattgccccagcagagcagatctgctttttttccagagcaaaatgaagcactaggtataaatatgttgttactgccaagaacttaaatgactggtttttgtttgcttgcagtgctttcttaattttatggctcttctgggaaactcctccccttttccacacgaaccttgtggggctgtgaattctttcttcatccccgcattcccaatatacccaggccacaagagtggacgtgaaccacagggtgtcctgtcagaggagcccatctcccatctccccagctccctatctggaggatagttggatagttacgtgttcctagcaggaccaactacagtcttcccaaggattgagttatggactttgggagtgagacatcttcttgctgctggatttccaagctgagaggacgtgaacctgggaccaccagtagccatcttgtttgccacatggagagagactgtgaggacagaagccaaactggaagtggaggagccaagggattgacaaacaacagagccttgaccacgtggagtctctgaatcagccttgtctggaaccagatctacacctggactgcccaggtctataagccaataaagcccctgtttacttga

SEQ ID NO: 6877 - DNA, 413 bp, Homo sapiens
  source 1..413: mol_type = unassigned DNA
aaggcaagagatctaggacttctagcccctgaactttcagccgaatacatcttttccaaaggagtgaattcaggcccttgtatcactggcagcaggacgtgaccatggagaagctgttgtgtttcttggtcttgaccagcctctctcatgcttttggccagacagacatgtcgaggaaggcttttgtgtttcccaaagagtcggatacttcctatgtatccctcaaagcaccgttaacgaagcctctcaaagccttcactgtgtgcctccacttctacacggaactgtcctcgacccatgagattaacaccatctatcttggcgggcccttcagtcctaatgtcctgaactggcgggcactgaagtatgaagtgcaaggcgaagtgttcaccaaaccccagctgtggccctga

SEQ ID NO: 6878 - DNA, 667 bp, Homo sapiens
  source 1..667: mol_type = unassigned DNA
aaggcaagagatctaggacttctagcccctgaactttcagccgaatacatcttttccaaaggagtgaattcaggcccttgtatcactggcagcaggacgtgaccatggagaagctgttgtgtttcttggtcttgaccagcctctctcatgcttttggccagacagacatgtcgaggaaggcttttgtgtttcccaaagagtcggatacttcctatgtatccctcaaagcaccgttaacgaagcctctcaaagccttcactgtgtgcctccacttctacacggaactgtcctcgacccatgagattaacaccatctatcttggcgggcccttcagtcctaatgtcctgaactggcgggcactgaagtatgaagtgcaaggcgaagtgttcaccaaaccccagctgtggccctgaggcccagctgtgggtcctgaagtgctttcttaattttatggctcttctgggaaactcctccccttttccacacgaaccttgtggggctgtgaattctttcttcatccccgcattcccaatatacccaggccacaagagtggacgtgaaccacagggtgtcctgtcagaggagcccatctcccatctccccagctccctatctggaggatagttggatagttacgtgttcctagcaggaccaactacagtcttcc

SEQ ID NO: 6879 - DNA, 512 bp, Homo sapiens
  source 1..512: mol_type = unassigned DNA
aaggcaagagatctaggacttctagcccctgaactttcagccgaatacatcttttccaaaggagtgaattcaggcccttgtatcactggcagcaggacgtgaccatggagaagctgttgtgtttcttggtcttgaccagcctctctcatgcttttggccagacagacatgtcgaggaaggcttttgtgtttcccaaagagtcggatacttcctatgtatccctcaaagcaccgttaacgaagcctctcaaagccttcactgtgtgcctccacttctacacggaactgtcctcgacccatgagattaacaccatctatcttggcgggcccttcagtcctaatgtcctgaactggcgggcactgaagtatgaagtgcaaggcgaagtgttcaccaaaccccagctgtggccctgaggcccagctgtgggtcctgaaggaccaactacagtcttcccaaggattgagttatggactttgggagtgagacatcttcttgctgctggatttccaagc

SEQ ID NO: 6880 - DNA, 787 bp, Homo sapiens
  source 1..787: mol_type = unassigned DNA
aaggcaagagatctaggacttctagcccctgaactttcagccgaatacatcttttccaaaggagtgaattcaggcccttgtatcactggcagcaggacgtgaccatggagaagctgttgtgtttcttggtcttgaccagcctctctcatgcttttggccagacagacatgtcgaggaaggcttttgtgtttcccaaagagtcggatacttcctatgtatccctcaaagcaccgttaacgaagcctctcaaagccttcactgtgtgcctccacttctacacggaactgtcctcgacccgtggtcctaatgtcctgaactggcgggcactgaagtatgaagtgcaaggcgaagtgttcaccaaaccccagctgtggccctgaggcccagctgtgggtcctgaagtgctttcttaattttatggctcttctgggaaactcctccccttttccacacgaaccttgtggggctgtgaattctttcttcatccccgcattcccaatatacccaggccacaagagtggacgtgaaccacagggtgtcctgtcagaggagcccatctcccatctccccagctccctatctggaggatagttggatagttacgtgttcctagcaggaccaactacagtcttcccaaggattgagttatggactttgggagtgagacatcttcttgctgctggatttccaagctgagaggacgtgaacctgggaccaccagtagccatcttgtttgccacatggagagagactgtgaggacagaagccaaactggaagtggaggagc

SEQ ID NO: 6881 - DNA, 1063 bp, Homo sapiens
  source 1..1063: mol_type = unassigned DNA
aaggcaagagatctaggacttctagcccctgaactttcagccgaatacatcttttccaaaggagtgaattcaggcccttgtatcactggcaacaagacaatgagattctcatattttggtctaaggatataggatacagttttacagtgggtgggtctgaaatattattcgaggttcctgaagtcacagtagctccagtacacatttgtacaagctgggagtccgcctcagggatcgtggagttctgggtagatgggaagcccagggtgaggaagagtctgaagaagggatacactgtgggggcagaagcaagcatcatcttggggcaggagcaggattccttcggtgggaactttgaaggaagccagtccctggtgggagacattggaaatgtgaacatgtgggactttgtgctgtcaccagatgagattaacaccatctatcttggcgggcccttcagtcctaatgtcctgaactggcgggcactgaagtatgaagtgcaaggcgaagtgttcaccaaaccccagctgtggccctgaggcccagctgtgggtcctgaagtgctttcttaattttatggctcttctgggaaactcctccccttttccacacgaaccttgtggggctgtgaattctttcttcatccccgcattcccaatatacccaggccacaagagtggacgtgaaccacagggtgtcctgtcagaggagcccatctcccatctccccagctccctatctggaggatagttggatagttacgtgttcctagcaggaccaactacagtcttcccaaggattgagttatggactttgggagtgagacatcttcttgctgctggatttccaagctgagaggacgtgaacctgggaccaccagtagccatcttgtttgccacatggagagagactgtgaggacagaagccaaactggaagtggaggagccaagggattgacaaacaacagagccttgaccacgtggagtctctgaatcagccttgtctggaaccagatctacacctggactgcccaggtctataagccaataaagcccctgtttac

SEQ ID NO: 6882 - DNA, 1709 bp, Homo sapiens
  source 1..1709: mol_type = unassigned DNA
agtttcccgcccagaggcaagggcgtgcgaggggatccagatatccaaggacctgaggtttcggcctcgaggtcttgggcgggggactgggcaggctgcgcggggtcccagcgaggggacagctcgggtgggcggccagggtgttgggggctgcgggcggcggacaaagcggcggcaccaccccgcggcgcgggccaatggaatgaatgggctataaatagccgccaatgggcggcccgcgttgtgccccttaagagccgcgggagcgcggagcggccgctgttcgcctgcgtcgctccgggagctgccgacggacggagcgcccccgcccccgcccggccgcccgcccgccgccgccatgcccttctccaacagccacaacgcactgaagctgcgcttcccggccgaggacgagttccccgacctgagcgcccacaacaaccacatggccaaggtgctgacccccgagctgtacgcggagctgcgcgccaagagcacgccgagcggcttcacgctggacgacgtcatccagacaggcgtggacaacccgggccacccgtacatcatgaccgtgggctgcgtggcgggcgacgaggagtcctacgaagtgttcaaggatctcttcgaccccatcatcgaggaccggcacggcggctacaagcccagcgatgagcacaagaccgacctcaaccccgacaacctgcagggcggcgacgacctggaccccaactacgtgctgagctcgcgggtgcgcacgggccgcagcatccgtggcttctgcctccccccgcactgcagccgcggggagcgccgcgccatcgagaagctcgcggtggaagccctgtccagcctggacggcgacctggcgggccgatactacgcgctcaagagcatgacggaggcggagcagcagcagctcatcgacgaccacttcctcttcgacaagcccgtgtcgcccctgctgctggcctcgggcatggcccgcgactggcccgacgcccgcggtatctggcacaatgacaataagaccttcctggtgtgggtcaacgaggaggaccacctgcgggtcatctccatgcagaaggggggcaacatgaaggaggtgttcacccgcttctgcaccggcctcacccagattgaaactctcttcaagtctaaggactatgagttcatgtggaaccctcacctgggctacatcctcacctgcccatccaacctgggcaccgggctgcgggcaggtgtgcatatcaagctgcccaacctgggcaagcatgagaagttctcggaggtgcttaagcggctgcgacttcagaagcgaggcacaggcggtgtggacacggctgcggtgggcggggtcttcgacgtctccaacgctgaccgcctgggcttctcagaggtggagctggtgcagatggtggtggacggagtgaagctgctcatcgagatggagcagcggctggagcagggccaggccatcgacgacctcatgcctgcccagaaatgaagcccggcccacacccgacaccagccctgctgcttcctaacttattgcctgggcagtgcccaccatgcacccctgatgttcgccgtctggcgagcccttagccttgctgtagagacttccgtcacccttggtagagtttatttttttgatggctaagatactgctgatgctgaaataaactagggttttggcctgcctgcgtctg

SEQ ID NO: 6883 - DNA, 1318 bp, Homo sapiens
  source 1..1318: mol_type = unassigned DNA
gctgttcgcctgcgtcgctccgggagctgccgacggacggagcgcccccgcccccgcccggccgcccgcccgccgccgccatgcccttctccaacagccacaacgcactgaagctgcgcttcccggccgaggacgagttccccgacctgagcgcccacaacaaccacatggccaaggtgctgacccccgagctgtacgcggagctgcgcgccaagagcacgccgagcggcttcacgctggacgacgtcatccagacaggcgtggacaacccgggccacccgtacatcatgaccgtgggctgcgtggcgggcgacgaggagtcctacgaagtgttcaaggatctcttcgaccccatcatcgaggaccggcacggcggctacaagcccagcgatgagcacaagaccgacctcaaccccccgcggggagcgccgcgcatcgagaagctcgcggtggaagccctgtccagcctggacggcgacctggcgggccgatactacgcgctcaagagcatgacggaggcggagcagcagcagctcatcgacgaccacttcctcttcgacaagcccgtgtcgcccctgctgctggcctcgggcatggcccgcgactggcccgacgcccgcggtatctggcacaatgacaataagaccttcctggtgtgggtcaacgaggaggaccacctgcgggtcatctccatgcagaaggggggcaacatgaaggaggtgttcacccgcttctgcaccggcctcacccagattgaaactctcttcaagtctaaggactatgagttcatgtggaaccctcacctgggctacatcctcacctgcccatccaacctgggcaccgggctgcgggcaggtgtgcatatcaagctgcccaacctgggcaagcatgagaagttctcggaggtgcttaagcggctgcgacttcagaagcgaggcacaggcggtgtggacacggctgcggtgggcggggtcttcgacgtctccaacgctgaccgcctgggcttctcagaggtggagctggtgcagatggtggtggacggagtgaagctgctcatcgagatggagcagcggctggagcagggccaggccatcgacgacctcatgcctgcccagaaatgaagcccggcccacacccgacaccagccctgctgcttcctaacttattgcctgggcagtgcccaccatgcacccctgatgttcgccgtctggcgagcccttagccttgctgtagagacttccgtcacccttggtagagtttatttttttgatggctaagatactgctgatgctgaaataaactagggttttggcctgcc

SEQ ID NO: 6884 - DNA, 856 bp, Homo sapiens
  source 1..856: mol_type = unassigned DNA
gcctggagcgcgcgccggaccggccgggggtccccggcgatgatggcgctccccgcgcgcgctgcggaccccgctgaccttggccgcgtcccggggggcgccggggggcccggcggcgggggcctgagtggtacgcgggagcccgggaaccccggcgtgccggtcccctctgaccccgcgtctccccgcagcccgccgccgccatgcccttctccaacagccacaacgcactgaagctgcgcttcccggccgaggacgagttccccgacctgagcgcccacaacaaccacatggccaaggtgctgacccccgagctgtacgcggagctgcgcgccaagagcacgccgagcggcttcacgctggacgacgtcatccagacaggcgtggacaacccgggccacccgtacatcatgaccgtgggctgcgtggcgggcgacgaggagtcctacgaagtgttcaaggatctcttcgaccccatcatcgaggaccggcacggcggctacaagcccagcgatgagcacaagaccgacctcaaccccgacaacctgcagggcggcgacgacctggaccccaactacgtgctgagctcgcgggtgcgcacgggccgcagcatccgtggcttctgcctccccccgcactgcagccgcggggagcgccgcgccatcgagaagctcgcggtggaagccctgtccagcctggacggcgacctggcgggccgatactacgcgctcaagagcatgacggaggcggagcagcagcagctcatcgacgaccacttcctcttcgacaagcccgtgtcgcccctgctgctggcctcgggcatggcccgcgactggcccgacgcccgcggtatctg

SEQ ID NO: 6885 - DNA, 759 bp, Homo sapiens
  source 1..759: mol_type = unassigned DNA
accttctcctccagcacaggaactaggaactacggagagagaagccaagggagaggaggaggaggaaactaacgattccctgcccacccccacacccagcaccaccaacaggtgggcaagcttgccgagaaaacgcagagggcatcctgtgagcagcaaacacatctgagcctggaaaagacgcagagaagtaaaagatcaaagcctcggacctagctccggccctcggtctatccggttgcatcctccctccctgttccggatcttatcttgcgccagcgcctactccaggatcccgtagccagacctcaagccatggctggtcccttctcccgtctgctgtccgcccgcccgggactcaggctcctggctttggccggagcggggtctctagccgctgggtttctgctccgaccggaacctgtacgagctgccagtgaacgacggaggctgtatcccccgagcgctgagtacccagacctccgaaagcacaacaactgcatggccagtcacctgaccccagcagtctatgcacggctctgcgacaagaccacacccactggttggacgctagatcagtgtatccagactggcgtggacaaccctggccaccccttcatcaagactgtgggcatggtggctggagatgaggagacctatgaggtatttgctgacctgtttgaccctgtgatccaagagcgacacaatggatatgacccccggacaatgaagcacaccacggatctagatgccagtaaa

SEQ ID NO: 6886 - DNA, 1911 bp, Homo sapiens
  source 1..1911: mol_type = unassigned DNA
ccttgcacacccacagggtagacggatcgagtttcagcttaaaccgaggggtgtgggggaagggtgttgggttcagctagtccacgtgggtgctgtcctccacttggtgctgaaatctgggcggccacatccccggggcgggagggggctacatccccggctttagacgcgcgagtctcaggtcccgctaattacctggcgggtgctgcccacccctgccctcgcgcacctagcgcggtggcaggcgggaaggcggggcctgggggagccccacccctggagactgcggctggggcctccctctcctccgcccgcccgcctgccactagctcattgcgcctctcctgcagtctgattggcaccggctcccattccggctccagcctccaatccgacccccatttcggctgcagcctcggacctagctccggccctcggtctatccggttgcatcctccctccctgttccggatcttatcttgcgccagcgcctactccaggatcccgtagccagacctcaagccatggctggtcccttctcccgtctgctgtccgcccgcccgggactcaggctcctggctttggccggagcggggtctctagccgctgggtttctgctccgaccggaacctgtacgagctgccagtgaacgacggaggctgtatcccccgagcgctgagtacccagacctccgaaagcacaacaactgcatggccagtcacctgaccccagcagtctatgcacggctctgcgacaagaccacacccactggttggacgctagatcagtgtatccagactggcgtggacaaccctggccaccccttcatcaagactgtgggcatggtggctggagatgaggagacctatgaggtatttgctgacctgtttgaccctgtgatccaagagcgacacaatggatatgacccccggacaatgaagcacaccacggatctagatgccagtaaaatccgttctggctactttgatgagaggtatgtattgtcctctagagtcagaactggccgaagcatccgaggactcagtctgcctccagcttgcactcgagcagagcgacgagaggtggaacgtgttgtggtggatgcactgagtggcctgaagggtgacctggctggacgttactataggctcagtgagatgacagaggctgaacagcagcagcttattgatgaccactttctgtttgataagcctgtgtccccgttgctgactgcagcaggaatggctcgagactggccagatgctcgtggaatttggcacaacaatgagaagagcttcctgatctgggtgaatgaggaggatcatacacgggtgatctccatggagaagggtggtaacatgaagagagtgtttgaaagattctgccgaggcctcaaagaggtggagagacttatccaagaacgtggctgggagttcatgtggaatgagcgtttgggatacatcttgacctgtccatctaacctgggcactggacttcgggcaggagtgcacatcaaactgcccctgctaagcaaagatagccgcttcccaaagatcctggagaacctaagactccaaaagcgtggtactggaggagtggacactgctgccacaggcggtgtctttgatatttctaatttggaccgactaggcaaatcagaggtggagctggtgcaactggtcatcgatggagtaaactatttgattgattgtgaacggcgtctggagagaggccaggatatccgcatccccacacctgtcatccacaccaagcattaactccccatcgccagctgatgactcaagattccaaggagttctgctcattctaatgatggcccattctacttgctctggacctgccctcgcatcccctgcctccatcctagtaaagactccttgctatgctgca

SEQ ID NO: 6887 - DNA, 1646 bp, Homo sapiens
  source 1..1646: mol_type = unassigned DNA
attgcgcctctcctgcagtctgattggcaccggctcccattccggctccagcctccaatccgacccccatttcggctgcagcctcggacctagctccggccctccctgttccggatcttatcttgcgccagcgcctactccaggatcccgtagccagacctcaagccatggctggtcccttctcccgtctgctgtccgcccgcccgggactcaggctcctggctttggccggagcggggtctctagccgctgggtttctgctccgaccggaacctgtacgagctgccagtgaacgacggaggctgtatcccccgagccagacatggccaactggacagctcccaggtaactgcactaggtctaggcgtctgtgccctccctccatggttactgggtaccccctccccagcgctgagtacccagacctccgaaagcacaacaactgcatggccagtcacctgaccccagcagtctatgcacggctctgcgacaagaccacacccactggttggacgctagatcagtgtatccagactggcgtggacaaccctggccaccccttcatcaagactgtgggcatggtggctggagatgaggagacctatgaggtatttgctgacctgtttgaccctgtgatccaagagcgacacaatggatatgacccccggacaatgaagcacaccacggatctagatgccagtaaaatccgttctggctactttgatgagaggtatgtattgtcctctagagtcagaactggccgaagcatccgaggactcagtctgcctccagcttgcactcgagcagagcgacgagaggtggaacgtgttgtggtggatgcactgagtggcctgaagggtgacctggctggacgttactataggctcagtgagatgacagaggctgaacagcagcagcttattgatgaccactttctgtttgataagcctgtgtccccgttgctgactgcagcaggaatggctcgagactggccagatgctcgtggaatttggcacaacaatgagaagagcttcctgatctgggtgaatgaggaggatcatacacgggtgatctccatggagaagggtggtaacatgaagagagtgtttgaaagattctgccgaggcctcaaagaggtggagagacttatccaagaacgtggctgggagttcatgtggaatgagcgtttgggatacatcttgacctgtccatctaacctgggcactggacttcgggcaggagtgcacatcaaactgcccctgctaagcaaagatagccgcttcccaaagatcctggagaacctaagactccaaaagcgtggtactggaggagtggacactgctgccacaggcggtgtctttgatatttctaatttggaccgactaggcaaatcagaggtggagctggtgcaactggtcatcgatggagtaaactatttgattgattgtgaacggcgtctggagagaggccaggatatccgcatccccacacctgtcatccacaccaagcattaactccccatcgccagctgatgactcaagattccaaggagttctgctcattctaatgatggcccattctacttgctctggacctgccctcgcatcccctgcctccatcctagtaaagactccttgctatgctgc

SEQ ID NO: 6888 - DNA, 1779 bp, Homo sapiens
  source 1..1779: mol_type = unassigned DNA
cttcacctcactttaccttctcctccagcacaggaactaggaactacggagagagaagccaagggagaggaggaggaggaaactaacgattccctgcccacccccacacccagcaccaccaacaggtgggcaagcttgccgagaaaacgcagagggcatcctgtgagcagcaaacacatctgagcctggaaaagacgcagagaagtaaaagatcaaagtctgattggcaccggctcccattccggctccagcctccaatccgacccccatttcggctgcagcctcggacctagctccggccctcggtctatccggttgcatcctccctccctgttccggatcttatcttgcgccagcgcctactccaggatcccgtagccagacctcaagccatggctggtcccttctcccgtctgctgtccgcccgcccgggactcaggctcctggctttggccggagcggggtctctagccgctgggtttctgctccgaccggaacctgtacgagctgccagtgaacgacggaggctgtatcccccgagcgctgagtacccagacctccgaaagcacaacaactgcatggccagtcacctgaccccagcagtctatgcacggctctgcgacaagaccacacccactggttggacgctagatcagtgtatccagactggcgtggacaaccctggccaccccttcatcaagactgtgggcatggtggctggagatgaggagacctatgaggtatttgctgacctgtttgaccctgtgatccaagagcgacacaatggatatgacccccggacaatgaagcacaccacggatctagatgccagtaaaatccgttctggctactttgatgagaggtatgtattgtcctctagagtcagaactggccgaagcatccgaggactcagtctgcctccagcttgcactcgagcagagcgacgagaggtggaacgtgttgtggtggatgcactgagtggcctgaagggtgacctggctggacgttactataggctcagtgagatgacagaggctgaacagcagcagcttattgatgaccactttctgtttgataagcctgtgtccccgttgctgactgcagcaggaatggctcgagactggccagatgctcgtggaatttggcacaacaatgagaagagcttcctgatctgggtgaatgaggaggatcatacacgggtgatctccatggagaagggtggtaacatgaagagagtgtttgaaagattctgccgaggcctcaaagaggtggagagacttatccaagaacgtggctgggagttcatgtggaatgagcgtttgggatacatcttgacctgtccatctaacctgggcactggacttcgggcaggagtgcacatcaaactgcccctgctaagcaaagatagccgcttcccaaagatcctggagaacctaagactccaaaagcgtggtactggaggagtggacactgctgccacaggcggtgtctttgatatttctaatttggaccgactaggcaaatcagaggtggagctggtgcaactggtcatcgatggagtaaactatttgattgattgtgaacggcgtctggagagaggccaggatatccgcatccccacacctgtcatccacaccaagcattaactccccatcgccagctgatgactcaagattccaaggagttctgctcattctaatgatggcccattctacttgctctggacctgccctcgcatcccctgcctccatcctagtaaagactccttgctatgctgca

SEQ ID NO: 6889 - DNA, 982 bp, Homo sapiens
  source 1..982: mol_type = unassigned DNA
tcttatcttgcgccagcgcctactccaggatcccgtagccagacctcaagccatggctggtcccttctcccgtctgctgtccgcccgcccgggactcaggctcctggctttggccggagcggggtctctagccgctgggtttctgctccgaccggaacctgtacgagctgccagtgaacgacggaggctgtatcccccgagcgctgagtacccagacctccgaaagcacaacaactgcatggccagtcacctgaccccagcagtctatgcacggctctgcgacaagaccacacccactggttggacgctagatcagtgtatccagactggcgtggacaaccctggccaccccttcatcaagactgtgggcatggtggctggagatgaggagacctatgaggtatttgctgacctgtttgaccctgtgatccgaggactcagtctgcctccagcttgcactcgagcagagcgacgagaggtggaacgtgttgtggtggatgcactgagtggcctgaagggtgacctggctggacgttactataggctcagtgagatgacagaggctgaacagcagcagcttattgatgaccactttctgtttgataagcctgtgtccccgttgctgactgcagcaggaatggctcgagactggccagatgctcgtggaatttggcacaacaatgagaagagcttcctgatctgggtgaatgaggaggatcatacacgggtgatctccatggagaagggtggtaacatgaagagagtgtttgaaagattctgccgaggcctcaaagaggttgttgtggggattaagtgaaatacaggtaaagtacttggtccacagtaagtgcttaataagtgttaaagtgttagctgcaatattattctggatggaagagtttccccccatgttcagcacataagatatccctggtggcatggttccttctgaactacaaacaggatccctttactcatgttg

SEQ ID NO: 6890 - DNA, 1779 bp, Homo sapiens
  source 1..1779: mol_type = unassigned DNA
cttcacctcactttaccttctcctccagcacaggaactaggaactacggagagagaagccaagggagaggaggaggaggaaactaacgattccctgcccacccccacacccagcaccaccaacaggtgggcaagcttgccgagaaaacgcagagggcatcctgtgagcagcaaacacatctgagcctggaaaagacgcagagaagtaaaagatcaaagtctgattggcaccggctcccattccggctccagcctccaatccgacccccatttcggctgcagcctcggacctagctccggccctcggtctatccggttgcatcctccctccctgttccggatcttatcttgcgccagcgcctactccaggatcccgtagccagacctcaagccatggctggtcccttctcccgtctgctgtccgcccgcccgggactcaggctcctggctttggccggagcggggtctctagccgctgggtttctgctccgaccggaacctgtacgagctgccagtgaacgacggaggctgtatcccccgagcgctgagtacccagacctccgaaagcacaacaactgcatggccagtcacctgaccccagcagtctatgcacggctctgcgacaagaccacacccactggttggacgctagatcagtgtatccagactggcgtggacaaccctggccaccccttcatcaagactgtgggcatggtggctggagatgaggagacctatgaggtatttgctgacctgtttgaccctgtgatccaagagcgacacaatggatatgacccccggacaatgaagcacaccacggatctagatgccagtaaaatccgttctggctactttgatgagaggtatgtattgtcctctagagtcagaactggccgaagcatccgaggactcagtctgcctccagcttgcactcgagcagagcgacgagaggtggaacgtgttgtggtggatgcactgagtggcctgaagggtgacctggctggacgttactataggctcagtgagatgacagaggctgaacagcagcagcttattgatgaccactttctgtttgataagcctgtgtccccgttgctgactgcagcaggaatggctcgagactggccagatgctcgtggaatttggcacaacaatgagaagagcttcctgatctgggtgaatgaggaggatcatacacgggtgatctccatggagaagggtggtaacatgaagagagtgtttgaaagattctgccgaggcctcaaagaggtggagagacttatccaagaacgtggctgggagttcatgtggaatgagcgtttgggatacatcttgacctgtccatctaacctgggcactggacttcgggcaggagtgcacatcaaactgcccctgctaagcaaagatagccgcttcccaaagatcctggagaacctaagactccaaaaacgtggtactggaggagtggacactgctgctacaggcggtgtctttgatatttctaatttggaccgactaggcaaatcagaggtggagctggtgcaactggtcatcgatggagtaaactatttgattgattgtgaacggcgtctggagagaggccaggatatccgcatccccacacctgtcatccacaccaagcattaactccccatcgccagctgatgactcaagattcccaggagttctgctcattctaatgatggcccattctacttgctctggacctgcccccgcatcccctgcctccatcctagtaaagactccttgctatgctgca

SEQ ID NO: 6891 - DNA, 1224 bp, Homo sapiens
  source 1..1224: mol_type = unassigned DNA
attgcgcctctcctgcagtctgattggcaccggctcccattccggctccagcctccaatccgacccccatttcggctgcagcctcggacctagctccggccctcggtctatccggttgcatcctccctccctgttccggaacctgtacgagctgccagtgaacgacggaggctgtatcccccgagcgctgagtacccagacctccgaaagcacaacaactgcatggccagtcacctgaccccagcagtctatgcacggctctgcgacaagaccacacccactggttggacgctagatcagtgtatccagactggcgtggacaaccctggccaccccttcatcaagactgtgggcatggtggctggagatgaggagacctatgaggtatttgctgacctgtttgaccctgtgatccaagagcgacacaatggatatgacccccggacaatgaagcacaccacggatctagatgccagtaaaagtcagaactggccgaagcatccgaggactcagtctgcctccagcttgcactcgagcagagcgacgagaggtggaacgtgttgtggtggatgcactgagtggcctgaagggtgacctggctggacgttactataggctcagtgagatgacagaggctgaacagcagcagcttattgatgaccactttctgtttgataagcctgtgtccccgttgctgactgcagcaggaatggctcgagactggccagatgctcgtggaatttggcacaacaatgagaagagcttcctgatctgggtgaatgaggaggatcatacacgggtgatctccatggagaagggtggtaacatgaagagagtgtttgaaagattctgccgaggcctcaaagaggttagagaagattgtgtaggggagctaggtgggaggacataaggaaaaccaaagagtagcataaatagattatgtaatttatcaaccaacccaagacatgtctgatggtaaaaaggactacctaggactcactctaggactaaaggtataaaccagctgggaccatactgggaaaaccaggacatgtggtcacactaagattaggaaaagagtgtcaggaaccttagaaagtgaagaaggcaggtaatgcaaagaaggaataactgagatggcacgtcagtgcctgggatgtgtgcagtgggatggtgaggtgtgcagataaggaaaacattcgagcttagattgatgttggcggg

SEQ ID NO: 6892 - DNA, 1372 bp, Homo sapiens
  source 1..1372: mol_type = unassigned DNA
ccctctcctccgcccgcccgcctgccactagctcattgcgcctctcctgcagtctgattggcaccggctcccattccggctccagcctccaatccgacccccatttcggctgcagcctcggacctagctccggccctcggtctatccggttgcatcctccctccctgttccggatcttatcttgcgccagcgcctactccaggatcccgtagccagacctcaagccatggctggtcccttctcccgtctgctgtccgcccgcccgggactcaggctcctggctttggccggagcggggtctctagccgctgggtttctgctccgaccggaacctgtacgagctgccagtgaacgacggaggctgtatcccccgaggtatttgctgacctgtttgaccctgtgatccaagagcgacacaatggatatgacccccggacaatgaagcacaccacggatctagatgccagtaaaatccgttctggctactttgatgagaggtatgtattgtcctctagagtcagaactggccgaagcatccgaggactcagtctgcctccagcttgcactcgagcagagcgacgagaggtggaacgtgttgtggtggatgcactgagtggcctgaagggtgacctggctggacgttactataggctcagtgagatgacagaggctgaacagcagcagcttattgatgaccactttctgtttgataagcctgtgtccccgttgctgactgcagcaggaatggctcgagactggccagatgctcgtggaatttggcacaacaatgagaagagcttcctgatctgggtgaatgaggaggatcatacacgggtgatctccatggagaagggtggtaacatgaagagagtgtttgaaagattctgccgaggcctcaaagaggttagagaagactatgtaggggagctaggtgggaggacataaggaaaaccaaagagtagcataaatagattatgtaatttaccaaccaacccaggacatgtcttatagtaaaaaggactatctaggactcactccaggactaaaggtgtaaaccagctgggaccatactgggaaaaccaggacatgtggtcacactaagattaggaaaagaaagagtgtcaggaatcttaggaagtgaacaaggctgttgacagagagtgcaaagaaggaataaatgagatggcacgtcagtgcctgggatgtgtgcagtgggatggtgaggtgtgcagataaggaaaacattcgagcttagattgatgttggcggggagaggttgctgtgttcatgactctaatataaccacccagttctgagacaaggtaggccttgactctggattctatcattcttgttaaagtatcgggtctag

SEQ ID NO: 6893 - DNA, 593 bp, Homo sapiens
  source 1..593: mol_type = unassigned DNA
gtttattccgcggtttccccgcggctgcccccgggagaccgaagaggtggctggggcaggccgaaagcagaggaaaggttgggcagtgtcacccttgcacacccacaggtctgattggcaccggctcccattccggctccagcctccaatccgacccccatttcggctgcagcctcggacctagctccggccctcggtctatccggttgcatcctccctccctgttccggatcttatcttgcgccagcgcctactccaggatcccgtagccagacctcaagccatggctggtcccttctcccgtctgctgtccgcccgcccgggactcaggctcctggctttggccggagcggggtctctagccgctgggtttctgctccgaccggaacctgtacgagctgccagtgaacgacggaggctgtatcccccgagcgctgagtacccagacctccgaaagcacaacaactgcatggccagtcacctgaccccagcagtctatgcacggctctgcgacaagaccacacccactggttggacgctagatcagtgtatccagactggcgtggacaaccctggccaccccttcatcaaga

SEQ ID NO: 6894 - DNA, 632 bp, Homo sapiens
  source 1..632: mol_type = unassigned DNA
actttaccttctcctccagcacaggaactaggaactacggagagagaagccaagggagaggaggaggaggaaactaacgattccctgcccacccccacacccagcaccaccaacaggtgggcaagcttgccgagaaaacgcagagggcatcctgtgagcagcaaacacatctgagcctggaaaagacgcagagaagtaaaagatcaaagcgcctactccaggatcccgtagccagacctcaagccatggctggtcccttctcccgtctgctgtccgcccgcccgggactcaggctcctggctttggccggagcggggtctctagccgctgggtttctgctccgaccggaacctgtacgagctgccagtgaacgacggaggctgtatcccccgagcgctgagtacccagacctccgaaagcacaacaactgcatggccagtcacctgaccccagcagtctatgcacggctctgcgacaagaccacacccactggttggacgctagatcagtgtatccagactggcgtggacaaccctggccaccccttcatcaagactgtgggcatggtggctggagatgaggagacctatgaggtatttgctgacctgtttgaccctgtgatccaagagcga

SEQ ID NO: 6895 - DNA, 1705 bp, Homo sapiens
  source 1..1705: mol_type = unassigned DNA
agcctccaatccgacccccatttcggctgcagcctcggacctagctccggccctcggtctatccggttgcatcctccctccctgttccggatcttatcttgcgccagcgcctactccaggatcccgtagccagacctcaagccatggctggtcccttctcccgtctgctgtccgcccgcccgggactcaggctcctggctttggccggagcggggtctctagccgctgggttctgctccgaccggaacctgtacgagctgccagtgaacgacggaggctgtatcccccgagagcaaagccagacatggccaactggacagctcccaggtaactgcactaggtctaggcgtctgtgccctccctccatggttactgggtaccccctccccagcgctgagtacccagacctccgaaagcacaacaactgcatggccagtcacctgaccccagcagtctatgcacggctctgcgacaagaccacacccactggttggacgctagatcagtgtatccagactggcgtggacaaccctggccaccccttcatcaagactgtgggcatggtggctggagatgaggagacctatgaggtatttgctgacctgtttgaccctgtgatccaagagcgacacaatggatatgacccccggacaatgaagcacaccacggatctagatgccagtaaaatccgttctggctactttgatgagaggtatgtattgtcctctagagtcagaactggccgaagcatccgaggactcagtctgcctccagcttgcactcgagcagagcgacgagaggtggaacgtgttgtggtggatgcactgagtggcctgaagggtgacctggctggacgttactataggctcagtgagatgacagaggctgaacagcagcagcttattgatgaccactttctgtttgataagcctgtgtccccgttgctgactgcagcaggaatggctcgagactggccagatgctcgtggaatttggcacaacaatgagaagagcttcctgatctgggtgaatgaggaggatcatacacgggtgatctccatggagaagggtggtaacatgaagagagtgtttgaaagattctgccgaggcctcaaagaggttagagaagactatgtaggggagctaggtgggaggacataaggaaaaccaaagagtagcataaatagattatgtaatttaccaaccaacccaggacatgtcttatagtaaaaaggactatctaggactcactccaggactaaaggtgtaaaccagctgggaccatactgggaaaaccaggacatgtggtcacactaagattaggaaaagaaagagtgtcaggaatcttaggaagtgaacaaggctgttgacagagagtgcaaagaaggaataaatgagatggcacgtcagtgcctgggatgtgtgcagtgggatggtgaggtgtgcagataaggaaaacattcgagcttagattgatgttggcggggagaggttgctgtgttcatgactctaatataaccacccagttctgagacaaggtaggccttgactctggattctatcattcttgttaaagtatcgggtctaggctttaagttgagagttcggagagagactggggaaggtggaggatagaatggttcaagttctagaatatgtggctctagatgagaggttgaactgaatcatcaatcctacatggattg

SEQ ID NO: 6896 - DNA, 1747 bp, Homo sapiens
  source 1..1747: mol_type = unassigned DNA
agacgcgcgagtctcaggtcccgctaattacctggcgggtgctgcccacccctgccctcgcgcacctagcgcggtggcaggcgggaaggcggggcctgggggagccccacccctggagactgcggctggggcctccctctcctccgcccgcccgcctgccactagctcattgcgcctctcctgcagtctgattggcaccggctcccattccggctccagcctccaatccgacccccatttcggctgcagcctcggacctagctccggccctcggtctatccggttgcatcctccctccctgttccggatcttatcttgcgccagcgcctactccaggatcccgtagccagacctcaagccatggctggtcccttctcccgtctgctgtccgcccgcccgggactcaggctcctggctttggccggagcggggtctctagccgctgggtttctgctccgaccggaacctgtacgagctgccagtgaacgacggaggctgtatcccccgagcgctgagtacccagacctccgaaagcacaacaactgcatggccagtcacctgaccccagcagtctatgcacggctctgcgacaagaccacacccactggttggacgctagatcagtgtatccagactggcgtggacaaccctggccaccccttcatcaagactgtgggcatggtggctggagatgaggagacctatgaggtatttgctgacctgtttgaccctgtgatccaagagcgacacaatggatatgacccccggacaatgaagcacaccacggatctagatgccagtaaaatccgttctggctactttgatgagaggtatgtattgtcctctagagtcagaactggccgaagcatccgaggactcagtctgcctccagcttgcactcgagcagagcgacgagaggtggaacgtgttgtggtggatgcactgagtggcctgaagggtgacctggctggacgttactataggctcagtgagatgacagaggctgaacagcagcagcttattgatgaccactttctgtttgataagcctgtgtccccgttgctgactgcagcaggaatggctcgagactggccagatgctcgtggaatttggcacaacaatgagaagagcttcctgatctgggtgaatgaggaggatcatacacgggtgatctccatggagaagggtggtaacatgaagagagtgtttgaaagattctgccgaggcctcaaagaggtggagagacttatccaagaacgtggctgggagttcatgtggaatgagcgtttgggatacatcttgacctgtccatctaacctgggcactggacttcgggcaggagtgcacatcaaactgcccctgctaagcaaagatagccgcttcccaaagatcctggagaacctaagactccaaaaacgtggtactggaggagtggacactgctgctacaggcggtgtctttgatatttctaatttggaccgactaggcaaatcagaggtggagctggtgcaactggtcatcgatggagtaaactatttgattgattgtgaacggcgtctggagagaggccaggatatccgcatccccacacctgtcatccacaccaagcattaactccccatcgccagctgatgactcaagattcccaggagttctgctcattctaatgatggcccattctacttgctctggacctgcccccgcatcccctgcctccatcctagtaaagactccttgctatgctgca

SEQ ID NO: 6897 - DNA, 1340 bp, Homo sapiens
  source 1..1340: mol_type = unassigned DNA
actacggagagagaagccaagggagaggaggaggaggaaactaacgattccctgcccacccccacacccagcaccaccaacaggtgggcaagcttgccgagaaaacgcagagggcatcctgtgagcagcaaacacatctgagcctggaaaagacgcagagaagtaaaagatcaaagtctgattggcaccggctcccattccggctccagcctccaatccgacccccatttcggctgcagcctcggacctagctccggccctcggtctatccggttgcatcctccctccctgttccggatcttatcttgcgccagcgcctactccaggatcccgtagccagacctcaagccatggctggtcccttctcccgtctgctgtccgcccgcccgggactcaggctcctggctttggccggagcggggtctctagccgctgggtttctgctccgaccggaacctgtacgagctgccagtgaacgacggaggctgtatcccccgagccagacatggccaactggacagctcccaggtaactgcactaggtctaggcgtctgtgccctccctccatggttactgggtaccccctccccagcgctgagtacccagacctccgaaagcacaacaactgcatggccagtcacctgaccccagcagtctatgcacggctctgcgacaagaccacacccactggttggacgctagatcagtgtatccagactggcgtggacaaccctggccaccccttcatcaagactgtgggcatggtggctggagatgaggagacctatgaggtatttgctgacctgtttgaccctgtgatccaagagcgacacaatggatatgacccccggacaatgaagcacaccacggatctagatgccagtaaaatccgttctggctactttgatgagaggtatgtattgtcctctagagtcagaactggccgaagcatccgaggactcagtctgcctccagcttgcactcgagcagagcgacgagaggtggaacgtgttgtggtggatgcactgagtggcctgaagggtgacctggctggacgttactataggctcagtgagatgacagaggctgaacagcagcagcttattgatgaccactttctgtttgataagcctgtgtccccgttgctgactgcagcaggaatggctcgagactggccagatgctcgtggaatttggcacaacaatgagaagagcttcctgatctgggtgaatgaggaggatcatacacgggtgatctccatggagaagggtggtaacatgaagagagtgtttgaaagattctgccgaggcctcaaagaggttgttgtggggattaagtga

SEQ ID NO: 6898 - DNA, 1116 bp, Homo sapiens
  source 1..1116: mol_type = unassigned DNA
cttcacctcactttaccttctcctccagcacaggaactaggaactacggagagagaagccaagggagaggaggaggaggaaactaacgattccctgcccacccccacacccagcaccaccaacaggtgggcaagcttgccgagaaaacgcagagggcatcctgtgagcagcaaacacatctgagcctggaaaagacgcagagaagtaaaagatcaaagtctgattggcaccggctcccattccggctccagcctccaatccgacccccatttcggctgcagcctcggacctagctccggccctcggtctatccggttgcatcctccctccctgttccggatcttatcttgcgccagcgcctactccaggatcccgtagccagacctcaagccatggctggtcccttctcccgtctgctgtccgcccgcccgggactcaggctcctggctttggccggagcggggtctctagccgctgggtttctgctccgaccggaacctgtacgagctgccagtgaacgacggaggctgtatcccccgagcgctgagtacccagacctccgaaagcacaacaactgcatggccagtcacctgaccccagcagtctatgcacggctctgcgacaagaccacacccactggttggacgctagatcagtgtatccagactggcgtggacaaccctggccaccccttcatcaagactgtgggcatggtggctggagatgaggagacctatgaggtatttgctgacctgtttgaccctgtgatccaagagcgacacaatggatatgacccccggacaatgaagcacaccacggatctagatgccagtaaaatccgttctggctactttgatgagaggtatgtattgtcctctagagtcagaactggccgaagcatccgaggactcagtctgcctccagcttgcactcgagcagagcgacgagaggtggaacgtgttgtggtggatgcactgagtggcctgaagggtgacctggctggacgttactataggctcagtgagatgacagaggctgaacagcagcagcttattgatgaccactttctgtttgataagcctgtgtccccgttgctgactgcagcaggaatggctc

SEQ ID NO: 6899 - DNA, 1512 bp, Homo sapiens
  source 1..1512: mol_type = unassigned DNA
agggaggatttccaggccggcccgaccagctcgccctgcatacacttcttggctgtgtgcgctcagcaggacgtgggaggctccggcttcaagacactcatccaagaggaaggatggccagtatcttttctaagttgctaactggccgcaatgcttctctgctgtttgctaccatgggcaccagtgtcctgaccaccgggtacctgctgaaccggcagaaagtgtgtgccgaggtccgggagcagcctaggctatttcctccaagcgcagactacccagacctgcgcaagcacaacaactgcatggccgagtgcctcacccccgccatttatgccaagcttcgcaacaaggtgacacccaacggctacacgctggaccagtgcatccagactggagtggacaaccctggccaccccttcataaagactgtgggcatggtggctggtgacgaggagtcctatgaggtgtttgctgacctttttgaccccgtcatcaaactaagacacaacggctatgaccccagggtgatgaagcacacaacggatctggatgcatcaaagatcacccaagggcagttcgacgagcattacgtgctgtcttctcgggtgcgcactggccgcagcatccgtgggctgagcctgcctccagcctgcacccgggccgagcgaagggaggtagagaacgtggccatcactgccctggagggcctcaagggggacctggctggccgctactacaagctgtccgagatgacggagcaggaccagcagcggctcatcgatgaccactttctgtttgataagccagtgtcccctttattaacatgtgctgggatggcccgtgactggccagatgccaggggaatctggcataattatgataagacatttctcatctggataaatgaggaggatcacaccagggtaatctcaatggaaaaaggaggcaatatgaaacgagtatttgagcgattctgtcgtggactaaaagaagtagaacggttaatccaagaacgaggctgggagttcatgtggaatgagcgcctaggatacattttgacctgtccttcgaaccttggaacaggactacgagctggtgtccacgttaggatcccaaagctcagcaaggacccacgcttttctaagatcctggaaaacctaagactccagaagcgtggcacaggtggtgtggacactgccgcggtcgcagatgtgtacgacatttccaacatagatagaattggtcgatcagaggttgagcttgttcagatagtcatcgatggagtcaattacctggtggattgtgaaaagaagttggagagaggccaagatattaaggtgccaccccctctgcctcagtttggcaaaaagtaaactttccctttcccaatttataaataatctgtctgctggtacgacagacataaatctctactctgagagtttttatacacttggaaaaatataaaattgtagatcctgcctatctttacaataaaactctccttaatat

SEQ ID NO: 6900 - DNA, 1637 bp, Homo sapiens
  source 1..1637: mol_type = unassigned DNA
atacacttcttggctgtgtgcgctcagcaggacgtgggaggctccggcttcaagatcaaaggaaatgtttccctttgtcccgtttcacactaaacgggttggggaggaaccaggggagatgtcaaccgtctgccggtgactgggaagttttctgcaagtcctccacagcataggccagcaggccacttttcactaacagaagtcacaagccaagtgagacactcatccaagaggaaggatggccagtatcttttctaagttgctaactggccgcaatgcttctctgctgtttgctaccatgggcaccagtgtcctgaccaccgggtacctgctgaaccggcagaaagtgtgtgccgaggtccgggagcagcctaggctatttcctccaagcgcagactacccagacctgcgcaagcacaacaactgcatggccgagtgcctcacccccgccatttatgccaagcttcgcaacaaggtgacacccaacggctacacgctggaccagtgcatccagactggagtggacaaccctggccaccccttcataaagactgtgggcatggtggctggtgacgaggagtcctatgaggtgtttgctgacctttttgaccccgtcatcaaactaagacacaacggctatgaccccagggtgatgaagcacacaacggatctggatgcatcaaagatcacccaagggcagttcgacgagcattacgtgctgtcttctcgggtgcgcactggccgcagcatccgtgggctgagcctgcctccagcctgcacccgggccgagcgaagggaggtagagaacgtggccatcactgccctggagggcctcaagggggacctggctggccgctactacaagctgtccgagatgacggagcaggaccagcagcggctcatcgatgaccactttctgtttgataagccagtgtcccctttattaacatgtgctgggatggcccgtgactggccagatgccaggggaatctggcataattatgataagacatttctcatctggataaatgaggaggatcacaccagggtaatctcaatggaaaaaggaggcaatatgaaacgagtatttgagcgattctgtcgtggactaaaagaagtagaacggttaatccaagaacgaggctgggagttcatgtggaatgagcgcctaggatacattttgacctgtccttcgaaccttggaacaggactacgagctggtgtccacgttaggatcccaaagctcagcaaggacccacgcttttctaagatcctggaaaacctaagactccagaagcgtggcacaggtggtgtggacactgccgcggtcgcagatgtgtacgacatttccaacatagatagaattggtcgatcagaggttgagcttgttcagatagtcatcgatggagtcaattacctggtggattgtgaaaagaagttggagagaggccaagatattaaggtgccaccccctctgcctcagtttggcaaaaagtaaactttccctttcccaatttataaataatctgtctgctggtacgacagacataaatctctactctgagagtttttatacacttggaaaaatataaaattgtagatcctgcctatctttacaataaaactctccttaatat

SEQ ID NO: 6901 - DNA, 1479 bp, Homo sapiens
  source 1..1479: mol_type = unassigned DNA
ctgcatacacttcttggctgtgtgcgctcagcaggacgtgggaggctccggcttcaaggtcgacactcatccaagaggaaggatggccagtatcttttctaagttgctaactggccgcaatgcttctctgctgtttgctaccatgggcaccagtgtcctgaccaccgggtacctgctgaaccggcagaaagtgtgtgccgaggtccgggagcagcctaggctatttcctccaagcgcagactacccagacctgcgcaagcacaacaactgcatggccgagtgcctcacccccgccatttatgccaagcttcgcaacaaggtgacacccaacggctacacgctggaccagtgcatccagactggagtggacaaccctggccaccccttcataaagactgtgggcatggtggctggtgacgaggagtcctatgaggtgtttgctgacctttttgaccccgtcatcaaactaagacacaacggctatgaccccagggtgatgaagcacacaacggatctggatgcatcaaagatcacccaagggcagttcgacgagcattacgtgctgtcttctcgggtgcgcactggccgcagcatccgtgggctgagcctgcctccagcctgcacccgggccgagcgaagggaggtagagaacgtggccatcactgccctggagggcctcaagggggacctggctggccgctactacaagctgtccgagatgacggagcaggaccagcagcggctcatcgatgaccactttctgtttgataagccagtgtcccctttattaacatgtgctgggatggcccgtgactggccagatgccaggggaatctggcataattatgataagacatttctcatctggataaatgaggaggatcacaccagggtaatctcaatggaaaaaggaggcaatatgaaacgagtatttgagcgattctgtcgtggactaaaagaagtagaacggttaatccaagaacgaggctgggagttcatgtggaatgagcgcctaggatacattttgacctgtccttcgaaccttggaacaggactacgagctggtgtccacgttaggatcccaaagctcagcaaggacccacgcttttctaagatcctggaaaacctaagactccagaagcgtggcacaggtggtgtggacactgccgcggtcgcagatgtgtacgacatttccaacatagatagaattggtcgatcagaggttgagcttgttcagatagtcatcgatggagtcaattacctggtggattgtgaaaagaagttggagagaggccaagatattaaggtgccaccccctctgcctcagtttggcaaaaagtaaactttccctttcccaatttataaataatctgtctgctggtacgacagacataaatctctactctgagagtttttatacacttggaaaaatataaaattgtagatcctgcctatctttacaataaaactctccttaat
